United States Patent Application Publication US 2004/0029129 A1 - sequence listing, part 19

SEQ ID NO: 54351 - protein, 608 aa, Campylobacter jejuni
MQFQTEVNQLLQLMIHSLYSNKEIFLRELISNASDALDKLNFLSVSDDKYKSLKFEPKIEIKIDKDKKTLSISDNGIGMDKDDLINNLGTIAKSGTKSFLENLSGDAKKDSQLIGQFGVGFYSAFMVASKIEVLSKKALDDKAYLWSSDANGYEIDDANKEEQGTSITLYLKDDEFANAYKIESIIEKYSNHIQFPIFMEKEEFTPAKEGEEEGKTELKISQINKANALWRMQKSSLKAEDYERFYEQNFHDSNKPLLYLHTKSEGKLEYNSLFFIPQNAPFDLFRVDYQSGLKLYVKRVFISDDDKELLPTYLRFVRGIIDVEDLPLNVSREILQENQILKGIKEASVKKILGELEKLKNNDKEKYLSFFKTFGKVLKEGLYGFGGEKDSLLKLMLYKSTKGENLRSLEEYKNDLQGEQKEIFYIAGNNESLLRTSPLLEEYKQKNIEVLLMDDEIDSLVTPMLEFEGLKFVSINQVEDKNELSDEEKNTFAPLVAKFKELLKDQVEDVRLTSRLKDSPSCIVYDKNKPDFAMQQLLKQMGQEQNFKPILEINPKHAIFTGLKNNESFSADIATLVLNMAKLSEGMGVDNPAEFNASLTKIINKAFS

SEQ ID NO: 54352 - protein, 167 aa, Campylobacter jejuni
MAILLIGMTNLGIGFKVFSGDLLEKILVKSTDTKIKSILFGTLSTLIMQFSILVSIVTISFLSAGLISLGAGIGIIFGVNLGNTASSWLIVGLTNIKILMLAIPLLIIGVLFFFQKDSILKGLGNIFIGIGFFFLGVDYIKSGFENFKHIIDLSRFDFAGFKGVFVF

SEQ ID NO: 54353 - protein, 602 aa, Campylobacter jejuni
MQEYKKNRVSKVAFAYCMALLFMIIFISSTFFLTSKRHIPNTEKDQYALALRGSIITKDNFTITSSKQIYRAEIDLRSINKDKFDLFLKLFQIYSGISNDQVADIKKRMQNQKKRSYNFVLLQNLDSKQASYLKDLAKKLYIQGFFKAFTNNSGRVETRGLNIIEHEEDRIYMSKDSFTPIIGYTKMILDPESGILKNIGVKGLEKYYDACLSPVQNEKIQGLKDIGGNIILNLNSLQQKKINGCDLYLNLSLKLQKSIEKAIDQRNEDLKANEIIVGVMESKTGRILALASSRRYDPQNRGKDLSVLNASAIEYGYEAGSVIKPFIFTTALRLGKIKMDEVINTYGGSYKLGRFTIKDDHKMDKMTMEEVIRYSSNIGMIQIAKRLNNIEIVSGLKIFKFGEKSGIDLPYEQKGEIPNPKRLRDIEKSVLSYGYGLKTTFIQLLAAYNVFNNDGFYITPRLAEKFYQNGRFTNLDDDVKKEKILSSEAAKTMQNVLINVIEKGTGKKAITQGIIAGGKTGTARIAERQGYTSNRYNASFFGFANDLNHAYTIGVLVRHPTKPYSYYAAQSALPMFKDVVDILINEEFLTPIQDNNQTSTNN

SEQ ID NO: 54354 - protein, 289 aa, Campylobacter jejuni
MSILVNKNTKVIVQGFTGKEATFHAEQCMAYGTNIVGGITPHKGGQTHLGKPVFDTVADAVKATKADVSLIFVPAFAVGDSVIEAADAGIKLAVVITEHTPVKDMMFAKQYANKKGMKIIGPNCPGIITSEECKLGIMPGFIFKKGCVGLISKSGTLTYEAANQVVQGGYGISTAVGIGGDPIIGLAYKELLSEFQKDDETKAIVMIGEIGGSLEVEAAKFIKENISKPVVAFIAGATAPKGKRMGHAGAIVGSADESAAAKKEALKSYGIHVVDSPALIGEEIQKILG

SEQ ID NO: 54355 - protein, 297 aa, Campylobacter jejuni
MQKIDELIKQFLQELGYEPILNMLSNVKSGKKLRSKLLLAIADESEIAFKICAAIELIHLASLLHDDIIDESELRRGARSVNAEFGTKNALMLGDILYSKAFYELSKMDARFASIISDAVVKLAIGELMDVDLGEKFNINKEAYLKMIYNKTAVLIEASARCGAILAGLYEKDFAEYGKNLGLAFQMIDDILDIKSDEKILGKPAMNDFKEGKTTLPYIYLYENLQEQDRIYLQTLFKKDLNENEKEWLKTKFEEQKALEKAILEAKTYAKKARKAIEKYDNNKLNDIIKAMIDREF

SEQ ID NO: 54356 - protein, 432 aa, Campylobacter jejuni
MYYCISFTHKNTDIALREKLSFSNEAKKGEFLKIISTHENIEECLVISTCNRVEIVAFVKMACAEFIVKSLALLCDVDKDILLEKADIFEDSGAIHHLFSVASSLDSLVVGETQIAGQLKDAFAFAVKNNFCGVHLSRAVHSAFKCAAKVRNETQISKNSISVASVAVAKAKELADLTQKKAVVIGAGEMGELAAKHLIAAGAKVIILNRDLQKAKDLCERLGVLSEYDSLENLKKYLNQYEFFFSATNAPNAIITNSLIEELSYKRYFFDIAVPRDIDINENENISVFAVDDLEIVVQKNLALREQEARMAYGIIGRETSEFFRYLNDLALMPIIKAIRLQAKEYADKQLEIALKKGYLKKSDKEEARKLIHQVFKAFLHTPTVNLKHLQGKMQSDTVINAMRYVFDLQNNLEGLNQYKCEFDMENNDEIY

SEQ ID NO: 54357 - protein, 569 aa, Campylobacter jejuni
MMRFTKFYAPSLKEAPKDASLPSHIFLTRAGFVEQIGSGLYNFLPLGKRVLDKIKNIVKEEMDKAGAQEVNLSFITPASLWQESGRYNVFGKELLRFKDRKENEFVLGPTHEEAMLSLVKNKITSYKQLPLHLYQIGLKFRDEARPRFGLLRCREFLMKDGYSFHANEEDLGREFELMYKTYSQILQRMGLDFRAVEADSGAIGGSGSKEFMVLAKNGEDDILICENCDYAANVEAAKRAKKTCQDERPEANYASKFHTPNIKTIDSLAQFFKINAFYTIKAVVKKAIYENESKLVVFFIRGSDDLQEVKAQNTCSALELVDASEEELKKAGLVAGFIGFVGLKDIDFYIDFELENEKQMIMGANEKDYHLIGIDVVNLNKDRFKDLIEVKEGDCCVKCGAKLKQSKGIEVGHIFKLGQKYSKAMNANFLDENGKSQPFYMGCYGIGVSRLLAVAIEANHDEKGCIWNKTLAPFVLEIIVSNLKDEKALEFANKLYRDLTNLGLEVLLDDRNERFGVKMNDFELMGFPYALVIGKGLENNEIELIQREGLVKELIKTDELMEILKKKVL

SEQ ID NO: 54358 - protein, 307 aa, Campylobacter jejuni
MKLIIATRKSQLALWQSEHVAQILKNTHQIEVLLEGFKTKGDVLLDSPLAKIGGKGLFTKELEESMLRKEAHLAVHSLKDVPSFFPQGLVLAAVSKREQSNDAMLSQNYKDFLSLPKGAKIGTTSLRRKMQLLLLRPDLEIISLRGNVNSRIEKLKNNDFDAIILAMAGIKRLNLDKQVNFVYEFSKDELIPAASQGALGIESINDEKILELLKCLNDENALIETSIEREFIATLEGGCQVPIGINAELLGDEICVRAVLGLPDGSEILKDKRMIKKNDFKGFGESLAKEFIAKGAKELLKKAESMI

SEQ ID NO: 54359 - protein, 361 aa, Campylobacter jejuni
MNKIEILKQHFKEIAKLNSSEQVWQMPFFAALGVGIVLGLSVFFGKLNYGLIAMIGALSFLYVPSTPLYHRMAVVMCCSFGIVSSFFLGILTHFLPAIFAFIPIGIMAMGSSILIRYYNIGAPGYFFFVFSCVLGAYSPFEAKDFIFLVGLVFLGAMVANLMALLYSIVVIYGFKNALPSEIPPREYIGFDAVFVDSLIMGSFVAFSIFIGTFLELERSYWIAISCTAIMQGVTLNSIWIKQIQRIIGTALGVCFAWWLLSKQFHDIELILLMMSLFFIGQFLVNRNYALAMIFFTPYATYLSEAANFMSENADKLILARLIDVVIGSILGLLGGFVIYKPYLRVHFERIAKYIFRIKQKA

SEQ ID NO: 54360 - protein, 410 aa, Campylobacter jejuni [sequence omitted]

SEQ ID NO: 54361 - protein, 458 aa, Campylobacter jejuni
MQQEYYDLDLERAILSSCIMSEEAYASIAGDISPKDFSLKAHQDIFKAVIACSNNKEPISVSFLRKHKKIDEQILAEILATPSMIDLPAYVNELHEKSVKRQLLSFAHLLPTRINEDRAVSEIADEIGKEIFSITNRVNSRDIKDVDMVISELFEEFKKQKTLENKGIIGLDTGFEGLNKMTKGFKGGELIIIAARPGMGKTTLCLNFIDKVLRQKKGVALFSLEMPATQIMQRMLSSKTSIPLQKILTADLNDDEWERLGDACNDYSQKKLYIYDSGYATIADVRAILRRLKSQDESIGLCVIDYIGLMMSNSNFNDRHLQVSEISRGLKLLARELDMPIIALSQLNRGLEQRANKRPLMSDLRESGAIEQDADAILFVYRDEVYREQEEKERENKAKAEGKAYQRLFIPNPMQENAEIIVGKNRNGPVGTIEVVFLKEKSCFVDKPIGYETTEFTG

SEQ ID NO: 54362 - protein, 339 aa, Campylobacter jejuni
MKFVSVEQAIKDLQAGKMLVMVDAEDRENEGDLIFPAQFSTQEKVNFMIKEARGVVCVALDETLAKKFELPLMVPKNTSNHETAFTITVDAKDATTGVSAYERNMTIQIFADDNAKASDFVRPGHINPLIAKKGGVLERTGHTEGTVDLCKLAGLKGACVICEIVKDNGDMARREDLEIFCQKHDLNMIAVSDLIEYRLKHESLIKLEEKSQSVLAGFKAEKFIFSDHNQTQHIAFCFKDIKKCENVKFHISGSDFELLTSDKFSKLLEQIKFLSENGGVIVFMQGEKSSTTQYKNYGIGAQILRYFGIEEIKLLSQSCDKDYIGLEGFGLNLKACNFN

SEQ ID NO: 54363 - protein, 147 aa, Campylobacter jejuni
MTLKEQILNDIKEAMKQKDDFKRDSLRTLNAAFKQIEVDERIELDNERIYKIIASEIKKRKDVIELYLKANREDLAQKEQNEISLFEIYLPKQLSDEELTLALKQLIEELGVSSLKEQGLVMKEAKIKLGASVDGKRLNLALKELLQ

SEQ ID NO: 54364 - protein, 566 aa, Campylobacter jejuni
MKELSGSAMICEALKEENVKIVFGYPGGAALNIYDEIYNQKYFKHILVRHEQAALHAADAYARMSGEVGVAIVTSGPGFTNTITGLATAYSDSIPLVLISGQVANSLIGTDAFQEIDAVGISRPCVKHNYLVTCIEEFPRILKEAFYIARSGRPGPVHIDVPKDVSATLGLWEYSKEISMKTYKPVYKGNSKQIKKFAELLKEAKRPLFYLGGGCISSNASEQIRELIKFTKIPAVETLMALGTLRSDDVFNLKMAGMHGSYAANMALSECDLLVSVGARFDDRITGKTSEFAKHATIVHVDIDPSSISKIINAHYPIVGDIKEVLKELLEELKKENFNTTFKEWHETLKRYNELYPLSYEDSNEILKPQWVIEECAKMAPDARIITDVGQHQMWVAQFYPFNYPRQLATSGGQGTMGYSLPAALGAKLAVGEEVVINFVGDGSVLMNIQELMTAYEYGIKAINIILNNAFLGMVRQWQSMFYKEHFSQTDLSTQPDFIKIAQGFGCEGYEISNKEEFIQAFSQALKSDKTSLLNVKIDRFEDVLPMVPAGGAIYNMILPKAKDRQ

SEQ ID NO: 54365 - protein, 154 aa, Campylobacter jejuni
MRRVLSVIVLNEHGVLSRIVGLFSGRGYNIDSLTVAPLENKEFSRINIVTSGNERTFEQIVKQLHKLIPTYKVIESEEFIDKEMALVKIPLNENLGGLDAVLKAYNGTIANSNENFLFLMVADDANRIDNFLKTIKKYNPSDIVRSGSVLMEIK

SEQ ID NO: 54366 - protein, 321 aa, Campylobacter jejuni
MKLSEIAEFLSLEYKGEDIEISALNSLLKANFTELTYCDGEKNTKDIPHTGAAAILVSKEYENLVPKDTKALITQSPHLSFAFLSKLFAKPLISTAKEKVQNIAKSARIMPNVYIGDNVNIGENVIIMAGAYIGDNVSIGDESIIHPNVVIYNDTKIGKKCHLLANCVIGSDGFGYAHNKNGEHYKIYHNGNVVLEDFVEVGACTTIDRAVFDSTIIKAGTKVDNLVQIGHNCNIGQNCIIVAQTGISGSSELGRNVIMGGQSATSGHLKIGDFSTIAARGGVSKNLEGGRVYGGFPIMLQKDWLKLQAKIAINFKEKSQD

SEQ ID NO: 54367 - protein, 342 aa, Campylobacter jejuni
MNKDLLLSSYDYTLANELIANYPTNPKEDARLLVFDRKNKEIFHTTFKNLQDFLPNCAIFFNDTKVIKARIYGNKASGGKIELFLHQPFLNSHNPLFLAQIKGRIKKDEILYFKEDLKVRVVELLNDGLRKVQFFQNDKTLDTSNLYNLLDKIGHIPLPPYIKREDEKSDLKDYQSIFAKNLGAVAAPTASLHFSETMLENLRKKHEIYHLTLHVGAGTFKSVECENIQEHKMHSEFFNIPQQACEIIDSKQAILGVGTTVTRTIEYYTRTKTKNGFCDLFLHPQNPPIRQNHLLTNFHLPKSTLIMLVSAFIGREQCLKLYELAIKEKYRFYSYGDAMLIL

SEQ ID NO: 54368 - protein, 400 aa, Campylobacter jejuni
MLIVQKYGGTSVGTLERIEAVANRVIQSAQQGNQLVVVVSAMSGVTNTLIEQAEYFSKTPNGKDMDMLLSSGERVTSALLSIALNEKGCPAISFSGRKAGIITDSVFTKARIHHIDTKAIKSELQNGKIVVIAGFQGVDEEGNVTTLGRGGSDLSAVAVAGALNADLCEIYTDVDGVYTTDPRIEPKAKKLDKISYEEMLELASLGAKVLQNRSVELAKKLNVNLVTRSSFNNNEGTMITKEDGMEQALVSGIALDKNQARVTLRNIEDKPGIAAEIFSVLANENINVDMIIQNVGVDGATNLGFTVPQNELELAKNAMQKILSSKTTIESDSAVLKVSIVGVGMKSHSGVASKAFKALADEGINIGMISTSEIKISMIVHEKYGELAVRALHECYGLDK

SEQ ID NO: 54369 - protein, 380 aa, Campylobacter jejuni
MKFFKINPNTDFNLLCSFINPHKMGQKIMSEKTKIHFIFIKDISTPAANILKQDALRVGAELITHKEVITAKITHSNALLMASKEQIQKLVVKEKLQDFGLKNLALFLQKDFLKPKKAELMAVINVNEDSFNAKSRVSEEDFEKRLNDFLALKPEYIDIGAVSSRPGSEYCGKEEEFKRLKKVLDLIYEKNYYEQAIFSLDSFDEYCLEYALNKGFKLINDITSLRNLNLAKLASKYGAKYCLMHMQNNPNNMQDNPFYEDLLDEMTLFFKEKLELLESFGVKESILDVGIGFGKSAGHNMILIKHLEHFLQFNKPLLIGASRKSVINAYFQSEIKDRLAGTLYLHLKAFENGASIIRVHDLYEHKQLFALAQAMDNIGV

SEQ ID NO: 54370 - protein, 647 aa, Campylobacter jejuni
MKKEEYLEKVALANLWMRAYYEKDEPLASDEEYDALIRELRVFEEQNKDEISKDSPTQKIAPTIQSEFKKIAHLKRMWSMEDVFDESELRAWAKRAKCEKNFFIEPKFDGASLNLLYENGKLVSGATRGDGEVGEDITLNVFEIENIPKNIAYKERIEIRGEVVILKDDFEKINEKRALLNQSLFANPRNAASGSLRQLDTSITKERNLKFYPWGVGENTLNFTKHSEVMQFIRELGFLKDDFVRLCANLDEVLKAYDELLALREKKPMMMDGMVVRVDDLALCEELGYTVKFPKFMAAFKFPALEKTTRLIGVNLQVGRSGVITPVAVLEPVNLDGVVVKSATLHNFDEIARLDVKINDFVSVIRSGDVIPKITKVFKERREGLEMEISRPKLCPTCQSELLDEGTLIKCQNIDCEDRLVNSIIHFVSKKCLNIDGLGENIVELLYKHKKITTLESIFHLKFNDFEGLEGFKEKKINNLLNAIEQARECELFRFITALGIEHIGEVAAKKLSLSFGKEWYKQSFEAYANLEGFGEQMALSLCEFTRVNRTRIDEFYKLLNLKIEKLEIKSDGVIFGKTFVITGTLSRPRDEFKALIEKLGGKVSGSVSKKTDYVLFGEEAGSKLSKAKELEVKCIDESAFNELVKE

SEQ ID NO: 54371 - protein, 284 aa, Campylobacter jejuni
MLNIFTTISKINITSLAIGCFDGMHLGHLKLVKCLDENGALLVINKFKGQFLCSNRQKEEISGKKVIEVDFESIKSLDGRDFLSFLKKEFVNLKFIVVGYDFSFGKNRAYNAKDIESLSGIKTIIVDEFSIDGIGVHASLIKDFLSKANLQKAKEFLGRDYSIKGKMIKGQGLGSKELFATINLDCEGYFLPQNGVYVTLLKSQRKTYKSVSFLGVRSSDENFAIESHILEELGENFTQGEFFELEFISFLRENQKFQDLKKLKNQIAKDIEQARELLRKNDER

SEQ ID NO: 54372 - protein, 354 aa, Campylobacter jejuni
MGVLDIVKAGVISGDELNKIYDYAKAEGFAIPAVNVVGTDSINAVLEAAKKVNSPVIIQFSNGGAKFYAGKNCPNGEVLGAISGAKHVHLLAKAYGVPVILHTDHAARKLLPWIDGLIEANAQYKKTHGQALFSSHMLDLSEESLEENLSTCEVYLQKLDALGVALEIELGCTGGEEDGVDNTGIDNSKLYTQPEDVALAYERLGKISDKFSIAASFGNVHGVYKPGNVSLQPEILKNSQKFVKDKFALNSDKPINFVFHGGSGSELKDIKNAVSYGVIKMNIDTDTQWAFWDGVREYELKNRAYLQGQIGNPEGDDKPNKKYYDPRVWLRSGEESMIKRLEIAFEDLNCINKN

SEQ ID NO: 54373 - protein, 447 aa, Campylobacter jejuni
MQRQTWSSTLTYILTVAGATIGFGATWRFPYLVGENGGGAYVLVFCIAMIIIGIPVILVENVIGRKAMTNSVDAFKQKWQSIGYMGLLGSFGIMAYYMVLGGWVLVYIWELTLGNFSLANVVSKEFTHQFFNDKIAFNPLGVGIFTTVFVIINYIILKRGIIDGIEKSVKFLMPLLFICLIIVVGRNLTLDGAMAGVKFYLEPDFSKILSPKLLIDVLGQVFFALSLGFGVMITLSSHLNKNENMAKTAIYTGVLNTIIAVLAGFMIFPALFSAGLAPDSGPSLVFETLPIAFSHIHFGTIVCILFFVLLLIAALTTSLPIYQVIISVLEEKFKYSKNLSINLTLGFIFILGNLPCILTYGPWRDIVIIKGKNIFDSFDFISGNILFVLTAFFCCIYVGWILGKQESLKELSNNNTLKSSWFGIWFYYVKYIVPLIILIIFIYGILN

SEQ ID NO: 54374 - protein, 293 aa, Campylobacter jejuni
MQENNSPKAQAVVKKNEIYVSVKRKKSTIEYEKDLKNLQIELLKFQNHVKAKGLKVLILIEGRDAAGKGGAIKRLIEHLNPRGCRVVALEKPSDVEKTQWYFQRYIAHLPSAGEIVIFDRSWYNRAGVEPVMGFCTPQQHKDFLREVPLFENMISNSDIIFFKFYFSVSKDEQKKRFEKRRSDPLKQYKLSPVDQKSQELWDKYTLAKYSMLLASNTPTCPWTIISSDDKKKARLNLLRFILSKVEYPNKKTGDFSKIDAKLVRSGEEEIRKMEANLEKLDSKKADEKIKDLD

SEQ ID NO: 54375 - protein, 304 aa, Campylobacter jejuni
MLKEKIIKFALFLCAFVSVIVSFAIMLTILIEALKFFQKESVVTFLFSSQWAADAAFMNADGTSKQGVFGALSLFWGTFYISLIAMLTALPLGVMCAIYLGVFAGKKSKNYLKPILEIIAGIPTVVFGFFAAIVVAPFIVWFFSLFGIQASFQSALGAGFIMGIMIVPIVASLSQDCIEAVSEKRINGAYALGMTKKEVVFAVILPEAIPGIVAACLLGLSRALGETMIVVMAASLRPNLTLNFLEDMTTVTVKIVEALSGDQAFDSSLALSAFSLGLVLFVITLIINMFSVYLINRFHKRKNL

SEQ ID NO: 54376 - protein, 246 aa, Campylobacter jejuni
MIAKTTNLNLFYGKKQALFDINMQIEQNKITALIGASGCGKSTFLRCFNRMNDKIAKIDGLVEIKGKDVKNQDVVALRKNVGMVFQQPNVFVKSIYENISYAPKLHGMIKNKDEEEALVVDCLQKVGLFEEVKDKLKQNALALSGGQQQRLCIARALAIKPKLLLLDEPTSALDPISSGVIEELLKELSHNLSMIMVTHNMQQGKRVADYTAFFHLGELIEFGESKEFFENPKQEKTKAYLSGAFG

SEQ ID NO: 54377 - protein, 247 aa, Campylobacter jejuni
MCKDCGCSINSSHTHGHHHDHHHENPSLKEGKTIEVISKILSKNDEEAKHNRAHFNEANTLCINLMSSPGSGKTTLLESTIKALKNELKIAVIEGDLETNNDALRVKNAGALAYQITTGQSCHLDAFMVHEALHHLAIDDVDLLFIENVGNLVCPASYDLGEHLNVVLLSITEGSDKPQKYPVMFKKADIVLITKADLAHHFDFDIKEATRLIKELNPRADIITLDAKNGTNMELWYKVLKLKKELF

SEQ ID NO: 54378 - protein, 363 aa, Campylobacter jejuni
MNFIDEFRDKESILALKKLIEQELKNPINIMEICGGHTHSIMKYALPSILPKEINFIHGPGCPVCVMPRVRIDTAIKLASMKDTIFCTLGDLLRVPGSEISLLDLRAKGADVRALYSPLEVLEIAKQNLNKNIIFFAIGFETTTPMSALLLQKVIEEKINNVFFHINHITVPAPVEAIMNDENVKINAFLGPSHVSVITGYGIYEPLAAKFKTPIAVSGFEPVDILESVLNIIKQSNEGTFKVYNQYKRAVSKEGNVKAQNLVKKYFRVCDFEFRGLGLIKDGGLELKEEFSAYDASKKFDCTVQSKNESKACICGQILRGLAKPYDCKVFGKACTPRSPIGSCMVSGEGACAAYYKYSKVNA

SEQ ID NO: 54379 - protein, 978 aa, Campylobacter jejuni
MGGGSKDNPKSIINNFSNSGTIHSNTGESIYFGNAKISSFVNSGTIKSKQGAGVNISQGTSIENFNNTGTGIIEGKRMGVNVRSTINTFVNDGLIAATNDGIQINANVKTLINKGTIKGDAISIRSLGGTIETLTNEGIMYGKSAGIYMNRSLVKTLTNSGTINQNNSATWSAGIKLENGSIIENIINTGSIRSNAFGISVTGGKFGTLTIKDGGMVYGKYSAIGVGRSQTLGDLYIDGRSNNGTVSGIYSEEHGILLENNSRTQKIELKNGGIIKGNIDGIRLINSASLSGEMILSGEGSRVEGGRGVGILNRSGKIEGSIKVEDGATVTATSNRAIANSGSGSITGGITVSGKNTKLEGNIINTGNASIGSDIKIEGGAKVEGGLVNQGNGSISGSVQVSGGSSIDSITNEGNGAISGSITVYKDSKLDSITNTSTSSTGISGSITNNSDNKLEISNSGNIGGKIESTGSADMVISNSNGGTISGGISSSGSGSTSISNSQGSTINNGITVSGSAQVEISNQGSVGKDENGNTVTNNGSGSVGIKDWLVSTDKNTGKLNTVVIGGSRAFNVKVENITVDQSNVDLEELNDINNIISGVNQNNIGNIGTNGSGEISLSFDPITGKLTTDFNLNASISGATFRSLISTTSRRSTFIDNVMGNSMQSFALASSSKSQSIAMSEKGNLYADASDYIKSDLNNGSYGSNKEHSLFILPYTSSQNVELSLNEESKGHTKGTIIGYSTLKDSGIYGVYAGYEDTKMGSTYFDINNRTYYAGLKYFNTLFTTEKGQEVYIKAQGKAALIKNDLTEKIGNNEAKAEPNSYAYGVNTALGMNFISNKDIFSPEIGLAYEGGYTEAFSMKDTIGQATVKGGERTYANYLNLFSTKTSLTWFRDWLPNLKTSVELGAKFNINPKVEAEARFGNIKVSDEFDLPRVQKFVSTSFIVPVNEAFYFSLNYNGMFDKDGNTHTGFAQFNYLW

SEQ ID NO: 54380 - protein, 340 aa, Campylobacter jejuni
MAITVYYDKDCDLNLIKSKKVAIIGFGSQGHAHAMNLRDNGVNVTIGLREGSVSAVKAKNAGFEVVSVSEASKIADVIMILAPDEIQADIFNVEIKPNLSEGKAIAFAHGFNIHYGQIVVPKGVDVIMIAPKAPGHTVRNEFTLGGGTPCLIAIHQDESKNAKNLALSYASAIGGGRTGIIETTFKAETETDLFGEQAVLCGGLSALIQAGFETLVEAGYEPEMAYFECLHEMKLIVDLIYQGGIADMRYSISNTAEYGDYITGPKIITEETKKAMKGVLKDIQNGVFAKDFILERRAGFARMHAERKNMNDSLIEKTGRNLRAMMPWISAKKLVDKDKN

SEQ ID NO: 54381 - protein, 360 aa, Campylobacter jejuni
MSKKKLVQIQRYLIIAILFLLCIALALGILVKYQNSQDVSSVKPDYFIDKQEDLISLNKDHYEIGIFQENEFDNNKSVSILEQKIQEIDDLNTSLNEQNLSSVEQNLSLEQNQSLEQNFILKDTNLTQDQNLTFNEDIHLNKISKKPKLAIIIDDMANASQVRGLKALNLKLNPSFFPPDKNHSETPKLALKFDFYMVHLPLAAINYNKPELDTLNPNDSKERIFKKIKQIKKDFKDLRYINNHTGSLFTSNEEAMKKLYEALKNQNIFFVDSKTIGNSKANKIAKELSIPYIQRDVFLDNEDDVNYVKKQLENAVKLAQKKGFVIAIGHPRKNTFKALEQSKDLLKGVDLVYLSEIYGK

SEQ ID NO: 54382 - protein, 192 aa, Campylobacter jejuni [sequence omitted]

SEQ ID NO: 54383 - protein, 583 aa, Campylobacter jejuni
MRSHYNTDLGISHVGQSVKLCGWVNSYRDHGGVIFIDLRDRSGIIQLVCDPNDSKEAHEIASNARNEFVLITEGTIRPRGEGLVNPKLKTGEIEVVVSKLTIENESAVPPFAIADESVNEELRLKYRFLDLRNPKLYENFALRSKACIAARNSLANMGFLEVETPILTKATPEGARDYLVPSRVHQGEFYALPQSPQLFKQLLMCSGFDRYFQIAKCFRDEDLRADRQPEFTQIDVEMSFCEQKDVIKVAETFLKDIFKACGKEIQTPFRQMQYKDAMENYGSDKPDLRFDLKFIDVIDIFTKSNNEIFANIAKDTKKNRIKAIRVPKGDTIFSKRQMQRFEEFVRKFGAQGLAFIQVKKDGLKGPLCKFFSEEDLNELSKRCELEVGDVVFFGAGAKKTVLDYMGRFRIFLANELKLIDPNALEFLWVVDFPMFEQNDDGSYSAMHHPFTMPKNIDETDLEEISSIAYDVVLNGVELGGGSIRIHKNDIQQKVFKLLNIDEEQQKEKFGFLLDALSFGAPPHGGIAIGLDRLIMLVTGANSIREVIAFPKTQRAQCLMTDAPSPASNEAMRELGIKLRENIK

SEQ ID NO: 54384 - protein, 286 aa, Campylobacter jejuni
MQNKIDYKNIKKIGLVTRPNVSLDKEILKLQSILSIYKVELVLLKESSEILDLPKYGLDDLFKISDFVISLGGDGTLISLCRKACEYDKAVLGIHAGHLGFLTDFKVDEAENFFQAFFQGEFRIEKPYLLSIFLEDRQGKILEKLAFNDVVISKNNQASMAHIEVFRKEKKFNEYFGDGLIVATPAGSTAYNLSANGPIVYTLAQAFILTPVCSHSLTQRPIVLPKGFEIEIMAKDCMLCIDGQENYKMNDFKSIKVGLSDKNVALIHPKNRDYFQILKEKLHWGN

SEQ ID NO: 54385 - protein, 271 aa, Campylobacter jejuni
MFLNLDFQDGLRIVDTHCHLDSEAFKDDLDETLNRAFKNGIEKIIIPGADIKDLPYAATIAHKYKNIFFAAGVHPYEIDNYDEKILRQYLCDEKCVAVGECGLDYFRFKSDLAEEIQKEKENQKKIFIAQLELAIEFKKPVIIHSREANHDTYEILHGYSKDLVGGVLHCFNASEHLLTLFEEGFYFGIGGVLTFKNAKKLVEILPKIPKDKLLLETDAPYLTPEPYRGKRNEPLLTQFVVNKMCEVLNLSRKELLEICFNNSEKLFFKGY

SEQ ID NO: 54386 - protein, 291 aa, Campylobacter jejuni
MKSGFVSIIGRTNAGKSTLINSLLEEKIALVSHKQNATRRKIKAIVMHEKNQIIFIDTPGLHESGATLNQLLVQSAIKSMGDCDVILFVASVFDSTKDYENFLSLNPQVPHIITLNKVDLTDNATLLKKLSEYAKFSQHFKAIIPYSSKKKSYKKGLLDEIVKYLDEHEYFYDPEFLSASSEKEIYRDFILESIYENLSDELPYSSEVLIHRTKDTPNLLILEANIITDTNSHKGMLIGKEGATLKRIGKDARFKISKLAQKKVLLKLFVTVKKNWQKDEEFLKKLLNDEN

SEQ ID NO: 54387 - protein, 180 aa, Campylobacter jejuni
MFHATTILAYKGKNKSVIGGDGQVSFGNTVLKGNAVKIRKLNNGKVLAGFAGSTADAFNLFDMFENLLQSSKGDLLKAAIDFSKEWRKDKYLRKLEAMMLVLDRNHIFLLSGTGDVVEPEDGQIAAIGSGGNYALSAARALAKHTDLDEEELVKSSLQIAGEICIYTNTNIKTYVIEDEK

SEQ ID NO: 54388 - protein, 147 aa, Campylobacter jejuni
MKVLLIKDVKALGKAGEIKEVKDGYGQNFLIAKGFAKAATNEVLRKYESDKKKEAENLRFEIANLEKLKEELSKITLEISKPVGANGSLFGGVTKDEIAHALKEQSHIEIDKKSLECDTLKSLGIHEVSVKLGHAIHAKFNINIKAE

SEQ ID NO: 54389 - protein, 81 aa, Campylobacter jejuni
MRVDKFLNVVNITKRRAISEDMCKSGVVGINGVIVKASKEVKVDDIITLHFTEYTQKYKVLALPSTKSIPKNAQNEYVVKL

SEQ ID NO: 54390 - protein, 242 aa, Campylobacter jejuni
MSKLEIVNLEKIIKKTKIIHGISLEVNSGEVVGLLGPNGAGKTTTFYMICGLISPSSGKVLLDGLDVTKDPLNKRARSGIGYLPQESSIFKDLSVEDNLLLAAQIFYKDKKILHDKVEQMLELLSIEPIRLRKGLSLSGGERRRCEIARSLMCEPKFLLLDEPFAGVDPIAVAEIQTLIKELKRLGIGVLITDHNVRETLAICDRAYVIRSGSLLASGNADEIATNKDVKKYYLGAEFKLLD

SEQ ID NO: 54391 - protein, 681 aa, Campylobacter jejuni
MSKKQNKLITKEILNNAIKGAFLKFDPRFMVKNPVMFMVEVGSILTLILSIFPTLFNGNSDERIYNILITFILFIILFFANFAESIAEGRGKAQAATLRQSKKDSKARHIKSDGSEEMLNSSELKIGDIVLVKAGELIPNDGEIIEGTASVDESAITGESAPVMREAGGDFSSVTGGTTVLTDFLKIKILVGAGESFLDKMINLVEGAARQKTPNEIALNTLLIVLSLSFLMVVVSLYPFMQFLGVSLPISWLVALLVCLIPTTIGGLLSAIGIAGMDRVTRFNVIALSGKAVESCGDVDTMILDKTGTITFGNRLANEFYEVQGISKEEMIKACVLSSLKDETPEGKSIVALAQKMGYELEGNDIKEFIEFSAQNRMSGVDLQDNTKIRKGAFDAIRAYISEMNGKIPSDLETKVMEISNLGGTPLVVCKNEKILGVIYLKDTVKPGLKERFDELRKMGIKTLMCTGDNPLTAATITKEAGLDGFIAECKPEDKIKAIKKEQAQGKIVAMTGDGTNDAPVLTQADVGIAMNSGTQAAKEAANMIDLDSNPTKILEVVEIGKGLLITRGSLTTFSMTNDIAKYFAILPAMFSVVLPQMQILNIMHLATPKSAILSALIFNAIIIPLLIPIAMRGVKFKPMKSEHLLLRNLSIYGLGGMIAPFIGIKIIDIPTAWILRILGV

SEQ ID NO: 54392 - protein, 606 aa, Campylobacter jejuni
MQRQSPEQILKKLEVKAKEEEKNKLVKLKIFLGYAAGSGKTYAMLSEARTLRDNGVDVVLGYIEPHDRPETMALAQGFESIANLEIPYKNIVLKEFDLDATLKRKPALVLVDELAHTNAKGLRNEKRFQDIEELLKAGIDVYTTLNIQHLESLNDLVANISKIEVKERIPDRIFDEADQVELVDIEPNKLLKRMQDGKIYKEKQAKLALENFFRQERLIALREIALRRLASRVNLRASEQRLINDDLAYHTGEHILVCINASNAKVIRAAARLALAFHAKLSALYIKNPNIKEAKALEENIELAKSFDAKIISVYDDIARQIAEYSSLSNVSKIVLGKNKDKKSLKKRFLKLSLKKHPILIYILSMKIKFLLLKYEVKKSFDFLGFLKITGVLLLATFIAFVFHKFNTQPSNIVMIFILAVFASSFISDNKIFAFYSSLVSVLIYNFFFLEPIFSLKVHDSGNIITFTTMFIVGFLTAVFTRRLKLQSKELTKRAYRTAILLENSENLARVKSKQELWEQLGNQALKLLNLPIIIYPINKNNILSKPLLFFNDDKQMLKNCFSADEIAIAQWVATNKERAGVCTNTLPNANAMYLPIEDGKKLKGL

SEQ ID NO: 54393 - protein, 357 aa, Campylobacter jejuni
MEYKRFKTRQIKVGNVLIGGDAPISVQSMLFTKTRDIEGSLEQINRLYFAGANIVRLACLDMADARALKEIKAKSPLPLIVDIHFNHNLAVYCAEFIDGVRINPGNIGSKENIKEVVKACKERGIPIRIGVNHGSIEKQFSDKFGYGVDAMLESAMYNIKLLEDLDFFDIKISMKTSDAQKTIEAYERLRPLCDYPFHLGVTEAGTKFHSTVKSSIALGNLLLKGIGDTMRVSMTGELEEEIRVARAILQDSGVQKSGVNIISCPTCGRIQSDLLSAIKIVEEKTKHIKEPLNISVMGCVVNALGEAKGADVAIAFGKNQGLVIRHGEVVAKLKESELVDRFLAEVEDEVKSRVVKE

SEQ ID NO: 54394 - protein, 501 aa, Campylobacter jejuni
MMANLYLMRSRSDELNTIISTNLLKNYSKIYKNIAIYCPVIYIHRVPVLQGWLEEFNINQTVKSAYGFTFREAMEEFSKDPHNFFNVILEEYEELKRKYDFVLVNSFCEFGILDGFDLSIKLAKNLNTPIAAIINDEDKLIAQKYFDHALDGRNYVLINENFNFEEVQKLKEYDFITPHRFKYELIKQSIKNKKTVVLPESNDERILKAAEILLKSKVVDLILLGDEEKIKQDATRLSLDLSAMQIMNPLNSEYNQKFTSILYEARKSKGMSLEEAKMLVQDKTYFGTLLIHTGKADAMVSGASTTTAETIRPALQLIKTKEGISSVSGIFFMGLEDQVLAFADCAVNPSPTAEQLATSAYVSAMTAKSFGLEPRIALLSYSSGDSGKGESVDLVKEALKIAKEKYPELNIDGPMQFDCAYDPKTAAKKMPNSKIAGHANVYIFPDLNAANICYKAVQRTANALAIGPILQGLKKPVNDLSRGCLVDDIVDTVILSAIQAQ

SEQ ID NO: 54395 - protein, 312 aa, Campylobacter jejuni
MILEIPHIPVLLNEVQEIFKNLKTGYFLDCTLGFGGHSEALLKNHPDLKFIACDQDQQALKFSKKRLKDFRNRITFMQSNFSEVLEKISHKEELRGILADIGVSSFQLDNNERGFSVNSDFLDMRMNQNSKISAYEIINTYTKEQLTSIFKDYGELHDAHFIAEKICLERSKNLIKSAKELYQIIGKGKQNHRKISKATLAFQAIRIEVNQELKVLKDFLEHLENLKPKNCILAIISFHSLEDRIVKQFFKKWSKNCICNEKIMRCECGNNHSLGQIITKKAISASKEELLKNSRSSCAKMRAFYFNNLDNK

SEQ ID NO: 54396 - protein, 462 aa, Campylobacter jejuni
MILNILGIDLGSTQTCAIIAQKDEDGLKIIGFSKSKTNGVKKGAITNIELASKSIEEAVRSAEMMSGVHYDRVVVSISGAYTKSVDSIGVVNIPNHEIGIKEIHRAVSTAKHTANLPSGYEIIHVLPYNFKVNDLEHVDDPLGMSGNRLEVSTHIVISQESHIKNLKKAVELADLRVDNIVLSGYASAIACLDDSEKELGAVLIDMGGAICDMVVHTGNSIRYNDCLQIGSINITQDLSMALHTPLKEAEKIKLNYAALSQQPNTLIQIPSMGDERKVNEVSLDIISNVIYARAEETLMILAKILSDNRYANAIGGGVVLTGGMTKLAGIDELAPATFDNRSVRLATARKDLITGFSEIFNDPENTCAIGLCLYGAGYFTPYELDSNEKLRYKGEIENFNRQIKQDIVLQKDAESEIKSDFFDENLQENDTIAIQEQLDFKEPKEKKPSVFSNIWHKIMNQF

SEQ ID NO: 54397 - protein, 370 aa, Campylobacter jejuni
MSEFLVEEMQHNKGAKIKVIGCGGGGGNMINHMVKMGLNDLDLIAANTDAQAISISLAKTKIQLGEKKTKGLGAGMLPEVGAESARESFEEIKASLSQSDIVFIASGFGGGTGTGATPVIAQAAKEIGALTVSVVTMPFAFEGKQRKKLAESGLLELKKESDSILVIQNEKLLSIIDKKAGIKDAFRLVDDILARAVKGMVSILLDNGDINVDFADVRTIMSHRGLALMGVGSASGENAIEEALSNAIESPLLDGMDIKGAKGVILHFKTSSNCSLFEISAAANSIQEIVDENAKIIFGSTTDDSMEDRVEVTIIATGFEDKDTVAKKSTEEAQASKKNPYLSLKKVSGGYDEEIMAQIETPTFLRRQMD

SEQ ID NO: 54398 - protein, 476 aa, Campylobacter jejuni
MGKFVNNIDDFFKFCKQNEVLFVDFRFTDMIGTWHHITYNLHAINEETFQTGIPFDGSSIHGWQPIEKSDMILKPDAQSAFLDPFTADPTIIVFCDVYDIYKGQMYEKCPRSIAKKAIEHLKNSGIADTAYFGPENEFFVFDSVKIVDTTHCSKYEVDTEEGEWNDDREFTDSYNTGHRPRNKGGYFPVQPIDSLVDIRSEMVQTLEKVGLKTFVHHHEVAQGQAEIGVNFGTLVEAADNVQIYKYVVKMVAHLNGKTATFMPKPLYGDNGNGMHVHMSLWKNGVNLFYDKDGYSGLSQTAINYIGGILKNARSVAAFTNPSSNSYKRIVPGFEAPCILTYSCQNRSASCRVPYGIGKNSARIEIRFPDSTANPYLAFVSLLMAGLDGIKNKTIPVGPMDENLFDLTLDEIREKGIEQLPHTLRGSLEALIRHNSYLKPVMSDIFIDDYQHLKFETQVWPVEARPTAYEFKTCYSC

SEQ ID NO: 54399 - protein, 417 aa, Campylobacter jejuni
MIIPEIVAPAGNFTKLKIALAYGADAVYAGVNNFSLRSRTAREFNYESFEEAIKYTHERGKKIYVTLNGFHLSSQIEGLKRHILKLREMKPDAFIVASVGAMRLVKELAPEISLHVSTQANILNYLDAQVYKDMGAKRVVIARELGLKDAKALKENCDIELEAFVHGSMCFAYSGRCLISSVQSGRMSNRGSCANDCRFNYELYAKNPENGTLFRLEEDENGTHIFNSKDLNLCSYIEKIMQENCISAFKIEGRTKSEYYVALTTRTYKMAIQDALEGKFESSKYEKEIATLKNRGFTDGYLVSRPLEKTDTQNHNTSIEEGSHQVHAISEDGRFFKCKGKIVLNTPYEILTPLGDVIQTCDNELGKIYQKEGKYFIEFKKLIAKNNKEFSEIHSGNEHEIQLPNKISALSFLRKEI

SEQ ID NO: 54400 - protein, 287 aa, Campylobacter jejuni
MTFSQMILNLQNYWQEQGCAIMQPYDMPAGAGTFHPATFLRSLGKKPWAAAYVAPSRRPTDGRYGENPNRLGAYYQFQVLIKPSPDNIQELYLKSLENLGFDLKSHDIRFVEDNWESPSLGAWGLGWEVWLDGMEVTQFTYFQQVGGIAVDLVSAEITYGLERIAMYLQNVDNVYDIVWSEFNGEKIKYADVHKQSEYEFSKYNFEVSDVKILNEQFENSYKECKNILEQGLALPAYDYCMLAAHTFNLLDARGAISVAQRQDYMLKIRELSKNCAEIYKKNLNEAE

SEQ ID NO: 54401 - protein, 445 aa, Campylobacter jejuni
MFELVSESFKSAINKLRFVDDEKALKNALETLKKALLKADVHHKVTKELLTLIEEDAKQNGIGQKQFLNAIKINLENILSVNGKNQGFVFASKPPTVVLMAGLQGGGKTTSTIKLANYLKLRNKKVLVAACDLQRLAAVEQLRQLCEANEIELFFIENEKDPIRVAKEALKKAESSMVDVLLVDTAGRLAIDEALMDELRAVKDVLNPDEIFYVADAMSGQDGVKTAASFNEVLGISGVILSKFDADTKGGVALGIAKQIGIPLRFIGVGEKVADLEVFIPDRIVSRIMGEGDLATLAEKTAAIIDEKEAKKLNQKIKKGEFNFNDFLNQMESIKKLGSMKSLIGMIPGLGGMANAVKDIDLDNSKEIIRIKAMISSMTPKERENPDLLNNARKRRIAEGAGLSQVEVNRFLKQFSNAAKLAKRFSGKKGMESLTQMMSQARRQF

SEQ ID NO: 54402 - protein, 75 aa, Campylobacter jejuni
MTVIRLTRMGRTKRPFYRIVVTDSRKRRDGGWIESIGYYNPMVEPEVIKVDAERLAYWKSVGAKLSDKVASITSK

SEQ ID NO: 54403 - protein, 80 aa, Campylobacter jejuni
MVENFLREYAKLIADYPEQIDTQKIELSENFFEIVLFAHKVDTGKLIGKNGKMINAIKTVISAYKSKDASSYRVTVKALE

SEQ ID NO: 54404 - protein, 179 aa, Campylobacter jejuni
MSEKDFVQVAKLGKTVGLKGYVKLHNLSDFSSQFKKDATFFIKNTKEMLKIKHYNANNSTVLFENYEDIEKAKELTNLILFQSIEKSRQTCKLKKDEFFYFDILECEVFEEDKRLGKVVDILETGASYLFEIQSDEKWVEKKYPKIFFIPYLDKFVKNIDIEKRQIFCTQDAFLILENS

SEQ ID NO: 54405 - protein, 234 aa, Campylobacter jejuni
MKFSFVSLFPNLMEFYFQDSILARAKEKKLFKLNFYNPRDFSKNSYHKVDDYKIGGGAGLLMQAEPMYEVLRSIQEKKENPYFIFLNPSGKTFNQKDAKRLSKKEHIVFVCGRYEGIDERVLEIFANEVFSIGDFILTGGELPALVMCDAILRNVNGVLGNMESLEEESFENNLLEAPAFSKPFIFEKKNKKFYTPSEFLKGNHARIASLKTTLASCKTKFFRPDLFLEHERKK

SEQ ID NO: 54406 - protein, 118 aa, Campylobacter jejuni
MKNKYIEQFEAKQIEGKNVPDFRAGDTLKLAIRIKEGDKTRIQNFEGICIARRGNGVSETFIVRKIGANNVGVERIFPIYSESLESITVLRRGRVRRARLFYLRDRRGKAARIKELKK

SEQ ID NO: 54407 - protein, 1200 aa, Campylobacter jejuni
MSQFTHLHLHTEYSLLDGANKLKELALTLKEQGATSVAMTDHGNMFGAIDFYQTMKAQGLKPIIGIEAYLHNHDELDDKSSRQRFHLCLYAKNEIGYQNLMYLSSQSYIKGLYYYPRINKKLLEDYSEGLICSSACLQGEVNWHLNTYSERNVRFGAKGYEAAKEAALWYKKVFKDDFYFEIMRHGIGDQRMIDDDIIRLSKELNIKIIATNDTHYTFKERAAAHEVFMCIAMGKKLNDPDRMRHSVHEFYVKSPEQMSELFADIPEAIENTQEIAQKCNLELNLGNPTPPNFKFTREYAKDHNIILPEETKEFSFDNDDMVFEELCKKGLEERLKFIDESKHEEYKQRLEVEINIIKNMKFSGYMLIVHDFIKVAKDKGIPVGPGRGSAAGSLVSYCLRITDLDPIPYSLLFERFLNPERVSMPDIDVDFCQDRRAEVIDYVIDKYGADKVAQVITFGKLLAKGVIRDVARVCDMSIQDADELAKLVPEELKITLDAAYEKEPKIKEFIDRHPKGLEVWEYARALEGLNRNAGMHAAGVVISNESLWKKTPLFRQSKNDERHLVTQYSKDHLEDVDLIKFDFLGLKTLTVINNAIKLIKKRYNKDIIWETIDVNDSKVYKTIQSGNTLGIFQIESGGMQSLNARLKPERFEDIIAVLALYRPGPMESGMLDDFIDRKHGLKSIEYPFDSLEKVLEPTYGVIVYQEQVMQIVQIIGGFSLGGADVVRRAMGKKDPEKMKKLKTDFADGAEKQGYDRAKAEDLWELIVKFAGYGFNKSHSAAYALITFQTAYLKTYYPSEFMAALLTSEENNVDKIAVYIDEMKKMNIKLLPPSINKAIREFSALEQDGKDAIIYGLGAIKSVGIPAVENLLEARQDGEFKDINDFLGKIDPTKINRRTLESLIKAGAFDEFGFTRKALFDNMENLSEASRKMAEVRKNAASSLFGEEELTSGVQVNFTPKNEEFEVMEKLGYEKEILGIYVSGHPLDRFYEQINAIDYVKSLDFESLKNNGEILSIGKIEDFKSMMSKNNKRYGRIEILDYYSSFDATVFESNVEEIENIIKDENLKNNAYGFVLGFKAEGGEKPSFFLKAIKDLQSLEDGEIKAIKKFGAKKDFKNKEENHFTAEPKEFEKNIIELDLTRLNRELIYEIHEIARNAHNPNEKNNKKLVLKVISAGSCLLYHTDFIISDSIVEEISNKYA

SEQ ID NO: 54408 - protein, 210 aa, Campylobacter jejuni
MTLEQILEKTKNVRLVAASKYVDASIIEKLFDQGIVEFGENQVQALAQKKENLDEKKLDIKWHFIGTLQSNKINLLIKQKPILWHSCNGIKIAKAMDKRLDYKLNTLLEINSANENSKSGLDPNQAVEEYLQIQEECSNLNLCGVMSIGSHSQDKENIIKSFETTFKIYEILQKHGAKICSMGMSNDFEIAIKCGSNLVRLGSILFKNLK

SEQ ID NO: 54409 - protein, 271 aa, Campylobacter jejuni
MTIKNALMEAKSSLKGYENEAVFILCEYLKKDKAWLFLNQDIKIDHEPYFELIKRFKSGEPFEYIFEKVDFWGLEFKIKKGILIPRYDSEILLFQILNLCKKNTFNGILEIGFGSGILSIVLAKELGLKITACDINPKALELALENAQLHKVDHLIDFKLCNFKQIKENYDFIFSNPPYIKNSYPIDIWVQKEPKEALFGGEKGYEILEEIIHFSLDKKVKFLACEFGYDQKEILEKILYQNNFIVDFFKDEQGYNRAFIAKFTNMRYDKK

SEQ ID NO: 54410 - protein, 180 aa, Campylobacter jejuni
MDTINIGILTLSDRASSGIYEDKATAEIERVLNSYIKNDIIYHKELIPDDYDLIIKKLLYLADEKKCDLIVTSGGTGPALRDVTPEATEAVCDKMMPGFGELMRLESLKYVPTAILSRQSAGIRNKSFIINLPGNPKAIKECLEPVFPAIPYCIDLIEGAYIEANDEVIKVFRPKKKCQN

SEQ ID NO: 54411 - protein, 251 aa, Campylobacter jejuni
MKKILSIALVALVGLFLGACSDSKNKESNASVELKVGTAPNYKPFNYKENSKLTGFDTDLVEEIAKKNGIKIVWVETNFDGLIPALKAGKIDMIASAMSATDERRQSVDFTKPYYMSKNLYLKLKNNDSLQTKNDLEGKKIGVQLGTLQENTAKAIKNAQVQSNKDLNIAVLALKNNKIDAIVADQDTAKGFLAENPELVSFYQETDGGEGFSFAFDKNKQKNIIEIFNKGIDEAKTDGFYDTLIKKYELE

SEQ ID NO: 54412 - protein, 623 aa, Campylobacter jejuni
MSKVIGIDLGTTNSCVAVYERGESKVIPNKEGKNTTPSVVAFTDKGEVLVGDSAKRQAVTNPEKTIYSIKRIMGLMINEDAAKEAKNRLPYHITERNGACAIEIAGKIYTPQEISAKVLMKLKEDAEAFLGESVTDAVITVPAYFNDAQRKATKEAGTIAGLNVLRIINEPTSAALAYGLDKKDSEKIVVYDLGGGTFDVTVLETGDNVVEVLATGGNAFLGGDDFDNKLIDFLANEFKDETGIDLKNDVMALQRLKEAAENAKKELSSANETEINLPFITADASGPKHLVKKLTRAKFEGMIDSLVAETITKINEVVSDAGLKKDEIKEIVMVGGSTRVPLVQEEVKKAFNKDLNKSVNPDEVVAIGAAIQGAVIKGDVKDVLLLDVTPLSLGIETLGGVMTKIIEKGTTIPTKKEQVFSTAEDNQSAVTINVLQGEREFSRDNKSLGNFNLEGIPPAPRGMPQIEVTFDIDANGILTVSAKDKATGKAQEIKITGSSGLSEEEINNMVKDAELHKEEDKKRKEAVDARNAADSLAHQVEKSLSELGEKVAAADKENIQKALDDLRETLKNQNASKEEIESKMKALSEVSHKLAENMYKKDEPNTANDKKKKDDDVIDAEVE

SEQ ID NO: 54413 - protein, 212 aa, Campylobacter jejuni
MNFWGIIKEDFSQPKAQDPAFNSCIELFFNYPGVWAVVNYRFAHFFYIRNFKRIARMISGISQFLTGVDLHPGAELGRRIFIDHANGVVIGQTAIIEDDVLIYQGVTLGGTSLEKGTKRHPTIKKGVIIGSGAKVLGNITIGENAKIGSNAVVVKDIGANLTAVGIPAYIIEERKNKNIRAIDANCDDKLEKLEKKILELENLILKQPESQK

SEQ ID NO: 54414 - protein, 408 aa, Campylobacter jejuni
MINALKGMKDLLDKDAYYYEKVIKICEEVAKNYGFTFINTPHLELCTLFKRSVGESSDIVGKEMYEFIDKGENHVCMRPEGTAGVVRAYIEKKLDKNTSVKRWFYYGSMFRYERPQKGRLREFHQFGVESLGIPNVYEDASIILMLVEIFSRLGIDFKLQLNSLGCSQCLPKYRDRLVEFLDSKEGFCEDCLRRKNLNPIRVLDCKNEHCQNLLENAPLLINNLCTSCQKDFETLQQILKDNGVKFELDSKLVRGLDYYSKTAFEFISDEIGAKAAIAGGGRYDRLIEYLGGKSGYGIGFAMGIERIITILEQKEEKIQREGIYLCAMDEIYIQKLLHIATNLRKEYKVLLSYEARKLAKHLENADKNNTEIFLCMGENEAQNESLFYKNLAKKEEKMIKISDLKKVL

SEQ ID NO: 54415 - protein, 192 aa, Campylobacter jejuni [sequence omitted]

SEQ ID NO: 54416 - protein, 258 aa, Campylobacter jejuni
MNIKKIFLSVLFTISLSFGADKTIIIGATPTPYAEILNFSKPLFQEKGWKLIVKEFNDYNIPNIALNEKDLDANLYQHKPFLDDFNTHKGTKLSSLGAIVLVPMAIYSNSIKDIKDIPNGAKIAIPNDATNESRALDLLAKANLIEFKSQSTLKTPIDISKNPKKLKFIELKAAQLPRALNDTDLAIITTNYALGAGLNPLKDGIFMEDKDSLYAIVLATRKGEETSQKSLVIKEILTSDKIKNFIIEKYKGSVIPTF

SEQ ID NO: 54417 - protein, 256 aa, Campylobacter jejuni
MNLFKIIILACILNLSSLFAQNITIGATPNPFGSLLELMKDDFKNKGYELKIVEFSDYILPNRALEEKELDANLYQHKPFLEEYNLKKGSNLIATTPVLIAPVGVYSKKIKNLENLKEGARVAIPNDATNESRALELLEKAKLIELNKNTLKTPLDINKNPKKLKFIELKAAQLPRALDDVDIAIINSNFALGAGLNPSKDTIFREDKNSPYVNYVVVRSEGKNSEKTKVIDEILRSDKFKAIINEHYKDILIPAF

SEQ ID NO: 54418 - protein, 257 aa, Campylobacter jejuni
MKIKSLFIASILTLSLNANALETITVAATPVPHAEILEQVKPDLEKQGYKLEIKEFTDYVLPNLAVDNGEADANFFQHTPYLEEFNKNKGTKLIKVAAIHIEPMAVYSKKYKSLDDIKEGVKIAIPNDPTNESRALDIIAKKGLVKFKDKALKTPLDIIDNPKKIKFVELKPAQLPRALNDVDFAVINSNYALSANLNPAKDSVFIEDKESPYANILVVRVGHENDPKIKALIQALQSDKIKQFIIEKYNGSVLPAF

SEQ ID NO: 54419 - protein, 303 aa, Campylobacter jejuni
MNEENISIVSAFFSRISQFFNEFSWQDIKEVSLSSITSFNENYENILKPALNETIYMSLMAVLFGFLLAIIPGILLAIWDKNGIKENKIAYSILDFITNILRAFPFLILIVVLLPLSKIIVGTSIGTNAAIVPLAIGIAPYLAKMLESAFKEIDKGIIEAAKSYGASNIQIIFKVIFSEALPAIISGITLTLIFTIGFSALAGTVGGGGLGDVAIRYGYERFNKEVMIQTVVILLILVQLVQILGNLFYTWAKNSKTTYIIATLLILLGVSIVININNDENFFWQVIVFILFLGSLLYKGFKK

SEQ ID NO: 54420 - protein, 870 aa, Campylobacter jejuni
MYDKNLEKEYYQICEERGYFEIDGNKTIQEKDKNFCIMMPPPNVTGVLHIGHALTFTLQDIMTRYKRMDGYKVLYQPGLDHAGIATQNVVEKQLLTQGIKKEELGREEFIEKVWEWKEQSGGKILDQMRTLGITPAWSRLRFTMDEGLVNAVKKAFVELYDKRLIVRGNYMINWCTHDGALSDIEVEYKENKGKLYHIKYFLKDSDEFLVVATTRPETFFGDTAVMVHPDDERYAKFVDKEVILPISKKAIKIIADKHVEKEFGTGVVKVTPAHDMNDYEVGLRHNLDFISVFDEKGILNEHCLEFQGLERLEAREKIVAKLESLGFIEKIEEYNNQIGYCYRCNNIVEPYISKQWFVKKEIAQESIEKVALGESKFYPNHWINSFNAWMKDLRDWCISRQLWWGHQIPVYYCECSHEWASQHTPKTCPKCQSQNFKQDEDVLDTWFSSGLWAMSTLGWGNENWGKDKIWSEKDLKDFYPNSLLITGFDILFFWVARMMFQSTNVLHQLPFKDIYLHALVKDEQGRKMSKSLGNVIDPNESIKEYSADILRFTLALLAIQGRDIKLSNDKLLQVRNFTNKIYNAKNYLLLNESKFEDLENITLHSELAKYIYAKFQTCVKDVRENLDNYRFNDAANTLYKFFWDDFCDWGIELSKAEKSSVKELGSIFKEALKLLNPFMPFISEYLYHKLSDTELKTSPSIMISKYPKFKEQDKNIEKIFSLLIESIVSIRRAKSLIDLGNSKIEKAYIKFNDKKIKDEIKAYMNFIIMLAKCEQIEFSEEKLPKAICDVSENLEIFITLENVDLSGILTRLENQKNKLEKESFKLNSMLSNEKFIANAPKEVVEQNKEALENLKIQLEKISVELQNLRG

SEQ ID NO: 54421 - protein, 372 aa, Campylobacter jejuni
MQISKISLKNNPDLQFIAEFLKPYTKRAYLVGGSVRDLFLGLKICDYDIELYDIKPKDFEKIMQKLGAQGFGKSFFVYKFKNYDLALARTENKISYGHKGFEVQICNDEKLGAKRRDFTINSMMINLFNDEFLDFYGGLKDLGVGFLRHIDKQSFQEDSLRVLRAVVFASRFNFKITSESLKLMQSMDITDLSKDRINAELCKFFKSPRLDVGYRYLQELGLEKQVFGFESVFKSSEFQNLLRQSREFVKSDALFLYLYLNFFNLEKDIFFKRTKLKKEYLKYANQAFYLDDISDFELAKIAFEMPLKEWLGLWSKKRIEQAKRLGLYENKFESKILAKDFINAGFCGKILGLKLQEARENELKEYIKGLAK

SEQ ID NO: 54422 - protein, 274 aa, Campylobacter jejuni
MISVLKICTKDQKGLIYRISDVIFKYHINIVKNDEFVGEGMFFFRALLEGEFDKEAFIGTLEAMLGQEALIELCEKRKKDIVVFATKESHCLGDLLIKHYSNELEANIKAVISNHNSLKDLVEKFEIPYHFISAENLDRKEQENQILKCLEQYKFDYLVLAKYMRILSPDFVRHFEGKIINIHHSFLPAFIGANPYKQAFERGVKIIGATAHFVNNNLDEGPIITQAVSPVNHEFTWQDMQQAGRNIEKDVLSKALDLAFEDRIFIHNNKTIIF

SEQ ID NO: 54423 - protein, 339 aa, Campylobacter jejuni
MNESILKSLDSNEKETLQKGLESLIEQTYVIENEYKTLNENYNSLRAMVDEIIEVLPSALWILDKEKNIILQNQEALKNPKLLSIISLDKIRDELEFEGRFYAVKIIAHNEKTIVSATDISDEKRNERLASMGSVAAHLAHEIRNPIGSISLLASTLFARSELKNKHIVLEIQKAIARVERIVNSTLLFTKGVHINALNFNLLELKEECESAINSYNFTSQIDFEISFLDKQICADKALLGLVLQNLIYNAIDAIEESECEKPMIKILASYDNEKICIRVYDNGCEIKDEKLVFEAFKTTKLKGNGLGLSLSKEIINAHKGELSFQSDPKNFYFTLPLV

SEQ ID NO: 54424 - protein, 475 aa, Campylobacter jejuni
MLINTLYFINSLFFNFCIAFYLMSALQWYSYKFKRVFFHYHKPLWHLYFLFIPYFLFLAFPLYSLVYFALIHTPILYFWNKGIDKKLVFTSKVKWFFVFVFVYNAIFTILALRFSFLFNLFSLPFALLSLKIYEFFTNLYYKKQAKAKLRANENLKIILITASFGKTSIKNFLYELLKDDFKSYKTPRSVNTLLGIVADINANLSQDTQIYIAEAGARLKGDIDEITHFLQPQISIVGEIGNAHLEYFKSVENIRSTKLEALNSERLEKAFLHSSTQKEEDKLISLYDDKLSLIHSSLEGLEFKVDIENKSYDFKSQILGDFNAQNLCVCILCAHYLGIKLEKIQKQVLNINSVEHRLQVLSREPKFIIDDGFNGNFKGMSTSYKLCKSYKGRKVLVSPGIVEVSEEENIKLAKIINECFDLAIISAQINAEIFKKELKIKTIILKEKSQLVQTLAKETKHGDLILFSNDAPSFM

SEQ ID NO: 54425 - protein, 239 aa, Campylobacter jejuni
MAQTQLSYKNKTYQISYEILGDLSLPQILILHGWGADKKLMKQSFCPFLKDFCQIYMDLAGFGNSSVEEILNTQDYANITELFLKQKKLNVCFFMGHSFGGKVSTLLAKEKDTLILLSSAGILAKKSLKVRFKIRIFKILKLFGLGKFYRYFASKDGANLSPIMYETFKKVVDEDFSEIFAKQKAKSLIFWGKSDEATPLYCGEKMHQFLKNSTFYPLEGDHFFFLKHSAFIAQKIKEI

SEQ ID NO: 54426 - protein, 346 aa, Campylobacter jejuni
MKFAILFGGNSYEHEISIVSAVVLKKVINQNLEFIFCDEERRFYHIPSEKMNSKTFSTKAYKKEKELFIKQGGFFSKGFLKENKLECECVINLIHGRDGEDGKIAALFEFYSIKFIGPRLEASVLSFNKELTKLYAKSVGVKTLDYTILRKNQNSKEKLSFPCIIKPARLGSSIGISIVKDEKDLEYAKDVGFEFDNDLVVEEFKNNIKEYNLAGCMINDEFVFSIIEEPKKKEFLDFEQKYLSFSGHNELIEADLSEELKEKLKDSFKKIYNPLFKGALIRCDFFILDNEIYLNEINPNPGSLANYLFKDFNTTLNALADQISLEKMIKINYNFLHSINGQKGKL

SEQ ID NO: 54427 - protein, 483 aa, Campylobacter jejuni
MKSLVFKNFIINALGILFSRILGLARDVLIALFLGAGLYSDIFFVALKMPAFFRRIFAEGAFGQSFLPNFVKAKKKGAFCVSVMMQFSLIVFLFCLLVSFFSSFFTKLFAFGFNADTIALAAPLVAINFWYLFFIFLVTFLGAILNYRQKFFITSFSAALFNLSIVIAAFFVDKNAPQNTLYYFSYATVLSGVAQLILHLLVLKNNPVIRAMTLSIKFKKTKAKLQGFYGNFFHGVLGSSATQFSSLLDTTIASFLMSGSISYLYYANRVFQLPLALFAIALTQVSFPKILKHLKSDQENLALKFMQRALALLSILLIASSIVGSVFALEISKLLFERGNFTHEDSVITAYVLIAYLIGLLPFGLQKLFSLWLYAKFKQKTAAWIAVKSLIISALCSMAFIFLIKDESLKVIAVALSSSISAFYLLGANIKEFGFKKFFALISIKICLLVIVALIVFTILLILIKPYILSFFIGIFTSFKGVF

SEQ ID NO: 54428 - protein, 462 aa, Campylobacter jejuni
MRLLDSVTKEKIKLDKKDISIYLCGPTVYDDAHLGHARSSVCFDLLRRVLLAQGNRVKFARNYTDIDDKILKKMAQSGQTLEEITEFYIKSYEEDMRVLNVLDPDFKPRATHYITAMLDLIKKLAKDGFVYTLEDGIYFDTSKDEKYLSLSNRNLEENISRLSNEVQKRNESDFVLWKFDENFYESEFGKGRPGWHTECVAMIDSIFENTLDIHAGGIDLLFPHHENEAAQCRCGCKRKLANIWLHNGFVKIDGEKMSKSLNNSFFIKDALKEFMGEALRFYLLSSHYRSHFNYSLSDLENAKKRLDKFYRLKKRLDLGEISDFDVLNDIGIKSEIAKQILEILNDDLNVSKALALLDDFISSANLELDKESKNKILKQNIKEALSELAKIFGFGFMDATLYFQWGVSKEEREEIEKLILERTEAKKNKDFNTADAIREQLNSKKITLLDTPNGTIWEKINA

SEQ ID NO: 54429 - protein, 580 aa, Campylobacter jejuni
MHNEMNLKEVLIRFKPFYKRYWKQFAIAIFGMILASGGTAGSFYALEPILNYIFVEKNEALLYTVPFLLVLMYFFKNLGTYLQSFYVSFIGTDMLRVLRARVLKNVLRLDMDFFKRYRSGELVSRCTNDINALQSIVSNIIPDFFRELLTAIGLLAVVLYQSPTLAFFALVILPLAIFPLVWFAKKLKKYARNIQETNSDLLSYLGEIFSNIELIKANDNEKKESDKFAKHNDTLCKLNLKSARIDALTSPLMDMMGSVGVAVVIIVGGREVINGSMSVGSFISFVSALFAIYTPLKRLSSLYGKLQGAVAASERTFYLLDLEPQIKGGSKELKNIEKISFENVEFAYENPHKSVLKGVNFDFVKGQMLALVGTSGGGKSSIINLLMYFYEKQKGKILLNQEDISTFTIESLHAKIGLVTQNIYLFNDSFAANIAYSEELEEEKVIQALKLANAYEFVKEMGGIWAEVKEHGKNLSGGQKQRIAIARALYKNPDVLIFDEATSALDNESEKAIVKTIENLKQDRLILVVAHRLSTIENADKIVVLDKGKVLAIGKDEELLQTCSLYQKFKSKEKTKPSFS

SEQ ID NO: 54430 - protein, 416 aa, Campylobacter jejuni
MIAYEKIQLKNKLEVYALPVNKNSDVISVDIFYKVGSRNEIMGKSGIAHMLEHLNFKSTKNLKAGEFDEIVKGFGGVDNASTGFDYTHYYIKCAKKNLDKALELFAELMANLNLKDEEFQPERAVVLEERRWRTDNNPLGYLYFRLFNHAFMYHPYHWTPIGFFKDIENWSIEDIKEFHSIYYQPKNAILLVSGDIESKEVFELSKKHFEKIKNTKTIPKIHTKEPKQDGVKRIYLHKNSDTELLALAYKIPNFKHKDIPALNALSELLGSGKSSLMSEILIDKLNLINDYYAYVNDCIDENLFIFICNCNPNVNAEKVEKELLKIIDKLKMGKISQKDLQRVKNNVKSDFIFSLNNASAVANIYGSYLARGDINPLLNYEKDIQNLELKDLISCAKKYFIQENSTTVILRKDSNG

SEQ ID NO: 54431 - protein, 246 aa, Campylobacter jejuni
MDWQKITEKMCDFIQEKVKNSQSQGVVLGLSGGIDSALVATLCKRALKENVFALLMPTQISNKANLEDALRLCADLNLEYKIIEIQSILDAFIKQSENTTLVSLGNFAARIRMSLLYDYSALKNSLVIGTSNKSELLLGYGTIYGDLACAFNPIGSLYKSEIYALAKYLNLHENFIKKAPSADLWENQSDEADLGFSYTKIDEGLKALETNDEKLLRTLDPSLIAMLKNRMQKNAFKGKMPEILEI

SEQ ID NO: 54432 - protein, 470 aa, Campylobacter jejuni
MKLVESRNVNNVSSFKEALINPNAPEGGLYSPLNLPIFEGEKYANLSYKDFALKLIESFGFGEEELFKKALKSYESFDDKNTPISLQKISEKTYINELWHGPTRAFKDMALQPFGVLLSEFSKDKNILIICATSGDTGPATLKSFENAKNVKVACMYPKGGTSGVQELQMRALDKDNLKVFAIDEDFDAAQRTLKELLFSKDFQNEIKALNYELCAANSVNFGRILFQIIYHYYASLKLFNEFLEEVQIIVPSGNFGNALGAFYAKKMGAKISKIKIASNANNILSEFFNQGVYDLREKSLKKTISPAMDILISSNIERLLFAKFKDKRTKELMNLLKNERYFKLEKEELQSLQEDFEADFCTDEECMQFIKQSKILIDPHTATCFKMLDPLKPSIITSTAEWTKFTPSMIKALYDRDSKNEKEDLKFIAKEFNVQVKDEILALFDLKNSDEKVFEARNIKKEILDWMQK

SEQ ID NO: 54433 - protein, 256 aa, Campylobacter jejuni
MKKIILIFISFFALNLSAKDLVVGMELGYPPFEMSDKTGKASGISVDFLEAFAKKNGYKLVVKNIAWDGLIPALKTAKIDLIMSSMTITDKRKKVVDFSIPYAKANLAILTPLNSDITNIKDLDKKGKVLALKRGSTGHLYAVKNLKNATINLFDKENAAILEVIQGKADGFFYDQLTIYRTWQKHQDTTRAILAPFQENPEFWGIAVRKGDEALKDKLDNFIDESRKNGFLDFLGNKYLKDIKEVFKQNNITFFL

SEQ ID NO: 54434 - protein, 429 aa, Campylobacter jejuni
MKTSILILAAGLGTRIKSQKPKVLQELCQKSMILHILKKAFALSDDVSVVLSHQKERVEKEILEYFPKTQILEQDLQNYPGTAGALSGFEPKNERVLILCGDMPLVEQTSLEALLGNNAKLNLAVFKARDPKSYGRVVIKNDSVEKIVEFKDANTQEKEINTCNAGVYVIDSRLLKELLPLIDNNNAAKEYYLTDIVKLAKEKDVMIKAVFVDEDEFMGINDKFELSIAENFMQKKIKKYWMQQGVIFHLPQSTFIGADVEFVGECEVYENVRIEGKSKIINSIIKSSSVIENSIVENSDVGPLAHLRPNCELKNTHIGNFVECKNAKLNTVKAGHLSYLGDCEIDSGTNIGCGTITCNYDGVKKHKTIIGKNVFVGSDTQFIAPVKIEDEVIIAAGSTVSINVEKGALFINRAGHKMIKDYYYKKFQK

SEQ ID NO: 54435 - protein, 222 aa, Campylobacter jejuni
MNELKHLAVVMDGNRRWARAKGFLAKLGYSQGVKTMQKLMEVCMEENISNLSLFAFSTENWKRPKDEIDFIFELLDRCLDEALEKFEKNNVRLRAIGDLSRLEDKVREKITLVEEKTKHCDALCVNLAISYGARDEIIRAAKRVIEKKLELNEENLTQNLDLPLDVDLMLRVGNAKRLSNFLLWQCSYAEIYFSETLFPSLTKREFKRIIKEFRNRERTFGK

SEQ ID NO: 54436 - protein, 241 aa, Campylobacter jejuni
MMKIKIIFSYDGSAFLGSATQPHKKGVQDALSGALSHLGIFSPLLMASRTDKGVHASYAVASVECGDYFTNLEYLQKQLNKFSHPFIHIKKIEKVKDDFEVRFDVKSREYRYIFSHASYSPFMASYVHFYPKFDLGKANELLGFFVGKKDLKFFCKSGGDNKTTLREIFIARAYAYKDFSIFHFKANGFLRGQIRLSVASVLKVLEGKMSEKELKEQIEAKKQYNHFLAPPNGLYLSRICY

SEQ ID NO: 54437 - protein, 848 aa, Campylobacter jejuni
MSFMQEYNKLVEERAALGIPPLPLNANQTRELCKLLENENNEELANLLENRVNPGVDDAALVKCEFLDSILKGKISAPNIDKKRALRMLGTMLGGYNVKVLIDALKDENIAKDAAEVLKNIIFVHDNFHTIAELSKNNPHAKEVLQSWANADWFNKKEKLPQVIKCIVFKVAGETNTDDLSPAGDAFTRSDIPLHANAMLKVRQTGSLEKIKELKKSGREVVYVGDVVGTGSSRKSAINSIQWHLGKEIEGVPNKHSGGIIMGSTIAPIFFNTAQDSGALPIICDVTNLEMGDEFEIHPYEGKIIKNGSTIAEFTLSPNTLLDEVRAGGRIPLIIGRGLCTKAREFLGMESENIFTKPEQPKSSSGGYTLAQKMLGRACGVEGVRPGMYIEPITLTVGSQDTTGPMTRDEIKELASLGFNADFVMQSFCHTAAYPKVSDSNLHKTLPNFMTSRGGVSLKPGDGVIHSWLNRFVLPDTVGTGGDSHTRFPIGISFPAGSGLVAFAAVTGSMPLNVPESVLVRFSGELQAGVTLRDLVNAIPYYAIKQGQLTVEKKNKKNIFAGKILEIEGLPNLKVEQAFELSDASAERSAAACSVDLSIESVSEYIKSNISLIEAMIEVGYENKATLARRAEKMREWLKNPTLLRADKDAKYAYIIDINLNNIKEPILACPNDPDDVATLSEILADDKRPKNIDEVFVGSCMTNIGHYRALGEILKDKGILKTRLWVVPPTKMDKAQLINEGYYSIFGAAGARIEVPGCSLCMGNQARVNDGAVVFSTSTRNFDNRMGMGAKVYLGSAELAAVCAILGKIPSKEEYLQIVSEKLSNEHKANIYRYLNFNEIENFKLEN

SEQ ID NO: 54438 - protein, 150 aa, Campylobacter jejuni
MFKVYYKMPLCYLSLHSDGKFLTRVDFCDNKRSEKNCSLLDLAKYELDLYFTHKLRKFSIPVLIQGTDFESKVYKALMEIPYGKIATYKDIAEKINHPKAFRAVGNANSKNQIPIFIPCHRVIASNGIGGYNGGLEIKRFLLENEGVNLK

SEQ ID NO: 54439 - protein, 628 aa, Campylobacter jejuni
MRYITTPIYYVNDVPHLGHAYTTIIADTLARFYRLQGHETRFLTGTDEHGQKIEEAAKLRNSTPQEYADKISFEFKKLWDEFEITYDIYARTTDTRHIEFIKAMFLKMWQKGDIYKDEYEGHYCISCESFFTQSQLINDCSCPDCGKQTRILKEESYFFKLSKYQDKILQWYEEKDPILPKNKKNELINFVQNGLKDLSITRTSFDWGIKLPQEINDDKHIIYVWLDALFIYVSSLDFQNKGENAKFWPAHVHLVGKDILRFHAIYWPAFLMSVDLPLPKFIGAHGWWTKEGEKMSKSKGNVVKPKEVVDAYGSEAFRYFLLREVPFGNDGDFSENMLINRINAELSNEFGNLLNRIIGMSTKYSQGNISKEGVLKFYNAELNQAKEHLNLAVEFLENLQCNRYLEELFKALSVANLAISKYEPWSLIKENKHEQANALVALCANILAKTSLLLSPTLPKSSQKVALALNFEISSANYTKMILDNELLDFKANPCEALFPKVEKALLKQEIKEEPKKEESPKIKIDDFAKIEIKVAKVLDCQNIEGSEKLLKFQLELDDKEIRQVLSGIAKYYKASDLIGKQVCVISNLKKAKIFGHESDGMILSAKSGDKLVLIAPEQLVQNGSLVG

SEQ ID NO: 54440 - protein, 719 aa, Campylobacter jejuni
MINTQLASQIANTQKNDLKVDNSASKDKTNLKDNPKEALAQALKQNLGLSKDASSEEILAKFVQNETGTKLKELVNKLLDQINAQKNPDSPVLKQGKNLNLAPNFANELKILSTELAKSDTFTQVLDRLNQILKPASEIKNNNLAPLFKNSGVFLEAKLKDALNEELLPKSFHSLLSTIKGLSSEKLSVQIAQLANTNLSPKDTLKELKNIINSSKNENKQILNQSSFKALLNLSSKLENFKNYISKNPSHAQEKITPIANKILKELNSIKNDFFKALNKPENLMIKDPNILKQTATAFEKLENTLKNILGNQASKIQDKENILENLLSNKENMKEEKLNHNTKNQDEEKHIKASKEDENLDSGIKTHEEDTQDTKNDIQNNETENKPDNDIKNSTPNQEKIKDEKQEKSKENIKENPKFYETKTENKTSINTNTNTSNPNTNNTQNLNNTQNIQSNNNQTMQNIFKNQEFIKQNIVKNLAFNVENLDLEQVQDLSKNLSNLSRRLNESLKELEPYTQNAKLNQAELKNLEHKLNLSIKDLAQIKPKTEQDIAESLHHDVKSTLLQISNLAKNEGNEAVYNQANRLLAQIEINQLMSLANDSINTYLPFSWDDLNDSKIMFRRGKKDKFFAQIKLEFAKLGDLEILISLNNEKYIDINIMAENIEFRKTIYENAHELKRNINKAGLLSANFFVGDIIRSKFDTRNMKNLDLEMGMDKKV

SEQ ID NO: 54441 - protein, 282 aa, Campylobacter jejuni
MEILKKLYKFSQSWTGTVVIVLLVIFFFIQAFVIPSGSMKNTLLVGDFLFVKKFSYGIPTPHIPWLEIPVLPDFNKDGHLIKAQGPQRGDIVVFRNPRNEKEHFVKRCVGTGGDRIVYANKTLYVRMHEGDEFMKEHYPNDLVTLGGQIYVKEPYKQKGIHYDPKKDIESDILRFLSIGDFAMSPAYIKELGNHIGFSGGNAYVFDVPENEYFMMGDNRDYSYDSRFWGSVPYRLIVGKPWFVYFSWDKDKNVRWERIGRFVDTLENDEQYIHDHDDEDKLS

SEQ ID NO: 54442 - protein, 418 aa, Campylobacter jejuni
MTYLEIEGTNHLSGNVTISGAKNAALPLIVSSILAKNEVKINNVPNVADIKTLISLLENLGAKVNFQNNSALLNTNTLNQTIAKYDIVRKMRASILTLGPLLARFGHCEVSLPGGCAIGQRPIDLHLLALEKMGANIQIKQGYVVASGNLKGNEILFDKITVTGSENIIMAAALAKGKTKLLNVAKEPEVVQLCEVLKDAGLEIKGIGTDELEIYGSDGELLEFKEFSVIPDRIEAGTYLCAGAITNSKITLDKVNATHLSAVLAKLHQMGFETLITEDSITLLPAKEIKPVEIMTSEYPGFPTDMQAQFMALALKANGTSIIDERLFENRFMHVSELLRMGADIKLNGHIATIVGGKELNAADVMATDLRASSALILAALAAKGTSKVHRIYHLDRGYENLEEKFKDLGAKITRLEE

SEQ ID NO: 54443 - protein, 290 aa, Campylobacter jejuni
MGVFLVLLGGIFWAISGVLAEYLFKNNYSVDWVCFYRLLSTGLILIFLSFKAQKILVFTNLKESLSICMFGFFGLLLTQFGYFKAIYYTDAGTATMIQYCAPLIIMLYLCFKNKKFPKLIEIFALILIIFALFLLATKGDIEAVVLNYWGIFWAVIGAFGVAFYSLSAREVILKYGLFWIMGWASLFASFVFLLILQFDKGLIHYAFNLKAFFSMGGIVFIGTIGAFCLYLKGVEYIGALRASMIASIEPVAAALMSFLFLKTRYSLLDIFAFVLIILSVILNAKKTKVS

SEQ ID NO: 54444 - protein, 594 aa, Campylobacter jejuni
MTLENYAVFGKYFYHDLKHTLKAFNHKESKKCFKFIEKYKNDFYILMLTDYELYRYFQDKNFTSKKAYLSVFAFKKRKKFQKEDIDEEKFIPEFINFLDQDNYKENFIKVKEAISKGRVYQINLTQNFKFHSKMDSFELFKLLLSRQDTEFKAFIKDETREILSFSPELFFKTKKRKIFTKPMKGTIKRDKDPIKDEENKIFLQNDTKNLSENVMICDLLRNDLSKIITKKSLKTKLFEIQSHPTLHQMTSRAQGKLKKNISLHQIFKALFPCGSITGAPKLESIKFIEELEQRDRGIYCGTIGLIHKNKNKFSVAIRTLEKQDEIYTYSTGSGLVWDSKFKDEFEELKLKSAILNPCDFHLFETMYFKNSQILFLKEHLLRLINSALKFNFNTHKLFKDFYNILNQKSSYKKYQNFTLFKLDEKIFHKKHSLFYNFPLPFKNPHKEGILKLILYKDGRYEFQQSALKQNSNDILLLSDDKINSKSDNLYHKSSLRTFYNQHSYKWQQNLCYDIAFFNEKDELCEGSRTNLILEKNSQFYTPQIQSGMLNGVYRNFLINLGLIKEKALFKQDLFEAENIYCINSVRGLKKVKLQ

SEQ ID NO: 54445 - protein, 354 aa, Campylobacter jejuni
MKYPLDCEENFEKSFLFWLAKYVKFKLNSLSNKELKNPQALAEVNFALTKGVKNIDELDALAKKARNAGLSGVNTYFNPLKKVFEYLNFYKLYSLKQIDEELIVEVLASITGALSDASKKNYRIAVINFFDFLDKQNEEDEKAHIFDINLKNWAGIAGSKGVKLPEFMSKEELKKFLDAIENADFKNNTIRNKLIIKIIIFTGIRVSEAINIKMGDISEENDLYIIRIRAKGNKYRVVMIKKELIYDLLKNVSINYISKDALLFVNKKGTPLTQSYVSRIVEQLLFRAGIRKQKNGAHMLRHTFATLLYKKQKDLVLVQEALGHASLNTSRIYTHFDNDKLKLAAQVAKELSDS

SEQ ID NO: 54446 - protein, 213 aa, Campylobacter jejuni
MRNFFCKFVLALVFYSSFALANNSFITLNPSLPSSENSVIEAFSYKCIHCYNHHKFGTLEKLREAFPNLHFKLYPVSLMNGEFSKEMNELFTFAQYKDEQNGKDASYSDSLSHKLADVYFVSYFLNKQRNFSNLDEFYDIGLKAMNVNKNEVLNFLNTPKAKEILSEFQRANDIAKTYGTPAFVVNGKYQINPSAINSMQDLEDLVKKLSNMK

SEQ ID NO: 54447 - protein, 136 aa, Campylobacter jejuni
MLFTKASEYALLSLIYISQKETPQDVDSLALELDIPKSFLAKILQTLAKDGLLKSFKGAKGGFVLIKEPSQYTIKEIVNSAEKKDISVFECSGGTCPNNKEENCTLMPMLVNLQNKVDEFLDSITLEDIMKNNGKK

SEQ ID NO: 54448 - protein, 90 aa, Campylobacter jejuni
MALDSAKKAEIVAKFAKKPGDTGSTEVQVALLTARIAELTEHLKIYKKDFSSRLGLLKLVGQRKRLLSYLKRKDYNSYSKLITELNLRDK

SEQ ID NO: 54449 - protein, 946 aa, Campylobacter jejuni
MLAPGMGEWVYKANLFLFGEFAYYYPFFLFILNYVYYKRNYKLANFTRRELFGIGFAFFSSLLLFAVFYPNSGYILELAYAIFSTILGHTGSGIFALLLLLFSLVLLFPKFAKEILKIELDFTYLLKVEQAFKSLLMRVFGGENEKEDVGKSEPIVPKLNILQDSIYGNLQINKKGETNNLEQIIKDSNINASKNSITTAKENFEKLKNQILDETIEIDKQSLKESRSFVHEHSQQVRNFAQKASKMSISLDEDFNFISEEEVDMIPERFLKPKKLEDIKQIDTNKNLDEPSYKRKNIEIPVSNQEVKPKIFTKELELRENLIKKEKLEQEYKAYQNEILENKVKQEIKKLEEYDAINSSDIIEGNKYSFNSPKTIKTETEESDKINENKNLDKADNIFEFAPIVEELNHPYIEPTPIKNINEIVIEEKNTLDFIQNTETKIDNEKTNDQEIKLQKAVLAKEIAINQALLREIEQGEIEKPKDFTLPPLDFLANPKEHKQEINESEIDKKIYNLLEKLRRFKIGGDVISTYVGPVVTTFEFRPSADVKVSRILNLQDDLTMALMAKSIRIQAPIPGKDVVGIEVPNDEIQTIYLREILQSEVFKNAKSPLTIALGKDIVGNAFVTDLKKLPHLLIAGTTGSGKSVGINSMLLSLLYRNSPKTLRLMMIDPKMLEFSIYNDIPHLLTPVITDPKKAVNALSNMVAEMERRYRLMADAKTKNIENYNEKMKELGGEKLPFIVVIIDELADLMMTAGKDVEFYIGRLAQMARASGIHLIVATQRPSVDVVTGLIKANLPSRISYKVGQKIDSKVILDAMGAESLLGRGDCLFTPPGTSSIVRLHAPFASEFEIEKIVDFLKDQQSVEYDESFLKDQQSVGVTTNESFDGEADELYEEAKRVILEDGKTSISYLQRRLKIGYNRSANIIEQLTQNGILSEPDAKGQREIL

SEQ ID NO: 54450 - protein, 643 aa, Campylobacter jejuni
MALIDLIEASKKFGDKIVLNEVNFSANEGEKIAIIGKNGEGKSTFLKTLLGALPLDSGRIIRQNGKSIAMLSQTVDFNANLSVKEAIKQELVEIYNTLEEYEILHKKLEEDPSNKDYLQKIDTLMTLIDSKDAWSIESKIIRVLKEFSLLEYENRIISTLSGGEIRRVGLCILLLKNPDILLLDEPTNHLDVYMTSFLEELLKNSKMCVIFISHDRYFIDAIAHKCVEVEQGKLSIFKGGYANYLEKKTQILQSLAKSHETLLKQLKSEEEWLRRGVKARLKRNEGRKERIFKMREEAKKNPGAIKRLKLEISRAALNFNGEKTINRKKMLFELKNISKNINNKNLFKDFSTRILQGERIAIVGRNGCGKSTLLKILLGQIKQDSGEIKRGELKIGYFDQARSLVNSDKSLLEIFCPNGGDRVEVRGKNMHVYGYLKNFLFPKEFLDKSVALLSGGEKNRVALALLFAKEYDVLILDEPTNDLDIATINILEEYLLSFEGAILLVSHDRYFVDKIATKLYAFEGNGYINILHTLYTEYLENEKEIEELDNFALELQTQEQNNNQKEKSSKKLSYKENEILKNHPEKIDFLEQKIAKLNQDLSDPNVYQEIGINKLYQELEVMQKELEILENEYFLVLEKSENL

SEQ ID NO: 54451 - protein, 556 aa, Campylobacter jejuni
MSEVNKKVQDGVDDYLEEEDFGQLLEAFDKSREEATTEGVIVEIKNDEVYVDIGKKSEGILALSEIQGDNSKLLFNVGDSIKVAVMGSRGGRSLLSHKKALRKEKVIEFIKNYQENQDDIFTVKVVGKNKGGLIVVDENDVEFFLPKSQYGFKETNNIIGKTFKVKIIKIDKDEQSIIVSRKKTLDDERRKRKELINNVAQQEDLIEGIVKKITTYGMFVDVGGVDGLVHYSEISYKGPVNPGTLYKEGDKVPVKVIKYDKERKHLSLSIKAALPDPWSEIKDTLDIGDTIKVIVSNIEPYGAFVDLGNDIEGFLHISEISWDKNIKNPKDYINKGQEIDVEVIEINPNERRLRVSLRNLLSRPFDEFMKSYKIADVVEGEITSVTSFGAFVKLGGIEGLLHNEDASWDRNDKCKDKFSQGDKIKVKIIKIDEENQKISLSTKELSSSPVQEYAKIHKVGDIVKGAIRDIKDFGVFVELSKNVDALIHKEDISTSMLENLKIGDDIEAAIVFIDEKKNRIRLSVKNLVRIKEREVLNEINNDDKVTLGDIIKDQLA

SEQ ID NO: 54452 - protein, 773 aa, Campylobacter jejuni
MIITKSWLNDWLELEEISSDKIAKTLNSIGIEVDRVGALKAPDKVVVGYVKEKIKHENSDKLSICQVDIGSETLQIVCGAANVDAGQFVAVATKGAIMSNGMEIKEAKLRGVDSCGMLCSSLELGFEKINEGIMLLDESIGKLELGRPLNTYEIFNDELIEVELTPNRGDCLSIYGIARDLAAALNLNLKEPKPFKESENVLGIGRILRLAAEKELNGLYNYRAIGLKEEIQTNLLLSLRLAQIEGLGKNSIENLLNYATHSTGVLFNAYDLSSFSEKDEEFTINLSKQVHGETKVSYKDKLLSFSGIFQNNESRCKDDSKIIIIEANYTDPLVIADAKIYHKDQDEKMLYRSFRGSEPKLNLGMDFLLGIFEQIPNLVIYSSSQQILTDKELPIIPISIEGISDIIGQNVDKDEVLKILKKLGFELILSGEGLINVKAPLHRPDIKNLSDICEEVVRIIGIDNIASKGLEFIEKNRLNSAYKNYIEFLNLRKRAVASGYFESLHYVLDNGEELKRLGFDSVKLKLINPITAELNTLRTTLLNHLLNAASLNAKNSKKIIKLFELGAVFNVNNQELNRIAFIHSGLKEEAKISNKAKPESVQFYDFLLDIKNIIGDFKLKSSKYNILSPYEQADIYLSDIKVGFIGRLHLKIENERDLPKTYICELDLDLIRQDFKIAKPYSKFPAITRDLSVLIPKGFEYNQIKNCIEELNLEILENFRLVDIYSDENLKEFYSITISFSFRDINKTLEDNQVNECMDKILNTLKNLGLDLR

SEQ ID NO: 54453 - protein, 330 aa, Campylobacter jejuni
MQNFIEQIQKCENLNDLEAIRISVLGKKGILTEGFTKLKELEDEAKKEFAAKLNAQKEIFNEAYLAKFKDLENLALEERMKQDALNFNYFDESITTGALHPVMSTMDKIIEYFIALNFSIEKGPLIEDDFHNFEALNLPKSHPARDMQDTFYFDDKRLLRTQTSPVQIRTMLAQKPPIRMIAPGAVFRRDFDITHTPMFHQVEGLVVEEGQKVSFANLKSVLEDFLRYMFGDVKVRFRPSFFPFTEPSAEVDISCVFCKGKGCRVCKHTGWLEVLGCGIVDPNVYNFVGYENVSGYAFGLGVERFAMLLHQIPDLRSLFEGDLRLLEQFR

SEQ ID NO: 54454 - protein, 242 aa, Campylobacter jejuni
MIEVKNLQKKYGELEVLKNINTTISKGDVIAIIGPSGGGKSTFLRCINRLELADSGEILINKQNILDKEIDINKIRQKVSMVFQHFNLFANKNVMENLCLTPIKTGILSQEEAIKKAKLLLAKVGLADKENIMPHKLSGGQKQRIAIARSLMMNPDVILFDEPTSALDPEMIGEVLSIMKDVAKEGLTMLVVTHEMGFARNVANRIFFMDKGKIAVDASPKEVFENPSNERLREFLNKVLNH

SEQ ID NO: 54455 - protein, 155 aa, Campylobacter jejuni
MFNIVLVHPRIPQNTGSIGRMCFNAGFKLHIVKPIVFDISQKAVRRAGLDYWDKLEPIIWENLEEFLNENMIYKNRFFFATTKSQKAYFDAEFQKNDFLFFGSESYGLPMELMQLNWENAITIPMKSYGRSLNLATSVGIISYEALRQNFRNFAS

SEQ ID NO: 54456 - protein, 328 aa, Campylobacter jejuni
MSLIKIDQKAYEYNLRHIAKKIGSFQRLICVFKDNAYGHGAKLLAPLAKNLGVSFVAVKSEEEAREIEEFFENILILSHRPHGNENSRFIYALNDISQVKNYKQDIKIHLKIDTGMHRNGICVENLEHAINLIQGSDLKLTGMFTHFASADEMDGSFFVQKENFQKAKKIVKKYFSNLLFHSYNSAALFRGKIPEDEYCRVGLVQFGYGDSNLKRVLSLYAHRLSQRILQKGQSIGYGGIFTAAKDMEVATYDLGYADGLFRYNGRGELVLGNGKAMLGKMSMDSFSCENSGEEICVFKDADIWADFFHTINYEILVKLNPNIQRVLV

SEQ ID NO: 54457 - protein, 299 aa, Campylobacter jejuni
MKVHEKVSELIGNTPIIHLKKFGINVFAKCEFLNPSHSIKDRAAFEMIKDALDSKKINQDTTIVEATSGNTGISLAMICADLGLKFIAVMPESMSLERRKMITLFGARLELTPANLGMKGAVDKANEILLNTPNSFMVSQFENISNKNAHRKNTALEILRDLDNELDIFVAGFGTGGTISGVGEILKEKLEKVHIVGVEPLNSPLLSKGEAGSHKIQGIGANFIPAILNKEVIDEVITVSNEDAINTAKELAKSGLMVGISSGANVFAASMLAKKFPDKRILTMLNDTAERYLSTDLFA

SEQ ID NO: 54458 - protein, 98 aa, Campylobacter jejuni
MTKADFISLVAQTAGLTKKDATTATDAVISTITDVLAKGDSISFIGFGTFSTQERAAREARVPSTGKTIKVPATRVAKFKVGKNLKEAVAKASGKKKK

SEQ ID NO: 54459 - protein, 137 aa, Campylobacter jejuni
MRDMGEPKLKIVAMPSDTNPAGNIFGGWILSQIDLAGAIAARELSPERVVTISMDKVVFKEPVFIGDIISCYSKVVNVGNTSISVEVEVTAQRVDSQGCTSCINVTSALVTYVSVTRDGKKNPISEELKRIHGFLNA

SEQ ID NO: 54460 - protein, 65 aa, Campylobacter jejuni
MNFKKFKYYYEKAERFFHPLVGLSSYDKYLEHMKQKHPGKIPKTRGEFFKECLDKKYNSGGLNKC

SEQ ID NO: 54461 - protein, 309 aa, Campylobacter jejuni
MRGYKIFSGSANVEFARQVSKYLSLPLSDAGVKRFSDGEISVQIDESVRGKDVFIIQSTCAPTNDNLMELLILTDALRRSSANSITAIIPYFGYARQDRKANPRVPITAKLVANLIQAAGIDRVATIDLHAGQIQGFFDIPVDNLYGSIVFNDYIKAKHFKNAIIGSPDIGGVARARSVAKHLGLDIVIVDKRREKANESEVMNIIGDVKDKEVILVDDIIDTAGTIVKAAEALKEKGAKSVMACCTHAVLSGKAYERIASGVLDELVVTDTIPLKEQLPNIKVLSVTPVFAEVIRRVYHNESVNSLFI

SEQ ID NO: 54462 - protein, 145 aa, Campylobacter jejuni
MLREKIYIASDHAGFELKEKICVFLKEKNIIFNDLGTNTCASCDYPDYAHLLAEKINKRSFGILICGSGIGISIAANRHKNIRCALCHESLSAELARRHNDANVLALGGRLIGVELAIDIIEKFIQTPFEEGRHMQRIQKIEVKI

SEQ ID NO: 54463 - protein, 110 aa, Campylobacter jejuni
MFTNWLVLTILICATIYLIVMLFYYKTLLNKEKTSKDFIKNNLDDTEIVIRKLQIQLQRSLGNIDILTEELNKIKADLTSLRTRNSQYRLENDKLRQRIKELEAKIEALL

SEQ ID NO: 54464 - protein, 483 aa, Campylobacter jejuni
MKFELNDKKLDAIKADFELVFIQDKNLKIFNKEKDFFKLNNYKGEGALLDLNNKKLYLELKSLAYEDIRLSLCTAYKTLEKLNIKSVKLPSIIGDCVVRSFASLVEGVLFGAYKFDKYKSEKKTSTLEKFIISNEELNGKKFNKDEAKIGLERGEILANATNFTKNIVNEIPEIYTPLKMAEDAQNLAKENKNIICKIYDEKFLAKEKMNAFLAVNHASVHPPRLIHLSYKAKNAKKRVVFVGKGLTYDSGGLSLKPADFMLTMKADKSGAAAAMGIIKAVAELALDLEVHCILGATENMIGGNAYKPDDVLISREGVSIEVRNTDAEGRLVLADCLSFAQDLKPDLLIDMATLTGACVVGLGEFTSAIMGNNEELQNDFYLSSKKSGEYTTILHFNPHLRELIKSNIADVSNTASSRYGGAITAGLFLDKFIRKEYKDKWLHLDIAGPAYTEKSWGYSSFGAGGAGVRMCVNYLIQILRKAK

SEQ ID NO: 54465 - protein, 367 aa, Campylobacter jejuni
MSLSVGIVGLPNVGKSTTFNALTKAQNAQSANYPFCTIEPNKAMVEVPDLRLNELAKIVKPERIMHSLIEFVDIAGLVKGASKGEGLGNKFLSNIRETEVILHIVRCFDEENITHVEGGVDPLRDVEIINTELILADIEQLSKKIEKLTKEAKANQKGAKESLELANSLLDHLNKGLAASSYPEKESEIYQALIKELRLLSAKEVIYGANVDENGISEDNDYVKALKEYAKKNDHEVIKLCAKIEEELVGLSDEESHEFLSSLGVNESGLDQIIRTAFAKLGLISYFTAGVVEVRSWTIKKGWKAPKAASVIHNDFEKGFIKAEVISYEDYIQYKGENGAKEAGKLRLEGKDYIVLDGDVMHFKFNV

SEQ ID NO: 54466 - protein, 460 aa, Campylobacter jejuni
MKNEMWSGRFSGASDELLKEFNASLNVDKTLFNEDIQGSIAHATMLESCGILKKEELDAIIKGLEQVRSEIEQGKFIFDIKDEDIHMAVEKRLSEIIGSEIGGRLHTARSRNDQVATDFKLFVKKSHIELIKLLKELIQTMLEHAKVHKKTIMPSFTHLQHAQPVSFSFYILAYAFMLMRDIKRLQNSLELADFSPLGSCACAGTSYAINRELSAKILGFKDIMPNAMDGVSDRDFALDLLYDIAVIFTHTSRLCEEMILFSSSEFSFITISDSFSTGSSIMPQKKNPDVCELIRGKTGRVYGNLISLLTIMKALPLAYNKDMQEDKEGIFDSVKTAKDSLIILNAMLKEIQINKENMLNACKKGHLLATDLADYLVREKNIPFRKAHFIVGNVVAQAEAQGIDISEIKDLSKIDPVFDEKAMELLNFEFSLNSKQSEGSSSIASVEKQIQILEGFIQNL

SEQ ID NO: 54467 - protein, 524 aa, Campylobacter jejuni
MKKFDKLGLDNIKEIFHNLSYDELNAHEKANNEGLSTDNDTFCVDTGIFTGRSPKDKYFVKQDPSSKYIAWGKVNQPITKELFDKLLTKAKQELSGKKIYVQDVFCGASLQSRKAVRFVTEIAWQAHFVKNMFIRPSQEELENFKADFIVYNACKCINEDYKQDGLNSEVFVIFNVEENIAVIGGTWYGGEMKKGIFSMMNYWLPLENKLSMHCSANVGEKDDVALFFGLSGTGKTTLSTDPKRRLIGDDEHGWDDEGVFNFEGGCYAKTINLDPEHEPEIYGAIKRNALLENVVLRADKSVDYADASKTENTRVSYPIEHIENHEPSLKAGHPKNIIFLSADAFGILPPVSKLSKEQAMYYFLSGYTAKVAGTERGITEPQATFSACFGEPFMPLHPTVYARLLGEKIEKHEVNVYLVNTGWSGGSYGVGKRMSIKATRACINAILDGSITKCEFENFEVFDLAIPKALEGVESVLLNPINTWLDKNAYIATRDKLAHMFIQNFKRYEDVKEGIEFSKFGPKI

SEQ ID NO: 54468 - protein, 599 aa, Campylobacter jejuni
MAKKFIDVMDTSFRDGFQSVYGARVLMDDFFPAVEAAKEAGITHFEFGGGARFQSLYFYLNEDAFTMMDRFRAIVGKDANLQTLARGVNTVTLDTGSSELIDLHAKLFAKHGTTTIRNFDALNDINNLKFSGECIAKHGLKHEIAITLMDLPPNCKGAHDVPFYEKILKEILAAEIPFHSICFKDASGTSNPNKIYETIKMARKILPQDMHIRLHTHETAGVSIACYLAALEAGVDGIDLAAAPVSGGTSQPDILTMMHALKGKDYDLGGLEEEKILKYEEVLKDCLKEYFLPPEATMVNPLIPFSPMPGGALTANTQMMRDNNILDKFPQVIHAMREVVEKGGFGTSVTPVSQFYFQQAFNNVMFGSWKKIAEGYGKMVLGYFGKTPVAPDANIIELASKQLNLEPTTELAINIADKDESKSIAYTKTLLEKEGIETSEENIFVAAACKEKGIAFLKGEAKVNIRKLASMPKPMSADENKFTVAVNGNKYHVEVSYGFDKDVNVKSVKKVEENKNIISSNSTSSVDAENEVLAGISGNVFKIYVNEGEEVKSGQAIMVLEAMKMEIEVNAPKDGIILELCIKIGDTVNEGEVLAIYKN

SEQ ID NO: 54469 - protein, 112 aa, Campylobacter jejuni
MKKVLFLLLACTAVAFAAETNAPVEQEAINVWIKAFSVLAAGLGLGVAALGGAIGMGNTAAATIAGTARNPGLGPKLMTTMFIALAMIEAQVIYALVIALIALYANPFIVLQ

SEQ ID NO: 54470 - protein, 261 aa, Campylobacter jejuni
MSLFTQKNKNFKPLKPLSKSKIITNLILLILFLILFCYCSFSISAYHFDFSAIATYKEKFLQGFLNTLIISFFSLLLSIILGGVFCAFSLSSIVFLRFLSTFYIELVRGTPLLVQVLLIYYIIANNLGLDNRYVAGVIILSCFSAAYLAEIFRAGILSISISQLESARALGLKEMQVFAYVIFPQALKNILAPLSGQFANLIKDSSLLSVIAVNELTQSAQEINSYTFATLEAYVILAITYLVLTLPISIFSRYLERKCQK

SEQ ID NO: 54471 - protein, 401 aa, Campylobacter jejuni
MNKSVLKYLLFKYLRFDKEQPFINLSMLLAFLGVCVGLCVLLVAMAIMNGFDKEFEKRFFVMNYPITILPKFYAPVNDEFIDELRKTFPNLLFSPYLSTQVVVKGDNRFEGGVLFGVNFNDEKKINEVVAKALKDENLSGFDILVGSALTDEFGLHKNDKLSLIFSNLNPSGFSLVPQTKRFDVKARFTSGLAFYDKAYMYTDVDALKKVLGIPKNPNYDGIHVYSDNAFKDVEKIKSYLKDDYAVVGWWEQNKNFFSALELEKRALFIVLMLIILVASLNIVSSLLMIVMNRRSEIALLLALGASKNEVKKSFFALGMLIGGGGMIVGVVLAFFALWLLGNFDIVTLPVDVYGTSKLPLDLSLMDFSLTIVGALIIIALSSFYPAKKATQINILDTLRNE

SEQ ID NO: 54472 - protein, 862 aa, Campylobacter jejuni
MFLNALKAVFGTKNDREVKKYFKRVAQINALEGNYQNLSDDELKAEFAKFKEQILSGEKNENDVLNDVFAIVRETGKRTLNMRHFDVQLIGGMVLHDGKIAEMKTGEGKTLVATLPVVLNAMSGKGVHVVTVNDYLAKRDAEQMSAIYNFLGFSVGVVLSSQNSDIEHKQAYDCDITYGTNNEFGFDYLRDNMKFSKAEKVQREHNFVIVDEVDSILIDEARTPLIISGPTNRTLDGYIKANEVAKQMQKGEAVLPPAKPEGDFVVDEKNRNILITEAGIAKAEKLFGVENLYSLDNAILAHQLDQALKAHNLFEKDVHYVLRNNEVIIVDEFTGRLSEGRRFSEGLHQALEAKENVKIQEESQTLADITFQNYFRMYNKLAGMTGTAQTEATEFSQIYSLDVISIPTNIPIKRQDKDDLIYKTQNEKFKAVIEEIKKANAKGQPVLVGTASIERSEVFHNMLVKEKIPHHVLNAKNHEQEALIIQDAGKKGAVTIATNMAGRGVDIKIDDEIRALGGLYIIGTERHESRRIDNQLRGRAGRQGDPGISRFYLSLEDNLLRIFGGDRIKSIMDRLGIEEGESIESRIVTRAVENAQKKVESLHFESRKHLLEYDDVANEQRKTIYRYRNELLDENYDIRAKISQNIAEYSANVMNDYMLDESGSNVNFENLKAKILYECSTQISEKDFENLSVIEMQDKLSQILENSYNEKMLRLEIKELRNIERILYLQVLDNAWREHLYQMDILKTGIGLRGYNQKDPLVEYKKESYNLFLELVNRIKFDSIKLLFSVQFNQEEAQNLENKANEENEKLLQSSVEMGASEDNLGEAEFKKVPRNAPCPCGSGKKFKECHGKSGPKQGILA

SEQ ID NO: 54473 - protein, 728 aa, Campylobacter jejuni
MDKETIKAHKISDEEYAQILEILGREPNLLELGVISAMWSEHCSYKSSKKYLNGFPTKAPWVIQGPGENAGVIDIGQGMAAVFKVESHNHPSFIEPFAGAATGVGGILRDVFTMGARVVAGLNSLKFGDIHDEKCGKHQKYLVKGVVNGISHYGNCMGVPTIGGECAFDECFNGNILVNAFALGVCKSEDIFYAKAEGVGNPVIYVGSKTGRDGLGGAVMASDSFNEESKSLRPTVQIGDPFSEKLLMEACLELFKTDYIVGIQDMGAAGLTSSSFEMAGRSGSGMKLYLDKTPMRESGMTPYELMLSESQERMLICAKKGYEDKVIEIFKKWDLDAVVMGEVTNTGKMELFWHDELVGLIPIEPLSEKAPILSRPTSEPKYLSEIKNYKFELKSSVQELFIQMLQNENINNKAFIYDQFDSSVQTNTIKADGRLGASVIRIKENGASVAMAIECNSRLNYVNSKIGAALAVASAGRKVACTGAKPLAISDCLNYGNPQNPEVMWQFAQGCEGIKEACKELNTPVVSGNVSLYNETEGVSIYPSPTIVSVGVLEDANKTLKASFEKENLSVYLLGESLGEFSGSMVMKIQDKKVSGSLKELDYKAELALWDLLYKANQNSLLECANSVGIGGIAMTLAKMFAISSVGANLTSDFDDEKMIFDESASRAIIGLSKENEEAFLNLAKEFGVKAYKLGVSTSQKHFKLDSIELSKAELDKLYFESFKEQIQ

SEQ ID NO: 54474 - protein, 442 aa, Campylobacter jejuni
MSDTIAAIATAHGVGSISIVRLSGERALEFALKLSHKTKLTPRHATFTKLFNQNNEIIDEAIMIYFKAPYSFTGEDIVEFQTHGGFSVSEVLLEELVSLGARLALAGEFSKRACLNGKMTPLKALNIQDLILSKSALAAKIIARNMQGNLGELLEKIRTDLVKTLAFVETSIDYADDDLPSDLLEQISTMCEENSKILKEIYTLSQSKKGLIEGFKIAIVGKPNVGKSSLLNALLSYERAIVSDIAGTTRDTIEENFKLGTHLLRIIDTAGIRESKDVIEQIGVALSKKSLEDADIILAVFDASRVQDKEDEKIFDLLANTDKKIFWILNKSDLENVFKNTQNKNFIKLSAQKDITLLKEELQNYLNSFDSEGIMVSSLDLINACKISSEAIFRAKGLLEESSLEFFAFELNLAINELARFTKDFQRDEILDEMFGNFCLGK

SEQ ID NO: 54475 - protein, 528 aa, Campylobacter jejuni
MNNSNNIFQQKRILLAVVISFLFFVIYDYFFIPKQPLKIEQNITQKNQQNTSINNTPNIQNATTNTPSAALVSQDSVISKVQSKHFEAQIDSFGRISAFYLKDRKYQNEKGEFINLVSKENSPYPLEMRFSDPSINSEAFKIPYVANASNLFVDENGSQVLKLTQNLSGLKIEKDITFYPKGNYEIEVKLSKNANYFISPGYRPNIAVDSYTVHGALVMDNKETIETYKDGDVEKDESANNVVMTSAFDRYYATFFYNFDKPLNVAISKDANQNPIVFAYSDNEFKAGGYIGSKEHVILRSIDPRLEAVVEYGWFTFIAKPMFEFLNFLHQYIGNWGWAIVVMTLIVRIILFPLTYKSMISMNKLKDLAPKMKDIRERYKGDPQKMNMHMMELYKKHGANPMSGCLPILLQIPIFFAIYRVLLNAIELKAAPWAFWIHDLSVMDPYFILPILMGATMFLQQLITPMTIQDPMQAKIMKFLPVIFTFFFITFPAGLTLYWFVNNLCSLVQQWVINKIFAKEHHKKTSGA

SEQ ID NO: 54476 - protein, 108 aa, Campylobacter jejuni
MKNFDKFSTNEEFSSVYKVGKKWHCEGVIIFYLNSYEKKIAVVASKKVGKAVVRNRSKRILRALFAKFERYLQDGKYIFVAKNEITELSFSRLEKNLKWGLKKLECFK

SEQ ID NO: 54477 - protein, 44 aa, Campylobacter jejuni
MKRTYQPHGTPRKRTHGFRVRMKTKNGRKVINARRAKGRKRLAV

SEQ ID NO: 54478 - protein, 762 aa, Campylobacter jejuni
MEKFCFKLSIVTFLSINAFAATQANTTDNRNFNIPEHYFNDNELYDKTNSTYKKLQGINYYAKSSKQYINNITLIYNNPKPNITNINDLNFKHYLLTPDMREDEVLSFKARHGVNTAGHSIKTVRVLPFLITAKTDHADASYNKLILEQGELSSVFYLKPKDTHIKNPSNSKSNQRMNFLMSSTFTHYGNASYNQTILQKDAHISMGVENTYDLALNGAPYLIGAIATYGDSTNNSLNIEAGSSVEFFTSLPKKDKNGNNTFDERITHLVGGLAYQGNVKNNKIFIKDANMIIHGPSKAYASLAAAHISAGYIDSGTDKNFQASKNLLDIDGFNLDMYMNHDKQPLAYNSVLFADFWGGKTEQGQALDNTINLKDIKNLKKDKNNENIFAQALFNFYAGASNNGEANYNTLNIELKHPLEIANNFLGYNQHSFYGGFATKGANHNTINIKNDLTTTDLSQSYKDALNIVAARTLEGSADYNKVYINNSMSTLPVYIYTAKKNILNNQDFYPSSANNNEVVIKDFASFRNLTVLTEAKEASYNTINYNNVQSITDVSNIDKGSKIIIRALDKANHNTIDIKNYSSNAADNAYLIMAYNEAAYNKIIINDTLFGVASDKREGILSIIAGLSNNAHDNTLIINNLNLDEYKNNNSIFIAPSAITGLSEAKSYNNTLYIGGNLNIFKNTFIDILAGALVHYEDNYSASNAAAPSDISLSKNNRLILNTKVEARIINNFEHYYLIVSNKINTTPLLKSYDAPINISS

SEQ ID NO: 54479 - protein, 574 aa, Campylobacter jejuni
MLEQSPYKEDANSKNYNNTLKVKDGVIIIDHSNTSDDNNSKTINTKKNTQKNQPNLSNDNTLKTKTPNSNTPSLKNTSKEESIHKVSFSFHITNKNINFKDLGLDEQVLQEALNDYKKESISVQDLQDIANIISYYVQVSGYPAATAYIPQQELKDQIQINITLGVLGKYVVQNNSSVRDYAIESKLPNHKGEIITTKLVEDAVYKVNEMYGIQTLASLKAGDNPGETDVVIETTPSDSFVSVLFYGDNYGIKESGRYRDGASMSFNNIAHQGDSLNAYLQRSDEAQTNYSISYTTFLGNLKITPSYSKRNYALGGAYKNANFIGTSENLGIDLKYPLWITTYNSFYLTSSYYHKKLSNSRLNIMTIDKSSDTISFSIEGVYNGISNDSFSYSANVSYGNVKDGGTTILGMSSKTDGDGFGKFAKLNVNLNNAYFFNDTFTHLFSLNYQQVVNGATLDSSETISLGDPYGVRAYNNGDGEGDNAVVASFGLRMATPLKDFYITPFYNIGYSWYENDSKLYRASETNYMDAYGLQLLYNKTGNFYVKLDLARALKKYKLDDDYSSKAYVSFGKYF

SEQ ID NO: 54480 - protein, 327 aa, Campylobacter jejuni
MFKRFRRLRLNENLRSMVRENSLSVNDLIYPLFVVNGTGIKKEISSMPDVFQMSLDEILKECQNVVNLGIKAIILFGVLENEKKDSCGSDALDDEGLVARSIREIKKNFPDLFIISDLCFCEYTDHGHCGIIDPKIKSVDNDATLEISAKQALVHARAGVDMIAPSGMMDGVITTLRKALDKEGFENLPIMAYSTKFASSYYGPFRDVAESAPSYGDRKSYQMDFANGKEALEESLEDEAQGADILMVKPALAYLDVVKEISLHSNLPLCIYNVSGEYAMLKAAKNAGVIDYEKVLYETIIAFKRAGAKLIITYHAKELAKMLKGEK

SEQ ID NO: 54481 - protein, 188 aa, Campylobacter jejuni
MIFKDYDFLQNYDLKNFEEKVKIYKELLSKFNRIHNLTHLKNIDENIFDSIKILDFYDFSKAKNIADIGSGAGFPVVFLAFLLQSNFHLFEPNPKKAAFLRTLKIECELPNLHIYKEKVQEYKNTFKADIITSRALMDVKPLLEICKNLKDENTVFILWKGSEIYQELENIKDYEIFENNLRRYCILK

SEQ ID NO: 54482 - protein, 622 aa, Campylobacter jejuni
MNAKTQEAELEELFQENAKDYITYEKLVKYLTKQPSASTTKKVQALMKKHKVQLFSAAEIAQMKNIEDAKRLQEEKQKLQDTSLENEFDLANENDLLEWSRSDSPVRMYLREMGQIALLNKDEEIEISKKIELGEDIIIDAFCSVPYLIDFILDYKEPLINRERRVKELFKSFDDEEKSDDKLDELDIDEDEENETELESDEENTKKNSKKEDERTLKVIEKFKALEKAKKDWLKTSKDKESGDELLDKLSIAFKKNILKEKLMDLGPTSKLISEIVKSMETALKSDEEFDKELKRLEYRLPMFSDELKKRHADILKDITKLSKEEITERALETTMVSTYMEIKKLFQTKEASEKSFDLEKSRLKEILEQIKRGKKISDEAKGRMAKSNLRLVVSIAKRYTNRGLPFLDLIQEGNIGLMKAVDKFEYKRGYKFSTYATWWIRQAISRAIADQARTIRIPIHMIETINQINKIIREHLQKDGKEPDVSVIAKEVGLSVDKVKQVIKITKEPISLEAPIGNEDDGKFGDFVEDRNSLSPMDHILKDDLKEQIDEVLDQLNDREKAVIRMRFGLMDDESDRTLEEIGKELNVTRERVRQIESSAIKKLKHPKVGRKLKNYIEGWK

SEQ ID NO: 54483 - protein, 373 aa, Campylobacter jejuni
MEFKLKHKDGMARVCEITTAHSTFLTPVFMPVGTVGAVKSLDANDMKNELDAKIILANTYHMYLRPTSKVVKDFGGLHGFTKFDRSFLTDSGGFQAFSLSKNSKHFNEGIEFKSHIDGSRHLFTPKSVLDTQYDFNSDIMMILDDLVALPATKERVKISVDRTILWAKEAITYHKNMQNKGIGIGQNIFGIIQGGTDYEERKRCALSLNEMPFDGLAIGGLSVGEENALMYETVQNLNPYLDENRPRYLMGVGTPEDLVENVERGVDMFDCVMPTRNARNGTFFTSFGKFNIKKAEFINDHEVIDSTCSCYTCRNFSRGYLNHLFKAKELTFFRLASLHNLHYYLELARKMREAILNNSFTQFKRNFYHLRGK

SEQ ID NO: 54484 - protein, 350 aa, Campylobacter jejuni
MMVRIKVSHLIFLIASIIFIFISPYIFGDYGLNIVNQIAIFIILAVSYNLINGVTGQFSLEPNGFVAIGAYAAALVLLSADAKNDQFFLDGPSSFILAIHSNSFILALIVAGICSSLLALILAFAVFRVRGDYLAIVTLGFGIIIKIAAINFPSITNGSRGLVDIPQFSTIYWTGGIAIVAVILILNIVYSKYGRAMKAIRDDEDAASAMGINTFWIKTLAFSTSAFLEGVGGGLLACLLTTVSPTQFDFLLTFQLLIIIVLGGLGSTTGAIIGAILVIGGSEWLRFLDELNIKIDSLNLDIQSTPGLRMVVFSIVLILVMLFARKGIMGYYELSDVIRGIKKRFKRSKK

SEQ ID NO: 54485 - protein, 343 aa, Campylobacter jejuni
MSKKQKIAIVGATGAVGEELLNVLDELDFPVESILPLASAKSVGSEVEFKGKAYKVKELTENVFKENPIDIAFFSAGGSVSEKYAKFAVESGAVVIDNTSHFRMEKDVPLVVPECNPEDIKDWKKTGIIANPNCSTIQMVQVLKPLNDAFNLKRVDVSTYQAASGAGKEGMQELVEAMQSFFAFKLDEFEPQTFPYTLALNLIPQIDVFMDNDYTKEELKMVNETQKILHKNLEVSATCVRVPVLRSHSEAITMHFEKEIDVKKAKEILKKAPSVIVIDDPKNKKYPMPLMTSDTNETYVGRIRADVYDKKILHLWCVADQIRVGAATNAVRIAQKWLELKNK

SEQ ID NO: 54486 - protein, 863 aa, Campylobacter jejuni
MENIFSKDSDIELVDIENSIKSSYLDYSMSVIIGRALPDARDGLKPVHRRILYAMQNDEAKSRTDFVKSARIVGAVIGRYHPHGDTAVYDALVRMAQDFSMRYPSITGQGNFGSIDGDSAAAMRYTEAKMSKLSHELLKDIDKDTVDFVPNYDGSESEPDVLPSRVPNLLLNGSSGIAVGMATNIPPHSLNELIDGLLYLLDNKDASLEEIMQFIKGPDFPTGGIIYGKKGIIEAYRTGRGRVKVRAKTHIEKKTNKDVIVIDELPYQTNKARLIEQIAELVKERQIEGISEVRDESNKEGIRVVIELKREAMSEIVLNNLFKSTTMESTFGVIMLAIHNKEPKIFSLLELLNLFLTHRKTVIIRRTIFELQKARARAHILEGLKIALDNIDEVIALIKNSSDNNTARDSLVAKFGLSELQANAILDMKLGRLTGLEREKIENELAELMKEIARLEEILKSETLLENLIRDELKEIRSKFDVPRITQIEDDYDDIDIEDLIPNENMVVTITHRGYIKRVPSKQYEKQKRGGKGKLAVTTYDDDFIESFFTANTHDTLMFVTDRGQLYWLKVYKIPEGSRTAKGKAVVNLINLQAEEKIMAIIPTTDFDESKSLCFFTKNGIVKRTNLSEYQNIRSVGVRAINLDENDELVTAIIVQRDEDEIFATGGEENLENQEIENLDDENLENEESVSTQGKMLFAVTKKGMCIKFPLAKVREIGRVSRGVTAIKFKEKNDELVGAVVIENDEQEILSISAKGIGKRTNAGEYRLQSRGGKGVICMKLTEKTKDLISVVIVDETMDLMALTSSGKMIRVDMQSIRKAGRNTSGVIVVNVENDEVVSIAKCPKEENDEDELSDENFGLDLQ

SEQ ID NO: 54487 - protein, 1005 aa, Campylobacter jejuni
MFKLAINRPITVLMFFLALMIFGLISAFSMSVNLFPNVSIPLIKITSKINGDLNFVESKVTKEIENALSEIDGVKTITSAAYDNFSVSVVEFKLGKNLEVAANDVRDKIGTLSLPSKPEIEKISSDSGSAISLFLYSKDKLQLMREINDKIKPFLQRVEGVGKIEAKGFLEPQIRIELKPNQLRKYNLNALDVANIIKSQNFKQALGELNNNQDNYIIKGYFEATNLEELSNLRIKTGVFLSDIANISSLYEDEKQSALYEGKEGVLLELGKITNYNTLEMIKNVKNALPILEKQIPKDISINMLYDKSLNIHKHLSQVIFDMVLGIFLTLVIVFLFLRNLSTTLIACIAIPTSIISTFFIIDLLGYDLNRLTFIALTLSIGIFIDDAIVVIENIAKKLKTYPPLQAAFLGINEIGFSVLSISIVLLCVFIPISYMNSISGLFFNALGISVASGIVISFLVSVFLIPSIGARFLNPKENKFYEKTEAFFEKIEQKYENLLYKILQNKVKFILATLVFIGLSFALATRIGLDFLPMEDDSEIQVLLESKKDLSLEAMKEKSLNLLEKIKNDSNVKYAFLLVGYDDAKDATKAKIYVKLKNLDERNLRQSAIVSLYRQKFQDESLKIKILELPKIEGAGIDDPVQFLILGDDLNTLKEAASQAKEILGTNARIVDISDNANATKDEVALHINKEKAKLLDVNPQYIAGVLGYSFSQLSVGSMDRGNSKDDIILSFAPEFKKDIEALKRISIKNNQGINLELSSVVDFIYSKDLKTINRYNKNRSVKITAGVNDLSLGAVQKLLLDNMDKILNNNPSLSYAFSGFINLLGETVQGFAMAVALAFVLIYLVLAALYESFILPLIIMITMPLAFGGASIGLFITGHNFSLFVLIAIILLFGMVGKNAILLVDVANKKCHEGLDPDKALLIAGKSRLRAILMTTFAMIFAMLPLALSRGAGYEANSPMAIAIIFGLISSTLLTLLVVPALFKFCFKLDSKLRKIYEREKLN

SEQ ID NO: 54488 - protein, 481 aa, Campylobacter jejuni
MNQIHKILIANRAEIAVRVIRACRDLHIKSVAVFTEPDRECLHVKIADEAYRIGTDAIRGYLDVARIVEIAKACGADAIHPGYGFLSENYEFAKACEDAGIIFIGPKSEVIHKMGNKNIARKLMAKNGIPIVPGTEKLNSYSMEEIKIFAEKIGYPVILKASGGGGGRGIRVVHKEQDLENAFESCKREALTYFNNDEVFMEKYVVNPRHIEFQILGDNYGNIIHLCERDCSIQRRHQKVIEIAPCPGISDNLRKTMGVTAVAAAKAVGYTNAGTIEFLLDDYNRFYFMEMNTRIQVEHPITEEITGIDLIVRQIRIAAGEILDLEQSDIKPRGFAIEARITAENVWKNFIPSPGKIGEYYPALGPSVRVDSHIYKDYTVPPYYDSMLAKLIIKATSYDLAVNKLERALKEFVIDDIRTTIPFLIAITKTREFRRGYLDTSFIETHMQELLEKTEDRHQENKEEVIAAIAATLKKIRESRE

SEQ ID NO: 54489 - protein, 387 aa, Campylobacter jejuni
MVADKRLFYLSCILITIGIVFSYSLTAFTVLFLDYSEFHFFIRQLFFGISGILIMFFISRLDPDKALSKKIILAILIVSFIFIIILPFLPSVLATASGGAKRWIRLGPLSISPVEFFKIGLIYFLAWSYTRRIDDSKKAIRHEALILLPYCILASIVIGYIYITQNDLGQSVISFFLILALAFFAGASKRLFAFGTLIIMMIGIMVIFSNQRRIQRIASWWGNIQDAFLPMLPDWLANALRVSSNSEPYQISHSLNAIAHGGMFGEGLGLGTFKLGFLSEVHTDFVLSGITEEIGLLGLGVICYIYLWMILRIFRIAGRCEAKQDFIFCSGIALLLLFSFFMNAFGIISLTPLKGVAVPLLSYGGSSMWAICIGIGYVLMISKKVKL

SEQ ID NO: 54490 - protein, 342 aa, Campylobacter jejuni
MTIALTGGGTGGHLAIVRCLLESAIKKNIECVYIGSQNGQDKAWFENEVRFKEKFFLSSKGVVNQSKFDKISSLLHTLKLSKDCREIFKKYHIQAVFSVGGYSAAPASFAALFSHLPLFIHEQNSKSGSLNMLLKPFATKFFSAFEKEISPYPVADKFFDNARIRKELKNIIFLGGSQGAQFINELALNLAPKLQEQNIKIIHQCGKNDFEKCKKHYQSLNIQADIFDFSLNLEEKMKNADLAISRAGASTLFELCANTLPTIFIPYPYAAKNHQYFNAKFLQDQALCQIFMQNSINLDEFFKSILKLNLENISTRLQNITQKNGADMLIQKALFDNLTFIR

SEQ ID NO: 54491 - protein, 296 aa, Campylobacter jejuni
MNKILSLPEDLKQLKGVNYKKIKSCTFAKYTQTDTSHSTFVNVGSHLLTFVRKGYKILHTASKDYKINSYETLFLKAGSYTLSNVGLSKGVYEAYLFFFDNAFLIELIYKYKDFFKLDQKFQNYEIFWVKNDKILQGILESFSPHFEENTQILDPIVSLKFEEIFLHLLLNKNIYFISFLSGILKEFRLDLSQLFEYCGREFLSVNEMSNFAKLDLATFSKEFKKCFGQSPKKWLDEKRLQKAKILLKFSKKNINEIANECAFSSVAWFIERFKEKYEQTPKQYQKTKNLYFLSKN

SEQ ID NO: 54492 - protein, 736 aa, Campylobacter jejuni
MMNDTKEELISKLDLNSYLEEFKALFARDKEIFLQGDSNLHFKRIHELCEVEFPTMPELSNLDKALVHLSKQGILHLDEIFEFVKIFRYFEKLKKIKLGTNLGSWLQKIEFVSGALELCLNFDEKGELKESLDERLVNLNAALRLKNESIIAEFKKFCYTKALMPYLIDTQIHLINNLEALLVRGGFNHAIKAKIIGRSSGGGFYIVPLSVENLQNDIEKIKNQKEEIYYEYAKNFSAFLAKNLPFLKFINTAFDLFDHYSARVLLAKKRDFEFVLCDQSTDLVLKNFAHPALKNPKSVSLEFKKQVLIITGVNAGGKSMLLKSMLSAAFLAKHLLPMHIKASESKIGTFKEFDAIIEDPQNVKNDISTFAGRMLHFSRLFSKKNLLLGIDEIELGTDFEEAACLYSVLISKLIANNLKIIITTHHKRLAMLLAKNEQVELIAALYDEELSRPKYEFLKGTIGKSYAFETALRYQIPPNLVSEAKKLYGEDKENLEELVGKNINLELELKAKLENVEKKEQKVDEILLSLKEQKEKNEQEFRTSLRNLEFKFHKAIEEAKKTIQLKDIKDKQRSLNKTNELKKEIILPSMEQNEELRVGDFVKYEKIKGKIISISKNDAMVESDGIKLRVPLKLLKKSTPTPKISPKTSISVAKPTNLSVSLDLHGLRSDEAISRLDKFISDALLAGFDEVLVYHGIGTGKLAFAVREFLKTHKSVKGFNDAPINQGGFGAKVVRL

SEQ ID NO: 54493 - protein, 432 aa, Campylobacter jejuni
MMQNIHFIGIGGIGISALARFLREKGFKISGSDLKESKITKELEKEGVKVSIPHHKDNILNKDLVIYSAAIKEENPEFKYAKELGIKCLSRKEALPLILEDKRVFAVAGAHGKSTTSSILASLLDDASVIIGAILKEFGSNMIYKESQNLVFEADESDSSFLNSNPYLAIVTNAEAEHLDHYGNEVSKLHHAYTQFLDVAKIRVINAEDEFLKNYKNESIKLYPSKDIKNCTMCIENFKPFTSFELKDLGEFKVFGMGYHLALDASLAILAALNFLDIETIRTRLKNYQGIKKRFDILHADENLVLIDDYGHHPTEIKATLSAAQEYVKLGGYKKITAIFEPHRYTRLATNLKEFAKAFEGVDELVILPVYAAGEEPIELDLKAVFPKALFVEDIKREGKFLVASKGQVFEEGLIIGFGAGDISNKLRQKNE

SEQ ID NO: 54494 - protein, 657 aa, Campylobacter jejuni
MRKILLQIFIFSVLFIATFAINRILMQNSFIPTGLISDKNEIFLMYLLGVFHDIRFLSAAFLPFLLCGFLSLIFSNIKINNKLVIYSKNFYFIFSSVYIIVLSCLCIGFSYVKYYYYEIYKTKFDIFMFTLKDDNTKTILSIIYHDYPILKILALMLIFGVFVFFLNLKILNLKLKPVNLRLFPLIALNLILIIVYVIALRGPFKHVAINVQNYSFSEYSVVNDTMLNPIMAFSWALKQYKEEAALKVITPLKAQELKEKLFDYLHQSPINLKAEKNHPSVFVNLMESFGLNLADFTNTEHNFLGSLDKHFKQDFLFKRFLSSSNGTIPSFANLFFVSPFSNISTSKFQKTYLDLTPIAVYKKAGYKVIFVSAGNGSWQNIKNYLSILGVDEIIDENILMKEYNGAKDSENGYGIADEFLYKKVYDLLQKNPHKTLIIALTISNHPPYKIPQNDLPKLQNIPQTLLNMLPYEKDKQDNIIKAYTYANNEFGKFLDKVKQSPFKNSVIIAATGDHRVREMSMDLNSQKAFAYSVPFYLYIPKDLQDNIYYDKDRVGSHKDIFPTLYALSLNNVKYLSVGGRNMLARPSDEKLEFGINDAVWIDKKGIYSGGKGYYFESNDTLKDMNKAFNLDGYTKDFDKFYRELNLYQLAERLGISK

SEQ ID NO: 54495 - protein, 453 aa, Campylobacter jejuni
MITLKEALKYSKEELENLKKELNEKAKKEKKLGAYIEQFLDKDLSVSGEGVPVAIKDNISVKGWELTSASKILQGYIAPYDASAIVNLKANGFSPFGRCNMDEFAMGSSTASSCYGKTLNPLNFERVPGGSSGGSAAAVAGGLALASLGSDTGGSVRQPAAFCGCVGFKPSYGRVSRYGLASYSSSLDQIGVLTQNVEDAAILYDAIAGYDKMDSTSANIEFIKTVPNLNANKKLKIAVIENYVNDADSEVKNALLKTIDMLKANGHEIVYKNLLDSKFDIAAYYIIATAEASANLSRYDGVRYGKRSENIQNLKEMYVNTRSEGFGEEVKRRILLGTFVLSSGYYDAYYIKAQKARAFIKAKYEEILQDCDLIFMPVTPTTAFKFDTQKSPMQTYLEDVYTISVNLAGLGGISVPVAKDKEGLNISAQLICKAYDEQTLLDGALSLEQMIKN

SEQ ID NO: 54496 - protein, 917 aa, Campylobacter jejuni
MDYKETLLLPSTTFAMRANLAELEPQRFKKWFEQNYAYEKMKENRKNAKKSFTLHDGPPYANGHIHIGHALNKILKETIIKTHYFKGESVRFTPGWDCHGLPIEQQVEVKLGEKKKSLSKKEIREFCRQHASEFVDIQREEFKDLGIIADWDKPYLTMKFEFEAAIYRTLCEIAKKGLLCERSKPVFWSWAAKSALAEAEVEYQDKEDYSIFVAFDLDVKACEKLGVSKASAVIWTTTPWTLVANQAIALNPNENYVITKEGLIFASALLKSMVEKGLTSGEIQKELNAKEFEKLEAINPLNGRKSVLIMGEHVLMDGGSGLVHTAPGHGEDDYYACLKYGIEVLMPVDDSGCYDETLRAKGLLPSHLLEEFIGLHIFKANEKILELLGEKLLHSSKFIHSYPFCWRTHKPVIYRATKQWFILMDEPKLQGKTLRECAKEQLLKTTFYPQSGVKRIGSMVENRPDWCISRQRDWGTPIAFFRDKNTKEVIFDDELFDFVAAIFEKHGADAWWEFEIKDLIPTNSKYKAENLEKVYDILDVWFDSGSTFNAVLNSGLYDAGEKRASMYLEGSDQHRGWFQSSLLVGTAINESAPYESILTHGFTTDEKGQKMSKSKGNVIASEYVAKTYGVEILRLWILLSDYSSDLKISDNILKQVGEQYRKIRNTIRFLLANTNDLKDLEVKEFSFIDKWILSRATKVFKASKEAFFAYEFAKGFSLLLNFLSADLSGIYLDISKDRLYCDSENAQRRKSAQVAMALMAKELLNLLAPNLSYSVDEALEHANVLIKGDAKDVFDLSLTQDFDYDFGIDDTFLMSAREKFFEQIDILKKDKIIKSTLELNLNISFNKFPNEELADWFMVSQISNENEEILAEFEVENEKFKITKASLCKCPRCWKLQSKNEETPCLRCEEVLKGVQC

SEQ ID NO: 54497 - protein, 178 aa, Campylobacter jejuni
MNLPNILAIFRMVLAPLLFFLLIHKFENIHQSWINYFAALTFSLAALSDFFDGYIARTWKQTTKLGGILDPLADKMLVLAAFLGLLLTGKANEWVIYIILVREFFITGFRVVMISENLNVNASFAGKLKTAFQMTAIGFLIMEWIGGEILLYIALILTLYSGFEYIYTYIKAQKKGEK

SEQ ID NO: 54498 - protein, 125 aa, Campylobacter jejuni
MKHYEVLFILKPTLTEEEVNTKLEFVKEVLTKNSAEIETVVPMGTRKLAYKIKKYERGTYFVIYFKAPTNLIAELERVLRITEEVIRFLIVKYENKKEIAAWEKLSHGIKQSKKEIKPLDAPEIQ

SEQ ID NO: 54499 - protein, 183 aa, Campylobacter jejuni
MFNKVVLVGNLTRDIEMRYAQSGSAIGASAIAVTRRFTANGEKREETCFIDISFYGRTAEVANQYLTKGSKVLIEGRLRFEQWSDQNGQNRSKHSIQVENMEMLGNSNAPQQGGNFGNNSFSNNNYSGNYENQSYDPYMSENQNFNKAKANPAPQRNQSPQHEEKLKEIDIDAYDSDDTNLPF

SEQ ID NO: 54500 - protein, 86 aa, Campylobacter jejuni
MAEKRKYSRKYCKYTEAKVEFIDYKDTAMLKHALSERFKIMPRRLTGTSKKYQEMVEVAIKRARHVALIPYIVDRKEVINNPFEGL

SEQ ID NO: 54501 - protein, 791 aa, Campylobacter jejuni
MQIEEIQNYPANLPVLVEDELFLYPFMITPIFINDSSNMKALDLAIKNDSMLFVAPSKLENGRNFDEIYNCGVIGTIMRKVPLPDGRVKILFQGYAKGKIIEQISNKPLEAKIELIKEDFLEGTKKEALLEVLKEKVKNLANISHYFSPDLLRTIEEGFDASRICDLILNTVRIKKQVAYEFFVLTDLEQKLVKLIDLIAQEIEANKIQKEIKNKVHSRIDKVNKEYFLKEQLRQIQKELGSDTQKEDEVREYQKRLELKKKFMHEDAYKEIKKQIEKFERIHQDNSEASMIQTYIETALDIPFEKISKKKLDIKEVSKQLNHDHYALNKPKERIEEYFAVRELLEKRKIAEKDGAKVILCLYGPPGVGKTSLANSVSKALKRELIRIALGGLEDVNELRGHRRTYIGAMPGRITQGLIEAKQINPVIVLDEIDKLNRSFRGDPSAVLLEILDPEQNSKFRDYYLNFNIDLSKVIFIATANDISNIPAPLRDRMEFIELSSYTPSEKFHIMKKYLIPDELKKHGLKSNELSIDDETIELIISDYTRESGVRNLRRKVAELCRKSAKKLLLENIKKVIINTKNLNEFLDKKVFEIEKNNGENQVGQVNGLAWTSVGGDVLKVEAVKIKGKGELTLTGSLGDVMKESARIAFSMIKVLIDEGKIKIPKKIIIDPKVNVYDSYNIHIHVPDGATPKDGPSAGITISTAIASIFSDKKVKADVAMTGEIDLKGKVLPIGGLKEKLIAAYKADIKTALIPRKNYERDLKDIPSEVRDNMEIIAVDTFSDVLEYTLV

SEQ ID NO: 54502 - protein, 209 aa, Campylobacter jejuni
MKIYLLNETPFEGVENLILNEIVFYDFSVDLSLYDALICTSKNALKALQHAKITLNFKLNLYAVGQSTAQYAKNLGFKKIKIPSKAYGKDLFLEFKEELKMQKCLYLRAKNIVSTLNLDLKNVGVDLDEMIVYENVFKKGDKKLIHPAIFIFTSPLSVENFLKFYSLKEEDKVVVIGQSTAKKLLNFKNLYICENQSLLNCVKLAKTLV

SEQ ID NO: 54503 - protein, 210 aa, Campylobacter jejuni
MKNKLDLSLYLVATKGSKSEECFLNTLENAIKGGVSIIQLREKELNAREFYKLGLKVQKLCKSYKIPFLINDRVDIALALDADGVHLGQEDLEAKLARKLLGDEKIIGLSLKKLEQLEFIQGVNYLGCGAIKATPTKESSLLSLELLSQICDKSPIGVVAIGGIDKEALVELKGINLSGVAVVRAIMDAKDAFLAAKELKRKIYENLSLK

SEQ ID NO: 54504 - protein, 978 aa, Campylobacter jejuni
MQASFYEYLQNPKICELFLCKDEKQADLLAQVSRFKGLKTFVLPDFRAQFGDDLRAFSKELFDLCKILNAYHKEEEKKILISPLNTVLKKLPSKKHLQNYHIDKKQNFDLKCFEDEISRLGYEFVDIVQDKGEISIRADIIDIFCINEENPIRILLFGEEIESIRYFDLQSQKSIPNELEHFEICPFLKYFDKENYEIFKDKLEDFQSDALIHDINSLGFWCIDDFFDYLELDFLACEKFDINEYEKDISFVNAKILPQAKKFKELQSSYNKDFFEFHKNKKITLLAKNEALFKALELEDTQNIHFVKSDLRLNLISPEELIISLNQKEKQKTRKKASLIIDELKNGDYIVHEDYGVGKFLGLEMIVISGAKKEFVAIEYQNSDKLLLPVENLYLIDKYLGVSGSIPSLDKLGKTSFIKLKEKLKTKLLAIASEIVIMAAKRSLVQAKKITVDLNRQTDFIASAGFIYTSDQDKACHEILQDFQSGKVMDRLLSGDVGFGKTEVAMNAIYPVVKSGFCAFLFAPTTLLSHQHYKTLKKRFDPFDIKVFKLDRFTSSAEKKQVLQNLKENKACVVVGTHALLSVECENLALVIIDEEHKFGVKQKEKLKEITQNSHILSMSATPIPRSLNQALSSIKSYSVLQTPPEDRMDVRTFVKENDDALLKEAIARELRRGGQIFYIHNHIASIEQCKKHLLELFSTLRILILHSKIDAKMQEEEMLKFENKEYDLLLSTSIVESGIDLPNANTIIVEKSDRFGMADLHQLRGRVGRSDKQGYCYFLIEDKNAITKDALKRLVSLESNSFLGAGSILAYHDLEIRGGGNLLGVDQSGHIEQIGYSLYLKMLEDELNALSKNEVDQKENKLDLKLNVNAFLNSELISEDRLRLELYRRLSKCEQVHEVYEIESEIEDRFGKLDIYTKQFLSLITIKILALNKFKSISNYEQNIQFTALNDEKELIKAKSKDDDDILEAILTHLRKA

SEQ ID NO: 54505 - protein, 809 aa, Campylobacter jejuni
MAYEASLIEKKWQKIWDENEYFEPKDDLNLPKKYILSMFPYPSGRIHMGHVRNYTIGDALARYYRKIGFNVLHPIGFDSFGMPAENAAIKHKIHPKSWTYENIAYMKKELFSLGFSFSKKRMLATSDPLYTKFEQEFFIKMFEKGLIYTKEANVNWCEQDQTVLANEQVEDGKCWRCGHEVVQKKMPGYYVKITAYAEELLKDLEELKDKWPNQVLTMQENWIGKSEGLEFSLNLDEESKQKTKESSLEVFTTRADTIYGVSYIALAPEHKIVQNLLSQNLLNQDVLNKIKVIQNQSPRERQSSEKEGYFLGIYAIHPLSGEKIPLWVANFVLADYGSGAVMAVPAHDERDFEFATKYNLAIKQVIQTQENLPYMQKLGKLINSQEFDNLDCNEARLKIISQFEAKNIGKRVVNFKIRDWGVSRQRYWGAPIPMIKCQSCGIVPQKLENLPITLPEDVQITGEGNPLDKHPTWKNCICPKCGKEAQKESDTLDTFFESSWYFARFASDEKTWQEKALDEKSVKYWMSVDQYIGGIEHAILHLLYARFFQKALRDLGYLTQNEPFDRLLTQGMVLKDGAKMSKSKGNVVDPDEIIEKYGADTARLFILFAAPPAKELEWNDDAVEGAYRFICKLYDRAQNVKKGELVELKQENLNKEEKYARLKVYEALKKSFEVYHQSFAFNTLIAACMEALNALALCKNEALEQEAFYIILNILEPIIPHVCFELSEELFKCKNFKKLELKEEVFVKDTLNLAVSINGKKRAEFEISSSASKEEILAFAKENTAKWLEGKSIVKEIYVEGKLVNLVIK

SEQ ID NO: 54506 - protein, 441 aa, Campylobacter jejuni
MKLKLNFLPYFSFIPKKLNTNSIIFKIIKVFFIAILLSNSIYLSFFENIFTQTISPFLAIWGLVLLLKSKTSKQYFWIGFFVGILWFWWIGLSSIYFNLNYLVPIIPIIIGFIYGLLFRLCYLLKFDFLRLCGIFCISFIHPLGFDWFNWGIFTVYGFFDPSYRGIICIFLIAYFIYEGYISRYYKIAIVLILFFSGFQYNEKQAQTLNLNYKLINTNISQDQKFLQENLKSNSDILIQDILQAINEKKELVILPETAFAFDLKNTKYELMLKELSYKITIITGAFHVEKEHTYNSTYIFKKGNVYILNKHFLVPFGEEIPFFKDLTKKYFLKNIEEFSKGPIQSKYKLDNQIITNAICYEATKEQNYQNSQIIIALSNNAWFNNSSEYKLQQLLMKFYASKYGVSVYHATNGKENIVILPKKLLSKDWKNLSKEIFNDKK

SEQ ID NO: 54507 - protein, 398 aa, Campylobacter jejuni
MYLFTSEVVSAGHPDKCADIIADTIVDILLKNDKNSRVASEVFVAGNKVVIGGEVKSNHKLSKADYDNLVKDVLKNIGYDGAGHFSKEQCLHPDEVDVMVFLNEQSPDINQGVDQEDGETGAGDQGIMFGFASCEAEEYMPAAISYARMLCDRVYAYAKANPHELGVDIKTQVTIDYGTKANFENCKPQSIHTIVVSAPCVESMKIEDLRSLVMKLILDSNLPKELFDPNKTRILINPTGKYVNHSSLHDSGLTGRKLIVDSFGGYSPIGGGAQSSKDYTKVDRSGLYAGRWLAKNIVAAGLAKKCIVQLSYAIGVAKPTSVSVDCMGTNTSVNDDVLSDFVMQNFSLTPNWIRDKFHLDKPSKETFLYADVAARGQVGQKDYPWEKLDALEQFKKLL

SEQ ID NO: 54508 - protein, 691 aa, Campylobacter jejuni
MNLFEDLNDSQKQAVSHIDGAMLILAGAGSGKTKTITTRLAYLIGEVGIPSHNTLTLTFTNKAASVMRHRALNFLQGNHNPLLCTFHKFGLLFLKLHFERLERKNSFIVIDTDDTKKIIKDLIHDKNKDNVYDIIQYISYCKNEGKRVSNVFEDLNLLKEHNFEKYQNEYKFANYYRAYEEYLLKQNFVDFDDLLLLSNLILENDINFAKEQSLLYNYITVDEYQDTNTLQYKILKNLCCMHENITVVGDDDQSIYSWRGAKIENILNFQNDFKNVKLVKLEQNYRSVGTILQAANNLISHNEQRLGKTLICTKDTGENIKILKNENEKDEGLYIAQEVKKLLNSGVEAKEIAILFRVNALSRAIEEAFMKKQISYKLLSGMRFYERLEIKDLISYLRLILNPSDDLSFKRIINRPKRSIGEKALKNLEEYAKKRQISLFDALCESDGGVGILTTKKAQNEANIFIQNIHTLKSYDNAKKVFDNIEELFKIKDYFSEQDDGDERIRNLDEFYANLREKLKEDPEASLEDLLSEISLLSDQDNLDEECVCLMSIHASKGLEFDYVFIIGFDEGFFPLNSEENLEEERRLAYVAITRAKKFLTISVANSRFYHGSRANINPSRFLEESKLINEKSKNQNIQKTSFCKGDLVKHKIFGIGRVVEANKSGKEEKLNINFGGIMRVIMASFVEKAV

SEQ ID NO: 54509 - protein, 272 aa, Campylobacter jejuni
MNKIFAAFKPRGLSSNAFLSTLKKKYKNKKAGYSGTLDPFAKGVLIVAFGQYTKLFRFLKKTPKTYKATLWLGVYSLSLDDQNIKEIKNIKEFDLPNLQQIIDQMQGIISYTPPQFSAKRINGTRAYELAKKGIEVNLKPCQMEVFDCKILSYNHPFLNIEITVSEGAYIRSYCELFARKLGINATLSSLERIKEGKFVYNNEKSLNVLKYINLKPNFIKDLNKLENGAKIFVEELEFHDKGDYYIETEKYFSIINIKENTVKYLLNKVEKC

SEQ ID NO: 54510 - protein, 75 aa, Campylobacter jejuni
MLILSRKENESIIIGEGIEIKVVQTGKGYAKIGIEAPKSLMILRKELVQQVKDENLHSVVQNDIKLDDLSKKLIK

SEQ ID NO: 54511 - protein, 150 aa, Campylobacter jejuni
MKIIARNKKALFDYSIIERFEAGIVLKGSEVVALRAGRANLKDSFVRIIKNEIFLLNSHISLLHTTHSFYKHEERGARKLLMHRKQIDKLLGKVSIEGYTIVALDLYFNTKNKVKATLALAKGKNLHDKRETLKKKQADLEARAAMKNYK

SEQ ID NO: 54512 - protein, 645 aa, Campylobacter jejuni
MNNNTQNNKGNPQGNNFFNKNPIFIFAIFAIIMIIIFKGFFDGNGSFGGALNGNEVNKNVPYSELKKLIESGQINQVSIGQTTIKAISSSHNTVYTAKKVNDPELVSLLDSKNIAYGAYSETNWFTDILFSWVLPVFIFFGIWMFLASRMQKNMGSSILGIGSSKKLVNSEKPKVKFSDVAGVEEAKEEVKEIVDFLKYPERYIKLGAKIPKGLLLVGPPGTGKTLLAKAVAGEADVPFFSVSGSSFIEMFVGVGASRVRDLFENAKKEAPAIVFIDEIDAIGKSRAASGMMGGNDEREQTLNQLLAEMDGFGTESSPVIVLAATNRPEVLDAALLRPGRFDRQVLVDKPDFKGRCDILKVHMKDVKISPKVKVEDIARLTAGLAGADLANIINEAALLAGRDSKKYVEQNDLVEAVERAIAGLEKKSRRINEKEKKIVTYHECGHALIAETTKGAKRVSKVSVIPRGLAALGYTLNTPEENKFLMQKHELIAEVDVLLGGRAAEEVFIGEISTGASNDLERATDIIKAMISMYGMSEIAGLMVLEKQRNTFLSGGQTIKDYSEKMAESLDDYVKKTLDERYKDVKDTLNTYKGAIETMVAALYEEETIEGNKVREIIKEFEDQNSLPTRLQELEEVKTEVKVEE

SEQ ID NO: 54513 - protein, 130 aa, Campylobacter jejuni
MKLLVVDDSSTMRRIIKNTLTRLGHDDVLEAEHGVEAWDLLTKNEDVKVLITDWNMPEMNGLELVKKVRAEKKYEDMPIIMVTTEGGKAEVITALKAGVNNYIVKPFTPQVLKEKLEDVLGTGSGEGAAE

SEQ ID NO: 54514 - protein, 590 aa, Campylobacter jejuni
MIFYKSKRLAFFLTSDIVLILLSVYLAFSLRFSGDIPSIFYHGMMVSAIILLVLKLSFLFVFRIYKVAWRFFSLNEARKIFIALLLAEFCFFLIFYFFSDFFNPFPRSAIVIDFVLSYMFIGTLRISKRMLVDFKPSRMKEEETPCIVVGATSKALHLLKGAKEGSLGLFPVGVVDARKELIGTYCDKFIVEEKEKIKSYVEQGVKTAIIALRLEQEELKKLFEELVAYGICDVKIFSFTRNEARDISIEDLLARKPKDLDDSAVAAFLKDKVVLVSGAGGTIGSELCKQCIKFGAKHLIMVDHSEYNLYKINDDLNLYKEKITPILLSILDKQSLDEVLKTYKPELILHAAAYKHVPLCEQNPHSAVINNILGTKILCDSAKENKVAKFVMISTDKAVRPTNIMGCTKRVCELYTLSMSDENFEVACVRFGNVLGSSGSVIPKFKAQIANNEPLTLTHPDIVRYFMLVAEAVQLVLQAGAIAKGGELFVLDMGKPVKIIDLAKKMLLLSNRNDLEIKITGLRKGEKLYEELLIDENDAKTQYESIFVAKNEKVDLDWLNKEIENLQICEDISEALLKIVPEFKHNKEGV

SEQ ID NO: 54515 - protein, 200 aa, Campylobacter jejuni
MYEKVFKRIFDFILALVLLVLFSPVILITALLLKITQGSVIFTQNRPGLDEKIFKIYKFKTMSDERDEKGELLSDELRLKAFGKIVRSLSLDELLQLFNVLKGDMSFVGPRPLLVEYLPLYNKEQKLRHKVRPGITGWAQVNGRNAISWQKKFELDVYYVKNISFLLDLKIMFLTALKVLKRSGVSKEGHVTTEKFNGKN

SEQ ID NO: 54516 - protein, 309 aa, Campylobacter jejuni
MPKLSVIVPTFNRQVLLEKAIKSIQNQDFKDLEIIVSDDNSSDDTKSVVQNLQKDDDRIKYFLNQNYKQGPNGNKNNGLDQASGEFVTFLDDDDELLSGALSTLMQKANEGYAHVFGNCLIEKEGNLSKEFSGKGLEKDSEISKKDFLMAKFSGEFFSVFKKSLLENKRFNEEFYGNEATLWVNLYKEKSFYIHKAFRIYRIFRQDSVTLGASKNAYRVYLGYLELAKILENELRMSKDKDYKKTCASYYKMAAYYAKLAKNYKALYKCLFKSLSIKINAPALILLILSIIPNNMIEKLSKIRVALCKN

SEQ ID NO: 54517 - protein, 342 aa, Campylobacter jejuni
MKIAIVRLSALGDIIQSAVVLQFIKNFKKDIEIHWFVDEKFEGILKNHPLINKLYALPLKDKKILKSLKILLKARKNNYNAVIDLQGLIKSAIVSRILSRNNFGFDKNSLKESFAHNFYNQKLELDYNENVFVRYLSLTSFMLNTDFNVKNLAFKQDIFSVDENLKQLLNNKLKLDKNEKNILIHVGSSVENKIYPKTKLAILCKLLINEFQQTKIWLAWGNVKEYEFAKEVLNLSGIDETHIELAPKFNLEELMAFTKMMNLIIGNDSGPTHLAFALNKASITIFGATPSYRNAFQTHINKIIDAGKKIQNAKHIDKSDFCITRIEEEDIFKLAKGLLNEK

SEQ ID NO: 54518 - protein, 303 aa, Campylobacter jejuni
MSQISIILPTYNVEKYIARALESCINQTFKDIEIIVVDDCGNDKSIDIAKEYASKDDRIKIIHNEENLKLLRARYEGAKVATSPYIMFLDSDDYLELNACEECIKILDMGGGGKIDLLCFEAFITNAKKSIKKLNIKQGKYNNKEFTMQILKTKNPFWTMWAKIIKKDIYLKAFNMLNLKKEIKINMAEDALLYYPLTILSNEIFYLTQPLYTQHVNSNSITNNINSLEANIQEHKIVLNVLKSIKNKKTPLYFLIIYLLKIQLLKYEQNFNKRNINLIYYKINILYQKYQFKWKKFLYNLIP

SEQ ID NO: 54519 - protein, 371 aa, Campylobacter jejuni
MKKIVFVSGTRADFSKIKSLMMKVENSNEFELFIFVTGMHMSKKFGSTYMEIEKCGFKNIYKYINHDKYYQMDKALSSTIDGFSKFIHEIEPDLIVVHGDRVEPLAAAIVGSLNNILVAHIEGGELSGTIDESLRHAISKLAHIHLVNDEIAKKRLIQMGEDEKSIFIIGSPDLELLNNTISLDEAKKYYDIKFKNYAIAIFHPITTEINSLYKQSEEFVNALIKSEKNYIVIYPNNDLGFELILQNYERLKNNERFKIFPSLRFEYFISLLKNANFIIGNSSCIIKEALYLNINGILVGSRQDGRTDINKTIRVNAEEKDILEAILNTSKCTNITNKRLEILNSSEQFYRLLKNNILFTINKQKIFMDKK

SEQ ID NO: 54520 - protein, 274 aa, Campylobacter jejuni
MPQLSIIIPLFNSCNFISRALQSCINQTLKDIEILIIDDKSKDNSLNMVLEFAKKDPRIKIFQNEENLGTFASRNLGVLHSSSDFIMFLDSDDFLTLDACKIALKEMKKGFDLLCFDAFVHRVKTKQFYRFKQDEFFNQKEFLEFLSKQRHFCWSVWAKCFRKDIILKSFEKIKIDERLSYGEDVLFCYVYFMFCEKIAVFKTCIYHYEFNPNGRYENKNKEILWQNYQDKKKSNELVKKLCLNFKNNDFHKKLFEVLEKEEFDLQRRVDEARN

SEQ ID NO: 54521 - protein, 186 aa, Campylobacter jejuni
MINLVEKEWQEHQKIVQASEILKGQIAKVGELLCECLKKGGKILICGNGGSAADAQHFAAELSGRYKKERKALAGIALTTDTSALSAIGNDYGFEFVFSRQVEALGNEKDVLIGISTSGKSPNVLEALKKAKELNMLCLGLSGKGGGMMNKLCDHNLVVPSDDTARIQEMHILIIHTLCQIIDESF

SEQ ID NO: 54522 - protein, 461 aa, Campylobacter jejuni
MLEFLSQQKPKILIIGDFMVDNYTWCDCSRISPEAPVLIAKTLKEDKRLGGAANVYANLKSLGADVFALGVVGDDESGKFLQENLKGEFLIQKGRKTPFKNRIMAHNQQVLRLDEEDISEILLENELIALFDEKIKDFKAVVLSDYAKGVLTPKVCKAVIEKAKVLNIPVLVDPKGSDFNKYSGATLLTPNKKEALEALKFENLEGENLEKGIKKLKEDFSLRYSIITLSEAGIALFDEGLKIAPAKALEVYDVTGAGDSVIAVLAFCLANEIEIFKACELANEAAAVVVSKIGSVSVSFDEIKSFKRVDFEKKIKSKEELLVLLKQNNKKIVFTNGCFDIVHFGHIKYLDKAKRLGDVLIVGLNSDASVKRLKGESRPVNSEFQRACMLAAFYFVDFVVIFDEDTPLELISFLKPDILVKGADYKDKLVVGADIVSRVELIDFEEGFSTSKIIEKIKDKK

SEQ ID NO: 54523 - protein, 785 aa, Campylobacter jejuni
MIMKCEHCKLDYKQAQMIEYKGKFFCCKGCESVWEILHESGLDEFYEKLGNQTLSPVNFQNEMKNYDEFITKTKEGFSEIYLMIHGIECAACVWLNEKILTKQEGILELDINHLNHKARIVFDEQSISLVQILRLIESIGYKASAYDASKASKKADLLKREFYSKLVVAIACVMNIMWIAVAKYAGFFSGMDKDTKDILNFAEFILCSPVLFYTGSHFYKSAFKTLKMHSLNMDVLVISGASLAYVYSLWAMFFRVGEVYFDSVAMIICFVFIGKYLEMFSKKRALDTIDGLNDFLQNEVLVFNGKEFVSKEVQKVCLGDRILLKTGDKILIDGICKSGEMSVDTSSLNGENTPKLIQKEDEIFSACIVLDGSVEYEATKFYKDSKLSQIIQLLELASSKKAKLESLVNSLLAYFSRTVLLIAFICFAFWFFYKEESFEISLVNAIAVLIIACPCALALATPVSNLVALGRALKKHILFKSSSVIEDLSKCDCVVFDKTGILTKIELELKEVFLDKALDLNELYNFVKLSKHPISQNIVLYLKQKGAKDLNLDFKKHSSIQAKGLSAELNEGLLLGGSSKFLQEKGIVAKEFDNTHFIFAKEGKILAFFEFDSVLREGAKELIAYLKKEKKELMILSGDHQKAVEKIAKKLEIQNYQASCLPEDKMKTIENLSKNYKVLFVGDGVNDALALKYASVSMTLREGSDLAIESSDVLLLKNDLLSLKKAIKLSKNTFKIIKQNLAFSLFYNACTIPLAFLGMINPLFAAISMSFSSIIVVLNALRIKE

SEQ ID NO: 54524 - protein, 432 aa, Campylobacter jejuni
MEKEKKQHQRTHVPVEGYKIEELKLLDLENLVKIANECEIENPREFRRQELIFEILKAQTKKGGFILFTGILEISSEGYGFLRGMDSNLSDSVNDAYVSNSQIKKFALRVGDIVTGQVREPKDQEKYYALLKIEAINYLPLQEAKERPLFDNLTPIFPTEKIKLEYDAMKLTGRVLDLFTPIGKGQRGLIVAPPRTGKTELMKELATAIAKNHPEMHLIVLLVDERPEEVTDMQRCVKGEVFSSTFDLPAYNHVRVAELVIEKAKRMVETGKDVIILLDSITRLARAYNTATPSSGKVLSGGVDANALHKPKRFFGAARNIENGGSLTIVATALIDTGSRMDDVIFEEFKGTGNSEIVLDRNIADRRIYPAINIIKSGTRKEELLQGVANLQKIWAIRSAISQMDDVEALKFLYSKMLKTKDNVELLSIMNE

SEQ ID NO: 54525 - protein, 509 aa, Campylobacter jejuni
MLQALAIKYRPKTFDELIGQKTVSVSLKYALNHNRLAHAYLFSGLRGSGKTSSARIFSRALVCEQGPSDTPCGTCKHCLAALEGKHIDIIEMDAASNRGLEDIQALIEQTKYTPSMARFKIFIIDEVHMLTPQAANALLKTLEEPPSYVKFILATTDPLKLPATVLSRTQHFRFKQIPQSEILNHLKEILLKENVKFEEEALKFIARSGNGSLRDTLTLLDQAIIFCQNEISISKITDMLGFLDPQKIKAFYQAILTKDKEKVFVYLEELQDYEASSVIDEMLFYLKESFFAKSTEFSTLIYERFFRILSKAKNMLCDDDGFTLCVMAFMMMEASHLKEIDAQIQEIKQENTTNIISRITPSPIIPHLEKKTEKNAYEILLDSIYDRDFDLAECFKQSTNFISFENNTLNINSNAQGQNRDTLNKGFKLIQELFKAKFGENAKINVQKALTIDENKLQSLTQELPNNENKNIDIQSSINMLKEGAKKFDPQEDLKEALKDCFGEPSIEN

SEQ ID NO: 54526 - protein, 75 aa, Campylobacter jejuni
MRKILFASLLPIIALADCASLMAKYEAPEPESKTMKQVERWINKKVSDPADAAVLKECMIARAADNPNQVSVAGK

SEQ ID NO: 54527 - protein, 530 aa, Campylobacter jejuni
MKSIIFNEIKKILECDFALENPKDKNLAHFATPLAFSLAKELKKSPMLIASDLASKFQNHDCFESVEAVNGYLNFRISKTFLNELANQALTNPNDFTKGEKKQESFLLEYVSANPTGPLHIGHARGAVFGDTLTRLARHLGYKFNTEYYVNDAGNQIYLLGLSILLSVKESILHENVEYPEQYYKGEYIVDLAKEAFEKFGKEFFSEENIPSLADWAKDKMLVLIKQNLEQAKIKIDSYVSERSYYDALNATLESLKEHKGIYEQEGKIWLASSQKGDEKDRVIIREDGRGTYLAADIVYHKDKMSRGYGKCINIWGADHHGYIPRMKAAMEFLGFDSNNLEIILAQMVSLLKDGEPYKMSKRAGNFILMSDVVDEIGSDALRYIFLSKKCDTHLEFDISDLQKEDSSNPVYYINYAHARIHQVFAKAGKKIDDVMKADLQSLNQDGVNLLFEALNLKAVLNDAFEARALQKIPDYLKNLAANFHKFYNENKVVGSANENDLLKLFSLVALSIKTAFSLMGIEAKNKMEH

SEQ ID NO: 54528 - protein, 542 aa, Campylobacter jejuni
MKILLLNENPVVSRLVSLSAKKMSYDFEELNAYSENLGNYDVIVVDSDTPAPLKILKEKCDRLIFLAPRNQNVEDIDAQILQKPFLPTDFLNLLNNKDANKHTSIDLPMLSNDENPYADISLDLDNLNLDDLPDENSLDINSEGMEDLSFDDDAQDDNANKTLETQNLEHETIKEQTQEDTQIDLDLTLEDGESEKEDLSQEHTALDTEPSLDELDDKNDEDLEIKEDDKNEEIEKQELLDDSKTNTLEMQEELSESQDDNSNKTLETQNLEHDNLEQETIKEQTQEDTQIDLDLTLEDGESEKEDLSQEHTALDTEPSLDELDDKNDEDLEDNKELQANISDFDDLPEVEEQEKEMDFDDLPEDAEFLGQAKYNEESEENLEEFAPVVEEDIQDEIDDFASNLSTQDQIKEELAQLDELDYGIDSDNSSKVLEDFKDEPILDDKELGTNEEEVVVPNLNISDFDTLKESDIQEALGEEILEKNEEPIVSDVTKDDNSEEIVNELSQSIAGAITSSIKDDTLKAALKGMNMNININISFKED

SEQ ID NO: 54529 - protein, 357 aa, Campylobacter jejuni
MTEITAAMVKELRESTGAGMMDCKNALSETNGDFDKAVQLLREKGLGKAAKKADRLAAEGLVSVKVSDDFTSATVSEINSETDFVAKNDQFIALTKDTTAHIQSNSLQSVEELHSSTINGVKFEEYLKSQIATIGENLVVRRFATLKAGANGVVNGYIHTNGRVGVVIAAACDSAEVASKSRDLLRQICMHIAAMRPSYLSYEDLDMTFVENEYKALVAELEKENEERRRLKDPNKPEHKIPQFASRKQLSDAILKEAEEKIKEELKAQGKPEKIWDNIIPGKMNSFIADNSQLDSKLTLMGQFYVMDDKKTVEQVIAEKEKEFGGKIKIVEFICFEVGEGLEKKTEDFAAEVAAQL

SEQ ID NO: 54530 - protein, 263 aa, Campylobacter jejuni
MVSMRDLLECGVHFGHQTRRWNPKMKKFIFGERKGIYVIDLQKTLRYFRYTYNIVRDAAAEGKTILFVGTKKQAGGAIKEYAEKCGMPYVNHRWLGGMMTNFGTIRQSIRKLEVIEKMEEDGSIKLLTKKEALMLTRKKEKLLAYLGGIRYMKTQPDMIFVIDTVKEKIAVQEANRLRIPVVAPLDTNCDPDLVTYPIPGNDDAIRSVQLFCQEMAEAINEGKALREQDGEALVNEEKEITDEEKKEVLDEAMSEEDFGEEQE

SEQ ID NO: 54531 - protein, 619 aa, Campylobacter jejuni
MFDVIVIGGGHAGVEASAAAARMGKKTLLLTTLIEQIGAASCNPAIGGLAKGHLVKELDAMGGLMGEITDEAGIQFRILNESKGVAVQGSRAQIDMDKYRIIARNKLLKLPNLEISQEQASVLIVENDEVKGVKTNLENIYFAKKVILTTGTFLNGLIHVGENKLQAGRVGELASVNLGNYLQTLGLKMGRLKTGTCPRVDAKSIDFSVLEIQDGDVNPKAFSFRSRNFNPTQLPCYIARTNTTTHEIIKNNFYRAPLFTGQIEGVGPRYCPSIEDKINRFSDKESHHLFIEPQTIDATEYYINGFSTSLPYEVQTQMLRSVEGFENAKITRFGYAIEYDYIEPTELKHTLELKKIKNLYCAGQINGTTGYEEAAAQGFMAGINASLSIDMKEPLILRRDEAYIGVLIDDLVVKGTKEPYRMFTSRAEFRLLLREENAILRLGKYGYDLGLLSEQDFTYIQNIANNLQKGLEFLLSKEFTPNNQNNAFLESLGEDKISSIVNLQKIVARASFDIEKLKKLDPIFETMDHYSLREILNEAKYYHYISMQKAQVEKMKNLSELKIPENFDFKSVSGLSNEVVEKLNHHKPPTIFAASQISGITPAALDILQIYIKMQKKKA

SEQ ID NO: 54532 - protein, 458 aa, Campylobacter jejuni
METLSQTLAERKPPLYKRIIKSLGFWVIIGIITGIVLGYTDKELAIASKPGVDYFIGALKVLIGPIIFVTLVLGIISLESLKKVGSIGAKAVIYFEVVSTLALAIGIFMANVMQPGHGMNLDPSQLDTKSVQKYISQTTEVSASSEIMHILKDAMPTDIITPFTEGKTIQVLVIAIITALIISLMRIEDKQAIQRVFEVVQNFVFKILQIIMYFSPIAAFSAMAVLIAQYGIGSLINLAYLLLVMLISCLVFIFGILGLICYFAKVNIFKFMRFISREVLIVFATSSSESALAPLMRKLEKAGLSKATVGLVLPTGYSFNLDCTNIYLAMSLIFLAQAFNVNLSLAHEISILIVLMIASKGAVGVTGSGFIVLGSTLAALGNMEISEANATLAQVLPVAAIGVLLGVDKFMSEMRAVGNLCGNSVAALIVAIWDKQIDWEKFRYAMDNPEKFHNAGMN

SEQ ID NO: 54533 - protein, 508 aa, Campylobacter jejuni
MQKDNLIAFVIFIISTIAFVIWGFGYISQHQLILFILASIFGIFMAFNIGGNDVANSFGTSVGAKTVTIKQALIIAAVFELSGAIFAGAEVTKTIRSGIVIFPNSLDPMLFVIIMLAALLSSGVWIFIATKKGLPVSTTHSIVGGIVGASIMMGLLKFDGIQTLSMVKWSEILRIAISWIASPLLGGIVAYIIYSYIDKKILKPSEKLNDDLKNIKKERKKFKEEYFLNLKTKSQEEQIKELSAIALDEEEQENNFYRNKMKEFKDQEKDIDIYSILKTHMPIIACIAAAIISAMFLFKGLNNVSTLDILQNFWIIGIIGTISYVVTFAIVKIVKKTELNKTTDRIFSWFQIFTASSFAFSHGANDIANAIGPFAAILDVLKNGTINATSPVPFAALAMFGVALVVGLWFLGKEVITTVGSKLATIRPTTGFSAELGASIVILLATQFGIPVSSTHILIGAILGIGVYNKNANWIMMKPIGLAWIITLPAAGIMAALVFLGFKLSLGI

SEQ ID NO: 54534 - protein, 392 aa, Campylobacter jejuni
MIIKNAKIYGDSLQDIEIKEGKITNIDSNLQGEEILDAKGMTLLPSFVDLCVSLKNDKFSLANLELLENECLKGGISSIVLRDCMDFDEESFALFLQNLAQRKMQIFSSVRVKDANGKLKNLATLLNKGACALELDSSLDANTLKVSSQYAFMKDSPIFVRCYDKDFDDNGVMNDCEMSFELGLIGMSKIAETSQIAKMKELAKFYKNKVIFDLLSLKDSLVLLDEKDLKLVSIHHLIKDDSACEDFNTAAKLMPPLRSKEDVLALREVLKEGKISFLTSLHSAKSISLKDLAFDEAAFGIHSVCEFISLCYTFLIKEGFLNWQELCRFTSKNPSEFLGLNSGVIEVGKEANLVLFDENEEIFAPKSSLYSEDKLFGKIKMHIIKGKNILEK

SEQ ID NO: 54535 - protein, 298 aa, Campylobacter jejuni
MMRIAVIGAGKWGSALHLALKENHNCFISSLHQRDLEDFVSIKEALECEYLVFALSSQGMRAWLKENFINKGQKILIASKGIEDQSCQFLDEIFLDFVPKENFCVLSGPSFAAEVMQKLPTALMISGINQELCKKFASFFPDFIKTYIDNDVRGAEICGAYKNVLAIASGISDGLKLGNNARAALISRGLIEMHRFGKFFGTKEETFLGLSGAGDLFLTATSVLSRNYRVGLKLAQNQKLDSILAELNEVAEGVKTAYAIEKLAKMKGIYTPIVNEVVAIFKGKSVQEATQNLLKQND

SEQ ID NO: 54536 - protein, 472 aa, Campylobacter jejuni
MFEVVIGLEVHAQLNTKTKIFCSCATSFGEAPNTNVCPTCLALPGALPVLNEEAVKKAIAFGKAVNATINKKSVFNRKNYFYPDLPKAYQISQFDIPIVEKGELFINVKGENKRIGITRAHLEEDAGKNIHESNFSKVDLNRAGTPLLEIVSEPELRSSDEAVAYLKKLHSIIRFLDISDANMQEGSFRCDANVSIRPKGDTKLYTRVEIKNLNSFRFIQKAIEYEVKRQSEAWEDGTYEQEVVQETRLFDTTNLVTRSMRGKEEAAEYRYFPDPDLLPVLLKDEFLDIKIPELPDEKKVRFIDKLGIKESDAEVLISSLEMSRFFESLISQNLNPKLCVNWLNTELMGLLKGELTIENSPVDAQKLGVLIKRIEDGTISAKAAKDVLAFVFENTSVEIDEAIEKLGLKQVSDDSAIEAVIEQILNANADKVAEYKSGKDKLFGFFVGQTMKEGKGAFNPAKVNEILKTKLG

SEQ ID NO: 54537 - protein, 262 aa, Campylobacter jejuni
MRKGEKMTLFTKAFCVATLFTGFAWANEELKVGSSITPHADILRFIKSALQKQGYDLKIYEFNDGVIPNVMVENGELDANYFQHEPYLKEFNQRQGTHLVKVASIHIEPMAVYSKKHKEFHPKEGQSISIPNNPTNESRALRIVVSKGLIEVKDNELITPLDITKNPKKLKFVELKDAQLTRSLDDVDYSLINSNFAILAGLNPVKDGLYTESKYSEYGNIIAVKEGNENLPKIKALVKALQSNEVKKFIEEKYQGALIPTF

SEQ ID NO: 54538 - protein, 282 aa, Campylobacter jejuni
MCSFSFEVFPPRKDENIKNLHAILDDLGQLSPNFISVTFGAGGSINSQNTLEVASLIQEEYQIPSIVHLPCIHSSKEKITQILQKCKEKNLNQILALRGDICENLKKSKDFSYASDLISFIKKQEYFEIYAACYPEKHNESKNFIEDIHHLKTKVNAGTDKLITQLFYDNEDFYTFKQNCALADIDIPIYAGIMPITNKRQVLKISQLCGAKIPPKFVKILEKYENNTLALEDAGIAYACDQIVDLITSGVDGIHLYTMNKSKAAIKIYEAVKHLLKEELHA

SEQ ID NO: 54539 - protein, 226 aa, Campylobacter jejuni
MKDLFLFSSLLDASHTFSYFFHIGLVALIAVIVAMMATRSMQLVPRGMQNLGEAFLEGVLSMGRDTMGSEKGARKYLPLVATLGIIVFFSNIIGIIPGFHAPTASLNLTLSLAIIVFVYYHFEGIRAQGFVKYFAHFMGPIKLLAPLMFPIEIVSHLSRVVSLSFRLFGNIKGDDLFLMVILALVPYIAPLPAYVLLTFMAFLQAFIFMILTYVYLAGATVVEEGH

SEQ ID NO: 54540 - protein, 446 aa, Campylobacter jejuni
MAKNKALFECQACGNQQSKWLGKCPDCGAWDSFVELKAEQIKVLKELAQVSMKTSEAVCIEDVELEHFTRYSTDDNELDLVLGGGLVEGSLVLIGGSPGVGKSTLLLKIASNLAKQGKKVLYVSGEESKAQIKLRADRLEANTPNLFLLTELCLENILEELHKKDYSILIVDSIQTLYSNKITSAAGSITQVREITFELMRVSKAYNISTFIIGHITKEGAIAGPRVLEHMVDVVLYFEGDATKEIRLLRGFKNRFGGTNEVGIFEMTAKGLISAKDLANRFFTRGKAISGSALGVVMEGSRALVLEVQALVCESSYPKRSATGYEKNRLDMLLALLERKLEIPLGHYDVFVNISGGVKVSETAADLAVVAAIISSFKNRPLSKDSIFIGELSLNGEIREVFSLDTRLKEAKMQKFKNAIVPSKPLEDIGLKCFVAKELSQVLEWM

SEQ ID NO: 54541 - protein, 288 aa, Campylobacter jejuni
MFNFFKKGLAKTLENIVGVKGENKKITKDLLEEILLEADVSYEIVEEIIYYLPPQNEVKKEDLKRVMGSYFLYEKKETNQEKPFVELILGVNGAGKTTSIAKLAYLYKNQNQKVILGACDTFRAGAIEQLKLWAQKVDVDIVLTAQGHDPSAVTFDTISKAKAKDFDRVIIDTAGRLQNQKNLAHELEKIVRISNKALEGAPHRKILVLDGTQGNAGILQAKAFNELVKLDGVIITKLDGTAKGGALFSIARELELPIFYVGVGEQMTDLQEFNASAYLDTLLDPIFE

SEQ ID NO: 54542 - protein, 208 aa, Campylobacter jejuni
MEKTDFRALQKIRLFKHSKLNFKQDYKIFKECLKIIKLFKAKNILIFIPLHYEPNLIKFRHILNKNYKLFVPFMQDKSLKIVKLRLPFIKKRFGVLEPIDSFFKAKIDLAIVPVIGVDKNLKRIGHGQGFYDRFFENLNYKPHIIFIQSIDALSQNNLTQKHDISGKLYINPYKKYYKKERKNDRITYRTYSRYSRTRYRIFSCKKNQ

SEQ ID NO: 54543 - protein, 517 aa, Campylobacter jejuni
MIESLIALIAAIVGLGIGYLVAKKINDAKYEIFVEQAKAKAKAIEYEAELILKDAKNSILNAELEVKKKYEEKTHKFQKDFNQKFDDLSKKEQKLQQEEEKLKEDKEYLCKSQKHIQNLQSDVDKLKNKYQEKLDDVLKILEHSTGLTQNEAKEIILKKVEENSREQIAHIVRKYEEEAKNEAKRKANFIIAQATSRFAGEFAAERLINVINIKNDELKGRIIGKEGRNVKTLEMVLGVDIIIDDTPGAIIVSCFNLYRRAIATKVIELLVEDGRIQPARIEEIHEKVCKEFDSAILEEGETIVMDLGLNKIHPEIVKLIGKLKYRASYGQNALAHSLEVAHLAGIIAAECGGDENLARRAGILHDIGKALTHDFEGSHVDLGAELCKRYKEHPVVINAIYAHHGHEEATSIESAAVCAADTLSAARPGARREVLEAFLKRVSELEDIAKSKEGIKNAYAINAGREIRVIANAQLVNDDESVLLAKEIAAEIQEKMQYPGEIKVNVIRELRAVEYAK

SEQ ID NO: 54544 - protein, 386 aa, Campylobacter jejuni
MKKLLLLFIFVVQSFAALSVEELTWDNGDTLLKFLQRNSIPMSLYYGLDREDQELASDIAYKIKYQVLKDENNNIEQVLIPISDDLQIHIYKDKDGQYTLAFTPVSYQKEDRILHLTIKSSAYQDVYEESGSSTLARAMVRAFRGSINFRNIQKGDEVTLYYEQKRRMGKLWGDINIKMAMVEINKSAREVFSYNDIFYDRDGKELESFLLTKPVNYTRISSPFTTARYHPILKRYRAHLGIDYAAPTGTPVKSAGKGVVTFIGTKGGYGNVIQIKHDSGYMTLYAHLSRFAKIKNGQKVNQGQVIAYVGSTGMSTGPHLHFGVYLNNKAINPASVVKIAKSELSGKAKENFKHIIAGYEQVVKEALASNQPNPPKEEDFENYIEF

SEQ ID NO: 54545 - protein, 203 aa, Campylobacter jejuni
MFNGLIREIAKVQSYQNNTLSLKAKYCPNLGDSIAVNGACLSVTKLYEGGFEVELSRESRTHIVIENLKDKVHIEPALRYGDRIDGHLMQGHIDFIGTLEKIQKDENGVDFYISLPKEAMKFMAEKGSIGVDGVSLTINEILKNGIRLTIIPITFKETLFKDYQVGRKINIESDLLARYIYAQLQGKNKGLSWEEVERISYLY

SEQ ID NO: 54546 - protein, 545 aa, Campylobacter jejuni
MAKEIIFSDEARNKLYEGVKKLNDAVKVTMGPRGRNVLIQKSFGAPSITKDGVSVAKEVELKDSLENMGASLVREVASKTADQAGDGTTTATVLAHAIFKEGLRNITAGANPIEVKRGMDKACEAIVAELKKLSREVKDKKEIAQVATISANSDEKIGNLIADAMEKVGKDGVITVEEAKSINDELNVVEGMQFDRGYLSPYFITNAEKMTVELSSPYILLFDKKITNLKDLLPVLEQIQKTGKPLLIIAEDIEGEALATLVVNKLRGVLNISAVKAPGFGDRRKAMLEDIAILTGGEVISEELGRTLESATIQDLGQASSVIIDKDNTTIVNGAGEKANIDARVNQIKAQIAETTSDYDREKLQERLAKLSGGVAVIKVGAATETEMKEKKDRVDDALSATKAAVEEGIVIGGGAALIKAKAKIKLDLQGDEAIGAAIVERALRAPLRQIAENAGFDAGVVVNSVENAKDENTGFDAAKGEYVNMLESGIIDPVKVERVALLNAVSVASMLLTTEATISEIKEDKPTMPDMSGMGGMGGMGGMM

SEQ ID NO: 54547 - protein, 396 aa, Campylobacter jejuni
MAKKVIRQILLIYLTTTGIFLTIFFALWYQKLYEELVVLKGATLRENHRNIVISILNSRFTPIDISAKNIAQSTALKFAIFDAKKIVFSNIDFDLRKAKIELKGRGICDNKVFFLASMSADHYFLRHASNEEVNTNDGLQILIQGEDVGKDLFWIRTKVFSFAIMAFCILGLISYILVKIALKPLEDKISTLNRFIKDSTHELNTPLSVILMSIEQLEHQNLGDNTKFTRIKLAAKSLSQVYSDLVFYNFPNTLETEKQKFDLRILLEERLEYFKVFFEQKKITLKLDLNQANIFAPKSQISKLIDNLISNAIKYNKKGGVISIILKANFLSIADTGCGISKSNLNHIFDRYTRFNTDQGGFGIGLSLVKKVCDDNDIKIICESVENQGSVFKLNW

SEQ ID NO: 54548 - protein, 199 aa, Campylobacter jejuni
MLPKWDNSYSVHNAKIDEQHKKLFKLAAKVEVVSDRSVSKNEVKELLAEFFNYMKDHFNDEEKYMQLIGYPNLEEHRKIHKEIIQTMINLIKDIKSTNDLKEKLYIVAKKWLLEHILYEDMKVEKWRSSSLSTDDGGDVSFEAAEDEDNEHPQFYLYTCNCPGKIHDVPYSIHQKIELQGRKFTCKTCKQAIKFYKKYS

SEQ ID NO: 54549 - protein, 224 aa, Campylobacter jejuni
MTNILMIEDDLELAEITAEYLEKFDMKVDIAHEPYIGLSKLALKEYQLIILDLSLPGLDGLEVCEEIRKKYDTPIIVSSARHDITDKVNALELGADDYLPKPYNPKELQARIKSHLRRISNTKSAIAKSVKDLVYDQYKHIITMKGQELTLTNAEFDILSYLIKKEGGVVSREELVYNCSSISEDSSNKSIDVIISRIRQKMGDDPKTPKYIHSIRGIGYKLTQ

SEQ ID NO: 54550 - protein, 472 aa, Campylobacter jejuni
MKKIFLSLSLASALFAASINFNESTATANRVNPAAGNAVLSYHDSIKDAKKSVVNISTSKTITRANRPSPLDDFFNDPYFKQFFDFDFSQRKGKNDKEVVSSLGSGVIISKDGYIVTNNHVVDDADTITVNLPGSDIEYKAKLIGKDPKTDLAVIKIEANNLSAITFTNSDDLMEGDVVFALGNPFGVGFSVTSGIISALNKDNIGLNQYENFIQTDASINPGNSGGALVDSRGYLVGINSAILSRGGGNNGIGFAIPSNMVKDIAKKLIEKGKIDRGFLGVTILALQGDTKKAYKNQEGALITDVQKGSSADEAGLKRGDLVTKVNDKVIKSPIDLKNYIGTLEIGQKISLSYERDGENKQASFILKGEKENPKGVQSDLIDGLSLRNLDPRLKDRLQIPKDVNGVLVDSVKEKSKGKNSGFQEGDIIIGVGQSEIKNLKDLEQALKQVNKKEFTKVWVYRNGFATLLVLK

SEQ ID NO: 54551 - protein, 297 aa, Campylobacter jejuni
MNSLYETLGVSKNASADEIKKAYRRLARKYHPDINKEKGAEEKFKEINAAYEILSDEKKRAQYDQYGDSMFGGQSFHDFSRNTGGVNLDDILKDLFGGGFGGRSRGGFNGFSSKGFSSGFGGFGGFEEEILDSNLELHIPFEKAVKGGEHSFNFQGETIKFKIPHGIKEGEKLRIRSKGKQSRNGARGDLIIIVKIEESPIYTREDDDLYQKVDISLKTALFGGKINIKTLKEGKEEAIINITPNSKNNQKIRLKGYGVQNRKSDIYGDMYLILNVVLPNLDTLDEKFIELLKEKLP

SEQ ID NO: 54552 - protein, 664 aa, Campylobacter jejuni
MSELLIEIGTEELPAIPLLKELANIEKKWNNVLEEYRLVSDFKFYYTPRRLVFFHENFADKQEDSFAEFIGAPKNVAYKDGVLTPAGQSFLQKARISENELSFKEIKGKEVLYHQKAIKGLQSQEILGEMVEKFLKSLSFGKSMRWGANSFEFIRAIRSIACILNDELVNFQSYGVKSTKKTFIHRSVSYDLQDFNNAKEYFELLEKNYIILDPIKRKEKILEQFKLIESQKNIQIGEDEELLAEVVAITEYPNALLGSFEEEFLEIPSEVIITSMRENQRYFAVFNDKGLSNHFIVVSNAVCKDYSKIIHGNERVLRARLSDAMFFYQNDLQNGLKPEKLAKMTYLEGLGTMQDKSLREIKIAEILCQMLHNDKIENISTALKYAKADLATQMVYEFTDLQGIMGSYYAQKMGLDYQICLAIKEQYLPNSEQAPLPSTEFSSIVALANKLDTLIGLFSIGKIPSGTKDPYALRRAANGIIKIALNLNKEFDIQILLEKLSNHYKSFDMQILKDFIFERLYTFYTVNASFVKAVLSSQNTDLIHINQSVNALIKLSKKDNFNENFATFKRLANIATKNPHKVDESLFVQEAESKLYKAFQEKTKANSLQEKLENLFALKPFIDEFFNQVMINAEDEKLKNNRQALVYEIYAEFLKIADLKELSL

SEQ ID NO: 54553 - protein, 399 aa, Campylobacter jejuni
MQNYKKALFALALSAFCMGVTEFVMAGVLVDVEAYFSVDAKTAGYLTTLYAIGVVIGAPLITIPLSRFHRHTQLLINLGIFALANFIIFFSQNFYLTAFARFIAGTQHGVFFVIATLAVSAITPDDKKSSALAIMVTGLTVALVTGVPLGTFIGHYFGFKFIFLLIFIITSLAFFGVWHMMPKNLHPSPTNLKNLIPAFSHQNLLKTYTITICSCGAQFVLYTYLQKILVEISGFKVQDTAYILLLYGICAICGNLWGGKIVDKKGAIFSLRLILSIQVLVFLSVFLTMHSKILIIFSVALIGFFAFSTIPALKMLSITKAKRHTYKVIDSTVSVNEAAFNVGIALASFLGGIVLARLGIEFNALFSALFVSPALIFALLFAKDKLNYKKFQRKSFTKV

SEQ ID NO: 54554 - protein, 511 aa, Campylobacter jejuni
MKKADILVLDFGSQYTQLIARRLREQGVYAEILPFNVSLADIKAKEPKGIILSGGPASVYATDAYFCDKGIFDLNLPVLGICYGMQLMAHHYKATVAPAGHKEYGKANIEIKKDNALFKNLPKKQTVWMSHSDKVENLPQGFEVLATSENSPFCVFGNEDKKFFALQFHPEVQHSEFGKNILKNFAKYACNCESIWNMGSFAKTQAEKIREEVGNDKVLCAVSGGVDSSVVAALLASAIKEQIIVVFVDNGLLRSGEKEQVEFMFKNTLGIDLISIDASEIFLSRLVNVTDPEQKRKIIGNTFIEVFEEEAKKHKDVKYLAQGTLYTDIIESSVVGASKTIKSHHNVGGLPEKMNLKLIEPLKEIFKDEVRALGLELGLSKEVVYRHPFPGPGLAIRIMGEVNRASLELLRKADVILLEELKSTGWYDKTWQAFCVLLNVKSVGVMGDNRTYDNAVCIRVVDASDGMTATFSHLPYEILENISRRIINEVEGINRVVYDISSKPPATIEWE

SEQ ID NO: 54555 - protein, 486 aa, Campylobacter jejuni
MHGKIAIYMDSTGRGTVTNSANTFFDFNRQIWNDKKSMPSVGMLVEFRTLSSEKKAEDGKLVQTSKTITGIKPSKFQEFKEGDFITEHDFWKTDNDDELEDLQNSRRSAYITELYRTTDFDTIEKIPLSFTIPQAIQKYFAHEILSVETLQANLQDEKEIPCILDYLILKRFLFKAYDTLIFMDNSIDQTQFSALKSIMMHLENSYKQMMADQKPNITKIFNETFLSLQCHYQALVATIDTRKNRLASLEAQMKTLQSEINLKSNATDADPEKLKARQERLAKLQKEAEYYRTTLKRLDAIREDFYKKNYNIFENAFKLSREKLFKKIVTGLNLCATIMDVKIWHLSLKSSGVKNSYFTMSNIENSFCSLSFAEHYLSRLNKSALNPFDQKLLVYIQKITKEQRKKFLVVTSDLDLLCKLKIENFSQNPYYLVKYAPKKVNYQSLMRDNTFDIVYIDEKHVWENVADIILQGKHFDKSGKTKFKLI

SEQ ID NO: 54556 - protein, 719 aa, Campylobacter jejuni
MQYSIEINKNTEIFDIDKVAKQAAGAVLMRQGKSVVLATVAREEKQVEEDFLPLTVQYIEKAYAAGKIPGGYVKRETKPSDAETLTARIIDRSLRPLFPKGYAYPTQIVVMVLSADPKVDLQVMSLNAASVALYLSDIPMKAPVCGVRIGKIDGNFILNPNNEELQNSTLDLYVAGVKDELLMIEMRALPDQKENEIFIEAPYADVLTQTTSQNMNELSEDEILEALNLAQKAILNGSNAYEEAFSKHKKNSQIELKNEIEHPEILAFIENNFQKQIKEAINQMAKSERASELNKIAKEILNLEITKDWSEESVLNTLAKVKRKLIREQILNEGKRADGRSLNEVRPISIETNILPNAHGSCLFTRGQTQALVVATLGGENDSQMIDLLTEKNPISERFMVNYNFPGFSVGEASPIKAPGRRELGHGNLAKRALYPSVDENYPYVIRLVSEILESNGSSSMATVCGGSLALKAAGVPSLKLVAGVAMGLIFEDNKYAVLTDIMGLEDHDGDMDFKVAGSKDGVTALQMDIKLGGIDQEILKQALYQAKEGRIHILNIMEEAAKEIIVNEEVLPKLELFSVDPSKIVDIIGQAGKTIKEIVEKFGVSIDLDREKGEVKIAGSQNEQIKAAKDYIINITSSQKGTKKGPKDKDISGFELGQEFQGIVKKIAPFGAFVELKNGVDGLLHSSKIKHLNLSENQSLKVKISEIKNGKISVDLCE

SEQ ID NO: 54557 - protein, 394 aa, Campylobacter jejuni
MENFNRTLLVCWFGVFTTSMGLSQIAPILPFYIKELGHVDTSEIAFYSGLAFGITPLFMAVFSPLWAFLGAKYGYKNMLLRASFGMSVLTLWLSFAHSALEVVFVRGLTGIISGFTSAAVVFIAVIAPKEKVAYALGTLSTASISGSLLGPLFGGFVAEFFSISAVFDVVAFLIACSFVTIYFFIHGRKIQKEAKKNTQKVKENKTLIIVLFITTFVIQFGTFGVMPILSIYVEQIHQGGNLALWAGIVVAASGISNLFFAPKLGKIADKIGPSKIIFGALIFCGICFYLQAVASNVYTLIFVRLLIGVGLGGLLPCVNALLKKSVSAKNLSVIFGFNQTCQFLGNFCGAFGGGLMASHFSVEFVFTFVCLIFIINAFIFLAFEKKYIFSNQGL

SEQ ID NO: 54558 - protein, 223 aa, Campylobacter jejuni
MINVLMIEDDPDFAQLLSEYLAQFNIKITNFENPKSALNVGIQGYDCLILDLTLPGIDGLEVCREIRQKSNIPIIISSARGDLSDKVVGLQIGADDYLPKPYDPKEMYARIMSLIRRTKRVEHTNNENINSAFKIDERRHEITYEDKVLTLTPAEFEILEYLIQQHGYSVSREQLVSRCKNLKDKDSKSLDVIIGRLRVKIGDSSKSPKHIFSVRGIGYKLIG

SEQ ID NO: 54559 - protein, 190 aa, Campylobacter jejuni
MVKGLEKFNELVESFANLPTIGKKTAIRLAYHLCINNQIDGMKLAHNIENAIRFIKPCEQCGALSENELCEICSDKERNKNILCIVESPKDILTLEESQSYNGLYFVLDELNEEKLEKLKQIILKLNISELIFALTHSINSDATIFFIEDKFKGLNLTFSKIAQGIPSGVNLENVDLISLNKAMNFRTKI

SEQ ID NO: 54560 - protein, 659 aa, Campylobacter jejuni
MAKIFVFLVFVFTTLFGVYENELANFDKNFIGSKSEVQVKFHHQLKSLYIQSVINEDEKTKIEILKRLIISSNTLNLDDKSYANELKESGISETSINALRKAVIKDIKVQNISQDTEKSTFEPIKTVQKNEKKSSNEQIKNTEKTNSKTSQAPKSSIVSKAKSDDKIYVLKSSKTNQGVEFELNADLDKDQLKSFALDEKGNYRFISDFDGVLEGGKKEFKFDDYRLVISQFNPKTIRIVVYAKEKIPIDISFKEEKIIFSKETTSQKKTEQVSKISEKKQDQKTEIKTKVLETKKQDKKTNNEKENQEPLYVLDVDKISNAVVLNLSDDLDEKEIAVFDTKDQKFRYVVSFKGVLEGNRKSFTFGQNVITVTQYNPKTVRVVLSAPKEFKLLKELDNNNLTLGFYIQTTNQNANKKATQSSSKTLNTNYKSGKLVVIDAGHGGKDSGALSDKKGSLKEKDIVLSTALKLGNELKKRGYKVLYTRSSDKFINLRDRTKYANDKRADLFISIHANAAPNATKAKSSEGVETFFLSPARSERSKKAAEKENQGDFEEINYFSKQSILNFLNREKIVASNKLAIDVQKNILTQTRKKYKIVDGGVREAPFWVLVGAQMPAILIEIGYITHPNEGKRIANKAFQDLLVKGIADGVESYFYNNR

SEQ ID NO: 54561 - protein, 363 aa, Campylobacter jejuni
MNLQPLQIGKHTIKYPIFQGGMGLGISWDRLASAVSLNGGLGIISSVGTGYYEERKYASKELNAKPYGSENFYSRKGLQALINNARKVCGDAPLGCNILCASNDYARIARDACEVGFNVIVSGAGLPTNLPEFTADFPDVALVPIISSAKALKIICKRWQSRYNRLPDAVVLEGPKSGGHQGFTYEQCLDPNYQLEKLIAPVVEEAKNWGSFPVIAAGGIWDKKDIENAISLGASGVQMGTRFIGTFECDASEEFKSVLLASKEEDIELIKSPVGYPARGVRTNLLNLVDKRMGPKINCISNCVAPCGRGKEATKVGYCIADRLFDAWSGKKETGLFFTGANGYRLDKLISVKELMEKLVNGE

SEQ ID NO: 54562 - protein, 401 aa, Campylobacter jejuni
MDIKKILAEVKRGCAELIDEERIENLIKNYYEKGENFFIKAGFDPTAPDLHLGHSVVLTKMAFLQKHGAIVQFLIGDFTGQIGDPSGKSATRKKLDKEQVLINAKTYKTQVFKVLDKEKTQIKFNSTWLNELGAAGIVELTSTFSVARMLERDDFTKRFKEQSPISICEFLYPLLQGYDSVALKSDIEMGGTDQKFNLLMGRQLQRVYNIGKEQAVIMMPLLEGLDGVNKMSKSLNNYIGVTEKANDMYAKILSISDELMFRYYELLSQKSLEEIAQIKKDIEQGNLHPKKAKENLALEITERFHSKEEANNAKSEFDRIHSQNALPSDMAEFEIQGKIWLAKALVECGLESSTSAARRSISANAVSVNSQKVSDEQMYLEQGEYILQIGKRKFAKLKVKE

SEQ ID NO: 54563 - protein, 731 aa, Campylobacter jejuni
MKPIDEELLLEQLIDNVKNCKDLEAAKALLFEICGHDAILEKAVDYCIFCHEGQFRKSGEPYAVHPILVATLVGFLSENKSNILAALLHDVIEDTNCTEEELREQFGSEVLKLVLGLTKIIEIREDNLISSKSKKSLTKSALTFRNMLLASIEDVGVLIVKLCDRLHNMLTLDILREDKQKRISEETLVVYAPIAHRLGISSIKNYLEDLSFKYLMPDEYKLIDNYINSNNQEMQLGLNEFISKIELLFLSNGFRQGSFEIQKRIKHSYSIYLKMQRKGIGIEEVLDLLGVRILVEKVSDCYLALGILHTHFNPLVSRFKDYIALPKQNGYQTIHTTLFDAKSIIEAQIRTFDMHKIAEFGIAAHWKYKEDGSVVAPRLDWLTDISMQSINNLENAEDYNAIELYEYAKDSLYVEDVAVYSPKGEIFTLPRGATVLDFAYEVHTKVGLHAKSAYVNRIKVPLLTELKNGDIVRVVTSNDKFYRCSWIDSVKTGKAKASIREFCKQKIREINLASSINMLSFIFGVDKNRIETWIEKENLVRRIRQVATDSAYLKDIVNGLKKYAKKSYWFDKYEIKEQKIGNFTLYCNHKIANVDFDFCCHPKRGDAVLAFVKGGNAIVHHKLCDRADKMIDNNQDMVFIKWDSNIPKSYKLIFSLENKKGVLAEFLAFLAKMQINLLTINLSSDLNSAVDYFEITMEIPDNINPDSVKDRLKSRCKILDFTSLNDAYKES

SEQ ID NO: 54564 - protein, 239 aa, Campylobacter jejuni
MQERKRVLVKFSGEALAGENGFGIENSILKFIASEIKELIKNQIEVGIVIGGGNIIRGVSAAKGGLIKRTSGDHMGMLATVINAIAIQEALESSGLEVRVQSAIQMEAFCETYIMRRAQRHLEKGRVVVFAAGTGNPYFTTDTTAILRAVEIDADMVIKATKVNGVYDKDPKQFDDAVFLNTLSYDEAMQDNIKVMDDTAIALAKDNKLPIVVCNMFEEGNLLKIIQGDTSLCSTVKNN

SEQ ID NO: 54565 - protein, 447 aa, Campylobacter jejuni
MKQFGLDRRTFKILLAGYIIIALFGALLLHSSWAHTTPIDFLDAFFTSTSAVSMTGLVVKNTAVDFTLAGQIIILALVQIGGLGYMGIGLFVYILIRKKVGFSARNLLKESLFYPSMDGLFKFFKKVLLFIFTIELIGAILLTMRFALEMNFKKALWFGIFHSISAFNNSGFTIFEHGFIAYKHDIAINLIITSLIIIGGLGYFVLVELYFFQRKKLQNLSLHTKMVVVASIFLIFSSTLIIFAFEYSNPQTIGHFSFFDKILSSYFIAINYRTAGFNTLDMGHLHDASLFFGSLFMVIGGAPGGTAGGMKVTTVMVLLLYAYWSIRDGRVRIFGHEIPRETISKAFIIAVGSAVYIVIAVILLSLLESKFDFIALLFETSSAFATVGISVGNGGTLSLCALFSDPSKVIIIIMMLSGRIGVFAFLLSVFKQDKAIHLKFPEGKVNL

SEQ ID NO: 54566 - protein, 208 aa, Campylobacter jejuni
MKNIHCINHPLIEHKLGILRAKETKPFQFRMLIDEISSFLLFEASKDFSLKEIEISTPIQKTTVKKLDEKIMICPILRAALGMLESVFKMIPDASVGFLGFVRNEETLKADFYFQKLPKDAKKRTAIVIDPMFATGGTAIDACNFLKSQGVKKIKFISILAAPQGLKKFSQMHDDVEVFVACIDEGLNEKGYIIPGLGDAGDRVFNTL

SEQ ID NO: 54567 - protein, 463 aa, Campylobacter jejuni
MHEKLTTRFAPSPTGYLHIGGLRTALYNYLYARKNGGNFLLRIEDTDLKRNSKEATKAIIEAFKWCGLEHDGEVTYQSERFDLYKEYVKKLLDEGKAYYCYMSKEELEELRAKQEAAKERPRYDGRYREFTGTPPQGIEPVVRIKAPQSGEIVFEDGVKGEVRFKAEDIMDDFIIARSDGTPTYNFTVVIDDALMGVSDVIRGDDHLSNTPKQIVLYEALGFKIPKFFHVAMIHGEDGKKLSKRHGATDVMEYKEMGILPQALLNFLVRLGWSHGDDEVFSLEDLKKLFDPYHINKSASCYNAKKLEWLNAHYIKTLPFEEINRQLKDLGFDLSVYEKAGFLLDLLRERAKTLHDIINGAKSIVNAPQNYDENAVQKFVNKNNLELLQAFANTLKDQKTGKDFEDFTNDFLEKKEAKLKDLAQPIRIALTGSAVSPSIFEVLEFLGVDECKKRIDNFLKVRGK

SEQ ID NO: 54568 - protein, 443 aa, Campylobacter jejuni
MEIKSILIANRGEIALRALRTIKEMGKKAICVYSEADKDALYLKYADASICIGKARSSESYLNIPAIIAAAEIAEADAIFPGYGFLSENQNFVEICAKHNIKFIGPSVEAMNLMSDKSKAKQVMQRAGVPVIPGSDGALAGAEAAKKLAKEIGYPVILKAAAGGGGRGMRVVENEKDLEKAYWSAESEAMTAFGDGTMYMEKYIQNPRHIEVQVIGDSFGNVIHVGERDCSMQRRHQKLIEESPAILLDEKTRTRLHETAIKAAKAIGYEGAGTFEFLVDKNLDFYFIEMNTRLQVEHCVSEMVSGIDIIEQMIKVAEGYALPSQESIKLNGHSIECRITAEDSKTFLPSPGKITKYIPPAGRNVRMESHCYQDYSVPAYYDSMIGKLVVWAEDRNKAIAKMKVALDELLISGIKTTKDFHLSMMENPDFINNNYDTNYLARH

SEQ ID NO: 54569 - protein, 151 aa, Campylobacter jejuni
MTKEEIKELVNLFAEANISKIKIKEQDGFEIELERDMCCDVPAPVCPPVPAPQPINVSVVNEAQPSQSVKSNKPSINSPMVGTFYQAPSPGAAPFVKVGSTVKKGDTIAIIEAMKIMNEIEAEFDCRIAEILVADGQPVEFGMPLFAVEKL

SEQ ID NO: 54570 - protein, 334 aa, Campylobacter jejuni
MFNKKNILITGGTGSFGKTYTKVLLENYKPNKIIIYSRDELKQFEMASVFNAPCMRYFIGDVRDKERLSAAMRDVDFVIHAAAMKHVPIAEYNPMECIKTNIHGAQNVIDACFENGVKKCIALSTDKACNPVNLYGATKLASDKLFVAANNIAGNKQTRFGVTRYGNVVGSRGSVVPFFKKLISEGAKELPITDTRMTRFWISLEDGVKFVLSNFERMHGGEIFIPKIPSMKITDLAHALAPNLSHKIIGIRAGEKLHEIMISSDDSHLTYEFENYYAISPSIKFVDKDNDFSINALGEKGQKVKDGFSYSSDNNPLWASEKELLEIINHTEGF

SEQ ID NO: 54571 - protein, 502 aa, Campylobacter jejuni
MTTHIYDFLEKSLIKFSEKTAFVEPFVKERKEITYKDFDLFSKKLASEILKTLGNDNPTQAPVLIILPKGIDCLISFFGVALSGNFYTLLDEKSPKERVEKVIEVLKPKLFITSKDLNFNLDLPTLYTQDFESFNIDESLIKHAKEKHIDTNLLYVFFTSGSTGIPKGVSIAHKSVIDYTFWVCETFKFDENEILANQAPFYFDNSILDIFSSVKSGATLHLLPNHLFAFPNKILECLEKEKVSTIFWVPSVLIYFANTEALNNFSLNALKKMLFCGEIMPNKQLNIWRKHLPNALFANLYGPTEITDVCSFYIINRTFKDEELLPIGKACKNTELLVFDENMNFISPKQIGVKGELFVRGTSLSLGYYNDKEKTKQAFIQNPLHDNYLDLLYKTGDIVSYNEFGELLCYGRADNQIKYMGHRIELGEIESVINSHVNIKNSACIFKEDIICFYESEEEINFKDFLKDKLPSYMIPKNFIKLDKFKLNQNGKIDRKVLKELV

SEQ ID NO: 54572 - protein, 248 aa, Campylobacter jejuni
MLKTRIIPCVLLKNSQLVKSIEFKDFRTIGHLTSTMRIYNARNVDELIILDIDASKSGEIDFESIEDLAKECFMPLTIGGGIKTLEDIQKILNLGADKISINSKALEDMDFISKAGNRFGSQCIVCSIDVKRKGDQFCVYDRGNLLEKSPLELALEYEKKGAGELLLTSVDFEGKAKGYDLELLKIFQNKLKIPLIINGGLSKPSDGVEALNLGADALAGAYIFHFSKYTPKDVKEELARQGFAVRLL

SEQ ID NO: 54573 - protein, 335 aa, Campylobacter jejuni
MKNLILAIESSCDDSSIAIIDKNTLECKFHKKISQELDHSIYGGVVPELAARLHSEALPKMLKQCKEHFKNLCAIAVTNEPGLSVSLLSGISMAKTLASALNLPLIPINHLKGHIYSLFLEEKISLDMGILLVSGGHTMVLYLKDDASLELLASTNDDSFGESFDKVAKMMNLGYPGGVIIENLAKNAKLKNISFNTPLKHSKELAFSFSGLKNAVRLEILKHENLNEDTKAEIAYAFENTACDHIMDKLEKIFNLYKFKNFGVVGGASANLNLRSRLQNLCQKYNANLKLAPLKFCSDNALMIARAAVDAYEKKEFVSVEEDILSPKNKNFSRI

SEQ ID NO: 54574 - protein, 241 aa, Campylobacter jejuni
MFNTTRIISALVMIGAIIIIALIDQFFINFIVFAVLLYLSFSEAKKLFALENISIIPLAIAFILGSLSHKALLFGILVLLLVVGYLVYKKASLKPALIYIYPSLPILALWQVYLDQGMFALFWLIIIVAACDSGAYFIGKLMGKTPFSPTSPNKTLEGVIGGLICASVIGTILGVFVYSFWLSLLCSFFVAIFAVIGDLLESYFKREAGVKDSGDLIPGHGGVLDRIDAVIIAAFVMVALL

SEQ ID NO: 54575 - protein, 435 aa, Campylobacter jejuni
MKYTELLQLQTFFSRFKKIDFIKRINDNILELSFDRERFIFDLTRAMSAIYTAKFNAKNYNAPFDFMLKKYFSNAFIKEVKVLEGNRILCFSVKANKAYKSYESKIYFEFTGKNTNVILTDEKDLIIEALRHIDKSYRVVKPNVILESLKPYKMDENFEEIKDFADYFSRKFTSIYESKIKQIKNLKLAQVDKKIQNLQELFSSLDEENSLLLKALEYRKRADVLFANLSVLKDYEREFKLDDFEGKELEFKLEFNPKQSANLYYKNAKKLEQKAKNLNIQRQNLKEKLDFTLSLKELLLQAKSEIELEILLPKKNSKKNQDHKQEDLVANFYFNEFKICVGKNEKGNEFLLKNAKKDDLWLHVRDIPSAHTLIVSNKQKISLDVIEFAARLCVSFSKLKKGSYWVDYTLKNFVKVQQKAFVNYTNFKSINITKD

SEQ ID NO: 54576 - protein, 322 aa, Campylobacter jejuni
MFFKHILSLKVLIALLLFFGMISLFIGVISINVKDILNLNSTQLEIITLTRIPRLIAILLTGMSLSICGLIMQQLTQNKFVSPTTAGTMDCAKFGILISLIFFTGASFFTQAIIASIFALLGSFIFIQILRKIKLKDVIFVPLIGLMFGGIISAITTFFAYALNYIQNIQGWLQGSMANVMQGNYELLYISLPLFILAYFLAHKITIVGMGEDIALNLGISYNGILFLGLMIVSIITSLVIVSVGIIPFLGLIIPNLVALYLGDNLRKNLIYIALCGALFLLVCDIISRLVIFPFEMPLSITTGVLGSLIFIFLLLKRKVYA

SEQ ID NO: 54577 - protein, 251 aa, Campylobacter jejuni
MIKLKNITKFYDNKVIISDLSLDFHKGKITSIIGANGAGKSTLLALASRLIKPSSGEIYIDGMNLKNYKEQILAQKISILKQQNNINLRLKVEELVAFGRFPHSQGRLNTNDKIKINEALEYMELSNLRNEFLDTLSGGQKQRAFIAMIIAQDTEFIMFDEPLNNLDMKHSVQIMQLMKNLVKDFNKSIAVVLHDINFASIYSDEIIALKDGKLLKQGSKDEIINQENLKQIYDMDIPVSQINGKKICIYF

SEQ ID NO: 54578 - protein, 598 aa, Campylobacter jejuni
MCGIVGYIGNNEKKQIILNGLKELEYRGYDSAGMAVMQEGELSFFKAVGKLENLANKCTDFESQGYGFAIGHTRWATHGKPTEINAHPHLGQYSCVIHNGIIENYKEIKDKLEKEGVSFLSQTDTEVIVQLFEFYARNLGVFEAWQKTIKELRGAFATLLVTKKDPNHVYFAKNAAPLIIGKNANKEWYFSSGDAPLIGSCDEVMYLEDLSLGYASKDELVVYENDILKSLCFSKLSGDKAYAKKDGFRFFMEKEIYEQSRVMSEVLMGRIQGDEVVFDELNNEDLSQVDEITLCACGTSYHAAMASAYLFERIAKVKAKVEIASEFRYREAIIKKDSLFIVISQSGETADTLEALKIAKEQGAKTFAICNVDNSNIVRLAHLSLLTRAGIEKGVASTKAFATQVLTLWMLAIFMAQKRNLNVSAEIKALLHTPNCVSVKQALHEKIHRLSKRYLDGHGFFFIGRDVFYPLALEGALKLKELSYLHAEGYPAGEMKHGPIALADSKLYTIALMPKHMLYEKTKSNVEELIARDSTVLSISPLEFDLSDDFIKTNEQDHYMCEFFEMMVITQLLAMEISIRLGNDVDMPRNLAKSVTVE

SEQ ID NO: 54579 - protein, 232 aa, Campylobacter jejuni
MRIKFISFILIFFTIFAFAKEQNLDDFEQEYQNYQVNDPLSGYNKAMTSFNVALYDYGLRPVLKGYNAITPEFIRLGARNFFDNLLAPLRFVSNVLQFKFEEAGEEFKRFTANTIMGFGGLMDVASKMGLKKHPADLGTVLAHWGVGSGFHIVLPILGPSNLRDTLTLPATWYASFTAYIDPTWASIAISAYGFGNELSFRLDEIDEIYHNTPNLYPFLRDAYEQRRNELSK

SEQ ID NO: 54580 - protein, 200 aa, Campylobacter jejuni
MKIILATSNKHKVLELKEILKDFEIYAFDEVLMPFEIEENGKTFKENALIKARAVFNALDEKQKKDFIALSDDSGICVDVLEGNPGIYSARFSGKGDDKSNRDKLVNEMIKKGFKQSKAYYVAAIAMVGLMGEFSTHGTMHGKVIDTEKGENGFGYDSLFIPKGFDKTLAQLSVDEKNNISHRFKALELAKIILKILNKG

SEQ ID NO: 54581 - protein, 474 aa, Campylobacter jejuni
MKKLTNDFGNIIADNQNSLSAGAKGPLLMQDYLLLEKLAHQNRERIPERTVHAKGSGAYGEIKITADLSAYTKAKIFQKGEVTPLFLRFSTVAGEAGAADAERDVRGFAIKFYTKEGNWDLVGNNTPTFFIRDAYKFPDFIHTQKRDPRTHLRSNNAAWDFWSLCPESLHQVTILMSDRGIPASYRHMHGFGSHTYSFINDKNERFWVKFHFKTQQGIKNLTNQEAAELIAKDRESHQRDLYNAIENKDFPKWKVQVQILAEKDIEKLGFNPFDLTKIWPHSFVPLMDIGEMILNKNPQNYFNEVEQAAFSPSNIVPGIGFSPDKMLQARIFSYPDAQRYRIGTNYHLLPVNRAKSEVNTYNVAGAMNFDSYKNDAAYYEPNSYDNSPKEDKSYLEPDLVLEGVAQRYAPLDNDFYTQPRALFNLMNDDQKTQLFHNIAASMEGVDEKIITRALKHFEKISPDYAKGIKKALEK

SEQ ID NO: 54582 - protein, 274 aa, Campylobacter jejuni
MIMKGKKGLIVGVANNKSIAYGIAKACFDQGAELAFTFLNDALKKRVEPIAQEFNSNFVYELDVNNNEHLDSIAEKIKKDLGEIDFVVHAVAFAPKEALENSFLETSKEAFDIAMQTSVYSLLSLTRAVLPILKDKGSILTLSYLGGVKYVPHYNVMGVAKAALESSVRYLARDLGVKGIRVNAISAGPIKTLAASGIGDFRMILKYNEINSPLKRNVSIEDVGNSAMYLLSDLANGVTGEIHYVDAGYNIMGMGDVEKNEEGQTVLCWDNQKG

SEQ ID NO: 54583 - protein, 400 aa, Campylobacter jejuni
MSDIISIKDIDLAKKKVFIRCDFNVPQDDFLNITDDRRIRSAIPTIRYCLDNGCSVILASHLGRPKEISSKYSLEPVAKRLARLLDKEIVMAKDVIGEDAKTKAMNLKAGEILLLENLRFEKGETKNDENLAKELASMVQVYINDAFGVCHRAHSSVEAITKFFDEKHKGAGFLLQKEIDFASNLIKHPARPFVAVVGGSKVSGKLQALTNLLPKVDKLIIGGGMAFTFLKALGYDIGNSLLEEELLEEANKILTKGKNLGVKIYLPVDVVAAPACSQDVPMKFVPAQEIPNGWMGLDIGPASVRLFKEVISDAQTIWWNGPMGVFEIDKFSKGSIKMSHYISEGHATSVVGGGDTADVVARAGDADEMTFISTGGGASLELIEGKELPGVKALRSKENE

SEQ ID NO: 54584 - protein, 332 aa, Campylobacter jejuni
MAVKVAINGFGRIGRCVARIILERNDIELVAINDTTDIELTKYLFKYDTVHGEFKGSVDSEGDDLVVNGKKIKVFKSRNVKDLDFAKHGAQIVLECTGAHLTMAKCQEFIDMGVQKVIMSAPAKDDTPTYVLGVNSELYKGESIISNASCTTNCLGPVCRVLQDNFGIEKGLMTTIHAYTNGQSIIDAKAKDKRRSRAAAQNIIPTSTGAAKAMKLVMPELNGKLHGQSMRVPVIDVSSVDLTAQLSRKVSKDEINEAFRKAAATNLKGILMVDDDERVSSDFITCSYGAIVASDLTQVIADDFIKVIAWYDNEWGYSSRLVDMAVYIANKA

SEQ ID NO: 54585 - protein, 116 aa, Campylobacter jejuni
MKKILILLTLCAFAFGASECDRKIDRINKEISFSKAHNDTARTLSLELALKQVQNDCAKDPMFYDKKLEAKKLKEQEVEKIEKELDALKEQKDYMSKAEYKAKKEALKEQKEKIKK

SEQ ID NO: 54586 - protein, 115 aa, Campylobacter jejuni
MRVGCDIIAISRIEKIHSRHGKNFLDKFLNPKEQILIKNPATLAGLWAAKEAASKALGVGICELCSFFDIEISKDEKNAPKLKYSQKITKDFNITQTSLSISHDNGFAIAIVAVV

SEQ ID NO: 54587 - protein, 170 aa, Campylobacter jejuni
MKNNPYIIWLTGLAGSGKTTIGQALYEKLKLKYKNLIYLDGDELREILGHYAYDRQGRIDMALKRAKFAKFLNDQGMMVIVTTISMFNEIYDYNRKQLKNYYEIYIECDMHELIQRDQKGLYTKALNKEIDNVVGVDIEFDKPEADLVINNSCRNNLEEKVELIIKKLAL

SEQ ID NO: 54588 - protein, 368 aa, Campylobacter jejuni
MYDYLIVGSGLFGSIFAYEATEKGYTCLVVEQREHIGGNCYTENIKNINVHKYGAHIFRTSDQNIWDYMNQFCEFNHFINSPIAIYKDEIYNLPFNMNTFSKLWGIKTPNEARKIIEMQKQIIQHPPKNLEEQAISLVGTDVYEKLIKGYTEKQWGRSCKDLPASIIRRLPVRYIYDNNYFNDPYQGIPKGGYTAIFDKMLKKSKVILNTDFLKYKDKFKNKAKKIVFTGCIDAYYDYRYGALEYRSLKFEHKILNLDNFQGVAVVNYTDKEIPYTRIIEHKHFEFGNTDTTVISEEYPLEWIKGIEPYYPINDEKNQALYEKYKQLAKHESNVYFGGRLGEYRYYDMQDVVRSALLFCKNELKNKQG

SEQ ID NO: 54589 - protein, 393 aa, Campylobacter jejuni
MKIVIVGIGYVGLANAILFSKNNENEVVLLDIDENKIQSINNHKSPIKDKLIEKFFVQNISKLHATSNIKEAYFNADFAVIATPTDYDEQLNFFDTRSIENVLKDIKNINSKINVIIKSTVPIGYTKTIKQKFNMSNIVFSPEFLREGSALYDSLYPSRIIIGDKSVLGKTIGDLFLKNIEKKNVDIFYMDSDEAESVKLFSNTYLAMRVGFFNEVDSYARKHNLNSADIIKGISADDRIGKYYNNPSFGYGGYCLPKDTKQLLANFYNIPNSLIKAIVETNEIRKKFITQLILEKKPNILGIYRLIMKQNSDNFRNSVIIDIIKYLQEYNSNIELIIYEPLVKEKKFLNIKVENDFNVFGAKVDLIIANRFDDKLKEIKDKVFSADVFYTDI

SEQ ID NO: 54590 - protein, 552 aa, Campylobacter jejuni
MKKILILLFSCILCFGAVDVSQIISAEDQGSATTSIDQNLSSNYDIANKENNLTKIHQILVFGAHLFNGNFKNYNQRVYNPDYKIAVGDQISLKIWGAVEFSQVLVVDSQGNIFIPKVGAVNLLGVKNSALVSVIKARVNKIYKSNVFVYADMNAYQNVSVFVTGNVNAPGLYQGLSSDSVIQYLDKAGGINLEYGSFRDIQILRNNSVIKNIDLYDFLLKGQMDLFPFRSGDVILVGNVQNYAFVNGDVQRPFRFELSNDIKTLADLARVSGAKPIVTNAIVKSYGEDHKLDVSAYNKMQFSKVLLRTGDEVEFHPEYVSENITISVNGEHNGLKTLVVGKGTTLEDISKLIKANPQSNMQALQVFRKSVARTQKELINAQLKELETLALTSGSVTAQGAAIRAQQAKTILEFIQRAKQVEPKGQIVIDNPKSYNSVILEDGDTINVPSKNNLIIVQGEVSLPGAFVYDKGKDLRYYINLAGGYGERADTSKVLVIRSNGKAEKYHSGIDMKRGDSVLVLPKVDSENLQIFSMLTQILYQIAIATNVVLNL

SEQ ID NO: 54591 - protein, 372 aa, Campylobacter jejuni
MEENKTLLEKIKDLSIFDSFKIVWFIMIFVVIYYTLIAAPRYVSTMILDVRSTSGESAQTSGILSLLSSTSTASEDLNYLKGYIESSDMLKILDEKIKLKNLYQEQHIDLPFKIWDSSSIESYLKYYQARVKVHTDETTKLLKVEVEGFTPKSAHLIAQAIMQESEKFINEISHKAAREQMAFAENEVQKYKERYQKAQNDLIAFQNKYGVFDPLKQAETKASLVAQIEANLAQKEAKLLTLQSYMNDAAPEVVALKAEIEAIKKQLLREKSKISANNSSQKLNDLAAKFQDLTIEATFAQKAYEAALKAYESARIEALRKIKQLVIIQSPDIPESAKYPERIYDILTAFIVLSLIFGIVKFIKMIIEEHKY

SEQ ID NO: 54592 - protein, 220 aa, Campylobacter jejuni
MIKLINLTKSYPLFSGGRHYVFKNFTFEFPENCSIGLMGYNGAGKSTLMRLLSGAELPDSGKIITNKKLSWPLGLNGAFQGSLTARDNAKFVARVYGYKGKELQEKVKFVEDFAELGKFFDEPMKTYSSGMSARIAFGLSMAFDFDYYLIDEAGAVGDPAFREKSVKLYRERLSKSKVIMVSHNVAEIKEWCDKIIYMKNGQITVYDDVDEGIAVYQGKV

SEQ ID NO: 54593 - protein, 321 aa, Campylobacter jejuni
MQIKDEILSLLKRGKNLLAFSYGSDSSVLFYLLMQEKIDFDLVMINYKTRKNSDLEELKAKELALKFHKKIFIKHAPKFQSNFEKKARDFRYDFFEKICLEQGYDHLILAHHLNDQFEWFLMQLSRGAGLAEILGMQECEKRSNYTLLRPLLFISKDEISSFLKEKDIFYFHDESNENEKYFRNYIRKNFSNAFVSEFHQGLKRSFSYLDEDRKKLYDFENIKEIQGLLICPKNESLIARAVKMKGLLLSTAQRKELLKGDCVLGGKIALAYKNEQAIVFEYETCQKLPKNFKEECRIAKIPRLLRAYLYNHKIDISSLSF

SEQ ID NO: 54594 - protein, 439 aa, Campylobacter jejuni
MSKLYLMSLGCNKNLVDSEIMLGHLSAYELCDEPSKADVLIVNTCGFIDSAKKESINAILDLHEQRKKDSLLVVTGCLMQRYREELMKELPEVDLFTGVGDYERIDEMILKKTNLFSNSTYLQSENSKRIITGSNSHAFIKIAEGCNQKCSFCAIPSFKGKLKSREISSIIAELKDLVARGYKDFSFIAQDTSSYLFDKGEKDGLIRLIDEVEKIKGIRAARILYLYPTSASEALIKRIIASEIFINYFDMPLQHISDNMLKIMKRGANSTRLKEMLNLMKSAPNSFLRTGFIVGHPGESEADFEELCEFVKDFGFDRISVFAYSKEEDTAAFDMEQVPFKVINKRLKIIEKIVDEVIEKSFEKEVGQKRLVVCTGKSSEGEFFIAAKDLRWDREIDGEILINESECGNLEMGQIYECEILQNLDKKLLAKALRKVDAN

SEQ ID NO: 54595 - protein, 365 aa, Campylobacter jejuni
MDNYEFSELLKTLKNKVGNIASIIKPENIQTRLKEIEELENSPSFWSDVKQAGIIGKEKTKITNLLKNYENAFNALNDASELFDLANSENDTETLEALFNDAPKLEDTITSLEISMLLSGENDGKNAIVSIHPGAGGTESNDWASILYRMYLRFCEREGFKVETLDFQEGEEAGLKDVSFLVKGENAYGYLKAENGIHRLVRTSPFDSAGRRHTSFSSVMVSPELDDDIEIEIEEKDIRIDYYRASGAGGQHVNKTESAVRITHFPTGIVVQCQNDRSQHKNKATAFKMLKSRLYELELMKQQDSANTGEKSEIGWGHQIRSYVLFPYQQVKDNRSGEAFSQVDNILDGDIKKMIEGVLIALKAE

SEQ ID NO: 54596 - protein, 273 aa, Campylobacter jejuni
MNKEDFIIKAFLNKKNGDDGAIIDDWCFSKDLFFENVHFKREWFSLEQIATKAMLVNISDAISMNAVPKYALLGLALPKNLSENEIKALQKGFLKTARKFNIKIIGGDTISNDKIDISLTIISKINDKAVFRKGLKKGHLLAYTGKLGRSLKGLEILQNGGTLKPNHVFIKPKLRASFFYEIAPLISCAMDISDGLSKDLSRLLALNKCGISWFKKLDDYALYSGEEYEILFAFDEKERQNIEIIAKKHGVKLNIFGKAVKGKYEFRGREHHF

SEQ ID NO: 54597 - protein, 472 aa, Campylobacter jejuni
MIRLILILINILFCHYLYALDCQKRLFDISINEKLSIQESLDELAKYCSFSIIVKDKIAKEKLETLQNSVNIHQMSLDEIFNFFIKEHDLSYDFDGKILRISGINTKIFKISYITSIREGQSITKASVDAKPRQSEYSGSFDDAEDNMIKSMEKFDFWQNIEKEIIVLLKNSHEDYEAKTPIINPNAGLIIVTGTNSQLKSVKNYLQKLENRLKKQVIIDVSILAVSLNESHSSGINWQNFNIGLNSQVNNENSFIQFQNGQGFVKNLGLRANLNFDSIINFLSQNGKTSVLSNPKLMALNNQQAIISVGDTINYQVKESSKGTENGTTVSESYNNYSIFVGILLNILPEISDDGKIMLRINPSLSDFKYPEDNKRQKEPRTIAPDTIQKKLSSVVQVENNQTLILGGLISHDKSNEKNSINFLSKIPILGSLFKGEVLNSKATEIVFIITPSIVDSVNAPSLKDLGFKHYE

SEQ ID NO: 54598 - protein, 129 aa, Campylobacter jejuni
MATTYATGKRKTAIAKVWVKPGSGKISVNGVDLNTWLGGHEAIKLKVVQPLLVTKQETSMDIKATTLGGGYSAQAEALRHGISRALAAMDADFRALLKPKGLLTRDSRTVERKKYGRRKARRSPQFSKR

SEQ ID NO: 54599 - protein, 141 aa, Campylobacter jejuni
MTKITKPNEVKREWIVLDAEGKRFGRLLTEVATILRGKNKPCFTPNVDCGDYVIIINASKAVFTGANKAEDKLYHRHSGYFGSVKSEKFGDLLEKNPAKLYKLAVRGMLPKTNLGRAMLKKLKIYAGSEHPHTAQIAKEGK

SEQ ID NO: 54600 - protein, 219 aa, Campylobacter jejuni
MSIDFLAIISVAFLSSFGHCYSMCGGFNLLFINLNSKSNNLFLLTFIYNLFRIFAYIVLGIIFGTFGNILAINAKVQSLSFFILGIFMMILGFALIFRGNMLSFIENNVFFDSFVKKIIKKSKNFKGLKSAIFLGFSNGFVPCGLVYFFIANAMSKQNIFEGILVMMIFGISTLPAMLFFSKISQFFSDFLKNLFNYLSYGVIVCYGINLAYIGFKAFQ

SEQ ID NO: 54601 - protein, 372 aa, Campylobacter jejuni
MKAYIYLENDIFLSAKAFGKSGTFFGELVFNTSLTGYQEIISDPSYAGQFIVFSMPEIGIVGTNENDNESKEIFASGVLMRELSSSFSNFRAKESLQDYLEKHGKIGIYELDTRYLVKMIRNNGNLRAVISTEISNKEDLKIALEKSAKIDEVNFVKEVSTKKNYSHKQGVWNASFQKFNDAKRSEKKVAVIDYGVKTNILNELVEVGFEVEVYPYNVKADELITLYKKGEIQGVFLSNGPGEPRILKQEIAEIKKLAEAKIPMLGICLGHQLLSNAFGYETYKMKFGQHGANHPVINLDTKTVEITAQNHNYNVPEELAQVAHITHRNLFGDNVEGVRYKDYPIISVQHHPESSSGPHESKYIFKEFMNLM

SEQ ID NO: 54602 - protein, 416 aa, Campylobacter jejuni
MSKADIIVGIQWGDEGKGKVVDKLCENYDFVCRSAGGHNAGHTIWVNGVRYALHLMPSGVLHPRCINIIGNGVVVSPEVLIAEMAQFENLKGRLYISDRAHLNLKHHSLIDIAKEKLKGKNAIGTTGKGIGPSYADKINRTGHRVGELLEPQRLCEALIKDFEANKTFFEMLEIEIPSAEELLADLKRFNEILTPYITDTTRMLWKALDEDKRVLLEGAQGSMLDIDHGTYPYVTSSSTISAGTLTGLGLNPKEAGNIIGIVKAYATRVGNGAFPTEDKGEDGEKIAQIGKEIGVSTGRKRRCGWFDAVAVRYTARLNGLDALSLMKLDVLDGFEKIKICRAYEYKGMEIDYIPSDLENVQPIYEEMDGWDKVFGIKDYDLLPENAKKYIARLEELAGVKVKYISTSPERDDTIIL

SEQ ID NO: 54603 - protein, 934 aa, Campylobacter jejuni
  MISC_FEATURE (181)..(181): X=any amino acid
MSSVGENIKLTRRSFLKMAALSSLATPLLARSETLREASADELKEAYEGSKKVKTVCTACSVGCGIIAEVQNGVWVRQEIAQDHPVSSGGHCCKGSDMIDMVRSHVRLKYPMKKENGEWKRISYEQALSEIGEKLAAYRKENPESVMFLGSAKLNNEQAYYIRKFAAFFGTNNVDHQARIXHSATVAGVANTFGYGAMTNHLGDIQRSKCIIIIGANPAVNHPVGFRHFLKAKEKGAKLIVVDPRFTKSAAKADIYARIRPGTDIAFMYGMLKIIFDEGLEDTKYLDERVFGIDKIREEAAKWTVEEVENVTGISKELLVQITHEVAKNKPTTLIWAMGLTQHTVGTSNTRLAPIVQMVLGNIGKFGGGVNILRGHDNVQGASDMACLSENLPGYYPLNEATWRYYAKIWGVDYEWLLGNFVSKDWMHKTGLSLARWWAAALNGKDGNDAIDNAGTPLKALVVMGNGITSTAQQVKVKEGLEALELLVLADPFVNEAGIIAERKDGIYLLPAATQFETSGSVTATNRSGQWRFKVVDPLYESMEDQEILFELAKKLGFYEDFTKTLRDEKGEIVWPENATREIAKAVRSIGLNGWSPERLKKHTLYWDKFDEVTLEGKDEVAGEYYGLPWPCWSDKHPGSPVLYNTDIEVAKGGMGFRNNFGLEYEGESLLAKNAPLNSPIDTGYPQITKDNIEKVLGITLSAQEKEKMGSTWSYDDSNIIATKCIEKGIVPYGNAKARAVVWTFKDKIPLHREPLHSPRNDLVQKYPSFEDQKALYRVDTKFVSVQQAKDYSKEFPLNLVTARLVNLNGAGMENRASMYLTRLTPEMFCEINPELAKEQDIKAGDMIWVHSPEGTKIHVRVKVNPGVAKDMIFLPFHFTGVMQGVDLTHNFPEGTKPYASGESANTVTNYGYDIMCQIPETKGGLCRISKDGK

SEQ ID NO: 54604 - protein, 396 aa, Campylobacter jejuni
MLMSYEESLKILHSHIKTYEKIEKIALTECLGRILAQDIKAPKNQPEFPTSAMDGYAIKFEDQDKPLKILGLTPAGTMPQFSVQNGTCVKTFTGSLMSEGSDTLVPVENIRIENNTLFIEKKVPQAFAVRAVGENYKKDEILLKKGTRLNYSEIALLAELGFFHISVFIKPIVGVLSSGSEIKDLGEALENPAQIRSSNHIAIANLAKNLNCDTRVFPLLKDDEKATFSTLESALQSCDILVTTGGVSMGDFDFLKKAIKEYEIIIDKADIKPGRHIKIAKANEKFIIALPGFPYSAMVMFNLYTREILNSWLLQPKDYICKAFLQGSYKKKTPYLEFVACNIEFKNGRILANLEGKKEGSSAIINNLNNKAALMVVPKECEMLENESLVDIIFMP

SEQ ID NO: 54605 - protein, 149 aa, Campylobacter jejuni
MSVTKQLLQMQADAHHLWVKFHNYHWNVKGLQFFSIHEYTEKAYEEMAELFDSCAERVLQLGEKAITCQKVLMENAKSPKVAKDCFTPLEVIELIKQDYEYLLAEFKKLNEAAEKESDTTTAAFAQENIAKYEKSLWMIGATLQGACKM

SEQ ID NO: 54606 - protein, 406 aa, Campylobacter jejuni
MLNNTLFFKQSEIHTISSYANRINDEVKSGDIGYYHLIDTSLNLIDESLQFIQDKEYVKNIVLVGMGGSSCGVKALRDMLFNEKSNQRELFILDNTSSHSFNKTLEKIKLEESLFLIISKTGSTIEVVSLFKLLIEHFKLDMQELKKYFVFITDKDSKLHQEGENLGIKCFFIPANVGGRFSILSAVGIVPLCFCGYNAKALLEGAKACFEDFFTHKKDEILQKAYHYCTHKNANINVLFSYSDAFKGFNEWYIQLIAESLGKKQGYKRIGLTPIALIGARDQHSFLQLIMDGPKNKTVTFLKIKDAQKAPIIPDIHFKFLDSLSNKVNLHELLNAQCDATMHALIAENLSVDVIELEKLDAWHAGYLMYYYELFTSTCGVMLGINTYDQPGVEVGKLILKNILNS

SEQ ID NO: 54607 - protein, 274 aa, Campylobacter jejuni
MLQTCIFPAAGYGTRFLPATKTLPKEMLPILTKPLIHYGVDEALEAGMENMGFVTGRGKRALEDYFDISYELEHQISGTKKEYLLDEIRSLINRCTFTFTRQNQMKGLGDAVLKGRPLVGDEAFGVILADDLCVNEEGLNVMAQMVKIYEKYRCTIIAVMEVPKEQVSNYGVISGNFVEENLIMVNSMIEKPSPDEAPSNLAIIGRYILTPDIFGILENTKAGKNGEIQLTDALLTQATNGMVLAYKFQGKRFDCGSVEGFVEATNYFYEKSKC

SEQ ID NO: 54608 - protein, 657 aa, Campylobacter jejuni [sequence omitted]

SEQ ID NO: 54609 - protein, 255 aa, Campylobacter jejuni
MFKVDLNSDLGESFGAYKMGMDEEILKFVSSVNVACGFHAGDPCVMDETLNLAKQNGVCIGAHPSYPDLLGFGRRNMQISFEEAKNYALYQLGALFGFAKAKGMKIQHFKAHGALYNMAAIDENLALALCEAVASFDENIIFLGLSNSAMNEAAKKKGLRYANEVFADRAYNDDGTLVSRKLEGALIHDENLAIKRVIKMIKESKVTSINGKEIDLKADSICVHGDNAKALEFVKKIKENLKKEQIQICALENFI

SEQ ID NO: 54610 - protein, 358 aa, Campylobacter jejuni
MQYKILENNRIASKGYAMLSKDAKFTPFEFSRHAIGDNDILIKILYAGICHSDIHTARSEWGEATYPCVPGHEIAGEVIAVGKNVSKFKVGDYAGVGCMVNSCGECDACKRSQEQFCENGKTIFTYNSCDVFHGNENTYGGYSNNIVVSEKFAVCVPKDAPMEKVAPLLCAGITTYSPLKFSNIKEGSSVAVAGFGGLGMMAVKYAVKMGAKVSVFARNENKKADALAMGVSSFYTSCDKNAVKERFDLIISTIPTPYNPAIYLDLLKFGGEMAIVGLPPHEVAPSISVITFVHKAGKKVYGSLIGGIAETQEMLDFSLKHGIYPETELITPQEIDKAYENLTSGKAKFRYVIDMTKE

SEQ ID NO: 54611 - protein, 1031 aa, Campylobacter jejuni
MSKAKTSEFDLEQFVISSLLEHGWCYEKPVRATDEVLLETSLVNALCRLNPQLDLSKANEIYKELKSKNHLSLLDSNENFHYKLVNGVNINTTKDGESRADIINLIDFNNASNNEFIATNQLSITEAKENKIPDVVLYINGIPLVLMELKSPSDENATINSAYNQINTYKQTIPSIFTYNAFCVISDGYFARAGSISADFSRFMAWKSSDGINYAPNKSLEIKTLIDGMLNPKTLLDIICNFIVFEKEQIRDLNGILSIKTTKKIACYHQYYAVNKAISRTITASSKDGDKKGGVVWHTQGSGKSLSMVFYSAKAIKALNNPTILLITDRNDLDDQLFGTFASCANLLRQEPKQANDKEHLKELLRVASGGVVFTTIQKFSPENDNVFECLSLRDNIIVIADEAHRTQYGFDAKVVEEKSKSGDVLGQKIVYGFAKYLRDALPNATYIGFTGTPIESHDINTPAVFGNYIDIYDISRAVEDGATVSIYYESRLAKIELSEEGKRLVNELDEKLENQDSQKAKATKLEALVGSTSRLKQIAKDIVKHFETRSSKLGGKGMIVSISRSVAIKLYDEIIKIRPSWHSDELSSGAIKVVMTSSSSDGVEFSKHHTSKIQKQFLANRMRNIDDELKLVIVVDMWLTGFDVPSLHTLYIDKPMKGHNLMQAIARVNRVYKDKPSGLVVDYLGIASDLKKALSFYSESGGKGDIITTQEDAVKVMIEKLEIVEQMLPNDYEKYFELDTGAKLEYILDVEEHILSNEDGKNRFIKEFAALDKAYTIAMPHEKALSIKNKIAFMYAIKARFLKFAKENENENLLNQALIKQVVDKAIVSSKVVDIFDASGIKKPDISILSDEFLLEVKNMKRKNLAFEMLKKILNDEIKAREKLSLTKAKKLAQMLSDAIKKYNNKLISSSEALDELINMSKSIVSMEDEAKKLGLKDYEYAFYSALACNDEYEKILGNEKLLALVSEILQIIKNNVSIDWMIKENVRARLRVAVKRVLNKYGYPPDMQQLAIDGVLAQAEILAKELANE

SEQ ID NO: 54612 - protein, 500 aa, Campylobacter jejuni
MAKKKEIKLEDALWKSADKLRKNIDAAEYKHIVLGLIFLRYISDSFMQKYEELLKEQDDGADPEDADEYLADNIFFVPEKSRYNYIRDNAKNPKIGKMLDEAMDEIEKHNDTLKGVLPKVYAKDNLDSKCLGELIDLIGNIAFDTGKSTDVLGHVFEYFLGEFALAEGKQGGQFYTPKCVVELLVTMLEPYKGRVFDPCCGSGGMFVQSEEFVKSHQGRLDDISIYGQESNQTTYKLAKMNLAIRKIESSQVIWNNEGSFLNDAHKDLKADFIIANPPFNDSDWSGELLENDGRWKYGVPPASNANYAWIQHFLYHLSPNGGVAGFVLAKGALTSNTTNEAAIRKALIEDDLIDCIVNLPAKLFLNTGIPASLWFIRRQKLPKTVKKTLFIDARDLGTRINRRNKTLNKDDINQIANIYKAWKNGTDYEDIKGFCKSVSIDEIRELSYVLTPGRYVGLADSDDEFDFDTRFNELLAKLKSQIKTEQELSEIILKNLEKIK

SEQ ID NO: 54613 - protein, 59 aa, Campylobacter jejuni
MQKFLAIISAINDESRVLILHHLLRYKELCVCDLQELLNMGQSRLSRHLKILKDAGFCM

SEQ ID NO: 54614 - protein, 596 aa, Campylobacter jejuni
MQNLALISLFSPFVAFLFASCFALSEKKQFVGIICSLLVALSAFCSLYLLFCNEAFNVSLFEWFAGVNFGFDIDAISLTMMSVVGIVATCVHFYSIFYMAHDEGFNKFFAYLGLFVFSMLFLVMSDNFLGLFVGWEGVGLCSWLLIGFWYKNDTYSFAANEAFIMNRIADLGMLLGIFWLYLQAGTLKYDEVFSMAQSLDHNALILIATCLFIGAMGKSAQFPFHTWLADAMAGPTPVSALIHAATMVTAGVYLVIRASTLYDLVPEVSYIIALLGAFVAIFAASMALVVRDLKRIIAYSTLSQLGYMFVAAGLGAYGIALFHLATHAFFKSLLFLGAGNVMHAMNDKLDIKKMGGLFKPLKITAILMCIGSLALAGIYPFAGFFSKDLILGYSFISFHHGIFLVLLIAAFLTAFYSFRLLMLVFFTPARHDEHPHEASKIALLAMSPLMVLAIIAGFFEHSFFEYLSTKLVFIDAQNQIVMICASVAAILGAILAIFAYKNSWFKESIEENKIHKLLSNDYFIPQFYHQFIVSKYESLCAILKHCDLYIFDRIVEKIALYSQNISQKMIMPNSLNLMLRFLVAAFVILLILVWMV

SEQ ID NO: 54615 - protein, 314 aa, Campylobacter jejuni
MLKRLVFSIFIAFFSTFLCFVLLHFSKGSIAYANGVNSQSKEFVQRIEQNLGLDKPLLEQYKIWLFKALKGDLGVSFLSGESVLKLIKERIFNTFILGFSALMLLFLLSVFLALLGYYYKESFIDKIITFLAFNFFALPPFVLALLFVLIFGIFWKILPVMGSSDIGFEDDFLNRLEHLILPVLVLVLSHLALFLRIARNFINESFSQIFIQNLYARALREKDIYFLVLKYSLSPIVAYFGGSALSFMMGTYVVESVFAYKGLGSLLFKSIIFKDYPIVLALIFFSVLLAAFFTFLSDIVARILNPRLRRLDFV

SEQ ID NO: 54616 - protein, 511 aa, Campylobacter jejuni
MLRWFVLLFLLFLNLEAKIPKDTLIIAVENEIARINPAYSEDHDAVINLVFSGLTRFDENMSLKPDLAKSWDISKDGLVYDIFLRDDVLWHDGVKFSADDVKFSIEAFKNPKNNSSIYVNFEDIKSVEILNPSHVKITLFKPYPAFLDALSIGMLPKHLLENENLNTSSFNQNPIGTGPYKFVKWKKGEYVEFKANEHFYLDKVKTPRLIIKHIFDPSIASAELKNGKIDAALIDVSLLNIFKNDENFGILREKSADYRALMFNLDNEFLKDLKVRQALNYAVDKESIVKNLLHDYAFVANHPLERSWANSKNFKIYKYDPKKAEDLLVSAGFKKNKDGNFEKDGKILEFEIWAMSNDPLRVSLAGILQSEFRKIGVVSKVVAKPAGSFDYSKVDSFLIGWGSPLDPDFHTFRVFESSQDSALNDEGWNFGHYHDKKVDIALQKARNTSNLEERKKYYKDFIDALYENPPFIFLAYLDFALVYNKDLKGIKTRTLGHHGVGFTWNVYEWSK

SEQ ID NO: 54617 - protein, 72 aa, Campylobacter jejuni
MAKDDVIEIDGTVLEALPNANFKVELDNKHVILCHIAGKMRMHYIRIMPGDKVKVELTPYSLDKGRITFRYK

SEQ ID NO: 54618 - protein, 37 aa, Campylobacter jejuni
MKVRPSVKKMCDKCKVVRRKGVVRIICENPKHKQRQG

SEQ ID NO: 54619 - protein, 121 aa, Campylobacter jejuni
MARIAGVDLPKKKRIEYGLTYIYGIGLFTSRKILDKVGISYDKRVHELSEDEAAAIRKEIQENYMVEGDLRKQVAMDIKALMDLGSFRGLRHRKGLPVRGQKTKTNARTRKGKRKTVGAKS

SEQ ID NO: 54620 - protein, 130 aa, Campylobacter jejuni
MAKRKIVKKKVVKKNIAKGIVYISATFNNTMVTVTDEMGNAIAWSSAGGLGFKGSKKSTPYAAQQAVEDALNKAKEHGIKEVGIKVQGPGSGRETAVKSVGAMEGIKVTFLKDITPLAHNGCRPPKRRRV

SEQ ID NO: 54621 - protein, 208 aa, Campylobacter jejuni
MARYRGPVEKLERRFGVSLALKGERRLAGKSALDKRPYAPGQHGARKGKISEYGLQLREKQKAKFMYGVSEKQFRRLFAEAARREGNTGVLLIQLLEQRLDNIVYRMGFATTRRFARQLVTHGHVLVNGKRVDIPSFRVEAGAKIEIIEKSKNNPQITRAIELTAQTGIVAWVDVEKDKRFGIFTRKPEREEVVIPVEERFIVELYSK

SEQ ID NO: 54622 - protein, 337 aa, Campylobacter jejuni
MRNITTSAYTPTEFTIENISDTVAKISAWPFEIGYGITLAHPLRRLLYTSTIGYAPTAIHIDGVAHEFDSMRGMLEDVALFIINLKKLRFKIKGDSNKEIVEFSFKGSKEIYGKDLNNDQVEVVNKDAYLATINEDAELKFTLIVEKGIGYVPSEEIKELINDPKFIALDAFFTPVREATYDIEKVLFEDNPDYEKVVLTVTTDGQITPNEAFQNALEAMYKQLSVFDKITNVRSVIKNQATSNELENTKLLQNITDLNLSARSYNCLEKAGVVYIGELALMSVSELAGLKNLGKKSLDEIKNIMESIGFPVGTSKLSDNKEILKNKIAELKAQNEG

SEQ ID NO: 54623 - protein, 117 aa, Campylobacter jejuni
MRHKHGYRKLGRTSSHRAALLKNLTIALVNSGKIETTLPKAKELRGYVERLITRARLGDFNAHRAVFASLQDKNATNKLVTEIAPKFKDRNGGYTRIIKTRIRRGDAAEMAFIEFVA

SEQ ID NO: 54624 - protein, 299 aa, Campylobacter jejuni
MQENTRLRIAIQKSGRLSKESIELLSECGVKMHIHEQSLIAFSTNLPIDILRVRDDDIPGLIFDGVVDLGIIGENVLEENELERQSLGENPSYKLLKKLDFGYCRLSLALPQENKFQNLKDFEGLRIATSYPQLLKRFMKENGINYKNCTLTGSVEVAPRANLADAICDLVSSGATLQANNLKEVKVIYESRACLIQKENALSKEKQALVDKIMLRVAGVMQARESKYIMLHAPKEKLDKIQALLPGVERPTILPLAHDEKNVALHMVSKENLFWETMEALKEEGASSILVLPIEKMLK

SEQ ID NO: 54625 - protein, 371 aa, Campylobacter jejuni
MSEMSLIMLAAGNSTRFNTKVKKQFLRLGNDPLWLYATKNLSSFYPFKKIVVTSSNITYMKKFTKNYEFIEGGDTRAESLKKALELIDSEFVMVSDVARVLVSKNLFDRLIENLDKADCITPALKVADTTLFDNEALQREKIKLIQTPQISKTKLLKKALDQNLEFTDDSTAIAAMGGKIWFVEGEENARKLTFKEDLKKLDLPTPSFEIFTGNGFDVHEFGENRPLLLAGVQIHPTMGLKAHSDGDVLAHSLTDAILGAAGLGDIGELYPDTDMKFKNANSMELLKQAYDKVREIGFELINIDICVMAQSPKLKDFKQAMQSNIAHTLDLDEFRINVKATTTEKLGFIGRKEGMAVLSSVNLKYFDWTRL

SEQ ID NO: 54626 - protein, 87 aa, Campylobacter jejuni
MANHKSAEKRARQTIKKTERNRFYRTRLKNITKAVREAAANGNKNAANEALKVANKSIHAMVSRGFIKKQTASRRVSRLALLVNKIA

SEQ ID NO: 54627 - protein, 355 aa, Campylobacter jejuni
MLASKLDPFFKRFEELNSLLSSSDILNDISKMTTLSKEQKNLEPIVLKAKEYLKTLDNIEENKALLNDPELGELAKEELKTLEELKPKLEEEIKILLLPKDPNDERNIFLEIRAGTGGDEASLFVGDLVKAYARYAENRGYKLEIVSSSEGSVGGFKEIIMLVKGTGAYSRLKYEGGTHRVQRVPQTESQGRVHTSAITVAVMPEVDDIEIEINPNDLKVDVMRSSGHGGQSVNTTDSAVRITHIPTGIVVVNQDGKSQHKNKESAMKVLKARLYEMQESERLAKESEARKSQVGSGDRSERIRTYNFPQNRISDHRINLTLYRLDAIMQDGLFDEIIEPLITHHQAQALQEQNL

SEQ ID NO: 54628 - protein, 328 aa, Campylobacter jejuni
MLNLNTHSKILVIIGLLVAYIIASFTALCLGDENLNPKELFSYIFSQDEILRQIIIDGRLPRIIMAILIGMLLASSGAITQNVFSNPIADPYIIGIASAATFGAVLAYLLKLNDYYYGILGFVCSAFFALGVFKISSKASIATLLIIGIAASSFLGAFTSFFTYLIGEDSFKIVAWLMGNIGNASWFRVGILILPLIFCLFYFYAHKNELNILLSGDDEARNLGVNAQKLKINLLIVSSLAVSFAVAFSGLIGFVGLIIPHTIRLLLKNYNNALVIPLCTAFGGLFLLICDTLARTLLAPVQIPIGILTAFFGAPIFLYLALSARRFL

SEQ ID NO: 54629 - protein, 268 aa, Campylobacter jejuni
MKKILIIMSLFLIALNAKERLVVLDPASIETLFMLKAEDQIVGIATLQHSNIYPKDQTSKLTSVGTFSNPSLEKIVALKPSLVILSSYSLNLEEGLKNFGIKSINLKAERLEDITKNITTLGQITKKEKEAELLKQEFNQKFKKLSDKPLNKSAIYLYSSNPLMAFNDNSLIADILRLIGIKNLSPQSQISRPVISAEYILKQNPDILILGINAKNNLLDTNALLKNTKAVKTGSIYFNKDTPILLRLSPKIIDRIQEFKTKLENNNF

SEQ ID NO: 54630 - protein, 336 aa, Campylobacter jejuni
MSNFKIQGRQMKEFYMNLALNEAWKYQFLTYPNPAVGCVILDKNEKILAIKAHEKAGLAHAELNAIAHAFKSLRPEISLPKEANALHEFICKNHQGVFKDSIAFVTLEPCSHQGKTPPCAKLFSELGFKKIFISVKDENKIASGGAEFLKKQGIEVEFDILKEEGKKLLKPFLKWQKGQFKLFKLALSMNGSPFGKIVSNELSRTYAHEIRAVIDLLVVGGETIRKDCPILDARLCKAKAPNLCILSRQNIDNFDKNIPLFKVPNRQIYTQIPSEAKFLMYEGGENFLKIFKDEIDMFLIFQSSSLNDEKNVTIPLNFKPLYRNFLGSDTYGIYEL

SEQ ID NO: 54631 - protein, 454 aa, Campylobacter jejuni
MSNLSIFKIGVGPSSSHTLGPMLAGNLFCKKVAKKLDEIDRVEVTLYGSLSLTGKGHLSDKAVIWGLNGLEAKNLSAAIQDEVNKNAIENAQIDFCGEKKLSFNYEKDLIFSKDFLPLHENGMKIKAYDCKGGLVDEETYYSVGGGFVLTAAELEKKGKNSNQNKKKKLDIELNNAKEALELCDKRDWDLAELSYRYELQFHTKEEICAYCLEIWEVMQEVYYNGTHPNEDYLPGKLHLKRRAKGLKERVAMTADPMGIIDFISLYAIAIAEENASGAKVVTAPTNGACAVIPAVMLYLKNHTIGFSDEKVIEFLLTAMLIGSFYKKNASISGAEAGCQAEIGSASSMAAAAMATVLGANAFKACNAAEMAMEHHLGLTCDPVAGLVQIPCIERNAFGAIKAISAARMAMTRKSTPMVSLDEVIETMYETGKDMNYKYKETSLGGLATNLKTVC

SEQ ID NO: 54632 - protein, 416 aa, Campylobacter jejuni
MNTPKWTSHDTRWVLSLFGTAIGAGVLLLPISAGLGGLIPLLVILVLAFPMTYLAHRNLCRFVLSSSNPKDDITFVAESYFGKGGGFLITLLYFFAILPILLVYSANLTTTLLEFLINQFNFNADLTHAARWWVSFLIVGVLVLISILGENVVTKAMSFLVFPFIIFLFIFSLLLIPQWNLSLFANVDFSVISTSNFWVTLWLVIPVMVFSFNHSPIISSLACYCKKEYGGYAEPRARKIISLAIILMVFVVMFFVFSCALTFTPEDFASAKDQNINILTFIANKFPEVSLLAYVGPIVALVAISKSFLGHYLGSQEGLNGILYKASNGRIQGKFAQTLTAIITFAIAWLVAYKNPSVIGIIEAIGGPVLAILLFLMPLYCIYRFDILARFRNKFLDLFVLVMGIVAISAAIHDLL

SEQ ID NO: 54633 - protein, 227 aa, Campylobacter jejuni
MKTLFLNHKYQASYITFIVFIPLLFVIFHSNDFFKMEIKNEDSFSLAIKQFTQTNPTNETKPTESIIEPIKPKPQPKVIKKTPEKMQKKIKKTPPHPIPNKTPIAPTQEVKTFAKTTDTNVKPKITQLTQGKDNHPVLKEIQKAIQQAQFYPRQAKKMRMQGTVKVEFLWKENKTLADLKIIEISGYDLLDKSALESIRKASLNFPHYNGDLRITLPIIYDFKTLRG

SEQ ID NO: 54634 - protein, 289 aa, Campylobacter jejuni
MKIDTSASLTHSLTNNVDKKELSVLKKEDQDKIPVQDLSSLNSDGVKVVFENKQGELIALNLSDENYSSLQKNFGSYMNYVARNDGSIRLNGEVNQFVSNWFESVKDNFGSLNSNLNNKQQSVKLNFNTSTLQQSMQNLGFKTSDEKISDDANIEEKLNFFIDKDVNKDGKVDDSDVKEPSMREILSDIKEASGGGANAMKTIDPQKINKKDDKENNIKEKEDEDLLQKAQEKGLSALSADEQAKLEASNPEEFEKLKQKSLQELSQNLSKDFQNKIENQEAQIVDKRV

SEQ ID NO: 54635 - protein, 362 aa, Campylobacter jejuni
MNTFGTRLKFTSFGESHGVAVGCIIDGMPAGVKFDEEFLQNELDKRKGGSKFATPRKESDKAQVLSGVFEGYTTGHPIAIVVFNENAHSKDYDNLKDLFRPAHADFTYFYKYGIRDHRGGGRSSARESVARVAGGAVAAMLLREFDICVQSGVFGVGTFVSNLKEEEFDFEFAKKSEIFCLDPKLESDFKNEILNARNSKDSVGAAVFTKVSGMLIGLGEVLYDKLDSKLAHALMGINAVKAVEIGEGINASKMRGSCNNDALKDGKFLSNHSGGILGGISNGENLILKTYFKPTPSIFAKQESIDKFGNNLKFELKGRHDPCVGVRGSVVASAMVRLVLADCLLLNASANLNNLKNAYGLK

SEQ ID NO: 54636 - protein, 605 aa, Campylobacter jejuni
MITKESIENLSQRLNIVDIIENYIEVKKQGSSFVCICPFHADKNPSMHINPIKGFYHCFACKAGGDAFKFVMDYEKLSFADAVEKVASLSNFTLSYTKEKQENKKELKSILPSLNAYFKDNLKHHKEVLTYLYQRALNDKDIAKFELGFAGASEDSIRLLQNQKIPLEDAMSVGALKKDENNEFYASFIWRITFPIYDHKDLLVGFGGRTLNPNVPAKYVNSPQNILFDKSRIFYAFNIAKENIAKKKEIIVCEGYMDAIAFHKAGFNNAVAVLGTALTEHHLPLIRRYDAKVILCFDNDEAGLKAATRSAFLLSTNKIDGKVAILQGGKDPAELVAKNESTKLHNILDEGIELGEFYIRRLISTHSIISALDKQKALETIQKFTFNLEPLVANSYTSLVSNLLKVDEKFIVLSQNSKKTIQTPLISQNKYNFPKEKIHIAELELIAFLKQHPDICNDFKQISDSVCFKHKILLDKILEKKGYEDSDIREFESKNIRKNLNYSEFLLGICKVNLAFLNNVKIKNSTLALKKQLFTLIDKNLNLLIKNLNTAELNNFLKEYLSFLKYEKNEEILQQSFRNLNGIFGNKNFTAYDLGFSIQNNDEPF

SEQ ID NO: 54637 - protein, 427 aa, Campylobacter jejuni
MKLKLENSFITDNTLECEKECFFLQTTQNAKFHAQALEKGAKIIDVNECKKLLKIDEKIQIIGITGTNGKTTTAAAIYSILLDLGYKCGLCGTRGAFINDEQIDEKSLTTSPILKTLEYLQIATQKKCDFFIMEVSSHALVQNRIEGLNFAAKIFTNITQDHLDFHGTFENYKEAKELFFTDESLKFINKDALAIKFNVRNAFTYGIENPALYQIKAYSLEEGISTIVTNKNQTFHIDSPLLGLFNLYNLLVASACVNELVKPDLKDLEKAISGFGGVCGRVEQVAKGVIVDFAHTPDGIEKVLDTLKNKKLIVVFGAGGDRDKTKRPLMGKIVEHFAKIAIITSDNPRSEEPKTIMEEILSGFTKKEKVLMIEDRKEAIKKALELKENDDLVVILGKGDETTQEIKGIKYPFSDKVVVNEILKNQG

SEQ ID NO: 54638 - protein, 103 aa, Campylobacter jejuni
MFENMDFSKMGELLNQVQEKAKNIELELANREFSAKSGAGLVKVSANGKGEIIDVSIDDSLLEDKESLQILLISAINDVLAMVAQNRSSMANDVLGGFGGMKL

SEQ ID NO: 54639 - protein, 281 aa, Campylobacter jejuni
MNLKELFIHHLEKNLPKVESFHPFFNEALALMLKAGGKHFRAQLLLSVVQSNKPELLNQALDVALALEFIHTYSLIHDDLPAMDNADFRRGIPTLHKSYDETTAILVGDALNTEAFLVLSHAHLKDEIKIKLIKTLAFNAGLNGMVIGQAIDCFFEDKRLSLNELEFLHTHKTARLIAAALKMGCEICELNNEESNQIYKLGLKLGLIFQINDDIIDVTTSQEQSGKPTNNDIHKNSFVNLLGLEQAIKTKENLLSECEQDLEKLNEKLAQMIQNLIIQYL

SEQ ID NO: 54640 - protein, 632 aa, Campylobacter jejuni
MNIQILQEQANTLRFLSADMVQKANSGHPGAPLGLADILSVLSYHLKHNPKNPTWLNRDRLVFSGGHASALLYSFLHLSGYDLSLEDLKNFRQLHSKTPGHPEISTLGVEIATGPLGQGVANAVGFAMAAKKAQNLLGSDLIDHKIYCLCGDGDLQEGISYEACSLAGLHKLDNFILIYDSNNISIEGDVGLAFNENVKMRFEAQGFEVLSINGHDYEEINKALEQAKKSTKPCLIIAKTTIAKGAGELEGSHKSHGAPLGEEVIKKAKEQAGFDPNISFHIPQASKIRFESAVELGDLEEAKWKDKLEKSAKKELLERLLNPDFNKIAYPDFKGKDLATRDSNGEILNVLAKNLEGFLGGSADLGPSNKTELHSMGDFVEGKNIHFGIREHAMAAINNAFARYGIFLPFSATFFIFSEYLKPAARIAALMKIKHFFIFTHDSIGVGEDGPTHQPIEQLSTFRAMPNFLTFRPADGVENVKAWQIALNADIPSAFVLSRQKLKALNEPVFGDVKNGAYLLKESKEAKFTLLASGSEVWLCLESANELEKQGFACNVVSMPCFELFEKQDKAYQERLLKGEVIGVEAAHSNELYKFCHKVYGIESFGESGKDKDVFERFGFSVSKLVNFILSK

SEQ ID NO: 54641 - protein, 250 aa, Campylobacter jejuni
MKIGVFDSGVGGLSVLKSLYEARLFDEIIYYGDTARVPYGVKDKDTIIKFCLEALDFFEQFQIDMLIIACNTASAYALDALRAKAHFPVYGVIDAGVEATIKALHDKNKEILVIATKATIKSEEYQKRLLSQGYTNINALATGLFVPMVEEGIFEGDFLQSAMEYYFKNITTPDALILACTHFPLLGRSLSKYFGDKTKLIHSGDAIVEFLKERENIDLKNHKAKLHFYASSDVESLKNTAKIWLNLLRK

SEQ ID NO: 54642 - protein, 696 aa, Campylobacter jejuni
MKIFKIIFLIISIFLSSSAFARVDDYINEANLIKDMLKQSIETYKKGDNLGAKKLSEDAYFQHFENMEGSIGRNIGRKAITMERKFVNLRRMYKDEAPLTQINALIDSLYYDLDEVAPILQNGYRLKAEASDINYDKAKAEKSSLEANAKREADAEALIAQMMGVDKKDLAQSSLTTQAPIPINNDTSKLTDDNASTDLQAAAAMDVRLQFILDNISTKFSQAANAFKEKNYQTSKDFLNDALFSDYRNTKVEILVNKFTKAGNDQKIQQAIRTLIRQINDAKIDEKGLRDGLDNIEEQIFDVFLQIPNSELSSLQISGFNDETKGKDYAKVSNDIKLALDEILKNYDGFSASIVDDLQGIYLDIFEASGMENKIGAVDSGLKLKIESLFSKSVALIKASTDKKELEATFNDLEQLIASSVDKIQDSTPYSLFIWALGIILREGLEALIIVVAIVSYLVQSGNKNRLNIAYSALFTGVILSFVTAFGVSWLFKENAGQSRELIEGITMLIAVLLLFYVGFWLLSNAQNKKWTSFIKQGAIDAISNNSAKTLWITVFLAVYREGAETVLFYQALLFDAKTSTDFGAVFGGLGLGILILIVLYFLLKAGAIRIPVKQFFYITSYIIFYMVFVFTGKGIAELIEGKVIIPSLIPMNFEPILWLGIYPYYETLIPQFIVLIMLIIGILITKQISKKGVKS

SEQ ID NO: 54643 - protein, 467 aa, Campylobacter jejuni
MSIYFVHFLISVLPLSILMAFITPNKKYIFKSFFVVFLGFLFGYFAFFIAAQFLKTENLIFNFDFVFIGLLLVSFIFYFWKKIEILNFILLGILSFCTALHYYFLSQDFPIFTSSLIDSEGISSLGFIALALLVCILIFFFLKWQKNFNQKTSFMLFLLLILIESDKALANILLTLMRNSIIETHAFLVSFVGKSNYFGVFGIYVYLIFITFLAFLSLKIRKKNISKKQILDINYRKNEAKTSLINRYFSSVFISCVVSFCIVLYFFMVSSKPLTIDEPKEILPDKNGKFIFDIALLRDNKLHRFAYISAEGKVIRFFLINKREDKDSPVAVFDACMICGDMGYIKKDGQLICISCNVRIFLPSVGKSGGCNPIPLKYEYDGNKITIDVKDVIAGSNYFSQIKEIEVQDPVSKTKVINTQAPFSYSYKGVTYYFSNQNNYEEFKKDPTKYVEENEAQFLIQRRNDVG

SEQ ID NO: 54644 - protein, 414 aa, Campylobacter jejuni [sequence omitted]

SEQ ID NO: 54645 - protein, 343 aa, Campylobacter jejuni
MDDNKRKSLDAALKSLDKTFGKGTILRLGDKEVEQIDSIGTGSVGLDLALGIGGVPKGRIIEIYGPESSGKTTLTLHIIAECQKAGGVCAFIDAEHALDVKYAKNLGVNTDDLYVSQPDFGEQALEIVETIARSGAVDLIVVDSVAALTPKAEIEGDMGDQHVGLQARLMSQALRKLTGIVHKMNTTVIFINQIRMKIGAMGYGTPETTTGGNALKFYASVRLDVRKVATLKQNEEPIGNRVKVKVVKNKVAPPFRQAEFDVMFGEGLSREGELIDYGVKLDIVDKSGAWFSYKDKKLGQGRENSKAFLKENPEIADEITKAIQNSMGIEGMISGSEDDEGEE

SEQ ID NO: 54646 - protein, 258 aa, Campylobacter jejuni
MIIDFKKYSSVRIGNEFEVLVLDQICDFDGFLIGGANNLLVSPKPKNIGILGDGFNFIQILDRNKDFIHLRIGCKTKSSKMYRFAKENNLKGFEYLSKIPGTLGGLLKMNAGLKGECISQNLIKIATSQGEILRANINFDYRFCPLNTHFFWAEFKLNFGFDTLKDEALKNARSNQPSGASFGSIFKNPKNDFAGRLIEAVGLKGFSKGDAMLSDKHANFLINKKNASFEDAFFLIELARKKVFEEFGTNLENEVIII

SEQ ID NO: 54647 - protein, 928 aa, Campylobacter jejuni
FFEGKNTNIQTFNNSGFISANKGVDIGNIGTIKNFNNNGTIQGSEVGVAINTKIDTFTNNGFINSPGSGQWNNGIWISSNATIEKLVNNGTIKGGHSAIMVTSQHIKTVENTGIIHAEGEWGSSILLEYGGFIEHIINTGTISNNNVGIGSAYGVFGTLTIKDGGMVYGKYSAIGVGRSQTLGDLYIDGRSNNGTVSGIYSEEHGILLENNSRTQKIELKNGGIIKGNIDGIRLINSASLSGEMILSGEGSRVEGGRGVGILNRSGKIEGSIKVEDGATVTATSNRAIANSGSGSITGGITVSGKNTKLEGNIINTGNASIGSDIKIEGGAKVEGGLVNQGNGSISGSVQVSGGSSIDSITNEGNGAISGSITVYKDSKLDSITNTSTSSTGISGSITNNSDNKLEISNSGNIGGKIESTGSADMVISNSNGGTISGGISSSGSGSTSISNSQGSTINNGITVSGSAQVEISNQGSVGKDENGNTVTNNGSGSVGIKDWLVSTDKNTGKLNTVVIGGSRAFNVKVENITVDQSNVDLEELNDINNIISGVNQNNIGNIGTNGSGEISLSFDPITGKLTTDFNLNASISGATFRSLISTTSRRSTFIDNVMGNSMQSFALASSSKSQSIAMSEKGNLYADASDYIKSDLNNGSYGSNKEHSLFILPYTSSQNVELSLNEESKGHTKGTIIGYSTLKDSGIYGVYAGYEDTKMGSTYFDINNRTYYAGLKYFNTLFTTEKGQEVYIKAQGKAALIKNDLTEKIGNNEAKAEPNSYAYGVNTALGMNFISNKDIFSPEIGLAYEGGYTEAFSMKDTIGQATVKGGERTYANYLNLFSTKTSLTWFRDWLPNLKTSVELGAKFNINPKVEAEARFGNIKVSDEFDLPRVQKFVSTSFIVPVNEAFYFSLNYNGMFDKDGNTHTGFAQFNYLW

SEQ ID NO: 54648 - protein, 422 aa, Campylobacter jejuni
MSNSVTITDNRNGKSYEFPIYDGTTGPSVVDMSSFYKQTGMFSYDEGLTSTATCKSKITYIDGENGILMHRGYPIEWLAENKLYLDVVHLLLYKELPDATRLEAFRYEMKKRSFIHEGMHRLFDSFPDNAHPMAVLQGAVSSLSAFYPDHLNMNVKEEYMEMAARIVAKIPTIVATAYRYKHGFPMAYPNLDRGFTENFLYMLRTYPYDHVELKPIEVKALDTVFMLHADHEQNASTSTVRAVGSTHAHPYACIAAGIGALWGHAHGGANEGVIRMLEQIGSVDRVDEFIKRAKDKNDPFRLMGFGHRVYKNFDPRAKVLKKLRDQLIDELGIDTNLIKVATRIEEIALSDDYFVQRGLYPNVDFHSGLILKALGIPNEMFATLFVIGRTPGWIAQWIEQKEQESLKIVRPRQLYLGETSKI

SEQ ID NO: 54649 - protein, 278 aa, Campylobacter jejuni
MQIMLCAISNIASGNCSEDCKYCTQSAHVKTDIQKYRRKELSQIVLEAKMAKKNEALGFCLVTAGLGLDDEKLEYVCEAAKAVQKEVPNLLLIACNGMASVEQLKELKKAGIFSYNHNLESSKEFFPQICTTHTWESRFQTNLNAKEAGLMLCCGGIYGMGESEEDRLSFRKSLQELQPFSTPINFFIANENLKLQVPRLSADEALKIVRDTKEALPQSVVMVAGGREVVLRERQYEIFQAGAGAIVIGDYLTTKGEEPSQDIIKLKEMGFTFASECH

SEQ ID NO: 54650 - protein, 700 aa, Campylobacter jejuni
MKKNLIIVESPAKAKTIGNFLGKDYEVIASKGHIRDLPKSSFGIKIEDDEFIPEYRITSDHSALVKELKSKAKDAKEVYLATDEDREGEAIAYHIAKAIGKDENTLPRIVFHEITKSAIENALKNPRKLNMHSVNAQQTRRLLDRIVGYKLSPLLGQKIQRGLSAGRVQSAALKIIVDREKEIRAFVPLEYFSIDMIFQKDLDAELVEFDKAKIEKLTITNKDRAKLILEACKNEVYSISDIESKERKIAPPPPFMTSTLQQSASNRLGFNPKKTMMIAQKLYEGVNTHEGVMGVITYMRTDSLNLAKEAVENARKFIQANFGKDYLPSKANVYTTKTKGAQEAHEAIRPTNLSFTPEIAAKFLDKDELKLYTLIYNRFLACQMSPAISQTQNVFVKNDRVVFKISGRKILFDGYYKVYGDMDKDKILPNFKIGQNLKVQNLEMNSHFTEPPSRYSEAGLVKKLESLGIGRPSTYAPTISILTSRDYVTIDKKQLIPSDVAFNVTEVLEKNFSDIVDSKFTSNLENTLDEIAEDKADWQETLKEFYYPFMRKIEEGKTKIASQKTVTKLGESCPDCGGELAIRKGRFGEFVACLNFPKCKYSRNLKSESKNESENTAAKAKANGTGITCPSCQKGEIVERFSKRGKFYGCSAYPKCNFISKYKPSEEKCEECGETLVIKELKKGTFLECLKCKIKKEMKD

SEQ ID NO: 54651 - protein, 421 aa, Campylobacter jejuni
MNRALTNKILITLAFLFAYRVLAYVPVPGVNADVIAEFFNNNQNNALGLFNVFSGGAAERFSIISLGIMPYITASIIMELLAATFPNIGKMKKERDSMQKYMQIIRYATIVITLVQSIGVAIGLQSLHGRGGAGAIMVEDLNMFIALCAISMLAGTMLLMWLGEQITQRGIGNGISLIIFAGIVSGIPRAISGTVGQINSGEMNFLTAFAIFALILITIGVIIYIELGERRIPISYSRKVVMQNQNKRIMNYIPIKLNLSGVIPPIFASAILMFPTTILQTSTNPYLQAINDFLNPNGYLFHVLTFLFVIFFAYFYASIVFNAKDIAENLKKQGGFIPGIRPGEGTSSYLNEVASRLTLSGSIYLGLVATLPWVLVKFMGVPFHFGGTSVLIVVQVALDTMRKIEAQIYMSKYQTLSAVGL

SEQ ID NO: 54652 - protein, 130 aa, Campylobacter jejuni
MNLTKAAGSTHKTKRIGRGQGSGMGKTATKGGKGQTARKGYNEKRGFEGGQQPLQRRLPKVGFTSKIQKPYVINVEKITAVKELSEITFESIKSVHKISKSVNKIKLIGASAKDLVSKIKDENISVTGSK

SEQ ID NO: 54653 - protein, 147 aa, Campylobacter jejuni
MEKYNREEFEEVIVDIGRVTKVVKGGRRFRFTALVIVGNRKGLVGVGYGKAKEVPDAIRKAVDDAFKNIVEVKTKGSTIAHDVEVKYNASRILLKPASEGTGVIAGGSTRPIVELAGIKDILTKSLGSNNSANVVRATIKALTMLKG

SEQ ID NO: 54654 - protein, 118 aa, Campylobacter jejuni
MRANVLKRKLTLRIKRKKRIRAKISGCENFPRISVFKSNRTLYIQAIDDVKAVTLAAVDGRKLGVKANKEGAKKIAAEFAKTLKVKKIEQAVFDRNGYVYHGVIAALAESLRENGIRL

SEQ ID NO: 54655 - protein, 178 aa, Campylobacter jejuni
MSRIGKQPIAIPAGVEVKLEGNLLKFKKGNLAKELDTKANVNVEIKDNNILFSPKGEDRQSRAYWGTYRALAYNIVVGLTQGFSKTLEINGVGYKAALKGKVLELSLGFSHPINYDIPEGIEIVVDKNTIAVKGSDKQVVGQVAAQIREFRPPEPYKGKGVKYSDERIIRKAGKTSKK

SEQ ID NO: 54656 - protein, 131 aa, Campylobacter jejuni
MINDIISDSLTRIRNAGMRKLETTKLLHSKVVEALVGIFQAKGYIESFNVIEEDKKKFINVVLKYDEKGKSVINELKRISKPGRRVYKGKDEIKRFKNGYGTIVVSTSHGVLANDEAYKAGVGGEILCTIW

SEQ ID NO: 54657 - protein, 61 aa, Campylobacter jejuni
MAKKSMIAKAARKPKFKVRAYTRCQICGRPHSVYRDFGICRVCLRKMGNEGLIPGLKKASW

SEQ ID NO: 54658 - protein, 181 aa, Campylobacter jejuni
MMRLKEKYNQSIKPALVKEFDIKNPMLIPVIEKVVISVGAGELAKDQKVLQNVADTISLIAGQKAVITKAKKSVAGFKVREGFPVGVMVTLRKENMYAFLDKLISIALPRVKDFRGLSRDGFDGRGNYNFGLDEQLMFPEVEYDKILRTHGMNISIVTTAQNDKQAQKLLELIGVPFTKGK

SEQ ID NO: 54659 - protein, 77 aa, Campylobacter jejuni
MAVKLKIKKGDSVKVITGDDKGKTGKVLAVYPKTLKVVVEGCKIAKKAIKPSEKNPNGGFINKEMPMDISNVAKVQE

SEQ ID NO: 54660 - protein, 122 aa, Campylobacter jejuni
MIQSFTRLAVADNSGAKELMCIKVLGGSKRRYATVGDVIVASVKKALPNGKVKKGQVVKAVIVRTKKEIHRDNGSLIRFDENAAVILDNKREPIGTRIFGPVGREVRYGGFMKIVSLAPEVL

SEQ ID NO: 54661 - protein, 83 aa, Campylobacter jejuni
MAFKREIQGVVVKIAGEKTASVLVERKVVHPRYRKIVKRFKKYLIHDERNEVKVGDTVVAVECRPLSKRKSFRLKSVLATGVE

SEQ ID NO: 54662 - protein, 61 aa, Campylobacter jejuni
MKYTEIKDKTAAELATMLKEKKVLLFTLKQKLKTMQLTNPKEISQVKKDIARINTAINALR

SEQ ID NO: 54663 - protein, 141 aa, Campylobacter jejuni
MLMPKRTKYRKMMKGRNRGYANRGTEFTFGEFALKATEAGRINSRQIEAARIALTRFVKRQGKTWIRVFPDKPLTKKPLETRMGKGKGAVEEWVMNIKPGRIIYEMAGVSEEMAREALTLAMHKLPFKTKFVTRESQNEIY

SEQ ID NO: 54664 - protein, 233 aa, Campylobacter jejuni
MGQKVNPIGLRLGINRNWESRWFPTKANLVENIGEDYKIRAFLKRKLYYAGISQILVERTAKKLRVTVVAARPGIIIGKKGSDVDNLRKELQDLIGKDVNINIKEERKAGASAQLAAESVATQLEKRIAFRRAMKKVIQGAQKAGAKGIKVSVSGRLGGAEMARTEWYLEGRVPLHTLRAKIDYGFAEARTTYGNIGVKVWIFKGEVLHKGMQPEKTEESAPAKKPRRTRRGK

SEQ ID NO: 54665 - protein, 141 aa, Campylobacter jejuni
MSKALIKFIRLSPTKARLIAREVQGMNAELAMASLKFMPNKGAKYIANAISSAVANGGFEANEVIVKSCRVDAAAVLKRFRPRARGSASRIRKPTSHILVEVAKAEVKSEEKKTVAKKTTTTKAPAKKTTSTKKATVKKES

SEQ ID NO: 54666 - protein, 93 aa, Campylobacter jejuni
MARSLKKGPFVDDHVMKKVIAAKKANDNKPIKTWSRRSTITPDMIGLTFNVHNGKSFIPVYITENHIGYKLGEFAPTRTFKGHKGSVQKKIGK

SEQ ID NO: 54667 - protein, 276 aa, Campylobacter jejuni
MAIKTYKPYTPSRRYITGLSSEDITAKPSVRSLLVKLPAHAGRNSYGRITSRHKEAGAKKLYRIIDFKRRKFGIEGKVEAIEYDPYRNCRIALIAYKDGEKRYILQPRGLSVGDIVAAAESGLDIKPGNAMKLKNIPVGTIVHNVELKPGKGGQMIRSAGAYAQLMGKEEKYVILRLASGEMRQVLAECMASIGEVGNEEWANVTIGKAGRNRHRGIRPQTRGSAMNPVDHPHGGGEGKKNSGRHPVTPWGKPTKGAKTRRKKASDKLIISRRKGK

SEQ ID NO: 54668 - protein, 93 aa, Campylobacter jejuni
MADITDIKTILYTEKSLNLQEQGVVVIQTSPKMTKTGLKAVLKEYFGVTPKSINSLRMDGKIKRFRGRLGQRNNYKKFYVKLPEGVSLENTEA

SEQ ID NO: 54669 - protein, 204 aa, Campylobacter jejuni
MSKVVVLNDKLEKAGELDLPSKYAEVNPHNLYLYVKSYLASLRANTAHTKGRSDVSGGGKKPWRQKGRGGARAGSTRTNVWVGGAVAFGPTNERNYFQKVNKKQKRLALERALADKAAKGVLFTADSLAIESGKTKDANAVIKKLGVKDALIVKDLLDEKTLLAYRNLANCYVVDVTEVNAYLVSVFNAVIMEKSVLESITKEG

SEQ ID NO: 54670 - protein, 191 aa, Campylobacter jejuni
MEYIVEKIGMSRTITNPSIAVTLLRVVNAKVCEVEGGKALVAYPKGKASNKCVAGQQKKYNLSAEYNRFATLEVANTEAGDLDETPLNEAKILKVSFNTKGRGYSGVMKRHNFAGGPASHGSRFHRRHGSIGNREWPGRVQPGMKMAGHYGNTKVTIKNEVVSYDAENKILVVKGAVPGYNGAMGKIRIAK

SEQ ID NO: 54671 - protein, 103 aa, Campylobacter jejuni
MERIRLKLKAYDHRVLDRTVAAIVEAVKRTGADIRGPIPMPTKIKRYTVLKSPHINKDSREQFEIRIHARMLDIVAATPDTVDSLTKLDLAPEVSVEVRAMGK

SEQ ID NO: 54672 - protein, 253 aa, Campylobacter jejuni
MRINKFISHNTRYSRREADELIKQGLVKINNKIALLSDEVKFDDKVFVKGKRVQKRTQFSVIIYHKQKGEIVSKKDDRGRKTIYDTLPRQFSTWLSVGRLDYASEGLLLLTDSPVIADALMHSDLEREYYLKVKGTVSKQVIEAMQNGLEIKNEKKGAHAKTKITSMSFAPFIDFEIFGSSGGYTKLRVVINEGKNRELRRFFGHFDLEVMDLKRVAFGALDLGMLKAGKHRYLENGEYEKLRDFLKFNEIRY

SEQ ID NO: 54673 - protein, 664 aa, Campylobacter jejuni
MNMDENKEINKNEQNPNSNSKNNKRYKYKNRRKKLADSLQNENDTPKIDQNSNKENSENSENKTEKKKKKNRNLPSKLTGNEDWQIALAECIEANRISHENRLHPLKYNNSSEHKIRITPLGGLGEIGGNISVFETNKDAIIVDIGMSFPDGTMHGVDIIIPDFDYVRKIKDKIRGIVITHAHEDHIGAVPYFFKEFQFPIYATPLALGMISNKFEEHGLKAERKWFRPVEKRRVYEIGEFDIEWIHITHSIIDASALAIKTKAGTIIHTGDFKIDQTPIDGYPTDLGRLAHYGEEGVLCLLSDSTNSYKEGYTKSESSVGPTFDQIFARTKGRVIMSTFSSNIHRVYQAITYGLKYGRKVCVIGRSMERNLYTTMELGYIKLDRKIFIDADEVSKYKDNEVLIVTTGSQGETMSALYRMATDEHKFIKIKPTDQVIISAKAIPGNEASVSAVLDYLLKAGAKVAYQEFSEIHVSGHASIEEQKLMLTLTKPKFFLPVHGEYNHITKHKETAMKCGIPERNIYLMSDGDQVELCQKYVKRIKTVKTGKVFVDNQINKQIADDVVIDRQKLADSGIVVIIAQIDKATKTLINKPRVFSYGLVADKHDHAFSKDMAEVLGQFFINVKDEVLNDPRFLENQIRQVLRKHIFRKIKKYPTIVPTIFVM

SEQ ID NO: 54674 - protein, 266 aa, Campylobacter jejuni
MVKAKKQYGQNFLIDKSVLAKIIQAIPKEMNNIIEIGPGLGDLTQELLKISQVKAYEIDNDLIPILKKKFQKELECGKFNLIHQDASEAFNPSLDEKPYFLVANLPYYVASHIILKALEDKNCLGLIVMAQREMAEKFCAKEGNSEFSSLGVLSAMICERKILFDVDPQCFNPPPKVMSAVMSLIKTKDFDELCEIENFKNFLKDCFKAPRKQLLGNLKTYKAKVLEVLSTLGLKENIRPHEICVDLYLKIYDKLKDEYGRKQRDK

SEQ ID NO: 54675 - protein, 176 aa, Campylobacter jejuni
MQNTIIQKAVNKDLNSILEITKDALNAMKTMNFHQWDENYPNEIVFQEDIQAQELYVFKENDEILGFICINEKFKPEFYKQVIFNKNYDDKAFYLHRLAVKQNAKGKGVAQKLLNFCENFALENHKASLRADTHSKNFPMNSLFKKLDFNFCGNFDIPNYQDPFLAYEKILNQKAF

SEQ ID NO: 54676 - protein, 470 aa, Campylobacter jejuni
MTMAKTLYEKVFDAHVVYEGKNELPILYIDRHLIHEVTSPQAFSGLKMAKRRMARADLTLATIDHDVSTKSMDLNACSDMAKEQITTLMQNTKEFGVRLLGLGDKNQGIVHIVGPELGFTLPGVTLVCGDSHTATHGAFGALAFGIGTSEVEHVMATQTLKQAKLKTMKIECKGQFQKGVYTKDLILYLIAQYGTAKGTGYAIEFCGELIRNLSMEARMTLCNMAIEFGAKVGMIAPDEITFEYIKGKEFAPKGEEFQKYCEYWKSLRSDEGAKYDASITLDVSKIKPQISYGTNPSQVIGIDEKIPKISDFKNQSEQKSLLDALYYVNLEQDQVIEGVKIDIVFIGSCTNGRLEDLKIAADILKGRKIHKNVKALIVPGSMQVRKEAENLGLDKIFIEAGCEWRYAGCSMCLGMNDDKANSGQRVASTSNRNFVGRQGKGSITHLMSPASAAACAIEGVICDNRKYLGV

SEQ ID NO: 54677 - protein, 841 aa, Chlamydia pneumoniae
MKIPLRFLLISLVPTLSMSNLLGAATTEELSASNSFDGTTSTTSFSSKTSSATDGTNYVFKDSVVIENVPKTGETQSTSCFKNDAAAGDLNFLGGGFSFTFSNIDATTASGAAIGSEAANKTVTLSGFSALSFLKSPASTVTNGLGAINVKGNLSLLDNDKVLIQDNFSTGDGGAINCAGSLKIANNKSLSFIGNSSSTRGGAIHTKNLTLSSGGETLFQGNTAPTAAGKGGAIAIADSGTLSISGDSGDIIFEGNTIGATGTVSHSAIDLGTSAKITALRAAQGHTIYFYDPITVTGSTSVADALNINSPDTGDNKEYTGTIVFSGEKLTEAEAKDEKNRTSKLLQNVAFKNGTVVLKGDVVLSANGFSQDANSKLIMDLGTSLVANTESIELTNLEINIDSLRNGKKIKLSAATAQKDIRIDRPVVLAISDESFYQNGFLNEDHSYDGILELDAGKDIVISADSRSIDAVQSPYGYQGKWTINWSTDDKKATVSWAKQSFNPTAEQEAPLVPNLLWGSFIDVRSFQNFIELGTEGAPYEKRFWVAGISNVLHRSGRENQRKFRHVSGGAVVGASTRMPGGDTLSLGFAQLFARDKDYFMNTNFAKTYAGSLRLQHDASLYSVVSILLGEGGLREILLPYVSKTLPCSFYGQLSYGHTDHRMKTESLPPPPPTLSTDHTSWGGYVWAGELGTRVAVENTSGRGFFQEYTPFVKVQAVYARQDSFVELGAISRDFSDSHLYNLAIPLGIKLEKRFAEQYYHVVAMYSPDVCRSNPKCTTTLLSNQGSWKTKGSNLARQAGIVQASGFRSLGAAAELFGNFGFEWRGSSRSYNVDAGSKIKF

SEQ ID NO: 54678 - protein, 1407 aa, Chlamydia pneumoniae
MKYSLPWLLTSSALVFSLHPLMAANTDLSSSDNYENGSSGSAAFTAKETSDASGTTYTLTSDVSITNVSAITPADKSCFTNTGGALSFVGADHSLVLQTIALTHDGAAINNTNTALSFSGFSSLLIDSAPATGTSGGKGAICVTNTEGGTATFTDNASVTLQKNTSEKDGAAVSAYSIDLAKTTTAALLDQNTSTKNGGALCSTANTTVQGNSGTVTFSSNTATDKGGGIYSKEKDSTLDANTGVVTFKSNTAKTGGAWSSDDNLALTGNTQVLFQENKTTGSAAQANNPEGCGGAICCYLATATDKTGLAISQNQEMSFTSNTTTANGGAIYATKCTLDGNTTLTFDQNTATAGCGGAIYTETEDFSLKGSTGTVTFSTNTAKTGGALYSKGNSSLTGNTNLLFSGNKATGPSNSSANQEGCGGAILAFIDSGSVSDKTGLSIANNQEVSLTSNAATVSGGAIYATKCTLTGNGSLTFDGNTAGTSGGAIYTETEDFTLTGSTGTVTFSTNTAKTGGALYSKGNNSLSGNTNLLFSGNKATGPSNSSANQEGCGGAILSFLESASVSTKKGLWIEDNENVSLSGNTATVSGGAIYATKCALHGNTTLTFDGNTAETAGGAIYTETEDFTLTGSTGTVTFSTNTAKTAGALHTKGNTSFTKNKALVFSGNSATATATTTTDQEGCGGAILCNISESDIATKSLTLTENESLSFINNTAKRSGGGIYAPKCVISGSESINFDGNTAETSGGAIYSKNLSITANGPVSFTNNSGGKGGAIYIADSGELSLEAIDGDITFSGNRATEGTSTPNSIHLGAGAKITKLAAAPGHTIYFYDPITMEAPASGGTIEELVINPVVKAIVPPPQPKNGPIASVPVVPVAPANPNTGTIVFSSGKLPSQDASIPANTTTILNQKINLAGGNVVLKEGATLQVYSFTQQPDSTVFMDAGTTLETTTTNNTDGSIDLKNLSVNLDALDGKRMITIAVNSTSGGLKISGDLKFHNNEGSFYDNPGLKANLNLPFLDLSSTSGTVNLDDFNPIPSSMAAPDYGYQGSWTLVPKVGAGGKVTLVAEWQALGYTPKPELRATLVPNSLWNAYVNIHSIQQEIATAMSDAPSHPGIWIGGIGNAFHQDKQKENAGFRLISRGYIVGGSMTTPQEYTFAVAFSQLFGKSKDYVVSDIKSQVYAGSLCAQSSYVIPLHSSLRRHVLSKVLPELPGETPLVLHGQVSYGRNHHNMTTKLANNTQGKSDWDSHSFAVEVGGSLPVDLNYRYLTSYSPYVKLQVVSVNQKGFQEVAADPRIFDASHLVNVSIPMGLTFKHESAKPPSALLLTLGYAVDAYRDHPHCLTSLTNGTSWSTFATNLSRQAFFAEASGHLKLLHGLDCFASGSCELRSSSRSYNANCGTRYSF

SEQ ID NO: 54679 - protein, 936 aa, Chlamydia pneumoniae
MKSSVSWLFFSSIPLFSSLSIVAAEVTLDSSNNSYDGSNGTTFTVFSTTDAAAGTTYSLLSDVSFQNAGALGIPLASGCFLEAGGDLTFQGNQHALKFAFINAGSSAGTVASTSAADKNLLFNDFSRLSIISCPSLLLSPTGQCALKSVGNLSLTGNSQIIFTQNFSSDNGGVINTKNFLLSGTSQFASFSRNQAFTGKQGGVVYATGTITIENSPGIVSFSQNLAKGSGGALYSTDNCSITDNFQVIFDGNSAWEAAQAQGGAICCTTTDKTVTLTGNKNLSFTNNTALTYGGAISGLKVSISAGGPTLFQSNISGSSAGQGGGGAINIASAGELALSATSGDITFNNNQVTNGSTSTRNAINIIDTAKVTSIRAATGQSIYFYDPITNPGTAASTDTLNLNLADANSEIEYGGAIVFSGEKLSPTEKAIAANVTSTIRQPAVLARGDLVLRDGVTVTFKDLTQSPGSRILMDGGTTLSAKEANLSLNGLAVNLSSLDGTNKAALKTEAADKNISLSGTIALIDTEGSFYENHNLKSASTYPLLELTTAGANGTITLGALSTLTLQEPETHYGYQGNWQLSWANATSSKIGSINWTRTGYIPSPERKSNLPLNSLWGNFIDIRSINQLIETKSSGEPFERELWLSGIANFFYRDSMPTRHGFRHISGGYALGITATTPAEDQLTFAFCQLFARDRNHITGKNHGDTYGASLYFHHTEGLFDIANFLWGKATRAPWVLSEISQIIPLSFDAKFSYLHTDNHMKTYYTDNSIIKGSWRNDAFCADLGASLPFVISVPYLLKEVEPFVKVQYIYAHQQDFYERHAEGRAFNKSELINVEIPIGVTFERDSKSEKGTYDLTLMYILDAYRRNPKCQTSLIASDANWMAYGTNLARQGFSVRAANHFQVNPHMEIFGQFAFEVRSSSRNYNTNLGSKFCF

SEQ ID NO: 54680 - protein, 930 aa, Chlamydia pneumoniae
MKIPLHKLLISSTLVTPILLSIATYGADASLSPTDSFDGAGGSTFTPKSTADANGTNYVLSGNVYINDAGKGTALTGCCFTETTGDLTFTGKGYSFSFNTVDAGSNAGAAASTTADKALTFTGFSNLSFIAAPGTTVASGKSTLSSAGALNLTDNGTILFSQNVSNEANNNGGAITTKTLSISGNTSSITFTSNSAKKLGGAIYSSAAASISGNTGQLVFMNNKGETGGGALGFEASSSITQNSSLFFSGNTATDAAGKGGAIYCEKTGETPTLTISGNKSLTFAENSSVTQGGAICAHGLDLSAAGPTLFSNNRCGNTAAGKGGAIAIADSGSLSLSANQGDITFLGNTLTSTSAPTSTRNAIYLGSSAKITNLRAAQGQSIYFYDPIASNTTGASDVLTINQPDSNSPLDYSGTIVFSGEKLSADEAKAADNFTSILKQPLALASGTLALKGNVELDVNGFTQTEGSTLLMQPGTKLKADTEAISLTKLVVDLSALEGNKSVSIETAGANKTITLTSPLVFQDSSGNFYESHTINQAFTQPLVVFTAATAASDIYIDALLTSPVQTPEPHYGYQGHWEATWADTSTAKSGTMTWVTTGYNPNPERRASVVPDSLWASFTDIRTLQQIMTSQANSIYQQRGLWASGTANFFHKDKSGTNQAFRHKSYGYIVGGSAEDFSENIFSVAFCQLFGKDKDLFIVENTSHNYLASLYLQHRAFLGGLPMPSFGSITDMLKDIPLILNAQLSYSYTKNDMDTRYTSYPEAQGSWTNNSGALELGGSLALYLPKEAPFFQGYFPFLKFQAVYSRQQNFKESGAEARAFDDGDLVNCSIPVGIRLEKISEDEKNNFEISLAYIGDVYRKNPRSRTSLMVSGASWTSLCKNLARQAFLASAGSHLTLSPHVELSGEAAYELRGSAHIYNVDCGLRYSF

SEQ ID NO: 54681 - protein, 928 aa, Chlamydia pneumoniae
MKTSIPWVLVSSVLAFSCHLQSLANEELLSPDDSFNGNIDSGTFTPKTSATTYSLTGDVFFYEPGKGTPLSDSCFKQTTDNLTFLGNGHSLTFGFIDAGTHAGAAASTTANKNLTFSGFSLLSFDSSPSTTVTTGQGTLSSAGGVNLENIRKLVVAGNFSTADGGAIKGASFLLTGTSGDALFSNNSSSTKGGAIATTAGARIANNTGYVRFLSNIASTSGGAIDDEGTSILSNNKFLYFEGNAAKTTGGAICNTKASGSPELIISNNKTLIFASNVAETSGGAIHAKKLALSSGGFTEFLRNNVSSATPKGGAISIDASGELSLSAETGNITFVRNTLTTTGSTDTPKRNAINIGSNGKFTELRAAKNHTIFFYDPITSEGTSSDVLKINNGSAGALNPYQGTILFSGETLTADELKVADNLKSSFTQPVSLSGGKLLLQKGVTLESTSFSQEAGSLLGMDSGTTLSTTAGSITITNLGINVDSLGLKQPVSLTAKGASNKVIVSGKLNLIDIEGNIYESHMFSHDQLFSLLKITVDADVDTNVDISSLIPVPAEDPNSEYGFQGQWNVNWTTDTATNTKEATATWTKTGFVPSPERKSALVCNTLWGVFTDIRSLQQLVEIGATGMEHKQGFWVSSMTNFLHKTGDENRKGFRHTSGGYVIGGSAHTPKDDLFTFAFCHLFARDKDCFIAHNNSRTYGGTLFFKHSHTLQPQNYLRLGRAKFSESAIEKFPREIPLALDVQVSFSHSDNRMETHYTSLPESEGSWSNECIAGGIGLDLPFVLSNPHPLFKTFIPQMKVEMVYVSQNSFFESSSDGRGFSIGRLLNLSIPVGAKFVQGDIGDSYTYDLSGFFVSDVYRNNPQSTATLVMSPDSWKIRGGNLSRQAFLLRGSNNYVYNSNCELFGHYAMELRGSSRNYNVDVGTKLRF

SEQ ID NO: 54682 - protein, 358 aa, Chlamydia pneumoniae
MTLPNDLLETLVKRKESPQANKVWPVTTFSLARNLSVSKFLPCLSKEQKLEILQFITSHFNHIEGFGEFIVLPLKDTPLWQKEFLLEHFLLPYDLVGNPEGEALVVSRSGDFLAAINFQDHLVLHGIDFQGNVEKTLDQLVQLDSYLHSKLSFAFSSEFGFLTTNPKNCGTGLKSQCFLHIPALLYSKEFTNLIDEEVEIITSSLLLGVTGFPGNIVVLSNRCSLGLTEELLLSSLRITASKLSVAEVAAKKRLSEENSGDLKNLILRSLGLLTHSCQLELKETLDALSWIQLGIDLGLIKVTENHPLWNPLFWQIRRAHLALQKQAEDSRDLQKDTISHLRASVLKELTKGLSPESF

SEQ ID NO: 54683 - protein, 386 aa, Chlamydia pneumoniae
MFFGAGNIVFPLALGYHYNAHPWSAYFGMMLTAVCVPLLGLVSMLFYSGDYQKFFFSIGRIPGMIFITAIILLIGPFGGIPRAIAVSHATLISLSEHKSAFIPSLPIFSAICCVLIYIFSCKLSRLIQWLGSVFFPIMLVTLLWVIIRSFMIPTHPMVQEFIPNARQAWLAGFIEGFNTMDLLAAFFFCSIVLISLRQLVAEEKHPTEEEIPLSFQGISKKNKRSLALGFFLAAILLGMTYLGFVLSAARHAGLLVNVSKGHILGRISAIALGPNSILAGVSVFIACLTTEIALVGIVADFLARVVSFKKLNYASAVICTLIPTYLISILNFETISHLLLPLLQLSYPALIVLACGNIAYKLWNFRYSPVLFYLTLSLTIVLKLVN

SEQ ID NO: 54684 - protein, 332 aa, Chlamydia pneumoniae
MSSLTLSRRPRRNRKTAAIRDLLAETHLSPKDLIAPFFVKYGNNIKEEIPSLPGVFRWSLDLLLKEIERLCTYGLRAVMLFPIIPDDLKDAYGSYSSNPKNILCHSIHEIKNAFPHLCLISDIALDPYTTHGHDGIFLNGEVLNDESVRIFGNIATLHAEMGADIVAPSDMMDGRIGYIRSKLDQSGYSKTSIMSYSVKYASCLYSPFRDALSSHVTSGDKKQYQMNPKNVLEALLESSLDEEEGADILMVKPAGLYLDVIYRIRQNTCLPLAAYQVSGEYAMILSAFQQGWLDKETLFHESLIAIKRAGADMIISYSAPFILELLHQGFEF

SEQ ID NO: 54685 - protein, 324 aa, Chlamydia pneumoniae
MEKKYYALAYYYITRVDNPHEEIALHKKFLEDLDVSCRIYISEQGINGQFSGYEPHAELYMQWLKERPNFSKIKFKIHHIKENIFPRITVKYRKELAALGCEVDLSKQAKHISPQEWHEKLQENRCLILDVRNNYEWKIGHFDNATLPDIQTFREFPEYAEKLAQECDPETTPVMMYCTGGIRCELYSPVLLEKGFKEVYQLDGGVIAYGQQVGTGKWLGKLFVFDDRLAIPIDESDPDVAPIAECCHCQTPSDAYYNCANTDCNALFLCCDECIHQHQGCCGEECSQSPRVRKFDSSRGNKPFRRAHLCEISENSESASCCLI

SEQ ID NO: 54686 - protein, 209 aa, Chlamydia pneumoniae
MARYCGPKNRVARRFGANIFGRSRNPLLKKPHPPGQHGMQRKKKSDYGLQLEEKQKLKACYGMIMEKQLVKAFKEVIHKQGNVAQMFLERFECRLDNMVYRMGFAKTIFAAQQLVAHGHILVNGRRVDRRSFFLRPGMQISLKEKSKRLQSVKDALESKDESSLPSYISLDKTGFKGELLVSPEQDQIEAQLPLPINISVVCEFLSHRT

SEQ ID NO: 54687 - protein, 293 aa, Chlamydia pneumoniae
MKVLPPPSIPLLGAHTSTAGGLKNAIYEGRDIGASTVQIFTANQRQWQRRALKEEVIEDFKAALKETDLSYIMSHAGYLINPGAPDPVILEKSRIGIYQEILDCITLGISFVNFHPGAALKSSKEDCMNKIVSSFSQSAPLFDSSPPLVVLLETTAGQGTLIGSNFEELGYLVQNLKNQIPIGVCVDTCHIFAAGYDITSPQGWEDVLNEFDEYVGLSYLRAFHLNDSMFPLGANKDRHAPLGEGYIGKESFKFLMTDERTRKIPKYLETPGGPENWQKEIGELLKFSKNRDS

SEQ ID NO: 54688 - protein, 547 aa, Chlamydia pneumoniae
MSRKDNEVSLARSIFNILSGTFCSRITGIFREIAMATYFGADPIVAAFWLGFRTVFFLRKILGGLILEQAFIPHFEFLRAQSLDRAAFFFRRFSRLIKGSTIIFTLLIEAVLWVVLQYVEEGTYDMILLTMILLPCGIFLMMYNVNGALLHCENKFFGVGLAPVVVNIIWIFFVIAARHSDPRERIIGLSVALVIGFFFEWLITVPGVWKFLLEAKSPPQEHDSVRALLAPLSLGILTSSIFQLNLLSDICLARYVHEIGPLYLMYSLKIYQLPIHLFGFGVFTVLLPAISRCVQREDHERGLKLMKFVLTLTMSVMIIMTAGLLLLALPGVRVLYEHGLFPQSAVYAIVRVLRGYGASIIPMALAPLVSVLFYAQRQYAVPLFIGIGTALANIVLSLVLGRWVLKDVSGISYATSITAWVQLYFLWYYSSKRLPMYSKLLWESIRRSIKVMGTTMLACMITLGLNILTQTTYVIFLNPLTPLAWPLSSITAQAIAFLSESCIFLAFLFGFAKLLRVEDLINLASFEYWRGQRGLLQRQHVMQDTQN

SEQ ID NO: 54689 - protein, 271 aa, Chlamydia pneumoniae
MVMFNNKMILIAGPCVIEGEDITLEIAGKLQSILAPYSDRIQWFFKSSYDKANRSSLNSFRGPGLTEGLRILAKVKETFGVGILTDVHTPQDAYAAAEVCNILQVPAFLCRQTDLLVATAETGAIVNLKKGQFLSPWDMEGPINKVLSTGNNKILLTERGCSFGYNNLVSDMRSIPVLSRSGFPVIFDATHSVQLPGALSTESGGLTEFVPTLSRAALAAGAHGLFIETHTNPKIAKSDAASMLSLEEFAALLPTWDQLFTCVSSFDMVSA

SEQ ID NO: 54690 - protein, 78 aa, Chlamydia pneumoniae
MKEFLAYIIKNLVDRPEEVRIKEVQGTHTIIYELSVAKPDIGKIIGKEGRTIKAIRTLLVSVASRNNVRVSLEIMEEK

SEQ ID NO: 54691 - protein, 339 aa, Chlamydia pneumoniae
MVLGVVGISYREAALKERERAIQYLQSFEKNLFLAQRFLGKGGAFIPLLTCHRAELYYYSESPEIAQAALLSELTSQGIRPYRHRGLSCFTHLFQVTSGIDSLIFGETEIQGQVKRAYLKGSKERELPFDLHFLFQKALKEGKEYRSRIGFPDHQVTIESVVQEILLSYDKSIYTNFLFVGYSDINRKVAAYLYQHGYHRITFCSRQQVTAPYRTLSRETLSFRQPYDVIFFGSSESASQFSDLSCESLASIPKRIVFDFNVPRTFLWKETPTGFVYLDIDFISECVQKRLQCTKEGVNKAKLLLTCAAKKQWEIYEKKSSHITQRQISSPRIPSVLSY

SEQ ID NO: 54692 - protein, 845 aa, Chlamydia pneumoniae
MAVRLIVDEGPLSGVIFVLEDGISWSIGRDSSANDIPIEDPKLGASQAIINKTDGSYYITNLDDTIPIVVNGVAIQETTQLKNEDTILLGSNQYSFLSDEFDPQDLVYDFDIPEENFSNDSGDLSDSNEQGKDLEPRQTSETNHSPKPKEKLTKDQGSSDPITSGDQELADAFLASAKAEKNQPRAKVAKKGLKESSNESLNPKEQNAKDSPKGEERTNKPQNAIMEDNGASPRQDPQPKSAEPSLKNTARDETPLKENKPVEEKANKKATPDSPEKKDQPEEGSKKEGSKIEATPLDSQKESEDKEAEEAFVQEEEENLTEDNKEDSDSAADANDDTASDHTAEDNKETPKKVENEKSAVLSPFHVQDLFRFDQTIFPAEIDDIAKKNISVDLTQPSRFLLKVLAGANIGAEFHLDSGKTYILGTDPTTCDIVFNDLSVSHQHAKITVGNDGGILIEDLDSKNGVIVEGRKIDKTSTLSSNQVVALGTTLFLLIDHHAPADTIVASLSPDDYSLFGRQQDAEALERQEAQEEEEKQKRATLPAGSFILTLFVGGLAILFGIGTASLFHTKEVVPLENIDYQEDLAQVINQFPTVRYTFNKTNSQLFLIGHVKNSTDKSELLYKVDALSFVKSVDDNVIDDEAVWQEMNILLSKRPEFKGISMHSPEPGKFIITGYVKTEEQAACLVDYLNIHFNYLSLLENKVVVETQMLKAIAGHLLQGGFANIHVAFVNGEVILTGYVNNDDAEKFRAVVQELSGIPGVRLVKNFAVLLPAEEGIIDLNLRYPNRYRVTGYSRYGEISINVVVNGRILTRGDVIDGMTVTSIQPNAIFLEKEGLKYKIDYNK

SEQ ID NO: 54693 - protein, 919 aa, Chlamydia pneumoniae
MKTVILNIGRKILQGIKKKKKKIGILSGLFFLDLVLLGVSSQRPTETSANVKHNLRDEKLAACPKNSAASLSAKKSHTKKTTPGSIPSKVFSKFDATQDKTFQKTSGSAFPAKPTTLKELEERKKPRPERRTTADVKRSPRFLPTQEVEEPVPAASKEQLDSIQVWEEKQNYARRAVNAINLSIKKQLEEQTSTVTEKDVQPKTQATPHASKKNVASPSTSMPGIEKAATTVAVPQDKSEEEKVKERLTKRELTCEDLKDNGYTVNFEDISILELLQFVSKISGTNFVFDSNDLQFNVTIVSHDPTSVDDLSTILLQVLKMHDLKVVEQGNNVLIYRNPHLSKLSTVVTDSSLKETCEAVVVTRVFRLYSVSPSAAVNIIQPLLSHDAIVSASEATRHVIISDIAGNVDKVSDLLAALDCPGTSVDMTEYEVKYANPAALVSYCQDVLGTLAEDDAFQMFIQPGTNKIFVVSSPRLANKAEQLLKSLDVPEMAHTLDDPASTALALGGTGTTSPKSLRFFMYKLKYQNGEVIANALQDIGYNLYVTTAMDEDFINTLNSIQWLEVNNSIVIIGNQGNVDRVIGLLNGLDLPPKQVYIEVLILDTSLEKSWDFGVQWVALGDEQSKVAYASGLLNNTGIATPTKATVPPGTPNPGSIPLPTPGQLTGFSDMLNSSSAFGLGIIGNVLSHKGKSFLTLGGLLSALDQDGDTVIVLNPRIMAQDTQQASFFVGQTVPYQTTNTIIQETGTVTQNIDYEDIGVNLVVTSTVAPNNVVTLQIEQTISELHSASGSLTPVTDKTYAATRLQIPDGCFLVMSGHIRDKTTKVVSGVPLLNSIPLIRGLFSRTIDQRQKRNIMMFIKPKVISSFEEGTRVTNKEGYRYNWEADEGSMQVAPRHAPECQGPPSLQAESDFKIIEIEAQ

SEQ ID NO: 54694 - protein, 171 aa, Chlamydia pneumoniae
MVHSPTHQCYHCQQPATICYTEIDKDKVIRSYVCATCPCPSHYYNNEHLSLSKGVGVLTLECGNCKTVWHSKQDDEQLLGCHQCYTNFKNQITSKLKSERVVSSSFTMEKGQGSLHIGRAPGEASNTNPLLKLIALNEALQDTLEREDYEQAAVIRDQINHLKTKNPDDPS

SEQ ID NO: 54695 - protein, 180 aa, Chlamydia pneumoniae
MSVLQDTEKKMAAALDFFHKEVKSFRTGKAHPALVETVVVDVYGTTMRLSDIASISVADLRQLVISPYDGNNASAIAKGIIAANLNLQPEVEGSIIRIKVPEPTADYRQEMIKQLRRKCEEAKINVRNIRREANDKLKKDSALTEDVVKGNEKKIQELTDKFCKQLDELTKQKEAEIASI

SEQ ID NO: 54696 - protein, 248 aa, Chlamydia pneumoniae
MAKQTRRVLFKISGEALSKDSSNRIDEMRLSRLVSELRAVRNNDIEIALVIGGGNILRGLAEQKELQINRVSADQMGMLATLINGMAVADALKAEDIPCLLTSTLSCPQLADLYTPQKSIEALDQGKILICTTGAGSPYLTTDTGAALRACELNVDVLIKATMHVDGVYDKDPRLFPDAVKYDFVSYKDFLSNQLGVMDASAISLCMDSHIPIRVFSFLQHSLEKALFDPTIGTLVSEDVNHVCSPRH

SEQ ID NO: 54697 - protein, 282 aa, Chlamydia pneumoniae
MSDFSMETLKTLRQQTGVGLTKCKEALEACGGNLEEAVVYLRKLGLASAGKKEHRETKEGIIAAKTDANGTALIEVNVETDFVANNAVFREFVSNLLNDILKYKVDTVEALSQAASSQDPSLSVDELRAVTMQTVGENIRISRVAYFPKATNSTVGIYSHGNGKTVALTMLSGSSTADSLAKDIAMHVVAAQPQFLSKESVPAEAIAKEKEVIASQIQGKPQEVIEKIVTGKLNTFFQEACLLEQPFIKNADLSIQSLIDDFSKTSGSSVAIEQFILWKIGA

SEQ ID NO: 54698 - protein, 277 aa, Chlamydia pneumoniae
MESQSCKLTIKDLMSAGAHFGHQTRRWNPKMKLYIFEEKNGLYIINLAKTLQQLRNALPHIRKVIQDNKTVLFVGTKKQAKCVIREAAIEAGEFFIAERWLGGMLTNMTTIRNSIKTLDKIEKDLSRNQAYLTKKEAALLAKRHQKLLRNLEGIRYMKKAPGLLVVVDPSYEKIAVAEAKKLGIPVLALVDTNCDPTPIDHVIPCNDDSLKSIRLIINVIKENIIEAKHKLGIEIVSPVKSLEVPDLSAFESSQDDESDEENREEDLLAKKFDGEAN

SEQ ID NO: 54699 - protein, 256 aa, Chlamydia pneumoniae
MLKIKHLHASCNDVKILDDFNLNIQPGTMHVIMGPNGAGKSTLAKILAGDESVLVSSGEIALQEQNLLSMLPEERSRAGLFVGFQMPPEIPGVNNKMFLRDAYNARRRANQEGDISIDEFNTLLSTVLETYEYNATTDLFLDRNVNEGFSGGERKRNEICQMLVLEPEMVLLDEPDSGLDVDALRLICRVLEKYRELHPTSSLCIVTHNPKLGNLIRPDVVHLLLDGRVALSGDVSLMHELEAKSYQEVTKRVAWR

SEQ ID NO: 54700 - protein, 252 aa, Chlamydia pneumoniae
MLIVLAFRQVFFSHSRSQLDRLKNYLRLLKQNFAITLPKERTSKGHSLMLTFDFASFDFYTNIFPFLEEQKIPAVVGVASRYIPSNAAQDLHPSHRLKPSETLAFQDEIFSNYMPFCCQNELIEMAKSPYIQLASSGFAIRNLMNNPPYLTTEILLSRHHIETITGAKPLAFLFPFGKSDPTSRKLAADHYPYSFLLGNTINRKLKTHNIYRLDIKPMQYVCPSLFQSSRYLKNWIKEKSKQLYLKKQLPKR

SEQ ID NO: 54701 - protein, 324 aa, Chlamydia pneumoniae
MTTNFPQPLIQATSLTKHYYKRSFWFQGKTIASRPVDDVSFSLYSRRAVGLIGESGSGKSTLALALAGLLPLTSGFLTFNGTPIKLHSKHGRHQLRSQVRLVFQNPQASLNPRKTILDSLGHSLLYHKLVPKEKVLATVREYLELVGLSEEYFYRYPHQLSGGQQQRVSIARALLGVPQLIICDEIVSALDLSIQAQILNMLAELQKKLSLTYLFISHDLAVVRSFCTEVFIMYKGQIVEKGNTKRIFSDPQHPYTRMLLNAQLPETPDQRQSKPIFQEYHKDSEESCSTGCYFYNRCPQKQEACKSEIIPNQGDAHHTYRCIH

SEQ ID NO: 54702 - protein, 426 aa, Chlamydia pneumoniae
MLPLIIFVLLCGFYTSWNIGANDVANAVGPSVGSGVLTLRQAVVIAAIFEFFGALLLGDRVAGTIESSIVSVTNPMIASGDYMYGMTAALLATGVWLQLASFFGWPVSTTHSIVGAVIGFGLVLGKGTIIYWNSVGIILISWILSPFMGGCVAYLIFSFIRRHIFYKNDPVLAMVRVAPFLAALVIMTLGTVMISGGVILKVSSTPWAVSGVLVCGLLSYIITFYYVHTKHCSYISDTPKKGSLTYRLKERGGNYGRKYLVVERIFAYLQIIVACFMAFAHGSNDVANAIAPVAGVLRQAYPASYTSYTLIRLMAFGGIGLVIGLAIWGWRVIETVGCKITELTPSRGFSVGMGSALTIALASILGLPISTTHVVVGAVLGIGLARGIRAINLNIIKDIVLSWFITLPAGALLSILFFFALRALFH

SEQ ID NO: 54703 - protein, 402 aa, Chlamydia pneumoniae
MDKLTVQDLSPEEKKVLVRVDFNVPMQDGKILDDIRIRSAMPTINYLLKKHAAVILMSHLGRPKGQGFQEEYSLQPVVDVLEGYLGHHVPLAPDCVGEVARQAVAQLSPGRVLLLENLRFHIGEEHPEKDPTFAAELSSYGDFYVNDAFGTSHRKHASVYVVPQAFPGRAAAGLLMEKELEFLGRHLLTSPKRPFTAILGGAKISSKIGVIEALLNQVDYLLLAGGMGFTFLQALGKSLGNSLVEKSALDLARNVLKIAKSRNVTIVLPSDVKAAENLQSKEYSVISIDQGIPPHLQGFDIGPRTTEEFIRIINQSATVFWNGPVGVYEVPPFDSGSIAIANALGNHPSAVTVVGGGDAAAVVALAGCSTKVSHVSTGGGASLEFLEQGFLPGTEVLSPSKS

SEQ ID NO: 54704 - protein, 364 aa, Chlamydia pneumoniae
MVPFRQHHAYQLLKQLHTSAISEADRVSYYFKQNRSLGSKDRQWIQNIIFNILRHRRLLETLILDSGEQVTPEALVAKVNEGVLENLDSYSAIPWPVRYSISDDLAHFLVQDYGEEQAEEIAKIWLTEAPITIRVNTDKISVKELQEKLEYPSSPGELPEALHFSKRHPLQSTEAFRRGFFEIQDENSQRISQGISLTDKDIVLDFCAGAGGKSLIFAQKAKHVVINDSRKAILQTAKHRLLRAGARNFSLADQLRLGSFSVVIVDAPCSGTGVFRRHPEHKWQFSKKLLLNYVRVQKSILKQASAYVGPRGRLVYITCSLLKEENEAHVAYMHSLGWKEVHRKTLPLQVGKGDAFFTSHFQKI

SEQ ID NO: 54705 - protein, 1240 aa, Chlamydia pneumoniae
MTWIPLHCHSQYSVLDAMSSIKDFVAKGQEFGIPALALTDHGNLYGAVDFYKECTQKGIQPIIGCECYIAPGSRFDKKKEKRSRAAHHLILLCKNEQGYRNLCILTSLAFTEGFYYFPRIDKDLLRQYSEGLICLSGCLSSSVSDAALKSPEALLLELQWFQDLFKDDYFTEVQLHKMSEESIAGFKEEWLKQEYYSLIEKQIKVNTAVLEASKRLGIPTVATNDIHYINANDWQAHEILLNVQSGETVRIAKQNTHIPNPKRKVYRSREYYFKSPAQMAELFKDIPEVISNTLEVAKRCDFTFDFSKKHYPIYVPESLKTLNSYTEEDRYQASAVFLKQLAEEALPKKYSSEVLAHIAKKFPHRDPIDIVKERMDMEMAIIIPKGMCDYLLIVWDIIHWAKANGIPVGPGRGSGAGSVLLFLLGITEIEPIRFDLFFERFINPERLSYPDIDIDICMAGRERVINYAIERHGKDNVAQIITFGTMKAKMAVKDVGRTLDMALSKVNHIAKHIPDLNTTLSKALETDPDLHQLYINDAESAQVIDMALCLEGSIRNTGVHAAGVIICGDQLTNHIPICISKDSTMITTQYSMKPVESVGMLKVDLLGLKTLTSINIAMSAIEKKTGQSLAMATLPLDDATTFSLLHQGKTMGIFQMESKGMQELAKNLRPDLFEEIIAMGALYRPGPMDMIPSFINRKHGKEIIEYDHPLMESILKETYGIMVYQEQVMQIAGALASYSLGEGDVLRRAMGKKDFQQMEQEREKFCKRACNNGIDPELATVIFDKMEKFAAYGFNKSHAAAYGLITYTTAYLKANYPKEWLAALLTCDSDDIEKIGKLIREAQSMGIPILPPHINVSSNHFVATDEGIRFAMGAIKGIGRGLIESIVEERDHHGPYESIRDFIQRSDLKKVSKKSIESLIDAGCFDCFDSNRDLLLASVEPLYEAIAKDKKEAASGVMTFFTLGAMDRKNEVPICLPKDIPTRSKKELLKKEKELLGIYLTEHPMDTVRDHLSRLSVVLAGEFENLPHGSVVRTVFIIDKVTTKISSKAQKKFAVLRVSDGIDSYELPIWPDMYEEQQELLEEDRLIYAILVLDKRSDSLRISCRWMKDLSIVNENIIYECDQAFDRIKNQVQKMSFTMSTSGKETKAKGNKPNENGHTQALAPVTLSLDLNELRHSHLCILKKIVQKHPGSRTLVLVFTQDNERVASMSPDDAYFVCEDIEELRQELVTADLPVRVITV

SEQ ID NO: 54706 - protein, 430 aa, Chlamydia pneumoniae
MTVTLPKGVFDIFPYLADAKQLWRHTSLWHSVEKAIHTVCMLYGFCEIRTPIFEKSEVFLHVGEESDVVKKEVYSFLDRKGRSMTLRPEGTAAVVRSFLEHGASHRSDNKFYYILPMFRYERQQAGRYRQHHQFGVEAIGVRHPLRDAEVLALLWDFYSRVGLQHMQIQLNFLGGSETRFRYDKVLRAYLKESMGELSALSQQRFSTNVLRILDSKEPEDQEIIRQAPPILDYVSDEDLKYFNEILDALRVLEIPYAINPRLVRGLDYYSDLVFEATTTFQEVSYALGGGGRYDGLISAFGGASLPACGFGVGLERAIQTLLAQKRIEPQFPHKLRLIPMEPDADQFCLEWSQHLRRLGIPTEVDWSHKKVKGALKAASTEQVSFVCLIGERELISQQLVIKNMSLRKEFFGTKEEVEQRLLYEIQNTPL

SEQ ID NO: 54707 - protein, 584 aa, Chlamydia pneumoniae
MKYRTHRCNELTSNHIGENVQLAGWVHRYRNHGGVVFIDLRDRFGITQIVCREDEQPELHQRLDAVRSEWVLSVRGKVCPRLAGMENPNLATGHIEVEVASFEVLSKSQNLPFSIADDHINVNEELRLEYRYLDMRRGDIIEKLLCRHQVMLACRNFMDAQGFTEIVTPVLGKSTPEGARDYLVPSRIYPGKFYALPQSPQLFKQLLMVGGLDRYFQIATCFRDEDLRADRQPEFAQIDIEMSFGDTQDLLPIIEQLVATLFATQGIEIPLPLAKMTYQEAKDSYGTDKPDLRFDLKLKDCRDYAKRSSFSIFLDQLAHGGTIKGFCVPGGATMSRKQLDGYTEFVKRYGAMGLVWIKNQEGKVASNIAKFMDEEVFHELFAYFDAKDQDILLLIAAPESVANQSLDHLRRLIAKERELYSDNQYNFVWITDFPLFSLEDGKIVAEHHPFTAPLEEDIPLLETDPLAVRSSSYDLVLNGYEIASGSQRIHNPDLQSQIFTILKISPESIQEKFGFFIKALSFGTPPHLGIALGLDRLVMVLTAAESIREVIAFPKTQKASDLMMNAPSEIMSSQLKELSIKVAF

SEQ ID NO: 54708 - protein, 156 aa, Chlamydia pneumoniae
MRVVLHCPDIPQNTGNIGRTCVALGAELILVRPLGFSLADKFVKRAGMDYWDKLQLTVVDSIEEALHDVPEDQIFCLSTKGSASYTEFSLPSSGTYVFGSESKGLPKEILKKYYKNCLRIPMQQDIRSLNLATSVGIVLYEVVRQKTVALQKNPTV

SEQ ID NO: 54709 - protein, 249 aa, Chlamydia pneumoniae
MSLLKDTVFTCLDCEMTGLDVKKDRIIEIAAVRFTFDSVISSIEFLINPERVVSAESQRVHHISNAMLRDQPKIAEVFPQIKAFFKEGDYIVGHSVGFDLQVLAQEMERIGETFLSKYTIIDTLRLAKEYGDSPNNSLESLAVHFNVPYDGNHRAMKDVEININIFKHLCKRFRTLEQLKQVLAKPIKMKYMPLGKHKGRCFSEIPLAYLQWASKMDFDSDLLFSIRHEIKHRQKGTGFSQVNNPFMEL

SEQ ID NO: 54710 - protein, 155 aa, Chlamydia pneumoniae
MLKKKPVSFSCIDGHIYKIFPNDLNANNTVFGGLLMSLLDRLALVVAERHTESVCVTAFVDALRFYAPAYMGENLICKAAVNRTWRTSLEVGVKVWAENIYKQERRHITSAYFTFVAVNEDNQPIPVHQIVPETPEEKRRYNEADRRRQARLELK

SEQ ID NO: 54711 - protein, 541 aa, Chlamydia pneumoniae
MLRIFCFVISWCLIAFAQPDLSGFVSILGAACGYGFFWYSLEPLKKPSLPLRTLFVSCFFWIFTIEGIHFSWMLSDQYIGKLIYLVWLTLITILSVLFSGFSCLLVAIVRQKRTAFLWSLPGVWVAIEMLRFYGIFSGMSFDYLGWPMTASAYGRQFGGFLGWAGQSFAVIAVNMSFYCLLLKKPHAKMLWVLTLLLPYTFGAIHYEYLKHAFQQDKRALRVAVVQPAHPPIRPKLKSPIVVWEQLLQLVSPIQQPIDLLIFPEVVVPFGKHRQVYPYESCAHLLSSFAPLPEGKAFLSNSDCATALSQHFQCPVIIGLERWVKKENVLYWYNSAEVISHKGISVGYDKRILVPGGEYIPGGKFGSLICRQLFPKYALGCKRLPGRRSGVVQVRGLPRIGITICYEETFGYRLQSYKRQGAELLVNLTNDGWYPESRLPKVHFLHGMLRNQEFGMPCVRACQTGVTAAVDSLGRILKILPYDTRETKAPSGVLETSLPLFNYKTLYGYCGDYPMILIAFCAVSYLGGGFLGYRLLAKKEIR

SEQ ID NO: 54712 - protein, 287 aa, Chlamydia pneumoniae
MSGFYMLERTQRTLKREVRYSGVGIHLGKSSTLHLQPAQTNTGIVFQRQSASGNYENVPALLDHVYTTGRSTTLSRGSAVIATVEHLMAALRSNNIDNLIIQCSGEEIPIGDGSSNVFVELIDQAGICEQEDKVSIARLTRPVYYQHQDIFLAAFPSDELKISYTLHYPQSSTIGTQYKSLVINEESFRQEIAPCRTFALYNELCFLMEKGLIGGGCLDNAVVFKDDGIISRGQLRFADEPVRHKILDLIGDLSLVGRPFVAHVLAVGSGHSSNIAFGKKILEALEL

SEQ ID NO: 54713 - protein, 153 aa, Chlamydia pneumoniae
MNQPSVIKLRELLDLLPHRYPFLLVDKVLSYDIEARSITAQKNVTINEPFFMGHFPNAPIMPGVLILEALAQAAGVLIGLVLENDRNKRIALFLGIQKAKFRQAVRPGDVLTLQADFSLISSKGGKAWAQARVDSQLVTEAELSFALVDKESI

SEQ ID NO: 54714 - protein, 279 aa, Chlamydia pneumoniae
MASIHPTAIIEPGAKIGKDVVIEPYVVIKATVTLCDNVVVKSYAYIDGNTTIGKGTTIWPSAMIGNKPQDLKYQGEKTYVTIGENCEIREFAIITSSTFEGTTVSIGNNCLIMPWAHVAHNCTIGNNVVLSNHAQLAGHVQVGDYAILGGMVGVHQFVRIGAHAMVGALSGIRRDVPPYTIGSGNPYQLAGINKVGLQRRQVPFATRLALIKAFKKIYRADGCFFESLEETLEEYGDIPEVKNFIEFCQSPSKRGIERSIDKQALEEESADKEGVLIES

SEQ ID NO: 54715 - protein, 219 aa, Chlamydia pneumoniae
MRSHISVMGKKEGMIHIFDKDGSLVACSVIRVEPNVVTQIKTKESDGYFSLQIGAEEMNAPAHTITKRVSKPKLGHLRKAGGRVFRFLKEVRGSEEALNGVSLGDAFGLEVFEDVSSVDVRGISKGKGFQGVMKKFGFRGGPGSHGSGFHRHAGSIGMRSTPGRCFPGSKRPSHMGAENVTVKNLEVIKVDLEKKVLLVKGAIPGARGSIVIVKHSSRT

SEQ ID NO: 54716 - protein, 224 aa, Chlamydia pneumoniae
MVLLSKFDFSGNKIGEVEVADSLFADEGDGLQLIKDYIVAIRANKRQWSACTRNRSEVSHSTKKPFKQKGTGNARQGCLASPQFRGGGIVFGPKPKFNQHVRINRKERKAAIRLLLAQKIQTNKLTVVDDTVFVDALTAPKTQSALRFLKDCNVECRSILFIDHLDHVEKNENLRLSLRNLTAVKGFVYGININGYDLASAHNIVISKKALQELVERLVSETKD

SEQ ID NO: 54717 - protein, 111 aa, Chlamydia pneumoniae
MKDPYDVIKRHYVTEKAKMLEHLSAGTGEGKKKGSFCKDPKFVFIVSHDATKPLIAQALEAIYVDKNVKVKSVNTINVKPQPARMFRGRRKGKTSGFKKAIVTFYQGHSVG

SEQ ID NO: 54718 - protein, 284 aa, Chlamydia pneumoniae
MFKKFKPVTPGTRQLVLPAFDELTTRGELRGTKSKRSLRPNKKLSFFKKSSGGRDNLGHISCRHRGGGAKQLYRVVDFKRNKDGITAKVVTVEYDPNRSAYIALLSYEDGEKRYILAPKGIQRGDVVVSGEGSPFKPGCCMTLKSIPLGLSVHNIEMRPSSGGKLVRSAGLAAQVIAKSPGYVTLKMPSGEFRMLNEGCRATIGEVSNADHNLRVDGKAGRRRWMGVRPTVRGTAMNPVDHPHGGGEGRHNGYIPRTPWGKVTKGLKTRDKNKSNKWIVKDRRK

SEQ ID NO: 54719 - protein, 88 aa, Chlamydia pneumoniae
MSRSLRKGPFVDHHLLKKVRAMNIEEKKTPIKTWSRRSMITPEMIGHTFEVHNGKKFLTVFVSETMVGHKLGEFSPTRIFKSHPVKKG

SEQ ID NO: 54720 - protein, 111 aa, Chlamydia pneumoniae
MFKATARYIRVQPRKARLAAGLMRNLSVQEAEEQLGFSQLKAGRCLKKVLNSAVANAELHENIKRENLSVTEVRVDAGPVYKRSKSKSRGGRSPILKRTSHLTVIVGEKER

SEQ ID NO: 54721 - protein, 223 aa, Chlamydia pneumoniae
MGQKGCPIGFRTGVTKKWRSLWYGNKQEFGKFLIEDVRIRQFLRKKPSCQGAAGFVVRRMSGKIEVTIQTARPGLVIGKKGAEVDLLKEELRALTGKEVWLEIAEIKRPELNAKLVADNIARQIERRVSFRRAMKKAMQSVMDAGAVGVKIQVSGRLAGAEIARSEWYKNGRVPLHTLRADIDYATACAETTYGIIGIKVWINLGENSSSTTPNNPAAPSAAA

SEQ ID NO: 54722 - protein, 138 aa, Chlamydia pneumoniae
MLMPKRTKFRKQQKGQFAGLSKGATFVDFGEYAMQTLERGWVTSRQIEACRVAINRYLKRRGKVWIRIFPDKSVTKKPAETRMGKGKGAPDHWVAVVRPGRILFEVANVSKEDAQDALRRAAAKLGIKTRFVKRVERV

SEQ ID NO: 54723 - protein, 86 aa, Chlamydia pneumoniae
MASEPRGSRKVKIGVVVSAKMEKTVVVRVERIFSHPQYLKVVRSSKKYYAHTELKVSEGDKVKIQETRPLSKLKRWRVIEHVGVVS

SEQ ID NO: 54724 - protein, 122 aa, Chlamydia pneumoniae
MIQQESQLKVADNTGAKKVKCFKVLGGSRRRYATVGDVIVCSVRDVEPNSSIKKGDVIKAVIVRTRRHITRKDGSTLKFDTNSCVIIDDKGNPKGTRIFGPVAREIRDRGFIKISSLAPEVI

SEQ ID NO: 54725 - protein, 111 aa, Chlamydia pneumoniae
MKKQNIRVGDKVFILAGNDKGKEGKVLSLTEDKVVVEGVNVRIKNIKRSQQNPKGKRISIEAPIHISNVRLTIAGEPAKLSVKVTEQGRELWQRRPDGTSQLYRLVRGKKG

SEQ ID NO: 54726 - protein, 180 aa, Chlamydia pneumoniae
MSRLKKFYTEEIRKSLFEKFGYANKMQIPVLKKIVLSMGLAEAAKDKNLFQAHLEELTMISGQKPLVTKARNSIAGFKLREGQGIGAKVTLRGIRMYDFMDRFCNIVSPRIRDFRGFSNKGDGRGCYSVGLDDQQIFPEINLDRVKRTQGLNITWVTTAQTDDECTTLLELMGLRFKKAQ

SEQ ID NO: 54727 - protein, 133 aa, Chlamydia pneumoniae
MGMTSDSIADLLTRIRNALMAEHLYVDVEHSKMREAIVKILKHKGFVAHYLVKEENRKRAMRVFLQYSDDRKPVIHQLKRVSKPSRRVYVSAAKIPYVFGNMGISVLSTSQGVMEGSLARSKNIGGELLCLVW

SEQ ID NO: 54728 - protein, 183 aa, Chlamydia pneumoniae
MSRKAREPILLPQGVEVSIQDDKIIVKGPKGSLTQKSVKEVEITLKDNSIFVHAAPHVVDRPSCMQGLYWALISNMVQGVHLGFEKRLEMIGVGFRASVQGAFLDLSIGVSHPTKIPIPSTLQVSVEKNTLISVKGLDKQLVGEFAASIRAKRPPEPYKGKGIRYENEYVRRKAGKAAKTGKK

SEQ ID NO: 54729 - protein, 123 aa, Chlamydia pneumoniae
MESSLCKKSLMKRRRALRVRKVLKGSPTKPRLSVVKTNKHIYVQLIDDSIGKTLASVSTLSKLNKSQGLTKKNQEVAKVLGTQIAELGKNLQLDRVVFDRGPFKYHGIVSMVADGAREGGLQF

SEQ ID NO: 54730 - protein, 165 aa, Chlamydia pneumoniae
MSLSKNSHKEDQLEEKVLVVNRCSKVVKGGRKFSFSALILVGDGKGRLGYGFAKANELTDAIRKGGEAAKKNLMKIEALEDGSIPHEVLVHHDGAQLLLKPAKPGTGIVAGSRIRLILEMAGIKDIVAKSFGSNNPMNQVKAAFKALTGLSPRKDLLRRGAAIND

SEQ ID NO: 54731 - protein, 144 aa, Chlamydia pneumoniae
MIKLESLFDISERKRRKKLLGRGPSSGHGKTSGRGHKGDGSRSGYKRRFGYEGGGVPLYRRVPTRGFSHKRFDKCVEEITTGRLAELFQEGEAITLDALKAKKAIARQAVRVKVILKGDLEKTFVWQDTAVVLSQGVQNLLGIT

SEQ ID NO: 54732 - protein, 462 aa, Chlamydia pneumoniae
MFRPYMTTLRQFFLITELRQKLFYTFALLTACRVGVFIPVPGINGELAVAYFKQLLGSGQNLFQLADIFSGGAFAQMTVIALGVVPYISASIIVQLFLVFMPALQREMRESSDQGKRRIGRLTRLFTVALAVIQSLLFAKFALRMNLTIPGIVLPTLLSSKLFGVPWIFYITTVVVMTTGTLLLMWIGEQISDKGIGNGISLIIALGILSSFPSVLGSIVNKLNLGSQDSSDLGLISILILALVFVFVLITTILIIEGVRKIPVQYARRVIGRREVPGGGSYLPLKVNYAGVIPVIFASSLLMFPATIGQFIASESSWMKRIAALLAPGSLVYSICYVLLIIFFTYFWTATQFHPEQIASEMKKNNAFIPGIRQGKPTQHYLEYTMNRVTLLGALFLAAIAILPSLLGCLLRVDSNVSYFLGGTAMLIVVGVVLDTMKQVDAFLLMRRYDSVLKTDRTKGRH

SEQ ID NO: 54733 - protein, 122 aa, Chlamydia pneumoniae
MPRIIGIDIPAKKKLKISLTYIYGIGSARSDEIIKKLKLDPEARASELTEEEVGRLNSLLQSEYTVEGDLRRRVQSDIKRLIAIHSYRGQRHRLSLPVRGQRTKTNSRTRKGKRKTVAGKKK

SEQ ID NO: 54734 - protein, 133 aa, Chlamydia pneumoniae
MVKNQAQAKKSVKRKQLKNIPSGVVHVKATFNNTIVSITDPAGNVISWASAGKVGYSGSRKSSAFAATVAAQDAAKTAMNSGLKEVEVCLKGTGAGRESAVRALISAGLVVSVIRDETPVPHNGCRPRKRRRV

SEQ ID NO: 54735 - protein, 391 aa, Chlamydia pneumoniae
MPAKKKAQSVVLGKEKGMSDNAHNLLYDKFELPEAVKMLPVEGLPIDKHARFIAEPLERGMGHTLGNALRRALLIGLEAPAIISFAMTGVLHEYMAIEGVIEDVTNIILNLKGALLKKYPMQDSSLGRTTQVLKASISIDASDLAAANGQKEVTLQDLLQEGDFEAVNPDQVIFTVTQPIQLEVVLRIAFGRGYTPSERIVLEDKGVYEIVLDAAFSPVTLVNYFVEDTRVGQDTDFDRLVLIVETDGRVTPKEALAFSTQILTKHFSIFENMDEKKIVFEEAISIEKENKDDILHKLILGINEIELSVRSTNCLSNANIETIGELVIMPEPRLLQFRNFGKKSLCEIKNKLKEMKLELGMDLTQFGVGLDNVKEKMKWYAEKIRAKNIKG

SEQ ID NO: 54736 - protein, 142 aa, Chlamydia pneumoniae
MQHARKKFRVGRTSSHNRCMLANMLKSLIHYERIETTLPKAKELRRHADKMITLAKKNSLAARRIAIGRLMVRYNKLTSKEARQAKGGDTSVYNVDRLVVNKLFDELGNRFVERKGGYTRILKLQNRIGDNAQKCIIEFLAS

SEQ ID NO: 54737 - protein, 335 aa, Chlamydia pneumoniae
MKVVINGFGRIGRLVLRQILKRNSSVEVLAINDLVPGDALTYLFKFDSTHGRFPEDVRCEADHLIVGKRKIQFLSERNVQNLPWKDLGVDLVIECTGLFTKKEDAEKHIQAGAKRVLISAPGKGDIPTFVMGVNHKTFNPEKDFVISNASCTTNCLAPIAKVLLDNFGITEGLMTTVHAATATQLVVDGPSKKDWRGGRGCLQNIIPASTGAAKAVTLCLPELKGKLTGMAFRVPIEDVSVVDLTVRLDKSTTYDDICKAMKQASETDLKGILDYTDEQVVSSDFIGSEYSSIFDALAGIALNDRFFKLVAWYDNETGYATRIVDLLEYVEKNSK

SEQ ID NO: 54738 - protein, 320 aa, Chlamydia pneumoniae
MRLLSILKLHLFSLRSSSSLSPHYYHSCSRSMLHLLCRWKDADIMEWQQICNILSGVCSRMSGKLVSLQKETQDSCHQEHERIHLQYREQLSALEEEYRRREEAKNQDLEKLQQENTWLQNRLAEKLQQIRHQSDIIDEIKKELLQSVQRTEISEGRRLCYEHKIKQLEEQLQRYVSQHGAPSIEIEEDKSSAAYAEINRLKKSLIDLQQEKDIYIKTYHSEIAKLREKLQRQEGAQTSSEVCSIEKLTEVQTDLAEKKKAIALLQDIVEDQYCQLRDLHKEKGMAMPSNTKLDHLKGLLGKEPESEVDVVFSESKSLGS

SEQ ID NO: 54739 - protein, 611 aa, Chlamydia pneumoniae
MWTHPIAYDVIVVGAGHAGCEAAYCSAKMGVSVLMLTSNLDTIAKLSCNPAVGGIGKGHIVREIDALGGIMAEVTDQSGIQFRILNQTKGPAVRAPRAQVDKQLYHIHMKRLLENTPGLHIMQATVESLLDKEGVISGVTTKEGWMFSGKTVVLSSGTFMRGLIHIGDRNFSGGRLGDPSSQGLSEDLKKRGFPISRLKTGTPPRLLASSINFSCMEEQPGDLGVGFVHRTEPFQPPLPQLSCFITHTMEKTKAIISANLHRSALYGGCIEGVGPRYCPSIEDKIVKFSDKERHHVFLEPEGLHTQEIYANGLSTSMPFDVQYDMIRSVLGLENAIITRPAYAIEYDYIHGNVIHPTLESKLIEGLFLCGQINGTTGYEEAAAQGLIAGINAVNKVFNRPPFIPSRQESYIGVMLDDLTTQILDEPYRMFTGRAEHRLLLRQDNACARLSHYGYELGLLSEERYELVKKQNQLLEEEKVRLQKTFRQYGQSVVSLAKALSRPEVSYDMLREAFPNDIRDLGAVLNASLEMEIKYSGYIDRQKILIQSLEKAESLLIPEDLDYKQITALSLEAQEKLAKFTPRTLGSASRISGIASADIQVLMIALKKHAHH

SEQ ID NO: 54740 - protein, 468 aa, Chlamydia pneumoniae
MDKSTGVPLPSPPHSKESEMIVLGCMLTGVHYLNLAANQLYEEDFYYLEHKIIFRVLQDAFKQDKPIDVHLAGEELKRHNQITVIGGPSYLITLAEFAGTAAYLEEYVDIIRSKSILRKMISTAKEIEKRALEQPKNVAEALDEAQNSFFKISQSTSVSQYTLVADKLRGLTTTTDKPYLVQLQERQELFLQNAQGDNKSFFTGIPTHFIDLDQLIHGFSPSNLMILAARPAMGKTALALNIAENLCFQNRLPIGIFSLEMTVDQLIHRMICSRSEVDSKKISIGDLSGHDFQRIVSVINEMQEHTLLIDDQPGLKVSDLRARARRMKESYDIQFLIIDYLQLLSGSGTLRATESRQTEISEISRMLKTLARELNIPILCLSQLSRKVEDRANHRPMMSDLRESGSIEQDSDLVMFLLRREYYDPNDKPGTAELIIAKNRHGSIGSVPLVFEKELARFRNYSAFECIS

SEQ ID NO: 54741 - protein, 540 aa, Chlamydia pneumoniae
MQSSEVKPFSRLRAYLCPIYKSEFSKFVPLFLLAFFVGFNYCLLKNMKDTLVIVGSDAGAEVIPFLKVWGIVPGAVIVTMVYGWLGSRYPRDTVFYCFMAAFLGFFFLFAVIIYPVGDSLHLNSLADKLQELLPQGLRGFIVMVRYWSYSIYYVMSELWSSVVLSMLFWGLANQITTITEAGRFYALINTGLNLSSICAGEISYWMGKQTFVAYSFACDSWHSVMLNLTMLITCSGLIMIWLYRRIHHLTIDTSIPPSRRVLAEEGAATANLKEKKKPKAKARNLFLHLIQSRYLLGLAIIVLSYNLVIHLFEVVWKDQVSQIYSSHVEFNGYMSRITTLIGVVSVLAAVLLTGQCIRKWGWTVGALVTPLVMLVSGLLFFGTIFAAKRDISIFGGVLGMTPLALAAWTGGMQNVLSRGTKFTFFDQTKEMAFIPLSPEDKNHGKAAIDGVVSRIGKSGGSLIYQGLLVIFSSVAASLNVIALVLLIIMVVWIAVVAYIGKEYYSRAADAVATLKQPKEPSSSIVREAQESVEQEEMAVL

SEQ ID NO: 54742 - protein, 870 aa, Chlamydia pneumoniae
MKKLFVLDASGFIFRAYFALPEMKNHQGQATQAVFGFIRSLNKLIKEFSPEYMISVFDGPNNKQSRQAIYADYKSNRQKKFEDIPPQIALVKEYCSLIGLAYLEKESVEADDVIASIAKKAREENYKVYVCTADKDLLQLVNDHVVAWNPWADQGVVGISEVIERYGIPPGNIPDYLALVGDSSDNIPGLPGCGPKKAAALLKQFGSVEGLLENLDAVKGLSQTMLSERQETLKLSKRLALLDSNIPIPVPIESLTFPQHPVDEEKLIHFYIQQGFKTLVPSKQTEAATVDVQIIKDAESLTNILNLVQGGDIAFAVAYTGNHLLSLKLEGLALTQGSGVFFIALEEEGTKILPILKDFFLREDLTFYGYNLKRDCHALLNAGIVIREISYDLALAEHLTNGGGKISFQSLLVNHGFTETAHRFAKEWGNSGLPIGRLPEQPEQYFGEFVAYLPIIKDAILEEINRKNLNHILSDIEMPLEKVLFSMERAGVPLDVEELAILEALFETELAVLTEEIYDLSGRPFNIKSPKQLSDILYNELGLRPIDKAKSTRAEVLEALRSEHPIIEKLLAFRTIEKLLSTYVKALPKQVDSHTQRIHPSFDQTGAVTGRLACRDPNLQNIPIRSERGILLRKAFRLSEKNSYFLSADYSQIELRFLAHLSQDKSLKFAFESGEDIHAFTASQVFHVPLEQVSKEQRMQAKTVNFGIVYGQQAFGLAKVLKISIGEAQELIQAYFSRYPEIAHFVEETIQQAAKDLRVTTMLGRERIIDSWNEFPGSRAASGRFAVNTRIQGSAAELIKLAMLDISQAIKQQQMKSRMLLQIHDELLFEVPEEEIEEMQRLVREKMESAMTLSVPIVVNILIGKNWAEC

SEQ ID NO: 54743 - protein, 464 aa, Chlamydia pneumoniae
MKEERSSEILPRVKETKKHAYVSMQEKSCVGECAVVASESEEAESVTVTKIAKLQRMGIEELNILARQYGVKNIGSLTKSQVVFEIVKAKSERPDELLIGEGVLEVLPDGFGFLRSPTYNYLPSAEDIYVSPAQIRRFDLKKGDTIIGTIRSPKEKEKYFALLKVDKINGSTPDKAKERVLFENLTPLYPNQRIVMEMGKDHLAERVLDLTAPIGKGQRGLIVAPPRSGKTVILQSIAHAIAVNNPDIVLIVLLIDERPEEVTDMIRQVRGEVVASTFDEQPERHIQVAEMVIEKARRLVEHGNDVVILLDSITRLARAYNTVQPHSGKILTGGVDASALHKPKRFFGAARNIEGGGSLTILATALIDTGSRMDEVIFEEFKGTGNMELVLDRRLSDRRTYPAIDLIKSGTRKEELLYHPSELERVYLFRQAIADLTTIDAMHLLLGRLKKTNSNAEFLLSLKE

SEQ ID NO: 54744 - protein, 210 aa, Chlamydia pneumoniae
MMNYEDAKLRGQAVAILYQIGAIKFGKHILASGEETPLYVDMRLVISSPEVLQTVATLIWRLRPSFNSSLLCGVPYTALTLATSISLKYNIPMVLRRKELQNVDPSDAIKVEGLFTPGQTCLVINDMVSSGKSIIETAVALEENGLVVREALVFLDRRKEACQPLGPQGIKVSSVFTVPTLIKALIAYGKLSSGDLTLANKISEILEIES

SEQ ID NO: 54745 - protein, 173 aa, Chlamydia pneumoniae
MADDTLIPKLMKNSLSQACSEGLLIAKYPPLQVIVHFDNNLVVKTHLSVAPVFSCLFLGPAAHKAMQEIVLWCSRYANKEHPPFSSHFAKDLIPSQYLEILNCVAEIPFGEQQTYAEIAKKTDTHPRTVGAACKQNPFLLFFPCHRVVGSHGERNYVLGPVIHEILLKFENSY

SEQ ID NO: 54746 - protein, 792 aa, Chlamydia pneumoniae
MRIPITLLQTYFSEPLSTKEILEACDHIGIEAEIENTTLYSFASVITAKILHTIPHPNADKLRVATLTDGEKEHQVVCGAPNCEAGLIVALALPGAKLFDSEGQAYTIKKSKLRGVESQGMCCGADELGLDELQIQERALLELPEATPLGEDLATVLGNTSLEISLTPNLGHCASFLGLAREICHVTQANLVIPKEFSFENLPTTALDMGNDPDICPFFSYVVITGISAQPSPIKLQESLQALKQKPINAIVDITNYIMLSLGQPLHAYDASHVALDSLRVEKLSTPESLTLLNGETVLLPSGVPVVRDDHSLLGLGGVMGAKAPSFQETTTTTVIKAAYFLPEALRASQKLLPIPSESAYRFTRGIDPQNVVPALQAAIHYILEIFPEATISPIYSSGEICRELKEVALRPKTLQRILGKSFSIEILSQKLQSLGFSTTPQETSLLVKVPSYRHDINEEIDLVEEICRTESWNIETQNPVSCYTPIYKLKRETAGFLANAGLQEFFTPDLLDPETVALTRKEKEEISLQGSKHTTVLRSSLLPGLLKSAATNLNRQAPSVQAFEIGTVYAKHGEQCQETQTLAILLTEDGESRSWLPKPSLSFYSLKGWVERLLYHHHLSIDALTLESSALCEFHPYQQGVLRIHKQSFATLGQVHPELAKKAQIKHPVFFAELNLDLLCKMLKKTTKLYKPYAIYPSSFRDLTLTVPEDIPANLLRQKLLHEGSKWLESVTIISIYQDKSLETRNKNVSLRLVFQDYERTLSNQDIEEEYCRLVALLNELLTDTKGTINS

SEQ ID NO: 54747 - protein, 651 aa, Chlamydia pneumoniae
MATPAQKSPTFQDPSFVRELGSNHPVFSPLTLEERGEMAIARVQQCGWNHTIVKVSLIILALLTILGGGLLVGLLPAVPMFIGTGLIALGAVIFALALILCLYDSQGLPEELPPVPEPQQIQIEDLRNETREVLEGTLLEVLLKDRDAKDPAVPQVVVDCEKRLGMLDRKLRREEEILYRSTAHLKDEERYEFLLELLEMRSLVADRLEFNRRSYERFVQGIMTVRSEEGEKEISRLQDLISLQQQTVQDLRSRIDDEQKRCWTALQRINQSQKDIQRAHDREASQRACEGTEMDCAERQQLEKDLRRQLKSMQEWIEMRGTIHQQEKAWRKQNAKLERLQEDLRLTGIAFDEQSLFYREYKEKYLSQKLDMQKILQEVNAEKSEKACLESLVHDYEKQLEQKDANLKKAAAVWEEELGKQQQEDYEQTQEIRRLSTFILEYQDSLREAEKVEKDFQELQQRYSRLQEEKQVKEKILEESMNHFADLFEKAQKENMAYKKKLADLEGAAAPTEIGEDDDWVLTDSASLSQKKIRELVEENQELLKALAFKSNELTQLVADAVEAEKEISKLREHIEEQKEGLRALDKMHAQAIKDCEAAQRKCCDLESLLSPVREDAGMRFELEVELQRLQEENAQLRAEVERLEQEQFQG

SEQ ID NO: 54748 - protein, 374 aa, Chlamydia pneumoniae
MHRKKRNLVFMNVPDSKNLHPPAYELLEIKARITQSYKEASAILTAIPDGILLLSETGHFLICNSQAREILGIDENLEILNRSFTDVLPDTCLGFSIQEALESLKVPKTLRLSLCKESKEKEVELFIRKNEISGYLFIQIRDRSDYKQLENAIERYKNIAELGKMTATLAHEIRNPLSGIVGFASILKKEISSPRHQRMLSSIISGTRSLNNLVSSMLEYTKSQPLNLKIINLQDFFSSLIPLLSVSFPNCKFVREGAQPLFRSIDPDRMNSVVWNLVKNAVETGNSPITLTLHTSGDISVTNPGTIPSEIMDKLFTPFFTTKREGNGLGLAEAQKIIRLHGGDIQLKTSDSAVSFFIIIPELLAALPKERAAS

SEQ ID NO: 54749 - protein, 267 aa, Chlamydia pneumoniae
MTKVALLIAYQGTAYSGWQQQPNDLSIQEVIESSLKKITKTRTPLIASGRTDAGVHAYGQVAHFRAPDHPLFANANLTKKALNAILPKDIVIRDVALFDDNFHARYLTIAKEYRYSLSRLAKPLPWQRHFCYTPRHPFSTELMQEGANLLIGTHDFASFANHGRDYNSTVRTIYTLDIVDKGDSLSIICRGNGFLYKMVRNLVGALLDVGKGAYPPEHLLDILEQKNRREGPSAAPAYGLSLHHVCYSSPYNNFCCEQCSVSTSNEG

SEQ ID NO: 54750 - protein, 211 aa, Chlamydia pneumoniae
MIKSSLILLSGGQGTRFGSKIPKQYLPLNGTPLVLHSLKILSSLPQIAEVIVVCDPSYQETFQEYPVSFAIPGERRQDSVFSGLQQVSYPWVIIHDGARPFIYPDEIHDLLETAEKIGATALASPIPYTIKQRNPVRTLDRDNLAIIHTPQCIKTEILREGLALAKEKQLTLVDDIEAAEIIGKPSQLVFNKHPQIKISYPEDLTIAQALL

SEQ ID NO: 54751 - protein, 458 aa, Chlamydia pneumoniae
MQIAQVFGCGRLNGEVKVSGAKNAATKLLVASLLSDQKCTLRNVPDIGDVSLTVELCKSLGAHVSWDKETEVLEIYTPEIQCTRVPPTFSNVNRIPILLLGALLGRCPEGVYVPTVGGDAIGERTLNFHFEGLKQLGVQISSDSSGYYAKAPRGLKGNYIHLPYPSVGATENLILAAIHAKGRTVIKNVALEAEILDLVLFLQKAGADITTDNDRTIDIFGTGGLGSVDHTILPDKIEAASFGMAAVVSGGRVFVRNAKQELLIPFLKMLRSIGGGFLVSESGIEFFQERPLVGGVVLETDVHPGFLTDWQQPFAVLLSQAQGSSVIHETVHENRLGYLHGLQHMGAECQLFHQCLSTKACRYAIGNFPHSAVIHGATPLWASHLVIPDLRAGFAYVMAALIAEGGGSIIENTHLLDRGYTNWVGKLRSLGAKIQIFDMEQEELTTSPKSLALRDASL

SEQ ID NO: 54752 - protein, 561 aa, Chlamydia pneumoniae
MSTLLSILSVICSQAIAKAFPNLEDWAPEITPSTKEHFGHYQCNDAMKLARVLKKAPRAIAEAIVAELPQEPFSLIEIAGAGFINFTFSPVFLNQQLEHFKDALKLGFQVSQPKKIIIDFSSPNIAKDMHVGHLRSTIIGDSLARIFSYVGHDVLRLNHIGDWGTAFGMLITYLQENPCDYSDLEDLTSLYKKAYVCFTNDEEFKKRSQQNVVALQAKDPQAIAIWEKICETSEKAFQKIYDILDIVVEKRGESFYNPFLPEIIEDLEKKGLLTVSNDAKCVFHEAFSIPFMVQKSDGGYNYATTDLAAMRYRIEEDHADKIIIVTDLGQSLHFQLLEATAIAAGYLQPGIFSHVGFGLVLDPQGKKLKTRSGENVKLRELLDTAIEKAEEALREHRPELTDEAIQERAPVIGINAIKYSDLSSHRTSDYVFSFEKMLRFEGNTAMFLLYAYVRIQGIKRRLGISQLSLEGPPEIQEPAEELLALTLLRFPEALESTIKELCPHFLTDYLYNLTHKFNGFFRDSHIQDSPYAKSRLFLCALAEQVLATGMHLLGLKTLERL

SEQ ID NO: 54753 - protein, 212 aa, Chlamydia pneumoniae
MIFRICKFFTWVAFSLFYKLKVYGVKKNFIKGPAIIAVNHNSFLDPIALHMCVHECIYHLARASLFNIPWLWKQWGCFPVRQDEGNSAAFKIASRLFNKRKKLVIYPEGARSPDGQLQPGKVGIGMMAAKSRVPIIPVYIRGTFEAFNRHQKIPHVWKTITCVFGTPMYFDDIIQNPEIKNKETYQIITNQTMNKIAELKAWYESGCKGDVP

SEQ ID NO: 54754 - protein, 216 aa, Chlamydia pneumoniae
MIITIDGPSGTGKSTTAKALADHLHFNYCNTGKMYRTLAYARLQSPWATLPLTKFLEEPPFSFTFATGQPLESFFNGHLLTSELTTQEVANAASELSQLPEVRAFMQDLQRRYAQLGNCVFEGRDMGSKVFPNADLKIFLTSSPEVRAQRRLKDLPEGTLSPEQLQAELVKRDAADAQRAHDPLVIPENGIVIDSSDLTIRQVLEKILALLFRNEL

SEQ ID NO: 54755 - protein, 308 aa, Chlamydia pneumoniae
MLNSNKFKSKTGAYGDLFQRVVVHSLVLTFLVLLLYSSLFPLTSFALGFITATCGAVGTYEYSSMAKAKMHYPLSTFSAIGSFLFLALSFLSIRWGHSLPGFFDALPWTLLIVWVVWSIFRVRKSTIGALQLSGVTLFSILYVGIPIRLFLHVLYSFIHTQEPYLGIWWASFLIATTKGADIFGYFFGKAFGNKKIAPQISPNKTVVGFVAGCLGATLISFIFFLQIPTRFASYFPMPAILIPLGLALGITGFFGDIIESIFKRDAHLKNSNKLKAVGGMLDTLDSLLLSTPIAYLFLLITQSKEFIG

SEQ ID NO: 54756 - protein, 261 aa, Chlamydia pneumoniae
MTYALINDPVDLSLATNNAESKFPSLQRLPNHVAIIMDGNRRWYKKHREECGHTHTSGHYYGAKVLPNILNAVLDLGIKVLTLYTFSTENFGRPKEEIQEIFNIFYTQLDKQLPYLMENEICLRCIGDLSKLPKGIQTKINHVSRMTASFSRLELVLAVNYGGKDELVRAFKKLHVDILNKKISSDDLSESLISSYLDTSGLTDPDLLIRTGGEMRVSNFLLWQIAYTELYITDTLWPDFTPQDLFEAINVYQQRSRRGGK

SEQ ID NO: 54757 - protein, 588 aa, Chlamydia pneumoniae
MTNSDNASAAGLLWAHPKEDPAFLGMIIKEFHLPPTVAQIFISRGFQTIQEIHKFLYSHLSSLYDPGLFLDMSKAVERLLLARDRKEHVMIYGDSDVDGMTGVALLVEFLRDIDVHVSYFFLGAILKQHGETSTLIAKLKEEGITLLITVDCGITAGKEVSDITRQGIDVIITDHHMPTGKIPHCVATLNPKLRDHTYPNRELTGVGVAFKLARGVLNALISRNLVPKSQGSLKKLLDLVTLGTITDVGVLLGENRVMVRYGIKEIARGARPGLNKLCALCGVEKSEVTSTDIVLKIAPKLNSLGRLDDPAKGVELLLTQDDERVDALIMELDNINRERQRIEAEVFQDVQEILNSNPEILKQAAIVLSSTAWHARVIPIISARLAKTYNKPVVIIAIQRGIGKGSARTIGSFPLLGVLKKCSSLLLSYGGHDFAAGVIMKEDKVEDFKKKFVHLVNSSLKKGDTLPHLEIDAYADFDAIDYDLLASMELFEPFGKGNLMPIFYSKVRQVRYPKVLPGNHLKLYLSQKERNLEGVAFGLGRHADALKASWHYPLEIAYTPRLSQTSGSGVIHLLVRDFRISSEPRFSD

SEQ ID NO: 54758 - protein, 505 aa, Chlamydia pneumoniae
MNWENVRVRVAPSPTGDPHVGTAYMALFNEIFAKRFKGKMILRIEDTDRTRSRQDYEENIFSALRWCGIQWDEGPDVGGPYGPYRQSERTKIYQGYVETLLKTDCAYKCFATPQELAEMRAVASTLGYRGGYDRRYRYLSPEEVASREAAGQPYTIRLKVPLSGECVFEDYSKGRVVFPWADVDDQVLVKSDGFPTYHFANVIDDHLMGITHVLRGEEWLSSTPKHLLLYEAFGWEPPVFLHMPLLLNPDGTKLSKRKNPTSIFYYRDSGYVKEAFVNFLTLMGYSMEGDEEVYSLERIIETFNPRRIGKSGAVFDIQKLDWMNKHYLNHEGSPECLLKELQGWLLNDEFFLKILPLCQSRITTLAEFINLTSFFFSGLLEYRVEELLPQALSPEKAAILLYSYVKYLEKTDQWTKETCYLGSKWLAQAFNVHHKKAIIPLLYVAITGKKQGLPLFDSIEILGKPRARARLVYAEKLLGGVPKKLAATVDKFMQREDFEEATFDL

SEQ ID NO: 54759 - protein, 123 aa, Chlamydia pneumoniae
MPTINQLIRKRRKSSLARKKSPALQKCPQKRGVCLQVKTKTPKKPNSALRKVAWVRLSNGQEVIAYIGGEGHNLQEHSIVLIQGGRVKDLPGVRYHIVRGTLDCAAVKNRKQSRSRYGAKRPK

SEQ ID NO: 54760 - protein, 157 aa, Chlamydia pneumoniae
MSRRHSAEKRDIPGDPIYGSVILEKFINKVMMHGKKSVARKIVYSALERFGKKLNLENVLEGFGEALENAKPILEVRSRRVGGATYQVPVEVASERRNCLAMQWIIKHARSKPGKSMEVGLATELIDCFNKQGATIKKREDTHRMAEANKAFAHYKW

SEQ ID NO: 54761 - protein, 694 aa, Chlamydia pneumoniae
MSNQEFDLSAIRNIGIMAHIDAGKTTTTERILFYAGRTHKIGEVHEGGATMDWMAQEQERGITITSAATTVFWLGAKINIIDTPGHVDFTIEVERSLRVLDGAVAVFDAVSGVEPQSETVWRQADKYGVPRIAFVNKMDRMGADYFAAVESMKEKLGANAFPVHCPIGSESQFVGMVDLISQKALYFLDDTLGAKWEEKEISEDLKERCAELRANLLEELATIDESNEAFMMKVLEDPDSITEDEIHQVMRKGVIENKINPVLCGTAFKNKGVQQLLNVIVKWLPSPLDRGNIRGINLKTDQEISLEPRRDGPLAALAFKIMTDPYVGRITFIRIYSGTLKKGSAILNSTKDKKERISRLLEMHANERTDRDEFTVGDIGACVGLKFSVTGDTLCDDNQEIVLERIEFPDPVIDMAIEPKSKGDREKLAQALSSLSEEDPTFRVSTNEETGQTIISGMGELHLDILRDRMIREFKVEANVGKPQVSYKETITVSGNSETKYVKQSGGRGQYAHVCLEIEPNEPGKGNEVVSKIVGGVIPKEYIPAVIKGIEEGLNTGVLAGYGLVDVKVSIVFGSYHEVDSSEMAFKICGSMAVKDACRKAKPVILEPIMKVAVITPEDHLGDVIGDLNRRRGKILGQESSRGMAQVNAEVPLSEMFGYTTSLRSLTSGRATSTMEPAFFAKVPQKIQEEIVKK

SEQ ID NO: 54762 - protein, 105 aa, Chlamydia pneumoniae
MKQQKQKIRIRLKGFDQGQLDRSTADIVETAKRTGARVVGPIPLPTKREVYTVLRSPHVDKKSREQFEIRTHKRLVDILDPTGKTIDALKMLALPAGVDIKIKAA

SEQ ID NO: 54763 - protein, 176 aa, Chlamydia pneumoniae
MDRDNEVPLPKPKWIYRTGIGQDSHRFLPESSTKPCILGGIIFDHCPGFQANSDGDIIFHAICNAISSVTNKIILGKVADELLQTRGITDSGIYLEEALKSLKPNQKISHVAITIEGSRPKFLCKLSALRQNIAQVMNLTPTDIGITATSGEGLSDFGCGDGVQCFCVLTVMEYCD

SEQ ID NO: 54764 - protein, 106 aa, Chlamydia pneumoniae
MEPYAVIQTGSKQYQVRSGDVIDVELLGEVASDKEVIFQDVLFVFDGTKASLGSPTIANAQVKAEYLSHVKGEKVVAYKYKKRKNYHRKHGHRQKYLRVKIREILI

SEQ ID NO: 54765 - protein, 84 aa, Chlamydia pneumoniae
MAHKKGQGASRNGRDSKSKRLGVKVGAGQKVSTGSILVRQRGTRWNPAQNVGRGRDDTLFALVDGIVVMKKTNRTYISVVPEQL

SEQ ID NO: 54766 - protein, 343 aa, Chlamydia pneumoniae
MKKDKNVIMFVDQITLELRAGKGGNGVVAWRKEKYLPKGGPYGGNGGNGGSVIIEATTSVYSFEAYRNIRFLKAPDGQSGATNNRTGRSGKDLIVSVPTGTLLRDAETGEILHDFTVDGERLLVSQGGKGGKGNTFFKTSVNRAPTKATPGKPGEIRQVELELKLIADIGLVGFPNAGKSTLFNTLAHTEVKVGAYPFTTLAPSLGLVLCKDRLYQKPWIIADIPGIIEGAHQNKGLGLDFLRHIERTLLLLFVIDVSKRERNSPEEDLETLIHELHSHQPDFEKKDMLVALNKIDDLLPDEQEECLQSFQKRFPSYTFVLISGLTGEGVDGLYRFFTQRLAV

SEQ ID NO: 54767 - protein, 1732 aa, Chlamydia pneumoniae
MNISDRFSSMKWLPATAVFAAVLPALTAFGDPASVEISTSHTGSGDPTSDAALTGFTQSSTETDGTTYTIVGDITFSTFTNIPVPVVTPDANDSSSNSSKGGSSSSGATSLIRSSNLHSDFDFTKDSVLDLYHLFFPSASNTLNPALLSSSSSGGSSSSSSSSSSGSASAVVAADPKGGAAFYSNEANGTLTFTTDSGNPGSLTLQNLKMTGDGAAIYSKGPLVFTGLKNLTFTGNESQKSGGAAYTEGALTTQAIVEAVTFTGNTSAGQGGAIYVKEATLFNALDSLKFEKNTSGQAGGGIYTESTLTISNITKSIEFISNKASVPAPAPEPTSPAPSSLINSTTIDTSTLQTRAASATPAVAPVAAVTPTPISTQETAGNGGAIYAKQGISISTFKDLTFKSNSASVDATLTVDSSTIGESGGAIFAADSIQIQQCTGTTLFSGNTANKSGGGIYAVGQVTLEDIANLKMTNNTCKGEGGAIYTKKALTINNGAILTTFSGNTSTDNGGAIFAVGGITLSDLVEVRFSKNKTGNYSAPITKAASNTAPVVSSSTTAASPAVPAAAAAPVTNAAKGGALYSTEGLTVSGITSILSFENNECQNQGGGAYVTKTFQCSDSHRLQFTSNKAADEGGGLYCGDDVTLTNLTGKTLFQENSSEKHGGGLSLASGKSLTMTSLESFCLNANTAKENGGGANVPENIVLTFTYTPTPNEPAPVQQPVYGEALVTGNTATKSGGGIYTKNAAFSNLSSVTFDQNTSSENGGALLTQKAADKTDCSFTYITNVNITNNTATGNGGGIAGGKAHFDRIDNLTVQSNQAKKGGGVYLEDALILEKVITGSVSQNTATESGGGIYAKDIQLQALPGSFTITDNKVETSLTTSTNLYGGGIYSSGAVTLTNISGTFGITGNSVINTATSQDADIQGGGIYATTSLSINQCNTPILFSNNSAATKKTSTTKQIAGGAIFSAAVTIENNSQPIIFLNNSAKSEATTAATAGNKDSCGGAIAANSVTLTNNPEITFKGNYAETGGAIGCIDLTNGSPPRKVSIADNGSVLFQDNSALNRGGAIYGETIDISRTGATFIGNSSKHDGSAICCSTALTLAPNSQLIFENNKVTETTATTKASINNLGAAIYGNNETSDITISLSAENGSIFFKNNLCTATNKYCSIAGNVKFTAIEASAGKAISFYDAVNVSTKETNAQELKLNEKATSTGTILFSGELHENKSYIPQKVTFAHGNLILGKNAELSVVSFTQSPGTTITMGPGSVLSNHSKEAGGIAINNVIIDFSEIVPTKDNATVAPPTLKLVSRTNADSKDKIDITGTVTLLDPNGNLYQNSYLGEDRDITLFNIDNSASGAVTATNVTLQGNLGAKKGYLGTWNLDPNSSGSKIILKWTFDKYLRWPYIPRDNHFYINSIWGAQNSLVTVKQGILGNMLNNARFEDPAFNNFWASAIGSFLRKEVSRNSDSFTYHGRGYTAAVDAKPRQEFILGAAFSQVFGHAESEYHLDNYKHKGSGHSTQASLYAGNIFYFPAIRSRPILFQGVATYGYMQHDTTTYYPSIEEKNMANWDSIAWLFDLRFSVDLKEPQPHSTARLTFYTEAEYTRIRQEKFTELDYDPRSFSACSYGNLAIPTGFSVDGALAWREIILYNKVSAAYLPVILRNNPKATYEVLSTKEKGNVVNVLPTRNAARAEVSSQIYLGSYWTLYGTYTIDASMNTLVQMANGGIRFVF

SEQ ID NO: 54768 - protein, 200 aa, Chlamydia pneumoniae
MFSGIIQELGEVCFFEAQGNGLSLGIKSTPLFVTPLVTGDSVAVDGVCLTLTSCNESKIFFDVIPETLACTTLGEKRCSDQVNLEAALKMGDSIGGHLLSGHVFGTAEIFLIKENRYYFRGSKELSQYLFEKGFIAIDGISLTLVSVDSDTFSVGLIPETLQRTTLGKKREGERVNIEIDMSTKIQVDTVKRILASSGKD

SEQ ID NO: 54769 - protein, 275 aa, Chlamydia pneumoniae
MDYKLLDSGDGNKLECFGPVTLIRPSSIAVWPKSRPELWSQAQLQYVREGERGAWKNFKRLPEEWEVAFSDVRCLLKRTPFGHLGVFPEHMGFWPALKQAIEKHKERQVLNLFAYTGAGSIFAAKCGARVTHVDASQAAVRWAQRNVEKNAFPERRIFWVIEDVISFLKKEIRRNKKYQVILLDPPSYGRGPDGEVFKIDKDLFPLLSLCSKLLADDASYFLLTSHTPGHTPEFLRAIARRSVPTLVSEAWSCGESFCGEGVGALPSGSFVQWIA

SEQ ID NO: 54770 - protein, 265 aa, Chlamydia pneumoniae
MDCIGKHNPLVKEALALKRSRCRKSSWFLVEGAREIQKALRTGYLCQHVFCSTHLSEKEKEFLYELKRNSTKILYCLDSTLAQLSFKEHHDSFVAVIQKRVWNKEDFLIQRKNAQPFYLIIEQVEKPGNVGAILRIADGAGVDGVILCNPIVDLYNPNVVRSSLGAVFSLPILSISREEGKELFKQEGWTVFVTSPRAETMYFSKNYLGPTALVFGSEKDGLTEDWFSEDFSEIALPMLGESDSLNLATSVAAVAYEVVRQRWVN

SEQ ID NO: 54771 - protein, 414 aa, Chlamydia pneumoniae
MKLWMKIFIGLFVGVTLGLVLEDKAIFFKPIGDIFLNLLSMVVYPLVFCSMVLGIASISDMKKLGRIGIKSVGLYLGTTALAIVIGLCFAWIFSPGNGCDFAQAQSMDSAVTVIDSNKTAAYFLSIIAQVFPSNPVRSFAEGNILQIIIFAIFLGIALRLSGERGRPVERFIDGFSEIMLRMVNMIMSFAPYGVGASMAWISGNHGLGVLWQLGKFIIAYYLACLFHATLVFGGLVRFGCKMSFSKFLSSMMDAISCAVSTASSSATLPVTMRCVSKNLGVSAEVSGFVLPLGATVNMNGTAIFQGMAAVFIAQAYNCPLSLSSLLLLVVTATFSAVGSAGVPGGGMITLGSVLASVGLPIQGIAILAGIDRLRDIVGTPMNILGDAVVATYVASGEGELSPYESIKQESVETT

SEQ ID NO: 54772 - protein, 393 aa, Chlamydia pneumoniae
MIFEFRFPKIGETSSGGSIVRWLKNLGDHVARDEPLIEVSTDKIATELPSPKAGRLVRFCVNEGDEVASGDVLGLIELEEISEADDESTSCPLTSCETKSEAGSSSSSVWFSPAVLSLAQREGIGLDNLQKIAGTGKGGRVTRQDLEAYISESQQVSIPEIFQGEVNRIPMSPLRRAIASSLSKSSDEVPHASLVVDVDVTDLMNLISGERQRFLDTHGVKLTITSFIVQCLAQTLRQFPLLNGSLDGTTIVMKKSVNVGVAVNLNKEGVVVPVIHNCQDRGLVSIAKALADLSSRARLNKLDPSEVQDGSVTVTNFGMTGALIGMPIIRYPEVAILGIGTIQKRVVVRDDDSLAIRKMVYVTLTFDHRVLDGIYGSEFLTSLKNRLESVTMG

SEQ ID NO: 54773 - protein, 329 aa, Chlamydia pneumoniae
MPSPMISTDVCQDILGKQKEAVDFFFQAFQPKEAMQLAEKILGHSGWVFFSGVGKSGCVARKLVATLQSLSERALFFSPVDLLHGDLGLVSPGDIVCLFSKSGETQELLDTVPHLKSRRAILVAITSMPYSNLAALSDLVVILPSVAELDPFNLIPTNSTTCQMIFGDFLAMLLFHSRGVSLSTYGKNHPSGQVGMKANGKVKDFMFPKTEVPFCHLGDKVSFSLEVFSAYGCGCVCIVDPQFRLMGIFTDGDLRRSLASYGGEVLSLSLEKVMTANPRCITEDSDIAIALQLMESSSPVAVLPVLDNEENRHVTGLLHMHTLAKAGLL

SEQ ID NO: 54774 - protein, 497 aa, Chlamydia pneumoniae
MVSLLHKFLENASGKKGQSLASTAYLAALDHLLNAFPSIGERIIDELKSQRSHLKMIASENYSSLSVQLAMGNLLTDKYCEGSPFKRFYSCCENVDAIEWECVETAKELFAADCACVQPHSGADANLLAVMAILTHKVQGPAVSKLGYKTVNELTEEEYTLLKAEMSSCVCLGPSLNSGGHLTHGNVRLNVMSKLMRCFPYDVNPDTECFDYAEISRLAKEYKPKVLIAGYSSYSRRLNFAVLKQIAEDCGSVLWVDMAHFAGLVAGGVFVDEENPIPYADIVTTTTHKTLRGPRGGLVLATREYESTLNKACPLMMGGPLPHVIAAKTVALKEALSVDFKKYAHQVVNNARRLAERFLSHGLRLLTGGTDNHMMVIDLGSLGISGKIAEDILSSVGIAVNRNSLPSDAIGKWDTSGIRLGTPALTTLGMGIDEMEEVADIIVKVLRNIRLSCHVEGSSKKNKGELPEAIAQEARDRVRNLLLRFPLYPEIDLEALV

SEQ ID NO: 54775 - protein, 237 aa, Chlamydia pneumoniae
MKNSGNIMEPSTNKPDCKKIFDSIASKYDRTNTILSLGMHHFWNRSLIQILGSGYSLLDLCAGTGKVAKRYIAAHPQASVTLVDFSSAMLDIAKQHLPQGSCSFIHSDINQLPLENHSYPLAAMAYGLRNLSDPHKALQEISRVLMPSGKLGILELTPPKKTHPTYSAHKLYLRAVVPWIGKSVSKDPDAYSYLSKSIQQLPKDHDLEDLFSKSGFYIAKKKKLFLGAATIWLLEKQ

SEQ ID NO: 54776 - protein, 387 aa, Chlamydia pneumoniae
MLHILLAIFCILLFLAFGLTQPSCHGSSKFLKTLNQRFFKDKGREYPPFPSAPTILATLLCILYGALGTKLYTLLPPKTAHKDLLFWPLYSLSALIAYGFLPPWISTKVPKETTAHLRFLASVFQLGLFPLQLLFYRRRPNQQVRSSTSFQSQLSEALSAFDNLIVREVMIPKVDIFALPEETTLQEALVLVSEEGYSRVPVYKKNLDNITGILLVKDLLLLYTSSHDLSQPISSVAKPPFYAPEIKKASSLLQEFRQKHRHLAIIVNEYGFTEGIATMEDIIEEIIGEIADEHDVQENTPYKKIGSSWIVDGRMNISDAEEYFNLKIDHENSYDTLGGHVFHKVGAVPQKGMRIHHENFDIEIITCTERNVGKLKITPRKRKFNIS

SEQ ID NO: 54777 - protein, 660 aa, Chlamydia pneumoniae
MSEHKKSSKIIGIDLGTTNSCVSVMEGGQAKVITSSEGTRTTPSIVAFKGNEKLVGIPAKRQAVTNPEKTLGSTKRFIGRKYSEVASEIQTVPYTVTSGSKGDAVFEVDGKQYTPEEIGAQILMKMKETAEAYLGETVTEAVITVPAYFNDSQRASTKDAGRIAGLDVKRIIPEPTAAALAYGIDKVGDKKIAVFDLGGGTFDISILEIGDGVFEVLSTNGDTLLGGDDFDEVIIKWMIEEFKKQEGIDLSKDNMALQRLKDAAEKAKIELSGVSSTEINQPFITMDAQGPKHLALTLTRAQFEKLAASLIERTKSPCIKALSDAKLSAKDIDDVLLVGGMSRMPAVQETVKELFGKEPNKGVNPDEVVAIGAAIQGGVLGGEVKDVLLLDVIPLSLGIETLGGVMTTLVERNTTIPTQKKQIFSTAADNQPAVTIVVLQGERPMAKDNKEIGRFDLTDIPPAPRGHPQIEVSFDIDANGIFHVSAKDVASGKEQKIRIEASSGLQEDEIQRMVRDAEINKEEDKKRREASDAKNEADSMIFRAEKAIKDYKEQIPETLVKEIEERIENVRNALKDDAPIEKIKEVTEDLSKHMQKIGESMQSQSASAAASSAANAKGGPNINTEDLKKHSFSTKPPSNNGSSEDHIEEADVEIIDNDDK

SEQ ID NO: 54778 - protein, 568 aa, Chlamydia pneumoniae
MKTSQLFYKTSKNANKSAAVLSNELLEKAGYLFKVSKGVYTYTPLLWRVVSKMMNIIREELNAIGGQELLLPLLHNAELWQHTGRWEAFTSEGLLYTLKDREGKSHCLAPTHEEVICSFVAQWLSSKRQLPLHLYQIATKFRDEIRPRFGLIRSRELLMEDSYTFSDSPEQMNEQYEKLRSAYSKIFDRLGLAYVIVTADGGKIGKGKSEEFQVLCSLGEDTICVSGSYGANIEAAVSIPPQHAYDREFLPVEEVATPGITTIEALANFFSIPLHKILKTLVVKLSYSNEEKFIAIGMRGDRQVNLVKVASKLNADDIALASDEEIERVLGTEKGFIGPLNCPIDFFADETTSPMTNFVCAGNAKDKHYVNVNWDRDLLPPQYGDFLLAEEGDTCPENPGHPYRIYQGIEVAHIFNLGTRYTDSFEVNFQDEHGQTQQCWMGTYGIGVGRTLAACVEQLADDRGIVWPKALAPFSITIAFNGGDTVSQELAETIYHELQSQGYEPLLDDRDERLGFKLKDSDLIGIPYKLILGKSYQSSGIFEIESRSGEKYTVSPEAFPTWCQNHLA

SEQ ID NO: 54779 - protein, 397 aa, Chlamydia pneumoniae
MRRNPHFSLLKPQYLFSEISKKLAQFRKENPEISVIDLSIGDTTQPLCRSITQAIKEFCVSQEKQETYRGYGPETGLEKLRTKIASEVYENRISPEEIFISDGAKPDIFRLFSFFGSEKTLGLQDPVYPAYRDIAHITGIRDIIPLACRKETGFIPELPNQQSLDILCLCYPNNPTGTVLTFQQLQALVNYANQHGTVLIFDAAYSAFVSDPSLPKSIFEIPEAKYCAIEINSFSKSLGFTGMRLAWNVIPKELTYDNNEPMINDWKRLFATTFNGASLLMQEAGYYGLDLFPTPPAISLYLTNAQKLKKSLETAGFSVHGGDHAPYLWVELPEGISDEEAFDFFLHQYHIAVTPGHGFGSCGQGFVRFSALTQPQNIALACDRLCTASLKETMVLA

SEQ ID NO: 54780 - protein, 444 aa, Chlamydia pneumoniae
MNFSLFLFFLIAIQGICLYVGRRGSKKVEDRESYFLAGRSLKIFPLMMTFIATQIGGGVLLGAAEEAFCYGYGGILYPLGVALGLIFLGMGPGKRLAEGSLTTVVSIFEVFYGSKKLRKIAFLLSAGSLFFILVAQVIALDRLFSSFPFGKYVTVAFWIVLASYTSTGGFRGVVRTDVIQAGFLLIAVLVCGVSVWLSVPKSLSVLDPFQSLPCAKLSNWIFMPMLFMLVEQDMVQRCVAASSPKRLQWAAVGAGLVLLLFNFIPLFLGSLGAKAGLKAGCPLIDTIAYFCNPSLAAVMAAAIGVAILSTADSLMNAVSQLIAEEYPTLKAPYYRYLVLGLAVAAPLVAIGFTNIVDVLILSYSLSVCCLSVPVGFYLLAPKGRRVSGAAAWAGVLVGALGYGWVQIVSLGMFGELLAWVGSLVAFSFVGFIEITWKNKVKTQT

SEQ ID NO: 54781 - protein, 1033 aa, Chlamydia pneumoniae
MFPIPPPHCPPNNKNNFYHLTTDTKDPLLLRILRTIGYVLLHIITLGLLLLIHYYKHHRVVRKEGLPTPPTLPKGPEPKTIEIAKQPPKDGEDKKPDVPKPGTPPPEDTPPPPPKAPSPASPKVPKQPADKKPTPPPEAPPPPVRVATPMPLRPSSQGYWQCLNRMVSMVLRRAPLPLPAMQVDPILGDFNPHFVASYPNRIDNEPMYFQIKQFKKIAQNPDLPQQHRRLAQLSLEQALYLNDNYYLVNVPGDGNCFYRAYAVGWLSALYEESSRNDIVFEQEATRLLDLPFASSSPANANLCAEMAELLQLCSTYCSFIDLYDGVILSQKHTATLIAFLRKLSAYAIRQQIAASSNEETARALFISDMQDDLLPSVLEFLAANRPYSELFQNLIDHSALPYMQSRDKLFLLLEHLPALFLTDAELQKMSPEDQQLRKQYEREIREAFAKLSRRIADSGWDTERFNAIVKDYLPEAIRCQYSRFLATIENRRSGDLPWSPALSFFAFLCTCPSVRFHKLCATFYKSLEDIIIASAPPQRSIQEILQISNASLSYLNEDLDSSWQREVISSNIMTILTTHESLTLESSMPQLETLHKRIANLLKNVISTSFETPPLSNQPDLLSNLVNKLLVAIHSKLELKEHFNTVCSARSLRLTRDEGSGLSQEQDLLYTQAVQLLFFILQHPQVNNRPETKDAVKELKMLLLPFLQYAFKKVENEKKLQKLLRSILGSLVLKPPARYPSTPSNKDKETFCKFWSRHPEVMVLDPILEKNCMQFLRATFPNYQLETEAILLEKEIESTFRNGWNVFLTRLNLFGSKLGSPSSPTALSDQFSKSFLIFCFLNNYPKLLQKKTPLAARLDAFQREASHRFTQVKDKLLLSLKYGFPLATATINQYSRARDQLICNLLKNTVTASDGFCRSGFRQSLIGYLHSLSSNELGDILDDVKEQAEANDVAAMTTVPLQPFAVCLIMSDRDTVSEENIENFVAMHGFLNTISPERDARIFLIRFPNHYGCLLPRNPRTEDQNSKPDSSNP

SEQ ID NO: 54782 - protein, 259 aa, Chlamydia pneumoniae
MIKQIGRFFRAFIFIMPLSLTSCESKIDRNRIWIVGTNATYPPFEYVDAQGEVVGFDIDLAKAISEKLGKQLEVREFAFDALILNLKKHRIDAILAGMSITPSRQKEIALLPYYGDEVQELMVVSKRSLETPVLPLTQHSSVAVQTGTFQEHYLLSQPGICVRSFDSTLEVIMEVRYGKSPVAVLEPSVGRVVLKDFPNLVATRLELPPECWVLGCGLGVAKDRPEEIQTIQQAITDLKSEGVIQSLTKKWQLSEVAYE

SEQ ID NO: 54783 - protein, 361 aa, Chlamydia pneumoniae
MQQTVIVAMSGGVDSSVVAYLFKKFTNYKVIGLFMKNWEEDSEGGLCSSTKDYEDVERVCLQLDIPYYTVSFAKEYRERVFARFLKEYSLGYTPNPDILCNREIKFDLLQKKVQELGGDYLATGHYCRLNTELQETQLLRGCDPQKDQSYFLSGTPKSALHNVLFPLGEMNKTEVRAIAAQAALPTAEKKDSTGICFIGKRPFKEFLEKFLPNKTGNVIDWDTKEIVGQHQGAHYYTIGQRRGLDLGGSEKPCYVVGKNIEENSIYIVRGEDHPQLYLRELTARELNWFTPPKSGCHCSAKVRYRSPDEACTIDYSSGDEVKVRFSQPVKAVTPGQTIAFYQGDTCLGSGVIDVPMIPSEG

SEQ ID NO: 54784 - protein, 845 aa, Chlamydia pneumoniae
MFEKFTNRAKQVIKLAKKEAQRLNHNYLGTEHILLGLLKLGQGVAVNVLRNLGIDFDTARQEVERLIGYGPEIQVYGDPALTGRVKKSFESANEEASLLEHNYVGTEHLLLGILHQSDSVALQVLENLHIDPREVRKEILKELETFNLQLPPSSSSSSSSSRSNPSSSKSPLGHSLGSDKNEKLSALKAYGYDLTEMVRESKLDPVIGRSSEVERLILILCRRRKNNPVLIGEAGVGKTAIVEGLAQKIILNEVPDALRKKRLITLDLALMIAGTKYRGQFEERIKAVMDEVRKHGNILLFIDELHTIVGAGAAEGAIDASNILKPALARGEIQCIGATTIDEYRKHIEKDAALERRFQKIVVHPPSVDETIEILRGLKKKYEEHHNVFITEEALKAAATLSDQYVHGRFLPDKAIDLLDEAGARVRVNTMGQPTDLMKLEAEIENTKLAKEQAIGTQEYEKAAGLRDEEKKLRERLQSMKQEWENHKEEHQVPVDEEAVAQVVSLQTGIPSARLTEAESEKLLKLEDTLRRKVIGQNDAVTSICRAIRRSRTGIKDPNRPTGSFLFLGPTGVGKSLLAQQIAIEMFGGEDALIQVDMSEYMEKFAATKMMGSPPGYVGHEEGGHLTEQVRRRPYCVVLFDEIEKAHPDIMDLMLQILEQGRLTDSFGRKVDFRHAIIIMTSNLGADLIRKSGEIGFGLKSHMDYKVIQEKIEHAMKKHLKPEFINRLDESVIFRPLEKESLSEIIHLEINKLDSRLKNYQMALNIPDSVISFLVTKGHSPEMGARPLRRVIEQYLEDPLAELLLKESCRQEARKLRATLVENRVAFEREEEEQEAALPSPHLES

SEQ ID NO: 54785 - protein, 467 aa, Chlamydia pneumoniae
MGWVDCIWESFINKESGMLTCNECTTWEQFLNYVKTRCSKTAFENWISPIQVLEETQEKIRLEVPNIFVQNYLLDNYKRDLCSFVPLDVHGEPALEFVVAEHKKPSAPVASQKESNEGISEVFEETKDFELKLNLSYRFDNFIEGPSNQFVKSAAVGIAGKPGRSYNPLFIHGGVGLGKTHLLHAVGHYVREHHKNLRIHCITTEAFINDLVYHLKSKSVDKMKNFYRSLDLLLVDDIQFLQNRQNFEEEFCNTFETLINLSKQIVITSDKPPSQLKLSERIIARMEWGLVAHVGIPDLETRVAILQHKAEQKGLLIPNEMAFYIADHIYGNVRQLEGAINKLTAYCRLFGKSLTETTVRETLKELFRSPTKQKISVETILKSVATVFQVKLNDLKGNSRSKDLVLARQIAMYLAKTLITDSLVAIGAAFGKTHSTVLYACKTIEHKLQNDETLKRQVNLCKNHIVG

SEQ ID NO: 54786 - protein, 297 aa, Chlamydia pneumoniae
MSERAHIPVLVEECLALFAQRPPQTFRDVTLGAGGHAYAFLEAYPSLTCYDGSDRDLQALAIAEKRLETFQDRVSFSHASFEDLANQPTPRLYDGVLADLGVSSMQLDTLSRGFSFQGEKEELDMRMDQTQELSASDVLNSLKEEELGRIFREYGEEPQWKSAAKAVVHFRKHKKILSIQDVKEALLGVFPHYRFHRKIHPLTLIFQALRVYVNGEDRQLKSLLTSAISWLAPQGRLVIISFCSSEDRPVKWFFKEAEASGLGKVITKKVIQPTYQEVRRNPRSRSAKLRCFEKASQ

SEQ ID NO: 54787 - protein, 653 aa, Chlamydia pneumoniae
MSYRKRSTLIVLGVFALYALLVLRYYKIQICEGDHWAAEALGQHEFCVRDPFRRGTFFANTTVRKGDKDLQQPFAVDITKFHLCADPLAIPECHRDEIIQGILQFIEGQTYDDLSLKLDKKSRYCKLYPLLDVSVHDRLSLWWKGYATKHRLPTNALFFITDYQRSYPFGKLLGQVLHTLREIKDEKTGKAFPTGGMEAYFNHILEGDVGERKLLRSPLNRLDTNRVIKLPKDGSDIYLTINPVIQTIAEEELERGVLEAKAQGGRLILMNSQTGEILALAQYPFFDPTNYKEYFNNKERIEHTKVSFVSDVFEPGSIMKPLTVAIALQANEEASLKSQKKIFDPEEPIDVTRTLFPGRKGSPLKDISRNSQLNMYMAIQKSSNVYVAQLADRIIQSLGVAWYQQKLLALGFGRKTGIELPSEASGLVPSPHRFHINGSLEWSLSTPYSLAMGYNILATGIQMVQAYAILANGGYAVRPTLVKKIVSASGEEYHLPTKEKTRLFSEEITREVVRAMRFTTLPGGSGFRASPKHHSSAGKTGTTEKMIHGKYDKRRHIASFIGFTPVESSEGNFPPLVMLVSIDDPEYGLRADGTKNYMGGRCAAPIFSRVADRTLLYLGILPDKKLRNCDEEAAALKRLYEEWNRSPKQGGTR

SEQ ID NO: 54788 - protein, 483 aa, Chlamydia pneumoniae
MDLKELLHGVQAKIYGKVRPLEVRNLTRDSRCVSVGDIFIAHKGQRYDGNDFAVDALANGAIAIASSLYNPFLSVVQIITPNLEELEAELSAKYYEYPSSKLHTIGVTGTNGKTTVTCLIKALLDSYQKPSGLLGTIEHILGEGVIKDGFTTPTPALLQKYLATMVRQNRDAVVMEVSSIGLASGRVAYTNFDTAVLTNITLDHLDFHGTFETYVAAKAKLFSLVPPSGMVVINTDSPYASQCIESAKAPVITYGIESAADYRATDIQLSSSGTKYTLVYGDQKIACSSSFIGKYNVYNLLAAISTVHASLRCDLEDLLEKIGLCQPPPGRLDPVLMGPCPVYIDYAHTPDALDNVLTGLHELLPEGGRLIVVFGCGGDRDRSKRKLMAQVVERYGFAVVTSDNPRSEPPEDIVNEICDGFYSKNYFIEIDRKQAITYALSIASDRDIVLIAGKGHEAYQIFKHQTVAFDDKQTVCEVLASYV

SEQ ID NO: 54789 - protein, 264 aa, Chlamydia pneumoniae
MKLTKYLNTKQLRSMISRLFVRYSLPMSKQLSFFALCVLGSHPIFAQTPNPPQRVRRSEVIFIDPGHGGKDQGTASKELHYEEKSLTLSLALTVQSYLKRMGYKPQLTRSSDVYVDLGKRVALSNRGQGDVFISIHCNHSSNAAAFGTEVYFYNGKVGSPTRNRMSEVLGKNILAAMEKNGILKSRGLKTANFVVIRDTSMPAVLVETGFLSNSRERAALQDARYRMHVAKGIAEGVHNFLSGPSFQKPKQNIAKIRKPQIQAN

SEQ ID NO: 54790 - protein, 100 aa, Chlamydia pneumoniae
MATMTKKKLISTISQDHKIHPNHVRTVIQNFLDKMTDALVKGDRLEFRDFGVLQVVERKPKVGRNPKNAAVPIHIPARRAVKFTPGKRMKRLIETPNKHS

SEQ ID NO: 54791 - protein, 324 aa, Chlamydia pneumoniae
MELLPHEKQVVEYEKAIAEFKEKNKKNSLLSSSEIQKLEKRLDKLKEKIYSDLTPWERVQICRHPSRPRTVNYIEGMCEEFVELCGDRTFRDDPAVVGGFVKIQGQRFVLIGQEKGCDTASRLHRNFGMLCPEGFRKALRLGKLAEKFGLPVVFLVDTPGAYPGLTAEERGQGWAIAKNLFELSRLATPVIIVVIGEGCSGGALGMAVGDSVAMLEHSYYSVISPEGCASILWKDPKKNSEAASMLKMHGENLKQFGIIDTVIKEPIGGAHHDPALVYSNVREFIIQEWLRLKDLAIEELLEKRYEKFRSIGLYETTSESGPEA

SEQ ID NO: 54792 - protein, 659 aa, Chlamydia pneumoniae
MKLLLKAVLRHKNHLVILGCSLLAILGLTFSSQMEIFSLGMIAKTGPDAFLLFGRKESGKLVKVSELSQKDILENWQAISKDSETLKVSDATTYIAEHGKSTASLTSKLSKFVRNYIDVSRFRGLAIFLICVAIFKAVTLFFQRFLGQVVAIRVSRDLRQDYFKALQQLPMTFFHDHDIGNLSNRVMTDSASIALAVNSLMINYIQAPITFILTLGVCLSISWKFSILICVAFPIFILPIVVIARKIKNLAKRIQKSQDSFSSVLYDFLAGVMTVKVFRTEKFAFTKYCEHNNKISALEEKSAAYGLLPRPLLHTIASLFFAFVVVIGIYKFAIPPEELIVFCGLLYLIYDPIKKFGDENTSIMRGCAAAERFYEVLNHPDLHSQKEREIEFLGLSNTITFENVSFGYQEDKHILKNLSFTLHKGEALGIVGPTGSGKTTLVKLLPRLYEVSQGKILIDSLPITEYNKGSLRNHIACVLQNPFLFYDTVWNNLTCGKDMEEEAVLEALKRAYADEFILKLPKGVHSVLEESGKNLSGGQQQRLAIARALLKNASILILDEATSALDAISENYIKNIIGELKGQCTQIIIAHKLTTLEHVDRVLYIENGQKIAEGTKEELLQTCPEFLKMWELSGTKEYNRVFVPDHKLVANPTDMAITT

SEQ ID NO: 54793 - protein, 295 aa, Chlamydia pneumoniae
MEKLLVTDIDGTITHQSHHLDKKVYERLYALHQAGWKLFFLTGRYYKYAARLFSDFDAPYLLGCQNGASVWSSTSSNLLYSKSLPSDLLCILQDCMEGATALFSVESGAPYGDHYYRFSPTPIAQDLHEYVDPRYFPNAKEREILFETRSLKDDYAFPSFAAAKVFGLRDEVIRIQKELERQEALTSVATMTLMRWPFDFRYAILFLTDKSVSKGKALDRVVNILYDGKKPFVMASGDDANDLDLIERGDFKIVMSSAPEEMHVHADFLAPPADKNGILSAWEAGVRYYDDLMSL

SEQ ID NO: 54794 - protein, 299 aa, Chlamydia pneumoniae
MLKIDLTGKVAFVAGIGDDQGYGWGIAKLLAEAGATIIVGTWVPIYKIFSQSWELGKFNESRKLSNGTLLEIAKIYPMDASFDSPEDVPEDIAENKRYKGITGFTISEVAEQVKKDFGHIDILVHSLANSPEISKSLLETSRKGYLAALSASSYSFVSLLSHFGSIMNRGGSTISLTYLASMRAVPGYGGGMSSAKAALESDTKTLAWEAGRRWGIRVNTISAGPLASRAGKAIGFIERMVDYYQEWAPIPEAMNAEQVGAVAAFLASPLASAITGETLYVDHGANVMGIGPEMFPKDS

SEQ ID NO: 54795 - protein, 130 aa, Chlamydia pneumoniae
MRDHAFSKLIGTVRAMVVEGRCPWSLQQSLVSMVEHILGECQEFHEAVLQGKTVQEVGSEAGDVLTLVLILCFLLEREGVLASEDVANEAMEKLRRRAPYIFAEDYKPVSIEEADRLWELAKHREKNEST

SEQ ID NO: 54796 - protein, 664 aa, Chlamydia pneumoniae
MEKVSSYPSVPLPLGASKISPNRYRFALYASQATEVILALTDENSEVIEVPLYPDTHRTGAIWHIEIEGISDQSSYAFRVHGPKKHGMQYSFKEYLADPYAKNIHSPQSFGSRKKQGDYAFCYLKEEPFPWDGDQPLHLPKEEMIIYEMHVRSFTQSSSSRVHAPGTFLGIIEKIDHLHKLGINAVELLPIFEFDETAHPFRNSKFPYLCNYWGYAPLNFFSPCRRYAYASDPCAPSREFKTLVKTLHQEGIEVILDVVFNHTGLQGTTCSLPWIDTPSYYILDAQGHFTNYSGCGNTLNTNRAPTTQWILDILRYWVEEMHVDGFRFDLASVFSRGPSGSPLQFAPVLEAISFDPLLASTKIIAEPWDAGGLYQVGYFPTLSPRWSEWNGPYRDNVKAFLNGDQNLIGTFASRISGSQDIYPHGSPTNSINYVSCHDGFTLCDTVTYNHKHNEANGEDNRDGTDANYSYNFGTEGKTEDPGILEVRERQLRNFFLTLMVSQGIPMIQSGDEYAHTAEGNNNRWALDSNANYFLWDQLTAKPTLMHFLCDLIAFRKKYKTLFNRGFLSNKEISWVDAMGNPMTWRPGNFLAFKIKSPKAHVYVAFHVGAQDQLATLPKASSNFLPYQIVAESQQGFVPQNVATPTVSLQPHTTLIAISHAKEVT

SEQ ID NO: 54797 - protein, 160 aa, Chlamydia pneumoniae
MMFGHFAGYLGADPEERMTSKGKRVITLRLGVKTRVGMKDETVWCKCNIWHNRYDKMLPYLKKGSGVIVAGDISVESYMSKDGSPQSSLVISVDSLKFSPFGRNEGSRSPSLEDNHQQVGYESVSVGFEGEALDAEAIKDKDMYAGYGQEQQYVCEDVPF

SEQ ID NO: 54798 - protein, 499 aa, Chlamydia pneumoniae
MVLFHAQASGRNRVKADAIVLPFWHFKDAKNAASFEAEFEPSYLPALENFQGKTGEIELLYSSPKAKEKRIVLLGLGKNEELTSDVVFQTYATLTRVLRKAKCSTVNIILPTISELRLSAEEFLVGLSSGILSLNYDYPRYNKVDRNLETPLSKVTVIGIVPKMADAIFRKEAAIFEGVYLTRDLVNRNADEITPKKLAEVALNLGKEFPSIDTKVLGKDAIAKEKMGLLLAVSKGSCVDPHFIVVRYQGRPKSKDHTVLIGKGVTFDSGGLDLKPGKSMLTMKEDMAGGATVLGILSALAVLELPINVTGIIPATENAIDGASYKMGDVYVGMSGLSVEICSTDAEGRLILADAITYALKYCKPTRIIDFATLTGAMVVSLGEEVAGFFSNNDVLAEDLLEASAETSEPLWRLPLVKKYDKTLHSDIADMKNLGSNRAGAITAALFLQRFLEESSVAWAHLDIAGTAYHEKEEDRYPKYASGFGVRSILYYLENSLSK

SEQ ID NO: 54799 - protein, 238 aa, Chlamydia pneumoniae
MTLYLLPNTLGTRAVETLPSVIGELVHRLDGLIVESDRGGRAFLSLWKIPEVHKFPLAILSKHARLPKAWDFYLEPIVKHGENWGLISDAGLPCIADPGASLVRRARALGIPVQAFSGPCSITLALMLSGLPSQSFTFLGYLPQSPKERVKSIKKAATSKEVSTSVCIETPYRNVYTFESLLDTLPSYAELCVASDLSGPSELVLTRQVQSWRTTEDLGSVKQSITKVPTIFLFHIPN

SEQ ID NO: 54800 - protein, 908 aa, Chlamydia pneumoniae
MDSEFVGQVYSSDMDWIESMYQRFMNHETLDPSWKYFFEGYQLGQAASPSEASTKISGNETIAMLQEQKSQFLCTIYRYYGYLQSQISTLAPTTDSRFIQEKIAKIDLDEQVPSAGLLPKAQVSVRELIEALKKCYCGSLTLETLTCTPELQEFVWNLMEKRQVERFAEQLLRSYKDLCKATFFEEFLQIKFTGQKRFSLEGGETLVPMLEHLVHYGSALGISNYVLGMAHRGRLNVLTNVLGKPYRYVFMEFEDDPAARGLESVGDVKYHKGYVLKSHQKDRETTFVMLPNASHLESVDPIVEGVVAALQHQGHAGKEQSSLAILVHGDAAFSGQGVVYETLQLSRVPGYSTEGTLHIVVNNYIGFTAVPRESRSTPYCTDIAKMLGIPVFRVNSEDVVACIEAIEYALQVRERFSCDVIIDLCCYRKYGHNESDDPSVTAPLLYDQIKRKKSIRELFRQYLLEGQFADISEETLASIEKEIQESLNREFQVLKGTDPEPFPKKECHHCDRLNNGELILHDCDVSLDRETLFHMSSRLCGFPDNFHPHPKIKTLLEKRMKMAEGGVGYDWAMAEELAFASLLIEGYNLRLSGQDSIRGTFSQRHLVWSDTVTGDTYSPLYHLSAEQGSVEMYNSPLSEYAILGFEYGYAQQALKTLVLWEAQFGDFANGAQIIFDQYISSGIQKWDLHSDIVLLLPHGYEGQGPEHSSSRIERYLQLAANWNFQVVLPSTPVQYFRILREHAKRDLSLPLVIFTPKLLLRYPQCVSSIEEFTEPGGFRAILEDADPNYDASILVLCSGKIYYDYAEMLPQDRRKDFSCLRIESLYPLALEDLVSLIDKYSHLKHFVWLQEESKNMGAYDYMFMALQDILPEKLLYIGRPRSSSTASGSAKLSRQELVTCMETLFSLR

SEQ ID NO: 54801 - protein, 613 aa, Chlamydia pneumoniae
MTLITPAINSSRRKTHTVRIGNLYIGSDHSIKTQSMTTTLTTDIDSTVEQIYALAEHNCDIVRVTVQGIKEAQACEKIKERLIALGLNIPLVADIHFFPQAAMLVADFADKVRINPGNYIDKRNMFKGTKIYTEASYAQSLLRLEEKFAPLVEKCKRLGKAMRIGVNHGSLSERIMQKYGDTIEGMVASAIEYIAVCEKLNYRDVVFSMKSSNPKIMVTAYRQLAKDLDARGWLYPLHLGVTEAGMGVDGIIKSAVGIGTLLAEGLGDTIRCSLTGCPTTEIPVCDSLLRHTKIYLDLPEKKNPFSLQHSENFVSAAEKPAKTTLWGDVYGVFLKLYPHHLTDFTPEELLEHLGVNPVTKEKAFTTPEGVVVPPELKDAPITDVLREHFLVFHHHQVPCLYEHNEEIWDSPAVHQAPFVHFHASDPFIHTSRDFFEKQGHQGKPTKLVFSRDFDNKEEAAISIATEFGALLLDGLGEAVVLDLPNLPLQDVLKIAFGTLQNAGVRLVKTEYISCPMCGRTLFDLEEVTTRIRKRTQHLPGLKIAIMGCIVNGPGEMADADFGFVGSKTGMIDLYVKHTCVKAHIPMEDAEEELIRLLQEHGVWKDPEETKLTV

SEQ ID NO: 54802 - protein, 404 aa, Chlamydia pneumoniae
MTDSNPLPSYTDASLYRTPAKHSYPIRLPLNRTDRIEKILKIVTLTLALACALGFSIAAGILAMPIFSAVVVITLAIAAVSLYSLLKKPKLYEILPQIEPESEQSSLSPSPQPPEQQDLPLQIDPLPDPESLPEVSLADLTTPPEELTAITVTPGYEALLEQNWDLLPSLAAVDPSFTTETPQQPCFIWKLKDSKLIFISTSGDIAVPRIKTQGRVMIVNAANENISREGGGTNKALSLATSLQCWNASRLPRAHSRSGSQLQPGECRSAKWENSDHTSNDHVPGKAHFLAQLLGPEAAKCNNDPKQAFEVSKKAFHNLFQEAEIIGVDVIQLPLIGCNLFAPSRLLNLGKTRAEWIEAIKLALITSLQDFGWEQDNQEEQKIIILTDKDQPPIIPPRFDLTTP

SEQ ID NO: 54803 - protein, 412 aa, Chlamydia pneumoniae
MQSWLQSLQERNILENFTAGLESVEGPIAAYLGFDPTAPALHIGHWIGICFLKRLAALGITPIALVGGATGMVGDPSGKQSERSLLQTSEVFDNSQKITACLQRYLPGVTLVNNADWLQEISLIDFLRDIGKHFRLGQMLVKDTIKQRVHSDEGISYTEFSYLILQSYDFYHLFKNYGTILQCGGSDQWGNITSGIDFIRRKGLGQAYGLTYPLLTNAQGKKIGKTESGTVWLDSDLTSPFELYQYLLRLPDDTIPKIARTLTLLSNEEIQDIDRRVQTDPVAVKEFVAQDILSAIHGDLGLEEALSVTRSMHPGNLSSLSEKDFHELFAGGMGASLDKSEVLGKRWLDLFLVLGLCKSKGEIRRLIEQKGVYINNVPIANEHSVCEEQDICYGHYVLLAQGKKRKLVLYLN

SEQ ID NO: 54804 - protein, 479 aa, Chlamydia pneumoniae
MQTNIGLIGLAVMGKNLVLNMIDHGFSVSVYNRTPEKTRDFLKEYPNHRELVGFESLEDFVNSLERPRKIMLMIQAGKPVDQSIHALLPFLEPGDVIIDGGNSYFKDSERRCKELQEKGILFLGVGISGGEEGARHGPSIMPGGNPEAWPLVAPIFQSIAAKVQGRPCCSWVGTGGAGHYVKAVHNGIEYGDIQLICEAYGILRDFLKLSATAVATILKEWNTLELESYLIRIASEVLALKDPEGIPVIDTILDVVGQKGTGKWTAIDALNSGVPLSLIIGAVLARFLSSWKEIREQAARNYPGTPLIFEMPHDPSVFIQDVFHALYASKIISYAQGFMLLGEASKEYNWGLDLGEIALMWRGGCIIQSAFLDVIHKGFAANPENTSLIFQEYFRGALRHAEMGWRRTVVTAIGAGLPIPCLAAAITFYDGYRTASSSMSLAQGLRDYFGAHTYERNDRPRGEFYHTDWVHTKTTERVK

SEQ ID NO: 54805 - protein, 259 aa, Chlamydia pneumoniae
MNVKDETFWSVHNLCVNYEHAAVLYHISFSLGKGSLTAILGPNGAGKSTLLKASLGLIKPSSGTVYFFNQKFKKVRQRIAYMPQRASVDWDFPMTVLDLALMGCYSYKGMWGRISSDDRREAFHILERVGLESVADRQIGQLSGGQQQRAFLARALMQKADLYLMDELFSAIDMASFKTSVGVLQELRDQGKTIVVVHHDLSHVRQLFDHVVLLNKRLICCGPTDECLNGDTIFQTYGCEIELLEQTLKLSRGKQFGSC

SEQ ID NO: 54806 - protein, 366 aa, Chlamydia pneumoniae
MKFVVSRNELGNLIKKIQSVVPQNTPIPVLTHVLIETYNDELVFTATDLTVSTRCVTKAKVYEKGAISIPSKRFFQLVKELTEANLEISYSAGEMAQITSGSSCFRLLSMEKEDFPMLPDIQNALRFSLPAEQLKTMLQRTSFAVSREESRYVLTGVLLAIANGVATIVGTDGKRLAKIDAEVTLDKSFSGEYIIPIKAVEEIIKMCSDEGEATIFLDQDKIAVECDNTLLITKLLSGEFPDFSPVISTESNVKLDLHREELITLLKQVALFTNESSHSVKFSFLPGELTLTANCTKVGEGKVSMAVNYSGELLEIAFNPFFFLDILKHSKDELVSLGISDSYNPGIITDSASGLFVIMPMRLHDD

SEQ ID NO: 54807 - protein, 165 aa, Chlamydia pneumoniae
  MISC_FEATURE (122)..(122): X=any amino acid
MLYWFLSPIMGEDLMAQKEIVSNRKALRNYEVIETLEAGIVLTGTEIKSLRDHGGNLGDAYVIVSKGEGWLLNASIAPYRFGNIYNHEERRKRKLLLHRYELRKLEGKIAQKGMTLIPLGMXLSRGYVKVRLGCCRGKKAYDKRRTIIEREKEREVAAAMKRRHH

SEQ ID NO: 54808 - protein, 89 aa, Chlamydia pneumoniae
MSRKCPLTGKRPRRGYSYTLRGIAKKKKGIGLKVTGKTKRRFFPNMLTKRLWSTEENRFLKLKISASALRHIDKLGLEKVLERAKSKNF

SEQ ID NO: 54809 - protein, 360 aa, Chlamydia pneumoniae
MGEKTEKATPKRLRDARKKGQVAKSQDFPSAVTFIVSMFTAFSLSTFFFKHLGGFLVSMLSQAPTRHDPVITLFYLKNCLMLILTASLPLLGAVAVVGVIVGFLIVGPTFSTEVFKPDIKKFNPIENIKQKFKIKTLIELIKSILKIFGAALILYITLKSKVSLIIETAGVSPIITAQIFKEIFYKAVTSIGIFFLIVAILDLVYQRHNFAKELKMEKFEVKQEFKDTEGNPEIKGRRRQIAQEIAYEDSSSQVKHASTVVSNPKDIAVAIGYMPEKYKAPWIIAMGINLRAKRILDEAEKYGIPIMRNVPLAHQLLDEGKELKFIPESTYEAIGEILLYITSLNAQNPNNKNTNQPDHL

SEQ ID NO: 54810 - protein, 364 aa, Chlamydia pneumoniae
MSHTECGIVGLPNVGKSGLFNALTGAQVASCNYPFCTIDPNVGIVPVIDERLEALAKISNSQKIIYADMKFVDIAGLVKGASDGAGLGNRFLSHIRETHAIAHVVRCFDDPDVTHVSGKVNPVEDIEVINLELIFSDFSSAKNIHSKLEKLAKGKREVGALLPLFDTIIAHLEKGLPLRTLELTPEQIVALKPYPFLTMKPMFYIANVDESSLPDMDNDYVAAVREVAAKENSKVVPICVRIEEEIVSLPIEERLEFLMSLGLEKSGLHRLVRAAYDTLGLISYFTTGPQESRAWTVVRGSSAWEAAGEIHTDIQKGFIRAEVITFEDMIECQGRAAARELGKLHIEGRDYIVQDGDTMLFLHN

SEQ ID NO: 54811 - protein, 308 aa, Chlamydia pneumoniae
MPMEIAYSLTSSFSVDSVTVGFFDGCHLGHSNLLSILTSYSGSSGVITFDSHPQTVLSLNHTKLINTKEERLQLLQTFPIDWLGVLTFDLNFANQSAEEFLTLLHRNLKCKRLILGYDSCIGKEQQSNTEALDTIGKPLGIEVIKIPPYRMDNIVVSSKAIRQFLSAGNLECAHRFLGHPYAISGKITEGSGIGGSLGFATINLPREESLIPLGVYACEIRYDSTTCQGVMNLGTAPTFERESLYAEAHIFSFAENLYGKEVSIIPRKFLREEKKFQSKETLIRAIEKDILDAQDWFAKGSFNYEGTA

SEQ ID NO: 54812 - protein, 235 aa, Chlamydia pneumoniae
MDLAVELKEGILLVDKPQGRTSFSLIRALTKLIGVKKIGHAGTLDPFATGVMVMLIGRKFTRLSDILLFEDKEYEAIAHLGTTTDSYDCDGKVVGRSKKIPSLEEVLSAAEYFQGEIQQLPPMFSAKKVQGKKLYEYARKGLSIERHHSTVQVHLQITKYEYPLLHFVVSCSKGTYIRSIAHELGTMLGCGAYLEQLRRLRSGRFSIDECIDGNLLDHPDFDISPYLRDAHGNSL

SEQ ID NO: 54813 - protein, 890 aa, Chlamydia pneumoniae
MEKVKLTKNLKLKIKNAQLTKAAGLDKLKQKLAQAGSSEAKSSSEKPSAKEKSVKVALAATSTPTASAEQASPESTSRRIRAKNRSSFSSSEEESSAHIPVDTSEPAPVSIADPEPELEVVDEVCDESPEVHPVAEVLPEQPVLPETPPQEKELEPKPVKPAEPKSVVMIKSKFGPTGKHINHLLAKTFKAPAKEEKVVAGSKSTKPVASDKTGKPGTSEGGEQNNREKQFNPANRSPASGPKRDAGKKNLTDFRDRSKKSDESLKAFTGRDRYGLNEGGEEDRWRKKRVYKPKKHYDEASIQRPTHIKISLPITVKDLATEMKLKASEVIQKLFIHGMTYVVNDILDSETAVQFIGLEFGCTIDIDYSEQDKLCLSNDTVRDEIQSTDPSKLVIRSPIVAFMGHVDHGKTTLIDSLRKSNVAATEAGAITQHMGAFCCSTPVGDITILDTPGHEAFSAMRARGAEVCDIVVLVVAGDEGIKEQTLEAIEHAKAADIAIVVAINKCDKPNFNSETIYRQLSEINLLPEAWGGSTVTVNTSAKTGEGLSELLEMLALQAEVLELKADPSARARGLVIESELHKGLGPVATVLIQNGSLKLGEALVFNDCYGKVKTMHNEHNELMKEAGPSIPVLITGLSDIPKAGDPFFVVKNEKTARDIIEARSAGQQRFALQQKKRPNFDSMLQNKKTLKLMIKADVQGSIEALVSSISKIKSEKVDVEILTNSVGEISESDIRLAAASKAVLIGFHTGIESHAEPLIKSLGVRVELFTVIYHAIDAIKEIMTSLLDPIAEEKDEGSAEIKEIFRSSQVGSIYGCIVTEGIMTRNHKVRVLRNKEILWKGTLSSLKRVKEDVKEVRKGLECGILLEGYQQAQIGDVLQCYEVIYHPQKL

SEQ ID NO: 54814 - protein, 434 aa, Chlamydia pneumoniae
MNKNLVAIFDYMEKEKGIQRSTIIGAIESALKIAAKKTLRDDANISVNINSRTGDIEVFCEKEIVEICQNPSKEIPLDKAREYDPDCQIGQYMDVPFVSDNFGRIAAHAARQIIGQKLRHAERDVIYEEYRHRVNETLSGVVKRFAKGSNLIIDLGKVEAILPTRFYPKTEKHKIGDKIYALLYEVQESENGGAEVILSRSHAEFVKQLFIQEVPELEEGSVEIVKIAREAGYRTKLAVRSSDPKTDPVGAFVGMRGSRVKNIIRELNDEKIDIVNYSPVSTELLQNLLYPIEIQKIAILEDDKVIAIVVNDADYATVIGKRGINARLISHILDYELEVQRMSEYNKLLEIQRLQLAEFDSPHLDQPLEMEGISKLVIQNLEHAGYDTIRRVLLASANDLASVPGISLELAYKILEQVSKYGESKVDEKPEIED

SEQ ID NO: 54815 - protein, 580 aa, Chlamydia pneumoniae
MPKQAEYTWGSKKILDNIECLTEDVAEFKDLLYTAHRITSSEEESDNEIQPGAILKGTVVDINKDFVVVDVGLKSEGVIPMSEFIDSSEGLVLGAEVEVYLDQAEDEEGKVVLSREKATRQRQWEYILAHCEEGSIVKGQITRKVKGGLIVDIGMEAFLPGSQIDNKKIKNLDDYVGKVCEFKILKINVERRNIVVSRRELLEAERISKKAELIEQISIGEYRKGVVKNITDFGVFLDLDGIDGLLHITDMTWKRIRHPSEMVELNQELEVIILSVDKEKGRVALGLKQKEHNPWEDIEKKYPPGKRVLGKIVKLLPYGAFIEIEEGIEGLIHISEMSWVKNIVDPSEVVNKGDEVEAIVLSIQKDEGKISLGLKQTERNPWDNIEEKYPIGLHVNAEIKNLTNYGAFVELEPGIEGLIHISDMSWIKKVSHPSELFKKGNSVEAVILSVDKESKKITLGVKQLSSNPWNEIEAMFPAGTVISGVVTKITAFGAFVELQNGIEGLIHVSELSDKPFAKIEDIISIGENVSAKVIKLDPDHKKVSLSVKEYLADNAYDQDSRTELDFKDSQGPKERKKKGK

SEQ ID NO: 54816 - protein, 122 aa, Chlamydia pneumoniae
MEIIHIGTDIIEISRIREAIATHGNRLLNRIFTEAEQKYCLEKTDPIPSFAGRFAGKEAVAKALGTGIGSVVAWKDIEVFKVSHGPEVLLPSHVYAKIGISKVILSISHCKEYATATAIALA

SEQ ID NO: 54817 - protein, 795 aa, Chlamydia pneumoniae
MNKRTLLFVSLIGIAFVGCQIFFGYNEFRSCKNLAEKQRKISEQTLAAVESVGLSVASWDTDVNGEEHKNNYAVRVGDKLFLLHNGEAAQSVYSSGESWSFVDHKCGFDNIHLALYRQQGSSFNPTNTGKVFLPTNHEGLPVLVVEFRNNKEPLVFLGEYAQGRISNKDSTIFGTALVFWRSGSDYIPLGLYDSREEKLVSLDLPITRAVIFGNDQDSAKSSDTANHYVLFNDYMQIIVSEESGSIEGINLPFASTNNKSIVNEIGFDRDLASEKSPEALFPGLSSKLPDGQQAKNSIGGYYPLLRRGLLSDSKKLLPLEYHALNVVSGRELATPVALRYRVLSYTPHSIQLESLDRSVQKVYKLPENPEEKPYVFETAITLTKETEDVWVTSGVPEVEIMSNASAPTIKYRVIKKNKGSLDKVKLPKVKEPLAVRRGVYPQWILNSNGYFGIILTPLSEIASGYGSLYISGSTAPTRLSAISPKNQLYPVSKYPGYETLLPLPKDAGTHRFLVYAGPLAEPTLKVLDKTITQEKGENPEYLDSISFRGVFAFITAPFAALLFIIMKFFKLVTGSWGISIILLTVFLKLLLYPLNAWSIRSMRRMQILSPYIQQIQQKYKNEPKRAQMEIMGLYKTNKVNPITGCLPLLIQLPFLIAMFDLLKSSFLLRGASFIPGWIDNLTAPDVLFSWQTSIWFIGNEFHLLPILLGIVMFLQQKVTSLHKKGPVTDQQKQQQVMGNMMAILFTAMFYNFPSGLNIYWLSSMILGVVQQWITNKILDSKHLKNEVVLNNKKHR

SEQ ID NO: 54818 - protein, 342 aa, Chlamydia pneumoniae
MDSSAPYNIASQGTEKSTVERILDLYGPASCIKFLKQMVLIREFEARGEEAYLEGLVGGFYHSYAGQEAVATAAIANTGLDPWVFSSYRCHALAILLNIPLQEIAAELLGKETGCALGRGGSMHMCGPNFPGGFGIVGGQIPLAAGAAFTIKYQEQKNRVSLCFIGDGAVAQGVFHETLNFVSLHQLPLMLIIENNGWSMGTSLNRAVAKQPIAESQGSSYDIRAVTVNGFDLFNSLLGFREAYRYMVDTESPVLVECLCSRFRGHSISDPNLYRSKEEMQCLFKKDPIVLAKDWLIRLEVLTEEEFQNIRQECKTAVLEAFSNAKLSSDPSVTTLEEGVYA

SEQ ID NO: 54819 - protein, 360 aa, Chlamydia pneumoniae
MSEAPVYTLKQLAELLQVEVQGNIETPISGVEDISQAQPHHIAFLDNEKYSSFLKNTKAGAIILSRSQAMQHAHLKKNFLITNESPSLTFQKCIELFIEPVTSGFPGIHPTAVIHPTARIEKNVTIEPYVVISQHAHIGSDTYIGAGSVIGAHSVLGANCLIHPKVVIRERVLMGNRVVVQPGAVLGSCGFGYITNAFGHHKPLKHLGYVIVGDDVEIGANTTIDRGRFKNTVIHEGTKIDNQVQVAHHVEIGKHSIIVAQAGIAGSTKIGEHVIIGGQTGITGHISIADHVIMIAQTGVTKSITSPGIYGGAPARPYQETHRLIAKIRNLPKTEERLSKLEKQVRDLSTPSLAEIPSEI

SEQ ID NO: 54820 - protein, 200 aa, Chlamydia pneumoniae
MTRYPDYLSKLIFFLRKLPGIGFKTAEKLAFELISWDSEQLKILGNAFHNVASERSHCPLCFTLKESKEADCHFCREERDNQSLCIVASPKDVFFLERSKVFKGRYHVLGSLLSPITGKHIENERLSILKSRIETLCPKEIILAIDATLEGDATALFLKQELQHFSVNISRLALGLPIGLSFDYVDSGTLARAFSGRHSY

SEQ ID NO: 54821 - protein, 335 aa, Chlamydia pneumoniae
MWFSVNKNKKAAIWATGSYLPEKVLSNADLEKMVDTSDEWIVTRTGIKERRIAGPQEYTSLMGAIAAEKAIANAGLSKDQIDCIIFSTAAPDYIFPSSGALAQAHLGIEDVPTFDCQAACTGYLYGLSVAKAYVESGTYNHVLLIAADKLSSFVDYTDRNTCVLFGDGGAACVIGESRPGSLEINRLSLGADGKLGELLSLPAGGSRCPASKETLQSGKHFIAMEGKEVFKHAVRRMETAAKHSIALAGIQEEDIDWFVPHQANERIIDALAKRFEIDESRVFKSVHKYGNTAASSVGIALDELVHTESIKLDDYLLLVAFGGGLSWGAVVLKQV

SEQ ID NO: 54822 - protein, 308 aa, Chlamydia pneumoniae
MKKRYAFLFPGQGSQYVGMGQDLYMEYPEVRELFDFANERLGFSLTSIMFEGPEDLLMETVHSQLAIYLHSMAVVKVLSQRSSIQPSLVSGLSLGEYTALVASDRISVLDGLELVRKRGQLMNEACNQSPGAMAALLGLPSEVIEENITSLGQGIWIANYNAPKQLVVAGIAEKVDQAIELFRDLGCKKAVRLKVSGAFHTPLMQVAQDGLAPDIYALCMKDSSLPLVSHVVGKSLVNTEEMRECLARQMTSPTLWYQSCYHIESEVDEFLELGPGKVLAGLNRSIGISKPITSLGTFAQIEKFLSEV

SEQ ID NO: 54823 - protein, 248 aa, Chlamydia pneumoniae
MDITLVGKKVIVTGGSRGIGLGIVKLFLENGADVEIWGLNEERGQAVIESLTGLGGEVSFARVDVSHNGGVKDCVQKFLDKHNKIDILVNNAGITRDNLLMRMSEDDWQSVISTNLTSLYYTCSSVIRHMIKARSGSIINVASIVAKIGSAGQTNYAAAKAGIIAFTKSLAKEVAARNIRVNCLAPGFIETDMTSVLNDNLKAEWLKSIPLGRAGTPEDVARVALFLASQLSSYMTAQTLVVDGGLTY

SEQ ID NO: 54824 - protein, 79 aa, Chlamydia pneumoniae
MSLEDDVIAIIVEQLGVDPKEVNENSSFIEDLNADSLDLTELIMTLEEKFAFEISEEDAEKLRTVGDVFTYIKKRQAEQ

SEQ ID NO: 54825 - protein, 925 aa, Chlamydia pneumoniae
MQRVLRLLFNLHHGEEKRAFLFFLLGLVWGIGCYGTLSLAEGLFIEKLGSAELPKIYLGSSLILCVLSSLILYNLFKKHISATALFLIPVSLSILCNFYLILSSIFAIDPPRSPLFFYRIVIWSLTILSYTSFWGFVDQFFNLQDGKRHFCIFNAIIFLGDAIGSGIIASLVHTIGIQGILILFTAALVLTFPIVFYVSKSLKSLSDDHDLFIDTGHPPPLSKALKLCFYDKYTFYLLCFYFLMQLLAIATEFNYLKIFEIQFASKEEFELVAHIGKCSLWISLGNMCFALFAYSRIVKRLGVNNIILFAPLCFLSLFLFWTFKTTLSIAVLAMVVREGVTYALDDNNLQLLIYGVPNKIRNQIRIVVESFIEPIGMLVWSLVCFLSSQQYVFCLIISLIATILVCLVRSYYAKAILKNLSAQALQLTRSMQDWIKSMTVKQKRQVELFLLAHLKHPSERHQTFAFQHLLNLASRSVLPSLLAHMNKLSLPNKLKTIEMVKSSLWAKDFLTLELLKRWTSIFPHPAIASAIHLYFAEHDLLHITHIAEDLYDTVGDRLLAAILTVRRQEAYGPYRDLADKRLKELLNSDQPEDIVMGLTILKLEKNPQNFPILLDFLNTKNEDILIVTCKALHTSVRANHKPYCPELLKRLRQCSHNDEASQYLLKTISIALDISFVKDLLMTTSQLKNTSRKYAEAMIGELDKEVAPAFLQVLTDEGTHNRCRILAAKALCKIDNWLLKKHAYKIVKSKASKALFYSYHGHYIQKKYPTYNLSLLANTLNSNYYAEVNFMLSLLGILGSMEHSGVLIRALTSKNQKIKAQALESLEKNCDSHLFSLLEPFVNQPGMCYSEKYYFKCGVIPLTLKELLNMMENSPSSLNKLTAQQLKEELSYCDPDFQSVNTIYNQEHEDFRTEESETLISFLSI

SEQ ID NO: 54826 - protein, 203 aa, Chlamydia pneumoniae
MTSPIPFQSSGDASFLAEQPQQLPSTSESQLVTQLLTMMKHTQALSETVLQQQRDRLPTASIILQVGGAPTGGAGAPFQPGPADDHHHPIPPPVVPAQIETEITTIRSELQLMRSTLQQSTKGARTGVLVVTAILMTISLLAIIIIILAVLGFTGVLPQVALLMQGETNLIWAMVSGSIICFIALIGTLGLILTNKNTPLPAS

SEQ ID NO: 54827 - protein, 470 aa, Chlamydia pneumoniae
MDSRTSHLDDELSFKLEKAFTCLSTDIHSHDLSKIVIEYNPIDLAYAVSCLPSESRAILYKNLSCITAKVAFIINTDSASRWAIFRRLSDSEVCALIEQMPPDEAVWVLDDIPDRRYRRILELIDSKKALKIRDLQKHGRNTAGRLMTNEFFAFLMETTVKDVSACIRSNPGIDLTRLVFVLDFKGELQGVVTDRSLIINPPEMSLKQIMNQIEHKVLPDATREEVVDLVERYKIAALPVVDEENFLIGAITYEDVVEAIEDIADETIARMAGTTEDVGYQTCHVVQRFLLRAPWLLVTLFAGLISASVMAYFQKISPALLALIIFFIPLINGMSGNVGVQCSTILVRSMATGTLSFGRRRETIFKEMSIGLLTGVVLGILCGLVVYLMGFLGLNIFSGGGIQLGVTVATGVLGASLTATTLGVLSPFFFAKLGVDPALASGPIVTALNDIMSMIIFFLIAGGINFLFFN

SEQ ID NO: 54828 - protein, 468 aa, Chlamydia pneumoniae
MHSHSKPTKPLGTFTVGMLSLAVVISLRNLPLTAKHGLSTLFFYGLAVICFMIPYALISAELASFKPQGIYIWARDALGKWWGFFAIWMQWFHNMTWYPAVLAFIASTIVYKINPELAHNKVYIATVILAGFWILTFFNFLGITSSALFSSICVIIGTLIPGVILVSLALFWIFSGNPIAISLSWGNLLPNFSNVSSLVLLAGMLLALCGLEANANLASDMVNPRKNYPKAVFIGAIATLTILVLGSLSIAIVIPKEEISLVSGLVKTFTLFFDKYNLSWMTGIVVVMTIAGSLGELNAWMFAGTKGLFISTQNDCLPRLFKKVNSKNVPTNLMLFQGIVVTIFTLLFLCLDSADLVYWILTALSVQMYLAMYICLFLAGPILRIKEPRAQRLYSVPGKFLGICTMSILGILSCAFALWVSFLPPRELAQISEGSKIGYTTFLLLAFSLNCLIPFGIYFTHKRLSKKS

SEQ ID NO: 54829 - protein, 349 aa, Chlamydia pneumoniae
MLNIHDILGNDDENLLSYQCKHITKDKLTLPSHDFVDKVFGLSDRNNRVLRSLQTMFSHGRLANSGYLSILPVDQGIEHSAGASFAINPIYFDPENIVKLAIESGCSAVASTYGTLSLLSRKYAHKIPFMLKLNHNELLSYPTKYHQIFFTQVEAAYSMGAVAVGATVYFGSETSNEEIVAVSNAFAKARSLGLATVLWCYLRNPAFVANGVDYHTAADLTGQADHLGATLGADIVKQKLPTCQGGFKAINFGKTDERVYSELSSNHPIDLCRYQVLNSYCGKVGLINSGGPSGKNDFTEAARTAVINKRAGGMGLILGRKAFQRPLSEGIQLLNLVQDIYLDPNITIA

SEQ ID NO: 54830 - protein, 221 aa, Chlamydia pneumoniae
MQSDLIQILLKETVNTLYMVSTAFFFSCAIGGMLGLGLFCTSPKSLNPKKSLYATISMILSFLTAIPFAILIVILFPITRWIVGTSLGPTASIVPLTIGAIPFVVTIVVDAFRNSALNYLESAVALGIPKRNILFGILLPESYPQLIFSLKSLVVHLISCSTLAGFVGGGGLGQLLLQYGYYRFEWSVTTSVLVITLVLIESVRILGDFWGRRVLKYRGIL

SEQ ID NO: 54831 - protein, 272 aa, Chlamydia pneumoniae
MKKKLSLLVGLIFVLSSCHKEDAQNKIRIVASPTPHAELLESLQEEAKDLGIKLKILPVDDYRIPNRLLLDKQVDANYFQHQAFLDDECERYDCKGELVVIAKVHLEPQAIYSKKHSSLERLKSQKKLTIAIPVDRTNAQRALHLLEECGLIVCKGPANLNMTAKDVCGKENRSINILEVSAPLLVGSLPDVDAAVIPGNFAIAANLSPKKDSLCLEDLSVSKYTNLVVIRSEDVGSPKMIKLQKLFQSPSVQHFFDTKYHGNILTMTQDNG

SEQ ID NO: 54832 - protein, 805 aa, Chlamydia pneumoniae
MDPKEKNYDASAITVLEGLQAVRERPGMYIGDTGITGLHHLVYEVVDNSIDEAMAGYCSRIDVRILEDGGIVIVDNGRGIPIEVHERESAKQGREVSALEVVLTVLHAGGKFDKDSYKVSGGLHGVGVSCVNALSEKLVATVFKDKKCYQMEFSRGIPVTPLQYVSVSDRQGTEIVFYPDPKIFSTCTFDRSILMKRLRELAFLNRGITIVFEDDRDVSFDKVTFFYEGGIQSFVSYLNQNKESLFSEPIYICGTRVGDDGEIEFEAALQWNSGYSELVYSYANNIPTRQGGTHLTGFSTALTRVINTYIKAHNLAKNNKLALTGEDIREGLTAVISVKVPNPQFEGQTKQKLGNSDVSSVAQQVVGEALTIFFEENPQIARMIVDKVFVAAQAREAAKKARELTLRKSALDSARLPGKLIDCLEKDPEKCEMYIVEGDSAGGSAKQGRDRRFQAILPIRGKILNVEKARLQKIFQNQEIGTIIAALGCGIGADNFNLSKLRYRRIIIMTDADVDGSHIRTLLLTFFYRHMTALIENECVYIAQPPLYKVSKKKDFRYILSEKEMDSYLLMLGTNESSILFKSTERELRGEALESFINVILDVESFINTLEKKAIPFSEFLEMYKEGIGYPLYYLAPATGMQGGRYLYSDEEKEEALAQEETHKFKIIELYKVAVFVDIQNQLKEYGLDISSYLIPQKNEIVIGNEDSPSCNYSCYTLEEVINYLKNLGRKGIEIQRYKGLGEMNADQLWDTTMNPEQRTLIHVSLKDAVEADHIFTMLMGEEVPPRREFIESHALSIRINNLDI

SEQ ID NO: 54833 - protein, 834 aa, Chlamydia pneumoniae
MFNKDEIIVPKNLEEEMKESYLRYSMSVIISRALPDIRDGLKPSQRRVLYAMKQLSLSPGAKHRKCAKICGDTSGDYHPHGESVIYPTLVRMAQNWAMRYPLVDGQGNFGSIDGDPPAAMRYTEARLTHSAMYLMEDLDKDTVDIVPNYDETKHEPVVFPSKFPNLLCNGSSGIAVGMATNIPPHNLGELIEATLLLLANPQASVDEILQVMPGPDFPTGGIICGSEGIRSTYTTGRGKIKVRARLHVEENEDKHRESIIITEMPYNVNKSRLIEQIANLVNEKTLAGISDVRDESDKDGIRVVLEIKKGESSEIIINRLYKFTDVQVTFGANMLALDKNLPRTMSIHRMISAWIRHRKEVIRRRTRYELNKAETRAHVLEGYLKALSCLDALVKTIRESGNKEHAKERIIESFGFTEPQALAILELRLYQLTGLEAEKIQKEYEELLNKIAYYKQVLSDEGLVKDIIRNELQDLLKHHKVARRTTIEFDADDIRDIEDIITNESVIITISGDDYVKRMPVKVFKEQRRGGHGVTGFDMKKGAGFLKAVYSAFTKDYLLIFTNFGQCYWLKVWQLPEGERRAKGKPIINFLEGIRPGEELAAILNIKNFDNAGFLFLATKRGVVKKVSLDAFSNPRKKGIRALEIDEGDELIAACHIVSDEEKVMLFTHLGMAVRFPHEKVRPMGRTARGVRGVSLKNEEDKVVSCQIVTENQSVLIVCDQGFGKRSLVEDFRETNRGGVGVRSILINERNGNVLGAIPVTDHDSILLMSSQGQAIRINMQDVRVMGRSTQGVRLVHLKEGDALVSMEKLSSNENDDEVLSGSEEECSDTVSLR

SEQ ID NO: 54834 - protein, 206 aa, Chlamydia pneumoniae [sequence omitted]

SEQ ID NO: 54835 - protein, 325 aa, Chlamydia pneumoniae
MTIDMHCDLLSHPHFCRKDPAVRCSPEQLLSGGVRQQVCAIFVPHSRGEPNCDKQNSLFFSLPNQYPDIGLLSYEEEENGSSSQKKSLSLIRSIENASALGDDTAPLGTLLAKLIHLTKQGPLAYLGIVWKGDNRFGGGTEAPKRLSNDGKVLLDIMYELGVPIDLSHCSDKLAEDILDYTADKLPNLAVIASHSNFRSVLDHRRNLVDAHAKEIVRRKGVIGLNLVRSYVGDSLGDLEKHVLHAENLGILSSIVLGSDFFYANEDENFFFNECSSAEAHPVLNQLIHRIFSKGKAESILSSRAEKFLKQVIVEQVNPKITDVKL

SEQ ID NO: 54836 - protein, 503 aa, Chlamydia pneumoniae
MPWMSPFKKIVNRLLCYISFQKESRTLPIIIREPRMTTKSLGSFNSVISKNKIHFISLGCSRNLVDSEVMLGILLKAGYESTNEIEDADYLILNTCAFLKSARDEAKDYLDHLIDVKKENAKIIVTGCMTSNHKDELKPWMSHIHYLLGSGDVENILSAIESRESGEKISAKSYIEMGEVPRQLSTPKHYAYLKVAEGCRKRCAFCIIPSIKGKLRSKPLDQILKEFRILVNKSVKEIILIAQDLGDYGKDLSTDRSSQLESLLHELLKEPGDYWLRMLYLYPDEVSDGIIDLMQSNPKLLPYVDIPLQHINDRILKQMRRTTSREQILGFLEKLRAKVPQVYIRSSVIVGFPGETQEEFQELADFIGEGWIDNLGIFLYSQEANTPAAELPDQIPEKVKESRLKILSQIQKRNVDKHNQKLIGEKIEAVIDNYHPETNLLLTARFYGQAPEVDPCIIVNEAKLVSHFGERCFIEITGTAGYDLVGRVVKKSQNQALLKTSKA

SEQ ID NO: 54837 - protein, 52 aa, Chlamydia pneumoniae
MASKNREIIKLKSSESSDMYWTVKNKRKTTGRLELKKYDRKLRRHVIFKEAR

SEQ ID NO: 54838 - protein, 149 aa, Chlamydia pneumoniae
MEKRKDTKTTIVKSSETTKSWYVVDAAGKTLGRLSSEVAKILRGKHKVTYTPHVAMGDGVIVINAEKVRLTGAKKGQKIYRYYTGYISGMREIPFENMMARKPNYIIEHAIKGMMPRTRLGKKQLKSLRIVKGDSYETFESQKPILLDI

SEQ ID NO: 54839 - protein, 134 aa, Chlamydia pneumoniae
MAKSTIQESVATGRRKQAVSSVRLRPGSGKIDVNGKSFEDYFPLEIQRTTILSPLKKITEDQSQYDLIIRVSGGGIQGQVIATRLGLARALLKENEENRQDLKSCGFLTRDPRKKERKKYGHKKARKSFQFSKR

SEQ ID NO: 54840 - protein, 213 aa, Chlamydia pneumoniae
MTKGSVFIIMGPPGSGKGTQSQYLANRIGLPHISTGDLLRAIIREGTPNGLKAKAYLDKGAFVPSDFVWEILKEKLQSQACSKGCIIDGFPRTLDQAHLLDSFLMDVHSNYTVIFLEISEDEILKRVCSRFLCPSCSRIYNTSQGHTECPDCHVPLIRRSDDTPEIIKERLTKYQERTAPVIAYYDSLGKLCRVSSENKEDLVFEDILKCIYK

SEQ ID NO: 54841 - protein, 512 aa, Chlamydia pneumoniae
MTNVVQETIGGLNSPRTCPPCILVIFGATGDLTARKLLPALYHLTKEGRLSDQFVCVGFARREKSNELFRQEMKQAVIQFSPSELDIKVWEDFQQRLFYHRSEFDNNMGYTSLKDSLEDLDKTYGTRGNRLFYLSTPPQYFSRIIENLNKHKLFYKNQDQGKPWSRVIIEKPFGRDLDSAKQLQQCINENLNENSVYHIDHYLGKETVQNILTTRFANTIFESCWNSQYIDHVQISLSETIGIGSRGNFFEKSGMLRDMVQNHMMQLLCLLTMEPPTTFDADEIRKEKIKILQRISPFSEGSSIVRGQYGPGTVQGVSVLGYREEENVDKDSRVETYVALKTVINNPRWLGVPFYLRAGKRLAKKSTDISIIFKKSPYNLFAAEECSRCPIENDLLIIRIQPDEGVALKFNCKVPGTNNIVRPVKMDFRYDSYFQTTTPEAYERLLCDCIIGDRTLFTGGDEVMASWKLFTPVLEEWDQDSSPSFPNYPAGSSGPKEADALIERDGRSWRPL

SEQ ID NO: 54842 - protein, 154 aa, Chlamydia pneumoniae
MQAMSKPSSCKAYLGIDYGKKRIGLAYAAEPLLLTLPIGNIEAGKNLKLSAEALHKIILSRNITCVVLGNPLPMQKGLYSSLQEEVSLLAEELKKLSTVEIILWDERLSSVQAERMLKQDCGLSRKDRKGKTDSLAATLILTSFLDSLPKKLTL

SEQ ID NO: 54843 - protein, 537 aa, Chlamydia pneumoniae
MPFKCIFLTGGVVSSLGKGLTAASLALILERQRLNVAMLKLDPYLNVDPGTMNPFEHGEIYVTDDGVETDLDLGHYHRFSSAALSRHSSATSGQIYARVIKREREGDYLGSTVQVIPHITNEIIQVILDAAKEHSPDVLIVEIGGTIGDIESLPFLEAIRQFRYDHSEDCLNIHMTYVPYLQAADEVKSKPTQHSVQTLRGIGIIPDAILCRSEKPLTQEVKSKISLFCNVPNRAVFNVIDVKHTIYEMPLMLAQEKIANFIGEKLKLATVPENLDDWRVLVNQLSQDLPKVKIGVVGKYVQHRDAYKSIFEALTHAALRLGHAAEIIPIDAEDENLTMELSQCDACLVPGGFGVRGWEGKIAAAKFCREQGIPYFGICLGMQVLVVEYARNVLNLDQANSLEMDPNTPHPIVYVMEGQDPLVATGGTMRLGAYPCLLKPGSKAHKAYNESSLIQERHRHRYEVNPDYIQSLEDHGLRIVGTCPPQGLCEIIEVSDHPWMIGVQFHPEFVSKLISPHPLFIAFIEAALVYSKDASHV

SEQ ID NO: 54844 - protein, 297 aa, Chlamydia pneumoniae
MRRFLFLILSSLPLVAFSADNFTILEEKQSPLSRVSIIFALPGVTPVSFDGNCSIPWFSHSKKTLEGQRIYYSGDSFGKYFVVSALWPNKVSSAVVACNMILKHRVDLILIIGSCYSRSQDSRFGSVLVSKGYINYDADVRPFFERFEIPDIKKSVFATSEVHREAILRGGEEFISTHKQEIEELLKTHGYLKSTTKTEHTLMEGLVATGESFAMSRNYFLSLQKLYPEIHGFDSVSGAVSQVCYEYSIPCLGVNILLPHPLESRSNEDWKHLQSEASKIYMDTLLKSVLKELCSSH

SEQ ID NO: 54845 - protein, 372 aa, Chlamydia pneumoniae
MALKFHLIHQSKKSQARVGQIETSHGVIDTPAFVPVATHGALKGVIDHSDIPLLFCNTYHLLLHPGPEAVAKLGGLHQFMGRQAPIITDSGGFQIFSLAYGSVAEEIKSCGKKKGMSSLVKITDEGAWFKSYRDGRKLFLSPELSVQAQKDLGADIIIPLDELLPFHTDQEYFLTSCSRTYVWEKRSLEYHRKDPRHQSMYGVIHGGLDPEQRRIGVRFVEDEPFDGSAIGGSLGRNLQEMSEVVKITTSFLSKERPVHLLGIGDLPSIYAMVGFGIDSFDSSYPTKAARHGLILSKAGPIKIGQQKYSQDSSTIDPSCSCLTCLSGISRAYLRHLFKVREPNAAIWASIHNLHHMQQVMKEIREAILKDEI

SEQ ID NO: 54846 - protein, 344 aa, Chlamydia pneumoniae
MLTLGLESSCDETACAIVNEDKQILANIIASQDIHASYGGVVPELASRAHLHIFPQVINKALQQANLLIEDMDLIAVTQTPGLIGSLSVGVHFGKGIAIGAKKSLIGVNHVEAHLYAAYMAAQNVQFPALGLVVSGAHTAAFFIENPTSYKLIGKTRDDAIGETFDKVGRFLGLPYPAGPLIEKLALEGSEDSYPFSPAKVPNYDFSFSGLKTAVLYAIKGNNSSPRSPAPEISLEKQRDIAASFQKAACTTIAQKLPTIIKEFSCRSILIGGGVAINEYFRSAIQTACNLPVYFPPAKLCSDNAAMIAGLGGENFQKNSSIPEIRICARYQWESVSPFSLASP

SEQ ID NO: 54847 - protein, 390 aa, Chlamydia pneumoniae
MSSPVNNTPSAPNIPIPAPTTPGIPTTKPRSSFIEKVIIVAKYILFAIAATSGALGTILGLSGALTPGIGIALLVIFFVSMVLLGLILKDSISGGEERRLREEVSRFTSENQRLTVITTTLETEVKDLKAAKDQLTLEIEAFRNENGNLKTTAEDLEEQVSKLSEQLEALERINQLIQANAGDAQEISSELKKLISGWDSKVVEQINTSIQALKVLLGQEWVQEAQTHVKAMQEQIQALQAEILGMHNQSTALQKSVENLLVQDQALTRVVGELLESENKLSQACSALRQEIEKLAQHETSLQQRIDAMLAQEQNLAEQVTALEKMKQEAQKAESEFIACVRDRTFGRRETPPPTTPVVEGDESQEEDEGGTPPVSQPSSPVDRATGDGQ

SEQ ID NO: 54848 - protein, 167 aa, Chlamydia pneumoniae
MDLKQIEKLMIAMGRNGMKRFAIKREGLELELERDTREGNRQEPVFYDSRLFSGFSQERPIPTDPKKDTIKETTTENSETSTTTSSGDFISSPLVGTFYGSPAPDSPSFVKPGDIVSEDTIVCIVEAMKVMNEVKAGMSGRVLEVLITNGDPVQFGSKLFRIAKDAS

SEQ ID NO: 54849 - protein, 454 aa, Chlamydia pneumoniae
MKKVLIANRGEIAVRIIRACHDLGLSTVAVYSLADQEALHVLLADEAICIGEPQAAKSYLKISNILAACEITGADAVHPGYGFLSENANFASICESCGLTFIGPSSESIAMMGDKIAAKSLAKKIKCPVIPGSEGIIEDESEGLKIAEKIGFPIVIKAVAGGGGRGIRIVKEKDEFYRAFSAARAEAEAGFNNPNVYIEKFIENPRHLEIQVIGDTHGNYVHLGERDCTIQRRRQKLIEETPSPILNAEIRVKVGKIAVDLARSAGYFSVGTVEFLLDKDKKFYFMEMNTRIQVEHTITEEVTGIDLVKEQIHVAMGNKLPWKQKNIEFSGHIIQCRINAEDPTNNFSPSPGRLDYYLPPAGPSIRVDGACYSGYAIPPYYDSMIAKVIAKGKNREEAIAIMKRALKEFHIGGVQSTIPFHQFMLDNPKFLESNYDINYIDNLLAQGNSFFKEF

SEQ ID NO: 54850 - protein, 429 aa, Chlamydia pneumoniae
MQSARRHLNTIFILDFGSQYTYVLAKQVRKLFVYCEVLPWNISVQCLKERAPLGIILSGGPHSVYENKAPHLDPEIYKLGIPILAICYGMQLMARDFGGTVSPGVGEFGYTPIHLYPCELFKHIVDCESLDTEIRMSHRDHVTTIPEGFNVIASTSQCSISGIENTKQRLYGLQFHPEVSDSTPTGNKILETFVQEICSAPTLWNPLYIQQDLVSKIQDTVIEVFDEVAQSLDVQWLAQGTIYSDVIESSRSGHASEVIKSHHNVGGLPKNLKLKLVEPLRYLFKDEVRILGEALGLSSYLLDRHPFPGPGLTIRVIGEILPEYLAILRRADLIFIEELRKAKLYDKISQAFALFLPIKSVSVKGDCRSYGYTIALRAVESTDFMTGRWAYLPCDVLSSCSSRIINEIPEVSRVVYDISDKPPATIEWE

SEQ ID NO: 54851 - protein, 544 aa, Chlamydia pneumoniae
MELLSLNKSYFEIQRLRYRPEILTLLETIRSKHIQETSSPPSPPPELQKHIPNLCRIPEVSIYTEQETSSKPLKIGVLLSGGQAPGGHNVVIGLFDALRVFNPKTRLFGFIKGPLGLTRGLYKDLDISVIYDYYNMGGFDMLSSSREKIKTEEQKKNILNTVKQLKLDGLLIIGGNNSNTDTAMLAEYFLAHNCKTSVIGVPKTIDGDLKNCWIETSLGFHTSCRTYSEMIGNLAKDALSAKKYHHFIRLMGQQASYTTLECGLQTLPNIALISELIATRKISLKQLSEQLALGLVRRYKSGKNYSTVLIPEGLIEHIFDTRKLIDELNVLLANGDSSIEKILSKLSPETLKTFHLFPKDIANQLLLARDSHGNVRVSKIATEELLAVMVKKEIEKIKPHMEFHSVSHFFGYEARAGFPSNFDCNYGIALGIISALFLVRQKTGYMITINNLAQSYTEWQGGATPLYKMMHLENRCGTETPVIKTDSVDPKSPAVQHLLQQSDSCLVEDLYRFPGPLQYFGKEELIDQRPLTLLWENQTHSPLL

SEQ ID NO: 54852 - protein, 820 aa, Chlamydia pneumoniae
MRYDPNLIEKKWQQFWKEHRSFQANEDEDKVKYYVLDMFPYPSGAGLHVGHLIGYTATDIVARYKRARGFSVLHPMGWDSFGLPAEQYAIRTGTHPKVTTQKNIANFKKQLSAMGFSYDEGREFATSDPDYYHWTQKLFLFLYDQGLAYMADMAVNYCPELGTVLSNEEVENGFSIEGGYPVERKMLRQWILKITAYADKLLEGLDALDWPENVKQLQKNWIGKSEGALVTFHLTQEGSLEAFTTRLDTLLGVSFLVIAPEHPDLDSIVSEEQRDEVTAYVQESLRKSERDRISSVKTKTGVFTGNYAKHPITGNLLPVWISDYVVLGYGTGVVMGVPAHDERDREFAEMFSLPIHEVIDDNGVCIHSNYNDFCLNGLSGQEAKDYVINYLEMRSLGRAKTMYRLRDWLFSRQRYWGEPIPIIHFEDGTHRPLEDDELPLLPPNIDDYRPEGFGQGPLAKAQDWVHIYDEKTGRPGCRETYTMPQWAGSCWYYLRFCDAHNSQLPWSKEKESYWMPVDLYIGGAEHAVLHLLYSRFWHRVFYDAGLVSTPEPFKKLINQGLVLASSYRIPGKGYVSIEDVREENGTWISTCGEIVEVRQEKMSKSKLNGVDPQVLIEEYGADALRMYAMFSGPLDKNKTWSNEGVGGCRRFLNRFYDLVTSSEVQDIEDRDGLVLAHKLVFRITEHIEKMSLNTIPSSFMEFLNDFSKLPVYSKRALSMAVRVLEPIAPHISEELWVILGNPPGIDQAAWPQIDESYLVAQTVTFVVQVNGKLRGRLEVAKEAPKEEVLSLSRSVVAKYLENAQIRKEIYVPNKLVNFVL

SEQ ID NO: 54853 - protein, 662 aa, Chlamydia pneumoniae
MKEENSQAHYLALCRELEDHDYSYYVLHRPRISDYEYDMKLRKLLEIERSHPEWKVLWSPSTRLGDRPSGTFSVVSHKEPMLSIANSYSKEELSEFFSRVEKSLGTSPRYTVELKIDGIAVAIRYEDRVLVQALSRGNGKQGEDITSNIRTIRSLPLRLPEDAPEFIEVRGEVFFSYSTFQIINEKQQQLEKTIFANPRNAAGGTLKLLSPQEVAKRKLEISIYNLIAPGDNDSHYENLQRCLEWGFPVSGKPRLCSTPEEVISVLKTIETERASLPMEIDGAVIKVDSLASQRVLGATGKHYRWALAYKYAPEEAETLLEDILVQVGRTGVLTPVAKLTPVLLSGSLVSRASLYNEDEIHRKDIRIGDTVCVAKGGEVIPKVVRVCREKRPEGSEVWNMPEFCPVCHSHVVREEDRVSVRCVNPECVAGAIEKIRFFVGRGALNIDHLGVKVITKLFELGLVHTCADLFQLTTEDLMQIPGIRERSARNILESIEQAKHVDLDRFLVALGIPLIGIGVATVLAGHFETLDRVISATFEELLSLEGIGEKVAHAIAEYFSDSTHLNEIKKMQDLGVCISPYHKSGSTCFGKAFVITGTLEGMSRLDAETAIRNCGGKVGSSVSKQTDYVVMGNNPGSKLEKARKLGVSILDQEAFTNLIHLE

SEQ ID NO: 54854 - protein, 872 aa, Chlamydia pneumoniae
MLGVNFMEKFSDAVSEALEKAFELAKSSKHTYVTENHLLLALLENTESLFYLVIKDIHGNPGLLNTAVKDALSREPTVVEGEVDPKPSPGLQTLLRDAKQEAKTLGDEYISGDHLLLAFWSSNKEPFNSWKQTTKVSFKDLKNLITKIRRGNRMDSPSAESNFQGLEKYCKNLTALAREGKLDPVIGRDEEIRRTIQVLSRRTKNNPMLIGEPGVGKTAIAEGLALRLIQGDVPESLKGKQLYVLDMGALIAGAKYRGEFEERLKSVLKDVESGDGEHIIFIDEVHTLVGAGATDGAMDAANLLKPALARGTLHCIGATTLNEYQKYIEKDAALERRFQPIFVTEPSLEDAVFILRGLREKYEIFHGVRITEGALNAAVLLSYRYIPDRFLPDKAIDLIDEAASLIRMQIGSLPLPIDEKERELAALIVKQEAIKREQSPSYQEEADAMQKSIDALREELASLRLGWDEEKKLISGLKEKKNSLESMKFSEEEAERVADYNRVAELRYSLIPQLEEEIKQDEASLNQRDNRLLQEEVDERLIAQVVANWTGIPVQKMLEGEAEKLLILEESLEERVVGQPFAVSAVSDSIRAARVGLNDPQRPLGVFLFLGPTGVGKTELAKALADLLFNKEEAMVRFDMSEYMEKHSISKLIGSSPGYVGYEEGGSLSEALRRRPYSVVLFDEIEKADKEVLNILLQVFDDGILTDGKKRKVNCKNALFIMTSNIGSPELADYCSKKGSELTKEAILSVVSPVLKRYLSPEFMNRIDEILPFVPLTKEDIVKIVGIQMRRIAQRLKARRINLSWDDSVILFLSEQGYDSAFGARPLKRLIQQKVVILLSKALLKGDIKPDTSIELTMAKEVLVFKKVETPS

SEQ ID NO: 54855 - protein, 544 aa, Chlamydia pneumoniae
MAAKNIKYNEEARKKIHKGVKTLAEAVKVTLGPKGRHVVIDKSFGSPQVTKDGVTVAKEIELEDKHENMGAQMVKEVASKTADKAGDGTTTATVLAEAIYSEGLRNVTAGANPMDLKRGIDKAVKVVVDELKKISKPVQHHKEIAQVATISANNDSEIGNLIAEAMEKVGKNGSITVEEAKGFETVLDVVEGMNFNRGYLSSYFSTNPETQECVLEDALILIYDKKISGIKDFLPVLQQVAESGRPLLIIAEEIEGEALATLVVNRLRAGFRVCAVKAPGFGDRRKAMLEDIAILTGGQLVSEELGMKLENTTLAMLGKAKKVIVTKEDTTIVEGLGNKPDIQARCDNIKKQIEDSTSDYDKEKLQERLAKLSGGVAVIRVGAATEIEMKEKKDRVDDAQHATIAAVEEGILPGGGTALVRCIPTLEAFLPMLANEDEAIGTRIILKALTAPLKQIASNAGKEGAIICQQVLARSANEGYDALRDAYTDMIDAGILDPTKVTRSALESAASIAGLLLTTEALIADIPEEKSSSAPAMPSAGMDY

SEQ ID NO: 54856 - protein, 732 aa, Chlamydia pneumoniae
MEKICGYLEQILVENKDSGDITAYIKIPNKTTPILIKGKLPQPLELGSPIQIYGVWSHSPSNTKYFQIHSYDSPLLYEYRGVFHYLTSKLIKGIGPKIAEKIIEKFQEKTCYVLDITPERLSEVSGISETRCVSICKQLCEQKILRKTLLFLQEYNIPIHYGVRIFKKYQEKSIEKICEDPFLLAREMEGIGFKTADFIAMKLGVPRNSESRLCAGIQHSLEELQEEGHTCYPIELLIDVVAKLLNQDVFDTPITLEEIDTQILNMQKRKLLHIQDISGTLHVWTRYLHLAEKTIVSDLKRILFSSRRIRSIDGEKAIAWVEENLSIDLAEQQREAIKACFSEKLLIITGGPGTGKSTITQAILKIFEQVTHKIILAAPTGKAAKRMTEITQKHSVTIHALLQYDFKTKSFRKNHDNPIDCDLIIVDESGMMDTHLLHHFLKALPDYTTLVFIGDIHQLPSVGPGNILKDLITSNKMTVIRLNKIFRQVHDSGIVTNAHRVNEGELPILYSETGRRDFLFFQKDDQEEALNHIIHLVTKFVPQKYHIYPQDIQVLAPMKKGTLGIYNLNKALKHALNPKKANLHGRFQSYAVGDKVMQIRNNYNKEVFNGDIGYVSTINFEDKAVVVRMEGKHVGYSFSELDDLVLAYATSVHKYQGSESPCIIIPIHTSHFMMLYRNLLYTAITRGKKLVILVGTKKAIAIATRNNRVQHRCTGLAEVLKELDTKKNYADL

SEQ ID NO: 54857 - protein, 551 aa, Chlamydia pneumoniae
MPQKVLITSALPYANGPLHFGHIAGVYLPADVYARFRRLLGDDVLYICGSDEFGIAITLNADREGLGYQEYVDMYHKLHKDTFEKLGFALDFFSRTTNPFHAELVQDFYSQLKASGLIENRISEQLYSEQEQRFLADRYVEGTCPRCGFDHARGDECQSCGADYEAIDLIDPKSKISGVELVKKETEHSYFLLDRMKDALLSFIQGCYLPDHVRKFVVDYIEHVRSRAITRDLSWGIPVPDFPGKVFYVWFDAPIGYISGTMEWAASQGNPDEWKRFWLEDGVEYVQFIGKDNLPFHSVVFPAMELGQKLDYKKVDALVVSEFYLLEGRQFSKSEGNYVDMDKFLSSYSLDKLRYVLAATAPETSDSEFTFLDFKTRCNSELVGKFGNFINRVLAFAEKNHYDKLSYHSVVLEDSDRAFLEEVRQLVRDAEKCYREYSLRKATSVIMSLAALGNVYFNQQAPWKLLKEGTRERVEAILFCACYCQKLLALISYPIIPESAVAIWEMISPKSLENCNLDTMYARDLWKEEILDVINEEFHLKSPRLLFTTVE

SEQ ID NO: 54858 - protein, 214 aa, Chlamydia pneumoniae
MNTSISEIQRFLSMIAFEKELVSEDFSVVAGIDEAGRGPLAGPVVASACILPKGKVFPGVNDSKKLSPKQRAQVRDALMQDPEVCFGIGVISVERIDQVNILEATKEAMLQAISSLPISPDILLVDGLYLPHDIPCKKIIQGDAKSASIAAASILAKEHRDDLMLQLHRLYPEYGFDRHKGYGTSLHVEAIRRYGPSPCHRKSFSPIKQMCAIV

SEQ ID NO: 54859 - protein, 121 aa, Chlamydia pneumoniae
MVNLLKELEQEQCRNDLPEFHVGDTIRLATKISEGGKERVQVFQGTVMARRGGGSGETVSLHRVAYGEGMEKSFLLNSPRIVSIEIVKRGKVARARLYYLRGKTGKAAKVKEFVGPRSSKK

SEQ ID NO: 54860 - protein, 361 aa, Chlamydia pneumoniae
MKIDILSLFPGYFDGPLQTSILGRAIKQRLLDVQLTNLRDFGLGKWKQVDDTPFSGGGMLLMAEPVTSAIRSVRKENSKVIYLSPQGALLTAEKSRELAAASHLILLCGHYEGIDERAIESEVDEEISIGDYVLTNGGIAALVLIDAVSRFIPGVLGNQESAERDSLENGLLEGPQYTRPREFEGKEVPEVLLQGDHKAISQWRLEQSERRTYERRPDLYLNYLYKRSIDHKFDEETTTNRDHFKCDKISVVLEVNKLKRAKNFYCKVFGLDAMSCENKFCLPHEGKTIFWLREVQAEKKNIVTLSLSLDCACEEDFCYLLRRWELFGGKLLEKQADEHAVWALAQDLDGHAWIFSWHRMK

SEQ ID NO: 54861 - protein, 119 aa, Chlamydia pneumoniae
MALKIRLRQQGRRNHVVYRLVLADVESPRDGKYIELLGWYDPHSSINYQLKSERIFYWLERGAQLSSKAEALVKQGAPGVYSALLSKQEARKLVVRKKRRAYRQRRSTQREEAAKDATK

SEQ ID NO: 54862 - protein, 448 aa, Chlamydia pneumoniae
MINSLSQKLSSIFSFLVSSRRINEENISESIREVRLALLDADVNYHVVKDFISKVKEKILGEEIWKHVSPGQQFIRCLHEELVAFLSDGREEFTIQKTPSIILLCGLQGAGKTTTAAKLADYVIKNKKAKKVLVVPCDLKRFAAVDQLKILVAQTKAEFYQSQENKPIDVVVKALAYAKENGHDFVILDTAGRLNIDNELMEELTAIQKVSQANERLFVMNVAMGQDVLATVQAFDQSLDLTGVILSMTDGDARAGAVFSIKHVLGKPIKFEGCGERIQDLRSFDPQSMAERILGMGDTINFVKEMREYISEEEDAELGKKLVTAAFTYEDYYKQMKAFRRMGPLRKLLGMMPGFNNAKPSQKEIEDSEQQMKRTEAIILSMTPEERKELVELDMSRMKRIASGCGLTLGDVNQFRKQMSQSKKFFKGMSKGKMEQVRKKMSGGNQWR

SEQ ID NO: 54863 - protein, 357 aa, Chlamydia pneumoniae
MKKKVAEYLNRLAEVEIKISNPEIFSNSKEYSALSKEHSYLLELKNAYDKILNLEKVLADDKQALAIEKDPEMVVMLEEGINENKVELEKLNKILESLLVPPDPDDDLNVIMELRAGTGGEEAALFVGDCVRMYHLYASSKGWKYEVLSASESDLKGYKEYVMGISGTGVKRLLQYEAGTHRVQRVPETETQGRVHTSAITIAVLPEPSEEDTELLINEKDLKIDTFRASGAGGQHVNVTDSAVRITHLPTGVVVTCQDERSQHKNKDKAMRILKARIRDAEMQKRHNEASAMRSAQVGSGDRSERIRTYNFSQNRVTDHRIGLTLYNLDKVMEGDLDPITTAMVSHAYHQLLEHGN

SEQ ID NO: 54864 - protein, 109 aa, Chlamydia pneumoniae
MKKNTHPEYRQVLFVDSSTGYKFVCGSTYQSEKTEVFEGKEYPVCYVSVSSSSHPFFTGSKKFVDAEGRVDKFLKRYSNVRQPAQQPQPEEDALPAAKGKKKVVTKKKK

SEQ ID NO: 54865 - protein, 636 aa, Chlamydia pneumoniae
MKQHYSLNKSRHILRSTYKLLKSKKLAHSPADKKQLQELLEQLEEAIFEHDQETASDLAQQALAFSNRYPNSFGRKTYELIKALLFAGVVAFLVRQFWFELYEVPTGSMRPTILEQDRILVSKTTFGLHCPFAKKPLAFNPESVTRGGLVVFTVGDLPIPDADTKYFGLIPGKKRYIKRCMGRPGDFLYFYGGKIYGLDDAGKRIEFPSVHGLENLYHVPYISFDGTTSSHTEGQKTIIDFKQFNQSYGRLIFPQTSMYGQFFDHKEWHQDEPNKLKDPHLSPVSYADLFGMGNYAMVRILTEHQARTSHLLPNPGSPTKVYLEICHTANLSYPKPLLRHYEHQLSPAIQPMKTLLPLRKEHLHLIRNNLTTSRFIVAQGCAYKYHQFKINTSGIAKAYAILLPKVPDGCYEYSKGEAYQIGFGEIRYKLKSSHPLTQLNDKQVIELFNCGINFSSIYNPVNPLQAPLPNRYAFFNQGNLYIMDSPVFIKNDPTLQKFVTSETEKQEGSSETQPYIAFVDKGLPPEDFKEFVEFIHNFGIQVPKGHVLVLGDNYPMSADSREFGFVPMENLLGSPLCTFWPIGRMGRLTGVSAPTTLSGYLVSGIALATGLSLIGYVYYQKRRRLFPKKEEKNHKK

SEQ ID NO: 54866 - protein, 1043 aa, Chlamydia pneumoniae
  MISC_FEATURE (798)..(798): X=any amino acid
MTADEVGKNSFAKKEEQVLKFWKDNQIFEKSLQNRQGKTLYSFYDGPPFATGLPHYGHLLASTIKDVVGRYATMDGYYVPRRFGWDCHGVPVEYEVEKSLSLTAPGAIEDFGIASFNEECRKIVFRYVHEWEYYINRIGRWVDFSSTWKTMDASFMESVWWVFQSLYNQGLVYEGTKVVPFSTALGTPLSNFEASQNYKEVDDPSLVVRMPLQNDSASLLVWTTTPWTLPSNMAIAVGETLVYVRIQDKKSGEQWILSQGCVSRWFSNPEEFVILESFSGKDLVGRTYEPPFTFFQSKREEGAFRVIAASFVEESEGTGVVHMAPAFGEGDFLVCKENHVPLVCPVDAHGSFTEEIPQYQGQYIKHADKEIIKFLKKEGRIFYYGTVKHRYPFCWRTDTPLIYKAVNSWFVAVEKIKDKMLRANSSIHWVPEHIQEGRFGKWLEGARDWAISRNRYWGTPIPIWKSADGEILVVGSIRELEELTGTQITDIHRHFIDDLNIVKDGKPFHRIPYVFDCWFDSGAMPYAQNHYPFENQKETEEAFPADFIAEGLDQTRGWFYTLTVISAILFDRPAFRNAIVNGIILAEDGNKMSKRLNNYPSPKYVLDTYGADALRLYLLHSVVVKAEDLRFSDKGIEGVLKQILLPLTNVLSFFNTYAELYGFDPKSQDIEPAYTEIDQWILSNLYSVVGKVRESMSQYHLNFAVEPFVTFIDDLTNWYIRRCRRRFWEAEDTPDRRAAFSTLYEVLTVFCKVIAPFVPFLAEDIYQKLKLEKEPESVHLCDFPQVEMDKILPDLEKXMHDIREIVGLGHSLRKEHKLKVRQPLANFYVVGSKDRLSLLKTFEGLIAEELNVKNVIFYEEAPSFIYTTVKPNFRMLGKKVGSKMKEVQKALSELPNNAIDKLIQEETWVLTIDDREIALDGDDVVICRHTDPGYIARSSALFSVILDCQLREPLIVEGIARELVNKINTMRRNQQLHVSDRIALRIKTTEAVHRAFLDYENYICEETLIIAYDFTQDSDFQGENWDINGHATQIEITVSSIDS

SEQ ID NO: 54867 - protein, 448 aa, Chlamydia pneumoniae
MDALILSRIQFGLFITFHYLFVPLSMGLSMMLVIMEGLYLVTKKQIYKQMTWFWVGIFALTFVLGVVTGIMQIFSFGSNWANFSEYTGNIFGTLLGSEGVFAFFLESGFLGILLFGRHKVSKKMHFFSTCMVALGAHMSAFWIICANSWMQTPSGYEMVMHKGKLIPALTSFWGVVFSPTTIDRFIHAVLGTWLSGVFLVISVSAYYLWKKRHHEFAKQGMKIGTICAVIVLVLQLWSADVTARGVAKNQPAKLAAFEGIFKTEEYTPIWAFGYVDMEKERVIGLPIPGALSFLVHRNIKTPVTGLDQIPRDEWPNVQAVFQLYHLMIMLWGVMVALTLISWSAYKGWRWALKPFFLVILTFSVLLPEICNECGWCAAEMGRQPWVVQGLLKTKDAVSPIVQANQIVQSLVIFSLVFIALLTLFITVLCKKIKHGPEEENDLTEFEVK

SEQ ID NO: 54868 - protein, 484 aa, Chlamydia pneumoniae
MITRTKIICTIGPATNSPEMLAKLLDAGMNVARLNFSHGSHETHGQAIGFLKELREQKRVPLAIMLDTKGPEIRLGNIPQPISVSQGQKLRLVSSDIDGSAEGGVSLYPKGIFPFVPEGADVLIDDGYIHAVVVSSEADSLELEFMNSGLLKSHKSLSIRGVDVALPFMTEKDIADLKFGVEQNMDVVAASFVRYGEDIETMRKCLADLGNPKMPIIAKIENRLGVENFSKIAKLADGIMIARGDLGIELSVVEVPNLQKMMAKVSRETGHFCVTATQMLESMIRNVLPTRAEVSDIANAIYDGSSAVMLSGETASGAHPVAAVKIMRSVILETEKNLSHDSFLKLDDSNSALQVSPYLSAIGLAGIQIAERADAKALIVYTESGSSPMFLSKYRPKFPIIAVTPSTSVYYRLALEWGVYPMLTQESDRAVWRHQACIYGIEQGILSNYDRILVLSRGACMEETNNLTLTIVNDILTGSEFPET

SEQ ID NO: 54869 - protein, 1826 aa, Chlamydia pneumoniae
MKSLPVYVSGIKVRNLKNVSIHFNSEEIVLLTGVSGSGKSSIAFDTLYAAGRKRYISTLPTFFATTITTLPNPKVEEIHGLSPTIAIKQNHFSHYSHATVGSTTELFSHLALLFTLEGQARDPKTKEVLDLYSKEKVLSTIMELSEGVQISILAPLLRKDIAAIHEYAQQGFTKVRCNGTIHPIYSFLTSGIPEDCSVDIVIDTLIKSENNIARLKVSLFTALEFGEGHCSVLSDEELMTFSTKQQIDDVTYTPLTQQLFSPHALESRCSLCQGSGIFISIDNPLLIDENLSIKENCCSFAGNCSSYLYHTIYQALADALNFNLETPWKDLSPEIQNIFLRGKNNLVLPVRLFDQTLGKKNLTYKVWRGVLNDIGDKVRYTTKPSRYLSKGMSAHSCSLCKGTGLGDYASVATWEGKTFTEFQQMSLNNWHVFFSKVKSPSLSIQEILQGLKQRLSFLIDLGLGYLTPNRALATLSGGEQERTAIAKHLGGELFGITYILDEPSIGLHPQDTEKLIGVIKKLRDQGNTVILVEHEERMISLADRIIDIGPGAGIFGGEVLFNGKPEDFLMNSSSLTAKYLRQELTIPIPESREAPTSWLLLTEATIHNLKNLSIRLPLARLIGVTGVSGSGKSSLINNTLVPAIESFLKQENPKNLHFEWGCIGRLIHITRDLPGRSQRSIPLTYIKAFDDIRELFASQPRSLRQGLTKAHFSFNQPQGACIQCQGLGTMTISDDDTPIPCSECQGKRYHSEVLEILYEGKNIADILDMTAYEAEKFFISHPKIHEKIHALCSLRLDYLPLGRPLSTLSGGEIQRLKLAHELLFASPKQTLYVLDEPTTGLHTHDIQALIEVLLSLTYLGHTVLVIEHNMHVVKVCDYVLELGPEGGDLGGYLLASCTPKDLIQLNTPTAKALAPYIEGSLDIPVVKSEPPSSPKSCDILIKDAYQNNLKHIDLALPRNSLIAIAGPGASGKHSLVFDILYASGNIAYAELFPPYIRQGLLKETPLPSVGEVKGLSPVISVRKCSSSNRSYHTIASALGLSNGLEKLFAILGEPFSPLTEEKLSKTTPQTIIDSLLKSYKDDYVTITSPIPLGSDLEIFLQEKQKEGFIKLYSEGNLYDLDERLPLNLIEPAIVIQHTKVSPKNSSSLLSAISVAFSLSSEIWIYISQKKQRKLSYSLGWKDKKGRLYPEITHQLLSSDHPEGRCLTCGGRGEILKISLEEHKEKIAHYTPLEFFSLFFPKSYMKPVQKLLKDENASQPLKLLTTKEFLNFCRGSSEFPGMNALLMEQLDTESDSPLIKPLLALTSCPACKGSGLNDYANYVRINNTSLLDIYQEDATFLESFLNTIGTDDTRSIIQDLMNRLTFISKVGLSYITLGQRQDTLSDGENYRLHLAKKISINLTNIVYLFEEPLSGLHPQDLPTIVQLLKELVANNNTVIATDRSCSLIPHADHAIFLGPGSGPQGGFLMDSDTEVCPSVDLHANVPQTEVCPKAPLSISKANHTRGSDRTLKVNLSIHHIQNLKVSAPLHALVAIGGVSGSGKTSLLLEGFKKQAELLIAKGTTTFSDLVVIDSHPIASSQRSDISTYFDIAPSLRAFYASLTQAKALNISSTMFSTNTKQGQCSDCQGLGYQWIDRAFYALEKRPCPTCSGFRIQPLAQEVLYEGKHFGELLHTPIETVALRFPFIKKIQKPLKALLDIGLGYLPIGQKLSSLSVSEKTALKTAYFLYQTPETPTLFLIDELFSSLDPIKKQHLPEKLRSLINSGHSVIYIDHDVKLLKSADYLIEIGPGSGKQGGKLLFSGSPKDIYASKDSLLKKYICNEELDS

SEQ ID NO: 54870 - protein, 932 aa, Chlamydia pneumoniae
MERYDIVRIIGKGGMGEVYLAYDPVCSRKVALKKIREDLAENPLLKRRFLREARIAADLIHPGVVPVYTIYSEKDPVYYTMPYIEGYTLKTLLKSVWQKESLSKELAEKTSVGAFLSIFHKICCTIEYVHSRGILHRDLKPDNILLGLFSEAVILDWGAAVACGEEEDLLDIDVSKEEVLSSRMTIPGRIVGTPDYMAPERLLGHPASKSTDIYALGVVLYQMLTLSFPYRRKKGKKIVLDGQRIPSPQEVAPYREIPPFLSAVVMRMLAVDPQERYSSVTELKEDIESHLKGSPKWTLTTALPPKKSSSWKLNEPILLSKYFPMLEVSPASWYSLAISNIESFSEMRLEYTLSKKGLNEGFGILLPTSENALGGDFYQGYGFWLHIKERTLSVSLVKNSLEIQRCSQDLESDKETFLIALEQHNHSLSLFVDGTTWLIHMNYLPSRSGRVAIIVRDMEDILEDIGIFESSGSLRVSCLAVPDAFLAEKLYDRALVLYRRIAESFPGRKEGYEARFRAGITVLEKASTDNNEQEFALAIEEFSKLHDGVAAPLEYLGKALVYQRLQEYNEEIKSLLLALKRYSQHPEIFRLKDHVVYRLHESFYKRDRLALVFMILVLEIAPQAITPGQEEKILVWLKDKSRATLFCLLDPTVLELRSSKMELFLSYWSGFIPHLNSLFHRAWDQSDVRALIEIFYVACDLHKWQFLSSCIDIFKESLEDQKATEEIVEFSFEDLGAFLFAIQSIFNKEDAEKIFVSNDQLSPILLVYIFDLFANRALLESQGEAIFQALDLIRSKVPENFYHDYLRNHEIRAHLWCRNEKALSTIFENYTEKQLKDEQHELFVLYGCYLALIQGAEAAKQHFDVCREDRIFPASLLARNYNRLGLPKDALSYQERRLLLRQKFLYFHCLGNHDERDLCQTMYHLLTEEFQL

SEQ ID NO: 54871 - protein, 940 aa, Chlamydia pneumoniae
MTTEDFPKAYNFQDTEPELYVFWEKNGMFKAEASSDKPPYSVIMPPPNVTGVLHMGHALVNTLQDVLVRYKRMSGFEVCWIPGTDHAGIATQAVVERHLQASEGKRRTDYSREDFLKHIWAWKEKSEKVVLSQLRQLGCSCDWDRKRFTMEPLANRAVKKAFKTLFENGYIYRGYYLVNWDPVLQTALADDEVEYEEKDGWLYYIRYRMVGSQESIVVATTRPETSLGDTGIAVSPNDERYASWIGASVEVPFVNRQIPIIGDASVDPTFGTGAVKVTPAHDKDDYLMGTNHHLPMINILTPSGGINENGGPFAGMAKEKAREEILIALEEQGLFVRKEPYKLRVGVSYRSGAVIEPYLSKQWFVSVSEFRGALREFVESQDIKIFPKDFVKNYLSWVNHLRDWCISRQLWWGHRIPVWYHKNDDERVLCYDGEGIPEEVAQDPDSWYQDPDVLDTWFSSGLWPLTCLGWPDENSPDLKKFYPTALLVTGHDILFFWVTRMVLLCSSMSGEKPFSEVFLHGLIFGKSYKRYNDFGEWSYISGKEKLAYDMGEALPDGVVAKWEKLSKSKGNVIDPLEMIATYGTDAVRLTLCSCANRGEQIDLDYRLFEEYKHFANKVWNGARFIFGHISDLQGKDLLAGIDEDSLGLEDFYILDGFNQLIHQLEEAYATYAFDKVATLAYEFFRNDLCSTYIEIIKPTLFGKQGNEASQSTKRTLLAVLLINVLGVLHPVAPFITESLFLRIQDTLGALPEGDGDAFTGHALRMLRSRACMEAPYPKAFDVKIPQDLRESFTLAQRLVYTIRNIRGEMQLDPRLHLKAFVVCSDTTEIQSCIPILQALGGLESIQLLDKEPEKGLYSFGVVDTIRLGIFVPEEHLLKEKGRLEKERVRLERAVENLERLLGDESFCQKANPNLVVAKQEALKNNRIELQGILDKLASFA

SEQ ID NO: 54872 - protein, 208 aa, Chlamydia pneumoniae
MANLNADGKLKQICDALRLDTLKPAEDEAAALLHNAKEQAKRIIQEAQEEARKILETAEERAHQKIKQGEVALSQAGKRALEALKQAVENKIFRESLVEWLEHVTTDPEVSTKLIQALVQALEAQGVSGNLTAYIGKHVSPRAVNELLGKAVTTKLRKKSVVVGSFVGGVQLKVEEKNWVLDLSSSALLEIFTRYLQKDFREMIFQGS

SEQ ID NO: 54873 - protein, 329 aa, Chlamydia pneumoniae
MPMSNQFDQLKKLSTIVCDSGDPELVKASGSQDATTNPSLILKVAQEPKFQELLNEAVVWGIRQNGDDLQTLSFILDKIQVNFALEIIKNIPGRISLEIDARLSFNVEAMVQRAVFLSQLFEAMGGDKKRLLVKIPGTWEGIRAVEFLEAKGIACNVTLIFNLVQAIAAAKAKATLISPFVGRIYDWWIAAYGDEGYSIDADPGVASVSNIYAYYKKFGIPTQIMAASFRTKEQVLALAGCDLLTISPKLLDELKKSQHPVKKELDPAEAKKLDVQPIELTESFFRFLMNEDAMATEKLAEGIRIFAGDTQILETAITEFIKQIAAEGA

SEQ ID NO: 54874 - protein, 1397 aa, Chlamydia pneumoniae
MEKIMFGENSRDIGVLSKEGLFDKLEIGIASDITIRDKWSCGEIKKPETINYRTFKPEKGGLFCEKIFGPTKDWECCCGKYKKIKHKGIVCDRCGVEVTLSKVRRERMAHIELAVPIVHIWFFKTTPSRIGNVLGMTASDLERVIYYEEYVVIDPGKTDLTKKQLLNDAQYREVVEKWGKDAFVAKMGGEAIYDLLKSEDLQSLLKDLKERLRKTKSQQARMKLAKRLKIIEGFVSSSNHPEWMVLKNIPVVPPDLRPLVPLDGGRFATSDLNDLYRRVINRNNRLKAILRLKTPEVIVRNEKRMLQEAVDALFDNGRHGHPVMGAGNRPLKSLSEMLKGKNGRFRQNLLGKRVDYSGRSVIIVGPELKFNQCGLPKEMALELFEPFIIKRLKDQGSVYTIRSAKKMIQRGAPEVWDVLEEIIKGHPVLLNRAPTLHRLGIQAFEPVLIEGKAIRIHPLVCAAFNADFDGDQMAVHVPLSVEAQLEAKVLMMAPDNIFLPSSGKPVAIPSKDMTLGLYYLMADPTYFPEEHGGKTKIFKDEIEVLRALNNGGFIDDVFGDRRDETGRGIHIHEKIKVRIDGQIIETTPGRVLFNRIVPKELGFQNYSMPSKRISELILQCYKKVGLEATVRFLDDLKDLGFIQATKAAISMGLKDVRIPDIKSHILKDAYDKVAIVKKQYDDGIITEGERHSKTISIWTEVSEQLSDALYVEISKQTRSKHNPLFLMIDSGARGNKSQLKQLGALRGLMAKPNGAIIESPITSNFREGLTVLEYSISSHGARKGLADTALKTADSGYLTRRLVDVAQDVIITEKDCGTLNHIEISAIGQGSEELLPLKDRIYGRTVAEDVYQPGDKSRLLAQSGDVLNSVQAEAIDDAGIETIKIRSTLTCESPRGVCAKCYGLNLANGRLIGMGEAVGIIAAQSIGEPGTQLTMRTFHLGGIAATSSTPEIITNSDGILVYMDLRVVLGQEGHNLVLNKKGALHVVGDEGRTLNEYKKLLSTKSIESLEVFPVELGVKILVADGTPVSQGQRIAEVELHNIPIICDKPGFIKYEDLVEGISTEKVVNKNTGLVELIVKQHRGELHPQIAIYDDADLSELVGTYAIPSGAIISVEEGQRVDPGMLLARLPRGAIKTKDITGGLPRVAELVEARKPEDAADIAKIDGVVDFKGIQKNKRILVVCDEMTGMEEEHLIPLTKHLIVQRGDSVIKGQQLTDGLVVPHEILEICGVRELQKYLVNEVQEVYRLQGVDINDKHIEIIVRQMLQKVRITDPGDTTLLFGEDVNKKEFYEENRRTEEDGGKPAQAVPVLLGITKASLGTESFISAASFQDTTRVLTDAACCSKTDYLLGFKENVIMGHMIPGGTGFETHKRIKQYLEKEQEDLVFDFVSETECVC

SEQ ID NO: 54875 - protein, 1262 aa, Chlamydia pneumoniae
MSHQNSRRTRMLKCPERVSVKKKEDIPDLPNLIEIQIKSYKQFLQIGKLAEERENIGLEEVFREIFPIKSYNEATVLEYLSYNLGVPKYSPEECIRRGITYSVTLKVRFRLTDETGIKEEEVYMGTIPLMTDKGTFIINGAERVVVSQVHRSPGINFEQEKHSKGNILFSFRIIPYRGSWLEAIFDINDLIYIHIDRKKRRRKILAITFIRALGYSSDADIIEEFFTIGESSLRSEKDFALLVGRILADNIIDEASSLVYGKAGEKLSTAMLKRMLDAGIASVKIAVDADENHPIIKMLAKDPTDSYEAALKDFYRRLRPGEPATLANARSTIMRLFFDPKRYNLGRVGRYKLNRKLGFSIDDEALSQVTLRKEDVIGALKYLIRLKMGDEKACVDDIDHLANRRVRSVGELIQNQCRSGLARMEKIVRERMNLFDFSSDTLTPGKVVSAKGLASVLKDFFGRSQLSQFMDQTNPVAELTHKRRLSALGPGGLNRERAGFEVRDVHASHYGRICPIETPEGPNIGLITSLSSFAKINEFGFIETPYRIVRDGIVTDEIEYMTADVEEECVIAQASASLDEYNMFTEPVCWVRYAGEAFEADTSTVTHMDVSPKQLVSIVTGLIPFLEHDDANRALMGSNMQRQAVPLLKTEAPVVGTGLECRAAKDSGAIVVAEEDGVVDFVDGYKVVVAAKHNPTIKRTYHLKKFLRSNSGTCINQQPLCAVGDVITKGDVIADGPATDRGELALGKNVLVAFMPWYGYNFEDAIIISEKLIREDAYTSIYIEEFELTARDTKLGKEEITRDIPNVSDEVLANLGEDGIIRIGAEVKPGDILVGKITPKSETELAPEERLLRAIFGEKAADVKDASLTVPPGTEGVVMDVKVFSRKDRLSKSDDELVEEAVHLKDLQKGYKNQVATLKTEYREKLGALLLNEKAPAAIIHRRTAEIVVHEGLLFDQETIERIEQEDLVDLLMPNCEMYEVLKGLLSDYETALQRLEINYKTEVEHIREGDADLDHGVIRQVKVYVASKRKLQVGDKMAGRHGNKGVVSKIVPEADMPYLSNGETVQMILNPLGVPSRMNLGQVLETHLGYAAKTAGIYVKTPVFEGFPEQRIWDMMIEQGLPEDGKSFLYDGKTGERFDNKVVIGYIYMLKLSHLIADKIHARSIGPYSLVTQQPLGGKAQMGGQRFGEMEVWALEAYGVAHMLQEILTVKSDDVSGRTRIYESIVKGENLLRSGTPESFNVLIKEMQGLGLDVRPMVVDA

SEQ ID NO: 54876 - protein, 129 aa, Chlamydia pneumoniae
MTTESLETLVEKLSNLTVLELSQLKKLLEEKWDVTASAPVVAVAAGGGGEAPVAAEPTEFAVTLEDVPADKKIGVLKVVREVTGLALKEAKEMTEGLPKTVKEKTSKSDAEDTVKKLQDAGAKASFKGL

SEQ ID NO: 54877 - protein, 170 aa, Chlamydia pneumoniae
MKQEKTLLLQEVEDKISAAQGFILLRYLRFTAAYSREFRNSLSGVSAEFEVLKKRIFFKAIEAAGLEVDCSDTDGHLGVVFSCGDPVSAAKQVLDFNKQHKDSLVFLAGRMDNASLSGAEVEAVAKLPSLKELRQQVVGLFAAPMSQVVGIMNSVLSGVISCVDQKAGKN

SEQ ID NO: 54878 - protein, 232 aa, Chlamydia pneumoniae
MTKHGKRIRGILKNYDFSKSYSLREAIDILKQCPPVRFDQTVDVSIKLGIDPKKSDQQIRGAVFLPNGTGKTLRILVFASGNKVKEAVEAGADFMGSDDLVEKIKSGWLEFDVAVATPDMMREVGKLGKVLGPRNLMPTPKTGTVTTDVAKAISELRKGKIEFKADRAGVCNVGVGKLSFESSQIKENIEALSSALIKAKPPAAKGQYLVSFTISSTMGPGISIDTRELMAS

SEQ ID NO: 54879 - protein, 141 aa, Chlamydia pneumoniae
MSVKKVIKIIKLQIPGGKANPAPPIGPALGAAGVNIMGFCKEFNAATQDKPGDLLPVVITVYADKTFTFITKQPPVSSLIKKTLNLESGSKIPNRNKVGKLTQAQVEAIAEQKMKDMDIVLLESAKRMVEGTARSMGIDVE

SEQ ID NO: 54880 - protein, 182 aa, Chlamydia pneumoniae
MYKWYVVQVFTAQEKKVKKALEDFKESSGMTDFIQEIILPIENVMEVKKGEHKVVEKYIWPGYLLVKMHLTDESWLYVKSTAGIVEFLGGGVPVALSEDEVRSILTDIEEKKSGVVQKHQFEVGSRVKINDGVFVNFIGTVSEVFHDKGRLSVMVSIFGRETRVDDLEFWQVEEVAPGQESE

SEQ ID NO: 54881 - protein, 83 aa, Chlamydia pneumoniae
MKQQHNRKALSRKIGTVKKQAKFAGSFLDEIKKIEWVSKHDLKKYIKVVLISIFGFGFAIYFVDLVLRKSITCLDGITTFLFG

SEQ ID NO: 54882 - protein, 394 aa, Chlamydia pneumoniae
MSKETFQRNKPHINIGTIGHVDHGKTTLTAAITRALSGDGLASFRDYSSIDNTPEEKARGITINASHVEYETPNRHYAHVDCPGHADYVKNMITGAAQMDGAILVVSATDGAMPQTKEHILLARQVGVPYIVVFLNKVDMISQEDAELIDLVEMELSELLEEKGYKGCPIIRGSALKALEGDANYIEKVRELMQAVDDNIPTPEREIDKPFLMPIEDVFSISGRGTVVTGRIERGIVKVSDKVQLVGLGETKETIVTGVEMFRKELPEGRAGENVGLLLRGIGKNDVERGMVVCQPNSVKPHTKFKSAVYVLQKEEGGRHKPFFSGYRPQFFFRTTDVTGVVTLPEGTEMVMPGDNVELDVELIGTVALEEGMRFAIREGGRTIGAGTISKINA

SEQ ID NO: 54883 - protein, 73 aa, Chlamydia pneumoniae
MAKKEDTLVLEGKVEELLPGMHFRVILENGMPVTAHLCGKMRMSNIRLLVGDRVTVEMSAYDLTKARVVYRHR

SEQ ID NO: 54884 - protein, 158 aa, Chlamydia pneumoniae
MPSYCQNQQDFSLFSLLSPRLVMFLGKHSRDEILQDLTDLVDAAGLLEDKQAFFDALVRRENIMSTGIGMGVAIPHGKLESCSNFFIAIGIHTQGILWDAIDGALVRLVFLIGGPENAQAEYLKLLSTLTLSLREESRRQQLLQVNTIEEVMNVFVGM

SEQ ID NO: 54885 - protein, 308 aa, Chlamydia pneumoniae
MRLFSYDKPKIKVQKIKADGFSGWLKCNHCHEMIHANELGQNYNCCPKCSYHYRITAIERVKLLADKDSWRPLYTDLKSQDPLEFIDTDTYANRLEKARKNTTESEGVIVGICTIGLHPVALAVMDFNFMAGSMGAVVGEKLTRLIEEAIETRLPVIIVSASGGARMQESVFSLMQMVKTSAALAKLHEAGLPYISVLTNPTSGGVTASFAALGDIIIAEPKALICFAGPRVVAQVIGEDLPEGAQKSEFLLEHGMIDKIVERKELKTTLQTLLDYFLAQEYTGGKSKAPRDLSKRLKEIFLLTDDSE

SEQ ID NO: 54886 - protein, 598 aa, Chlamydia pneumoniae
MKEVEQRIRSLYDAVTAENICRWLSNDCTQQDAKTILGWLDTDPAQLEDLFGATLTFGTGGLRSLMGIGTNRINLFTIRRTTQGLVQVLRAHLPHPGDPMRVVVGCDTRHNSIEFAQETAKVLAGNGCEVFLFQYPEPLALVSFTVRYERAIGGVMITASHNPPNYNGYKVYMASGGQVLPPLDQEIVAACSAVNEILSVPSIDHPNIHLIGKEYEALYRDTLKQLQLYPEANRISGRSLSISYSPLHGTGISLVPHVLKDWGFLSVHLVEKQAIGDGDFPTVQLPNPEDPEALTLGTEQMLANDDDLFIATDPDADRVGVVCLEDGQPYRFNGNQMASLLADHILGAWSKTRHLGEHDKLVKSLVTTEMLSAIAKHYHVDLINVGTGFKYIGEKIESWRNSTNKFVFGAEESYGCLYGTHVEDKDAIIASALIAEAALQQKLQGKTLCDALLSLYETYGYFANKTESVVFSAKTDEQEIRKKLSHLEEISSANFFSGKYQVEKFENYKQGIGFNLLSKDSYALTLPKTSMLCYYFSGGGRVIIRPSGTEPKIKFYFEMSTHYPERVTDKEIQKQREAESFQHLDDFIFDFKEKFSNL

SEQ ID NO: 54887 - protein, 453 aa, Chlamydia pneumoniae
MATKTKTQWTCNQCGATAPKWLGQCPGCHNWNSLVEEYVPQARSGTSSRSSTSAIALSSIELENESRIFIDHAGWDRILGGGVVRGSLTLLGGDPGIGKSTLLLQTAERLASQKYKVLYVCGEESVTQTSLRAKRLNISSPLIYLFPETNLDNIKQQIATLEPDILIIDSIQIIFNPTLNSAPGSVAQVREVTYELMQIAKSAQITTFIIGHVTKSGEIAGPRVLEHLVDTVLYFEGNSHANYRMIRSVKNRFGPTNELLILSMHADGLKEVSNPSGLFLQEKTGPTTGSMIIPIIEGSGALLIELQALVSSSPFANPVRKTAGFDPNRFSLLLAVLEKRAQVKLFTMDVFLSITGGLKIIEPAADLGALLAVASSLYNRLLPNNSIVIGEVGLGGEIRHVAHLERRIKEGKLMGFEGAILPEGQISSLPKEIRENFRLQGVKTIKDAIRLLL

SEQ ID NO: 54888 - protein, 234 aa, Chlamydia pneumoniae
MLSVCYSDPCLSDFCQGKRPLRIASRNSNLAKAQVHECISLLRSWYPKLWFQLSTTETTGDREKKIPLHLVENSYFFTDGVDALVHKGVCDLAIHSAKDLPETPSLPVVAITRCLHPADLLVYADHYVHEPLPLSPRLGSSSLRRSAVLKQLFPQGQILDIRGTIEERLDQLHRGHYDAIVLAKAASLRLHLHHAYSIELPPPYHALQGSLAITAKDHAGKWKQLFTPIHCHSS

SEQ ID NO: 54889 - protein, 449 aa, Chlamydia pneumoniae
MLLLISGALFLTLGIPGLTAGVSFGLGIGLSALGGVLVVSGLLCLLVKREVSKVCPEEIPAVQPEETPEGVPVTPFEKPALDEAQKEQKTQKILDQLPQELDQLDRYIQEVFACLGPLKDLKYEDQGFLQDVKEEFQVFDFVQKDMIAEFVELQQILCQEGRLLEFVINQTRYIGRDLFKREDSLYKLWEWLGYLPSGDVRGERLKKSAREVVDRFMRTTCNIRKIAMTFDRHVYSVAKTAFEKAFGALETCVYESMRESYREAFCEYEKAKLLGDEEKSAHAEQRFQDIKNRWEDVKDAFFWVKEDGKIEIDDAIGNSCKWSERYEEHRITRARWYKVAEHQLFNATMRVKDSLREHNEARVAFEKERSKENQRQVQKKKEKRLRDLKELHDQELPRAQERLRELQALYPEIAVSVVEARREVASDLEKAHESIDKHYQSCVREQELY

SEQ ID NO: 54890 - protein, 442 aa, Chlamydia pneumoniae
MTLQPYQASSRKYRPQIFREILGQSSVVAVLKNALVFNRAAHAYLFSGIRGTGKTTLARILAKALNCVHLSEDGEPCNQCFSCKEIASGSSLDVLEIDGASHRGIEDIRQINETVLFTPVKAKFKIYIIDEVHMLTKEAFNALLKTLEEPPQHVKFFFATTEIHKIPGTILSRCQKMHLQRIPEKTILEKLSLMAQDDHIEASQEALAPIARAAQGSLRDAESLYDYVISLFPKSLSPDTVAQALGFASQDSLRTLDNAILQRDYATALGIVTDFLNSGVAPVTFLHDLTLFYRNLLLTNSTTSKFSSQYKTEQLLEIIDFLGESAKHLQNTIFEQTFLETVIIHIIRIYQRPVLSELISSIKSRQFEGLRNIKEPTLTQQVSAPQPQPTYKEQSFLEKKNQPAAEGKIISVEVKSSASIKSAAVDTLLQFAVVEFSGILRQ

SEQ ID NO: 54891 - protein, 96 aa, Chlamydia pneumoniae
MGSGYAKKKKEAKIMEQQFLEMEASLLEKRYEGQAGNGLVSVVINGKCDLISVKVQPTCLDPEDPEVIEDLFRAAFKLAKEQMDQEMSLMRSTMPF

SEQ ID NO: 54892 - protein, 571 aa, Chlamydia pneumoniae
MDTQSSIGNEEWRIAGTSVVSGMALGKVFFLGTSPLHVRELTLPQEEVEHEIHRYYKALNRSKSDIVALEQEVTGQQGLQEVSSILQAHLEIMKDPLLTEEVVNTIRKDRKNAEYVFSSVMGKIEESLTAVRGMPSVVDRVQDIHDISNRVIGHLCCQHKSSLGESDQNLIIFSEELTPSEVASANSAYIRGFVSLVGAATSHTAIVSRAKSIPYLANISEELWNIAKRYNGKLVLIDGYRGELIFNPKPATLQSCYKKELSVVAHTSQRLVRKSLHPIVSSHAGSDKDVEDLLENFPQTSIGLFRSEFLAVILGRLPTLREQVDLYEKLARFPGDSPSVLRLFDFGEDKPCPGIKNKKERSIRWLLDYSVILEDQLQAIAKASLQGSIKVLIPGVSDVSEIIEVKKKWETIQTRFPKGHKVSWGTMIEFPSAVWMIEEILPECDFLSIGTNDLVQYTLGISRESALPKHLNVTLPPAVIRMIHHVLQAAKQNQVPVSICGEAAGQLSLTPLFIGLGVQELSVAMPVINRLRNHIALLELNSCLEITEALLQAKTCSEVEELLNRNNKITS

SEQ ID NO: 54893 - protein, 108 aa, Chlamydia pneumoniae
MNEPTRTYLESEKDTQDQIEELQATCIVKNAAGIHVRPAGVIVRLFDGEPCDVHFTYAGKTINAKSIMSILMLGAPQGGEILVTIRSKEAHRILQKIQDAFSSGFGEL

SEQ ID NO: 54894 - protein, 678 aa, Chlamydia pneumoniae
MGVVQNQVISSIRDVLKLVWELRFAEHKMLLLSRQSGSGGTFQLSCAGHELAGVLAGKSLIPGKDWSFPYYRDQGFPIGLGCDLSEIFASFLARTTPNHSSARMMPYHYSHKKLRICCQSSVVGTQFLQAAGRAWAVKHSSADEVVYVSGGDGATSQGEFHEMLNFVALHQLPLITVIQNNHWAISVPFEDQCGADLASLGRCHQGLAVYEVDGGNYTSLTETFSHAVDQARQHSVPALILIDVVRLSSHSNSDNQEKYRSALDLKLSMDKDPLILLEKEAINVFGLSPFEIEEIKAEAQEEVRKSCEIAEALPFPSKGSTSHEVFSPYTETLIDYENSESAQNLRNSEPKVMRDAISEALVEEMTRDSGVIVFGEDVAGDKGGVFGVTRNLTEKFGPQRCFNSPLAEATIIGTAIGMALDGIHKPVVEIQFADYIWPGINQLFSEASSIYYRSAGEWEVPLVIRAPSGGYIQGGPYHSQSIEGFLAHCPGIKVAYPSNAADAKALLKAAIRDPNPVVFLEHKALYQRRIFSACPVFSHDYVLPFGKAAIVHPGKDLTIVSWGMPLVLSLEVAQELASRGISIEVIDLRTMVPCDFATVLKSLEKTGRLLVIHEASEFCGFGSELVATMSEQGYAYLDAPIRRLGGLHAPVPYSKVLENEVLPHKESILQAAKSLAEF

SEQ ID NO: 54895 - protein, 58 aa, Chlamydia pneumoniae
MPSVKVRVGEPVDRALRILKKKIDKEGILKAAKSHRFYDKPSVKKRAKSKAAAKYRSR

SEQ ID NO: 54896 - protein, 819 aa, Chlamydia pneumoniae
MDSTTNSDSPILDPNPEDVEKLLDESEEESEDQSTERLLPSELFILPLNKRPFFPGMAAPILIESGPYYEVLKVLAKSSQKYIGLVLTKKENADILKVSFNQLHKTGVAARILRIMPIEGGSAQVLLSIEERIRIIEPIKDKYLKARVSYHADNKELTEELKAYSISIVSVIKDLLKLNPLFKEELQIFLGHSDFTEPGKLADFSVALTTATREELQEVLETTNMHDRIDKALILLKKELDLSRLQSSINQKIEATITKSQKEFFLKEQLKTIKKELGLEKEDRAIDIEKFSERLRKRHVPDYAMEVIQDEIEKLQTLETSSAEYTVCRNYLDWLTIIPWGIQSKEYHDLKKAEIVLNKDHYGLDEIKQRILELISVGKLSKGLKGSIICLVGPPGVGKTSIGRSIAKVLHRKFFRFSVGGMRDEAEIKGHRRTYIGAMPGKMVQALKQSQAMNPVIMIDEVDKIGASYHGDPASALLEVLDPEQNKDFLDHYLDVRVDLSNVLFILTANVLDTIPDPLLDRMEILRLSGYILEEKLQIAKKYLVPKARKEIGLTASEVNFQPEALKYMINNYAREAGVRTLNGNIKKVLRKVALKIVQNQEKPKSKKITFKISSKNLQTYLGKPIFSSDRFYESTPVGVATGLAWTSLGGATLYIESVQVSSLKTDMHLTGQAGEVMKESSQIAWTYLHSALHRYAPGYTFFPKSQVHIHIPEGATPKDGPSAGITMVTSLLSLLLETPVVNNLGMTGEITLTGRVLGVGGIREKLIAARRSRLNILIFPEDNRRDYEELPAYLKTGLKIHFVSHYDDVLKVAFPKLK

SEQ ID NO: 54897 - protein, 530 aa, Chlamydia pneumoniae
MSIVLDKIGKSLGTRILFDDVSVVFNPGNCYGLTGPNGAGKSTLLKIIMGMIEPTRGSISLPKKVGILRQNIDSFHDTTVLDCVIMGNTRLWEALQRRDNLYLQEFTDAIGMELGEIEEIIGEENGYRADSEAEELLTGIGIPNEMFDKKMAMIPIDLQFRVLLCQALFGHPEALLLDEPTNHLDLYSINWLGNFLKDYEGTVIVVSHDRHFLNTITTHIADIDYDTIIIYPGNYDDMVEMKTASREQEKADIKSKEKKISQLKEFVAKFGAGSRASQVQSRLREIKKLQPQELKKSNIQRPYIRFPLSDKSSGKVVLSLEAITKDYGDHQVIHPFSLEIYQGDKLGIIGNNGLGKTTLMKLLAGVEAPSSGSIKLGHQAICSYFPQNHSDVLADCGQETLFEWLRNRKTGINDQEIRSVLGKMLFGGDDAFKQIQALSGGETARLLMAGMMLENHNVLILDEANNHLDLESVSALSWAINDYKGTAIFVSHDRGLIQDCATKLLIFDKDKITFFDGTMVDYTAGHKQLL

SEQ ID NO: 54898 - protein, 523 aa, Chlamydia pneumoniae
MYQENLRLLERLLYNSVQKSYADRLFSYEKTKMVHDTPLIPWEEDKEKCAEAEKAFLEQQKILLDYGKSIFWLNENDEINLNDPWSWGLNTVRTRKVFQEVDDSERWNHKVLIQKLEDDYEKLLEESSKESTEANKKLLSDLVDRLEDAKTKFFLKKQEEVETRVKDLRARYGGTVDPKQDTEAKKKVELEASLETFLDSIESELVQCLEDQDIYWKEQDVKDLARTQELEEQDIEAKREEAAEDLRSLNERLKKSKTMLDRAKWHIENAEDSITWWTSQIEMKDMKARLKILKEDITSVLPEIDEIETCLSLEELPLLTTRELLTKSYLKFKICSETLLKMTSVFENNIYVQEYEVQLQNLGFKLQGISQRFGKKQDDFANLEEQVALQKKRLRELTQNFEIQGFNFMKEDFKAAAKDLYIRSTAEQKMNFDVPCMELFRRYHEEVNKPLLELMYNCADSYRDAKKKLCSLRLDEKELLQKEIKKEEFYQKKQQRHADRSRHTTYQKLRIAEELALELKKKI

SEQ ID NO: 54899 - protein, 488 aa, Chlamydia pneumoniae
MSAVYADWESVIGLEVHVELNTASKLFSSALNRFGDEPNTNISTVCTGLPGSLPVLNQSAVEKAVLFGCAVEGEISLLSRFDRKSYFYPDSPRNFQITQFEHPIIRGGRIKAIVQGEERYFELAQTHIEDDAGMLKHFGEFAGVDYNRAGVPLIEIVSKPCMFCPEDAVAYATSLVSLLDYIGISDCNMEEGSIRFDVNVSVRPKGSPELRNKVEIKNMNSFAFMAQALEAEKQRQIDEYLNQPNKDPKLVIPAATYRWDPEKKKTVLMRLKESAEDYKYFPEPDLPTLQLTESYIERIRKTLPELPYDKYHRYIQEYGLSEDIASILISDKNIATFFEVACKDCKNFRSLSNWVTVEFGGRCKTLGVKLPSSGIFPEGVAQLVNAIDQGVITGKIAKEIADLMMESPGKNPEEILKEKPELLPMSDEGELQKIIAEVVLANPESIVDYKNGKTKALGFLVGQIMKRTAGKAPPKRVNELLLLELDKG

SEQ ID NO: 54900 - protein, 492 aa, Chlamydia pneumoniae
MYRYSALELAKAVTLGELTATGVTQHFFHRIEEAEGQVGAFISLCKEQALEQAELIDKKRSRGEPLGKLAGVPVGIKDNIHVTGLKTTCASRVLENYQPPFDATVVERIKKEDGIILGKLNMDEFAMGSTTLYSAFHPTHNPWDLSRVPGGSSGGSAAAVSARFCPVALGSDTGGSIRQPAAFCGVVGFKPSYGAVSRYGLVAFASSLDQIGPLANTVEDVALMMDVFSGRDPKDATSREFFRDSFMSKLSTEVPKVIGVPRTFLEGLRDDIRENFFSSLAIFEGEGTHLVDVELDILSHAVSIYYILASAEAATNLARFDGVRYGYRSPQAHTISQLYDLSRGEGFGKEVMRRILLGNYVLSAERQNVYYKKATAVRAKIVKAFRTAFEKCEILAMPVCSSPAFEIGEILDPVTLYLQDIYTVAMNLAYLPAIAVPSGFSKEGLPLGLQIIGQQGQDQQVCQVGYSFQEHAQIKQLFSKRYAKSVVLGGQS

SEQ ID NO: 54901 - protein, 101 aa, Chlamydia pneumoniae
MEQFHLDREEILLLAKASALQLSEELIQEYQTSLSAVITSMKEALAIEIDDADSCESLFMHVVNVEDLREDSVTSDFNREEFLRNVPESLGGLVKVPAVIK

SEQ ID NO: 54902 - protein, 143 aa, Chlamydia pneumoniae
MQEHIHKELLHLGEIFRSSRESQSLSLKDVEAATSIRYSCLEAIEQGCLGKLISPVYAQGFIKKYATYLGLDGDSILQEHPYVMKIFKEFSDHNMEMLLDLESMGGRNSPERAIHSWSNLWWAGLIIIGGIMVWWLGSLFSIF

SEQ ID NO: 54903 - protein, 554 aa, Chlamydia pneumoniae
MSSPPQAVASLTERIKTLLESNFCQIIVKGELSNVSLQPSGHLYFGIKDSQAFLNGAFFHFKSKYYDRKPKDGDAVIIHGKLAVYAPRGQYQIVAHALVYAGEGDLLQKFEETKRRLTAEGYFATEKKKPLPFAPQCIGVITSPTGAVIQDILRVLSRRARNYKILVYPVTVQGNSAAHEISKAIEVMNAENLADVLIIARGGGSIEDLWAFNEEILVKAIHASTIPIVSAVGHETDYTLCDFASDVRAPTPSAAAEIVCKSSEEQVQVFEGYLRHLLSHSRQLLTSKKQQLLPWRRFLDRAEFYTTAQQQLDSIEIAIQKGVQGKIHESKQRYDNISRWLQGDLVSRMTCRLQSLKKMLSQALSHKALSLQVRCHQLKKSLTYPRQIQQASQKLSPWRQQLDTLISRRLHYQKEEYFHKHTRLKHAHNVLEQQLRSHVQKLELLGRRLSRGCELNLQNQKIAYANVKETLATILERRYENSVARYSALKEQLHSLNPKNVLKRGYAMLFDFNENSAMISVDSLQENARVRIQLQDGEAILTVTNIEICKLIKG

SEQ ID NO: 54904 - protein, 277 aa, Chlamydia pneumoniae
MTRSSPAQLSRFLSEIQNKPKKSLSQNFLVDQNIVKKIVATSEVIPQDWVLEIGPGFGALTEELIAAGAQVIAIEKDPMFAPSLEELPIRLEIIDACKYPLDQLQEYKTLGKGRVVANLPYHITTPLLTKLFLEAPDFWKTVTVMVQDEVARRIVAQPGGRDYGSLTIFLQFFADIHYAFKVSASCFYPKPQVQSAVIHMKVKETLPLSDEEIPVFFTLTRTAFQQRRKVLANTLKGLYPKEQVEQALKELGLLLNVRPEVLSLNDYLALFHKMQAG

SEQ ID NO: 54905 - protein, 333 aa, Chlamydia pneumoniae
MRIAVLGVTGLVGQKFVALLHKWYRDWVIAEVVASNSKYGQSYGDACIWQEPIGPMPEMVRDLPIRKIEEVQSDIVVSFLPSSAESMEAYCLSQGKVVFSNASTYRMHSSVPIIIPEVNSDHFQLLEEQPYPGKIITSPNCCVSGITLALAPLRKFSLDHVHIVTLQSASGAGYPGVPSLDLLANTVPHIVGEEEKILRETVKILGSSKQPLPCKLSVTVHRVPVAYGHTLSLHVTFSKDVDLDEILYSYQEKNKEFPNTYQLYDNPWSPQARKHLSHDDMRVHLGPITYGGDFRTIKMNVLIHNLVRGAAGTLLASMENYFFDYLKREMCLR

SEQ ID NO: 54906 - protein, 264 aa, Chlamydia pneumoniae
MGSSMHVGVIGCSGRTGKVIVSALEQSSEYTLGPGFSRSSALTLFQVIAHNDVLVDFSHPLLTKEVVAHLLISPKPLIIGTTGFPGKCKEAHDSLEELTHIVPVVVCPNASLGAYIHKRLVMLLSQLCNPQFDIRIRETHHRYKKDSLSGTAQDLLDTIQQVKQEDWGEEYEVGQRDSSKKTIEVQSSRVGDIPGEHEVAFISSGEQILVRHTVFSRNVFGRGILSILDWLKTLNPQPGLYSLGDTLELVLRNEHCLLKKTTDH

SEQ ID NO: 54907 - protein, 232 aa, Chlamydia pneumoniae
MPMNTSHRKTLVFSYLSSTFTLLLVLSNLVLSSKLIPTTFFNFIIPGGLILYPLTFLISDVVNEIFGPKKARVMIFSAFIANLLASSIVQIFMFFPVASPEMQTAWHCLFDLSPLRFLASLLAFIVSQQLDIVLYTFFKNRTPNSSLWLRSNGSTWISQIPDTFIVDTCILYFGMGLSFPQTLNIMFYSYIYKITFCVLTTPLFYLAVNTIRKFLGMPSTKIANTVPLINQP

SEQ ID NO: 54908 - protein, 331 aa, Chlamydia pneumoniae
MREETVSWSLEDIREIYHTPVFELIHKANAILRSNFLHSELQTCYLISIKTGGCVEDCAYCAQSSRYHTHVTPEPMMKIVDVVERAKRAVELGATRVCLGAAWRNAKDDRYFDRVLAMVKSITDLGAEVCCALGMLSEEQAKKLYDAGLYAYNHNLDSSPEFYETIITTRSYEDRLNTLDVVNKSGISTCCGGIVGMGESEEDRIKLLHVLATRDHIPESVPVNLLWPIDGTPLQDQPPISFWEVLRTIATARVVFPRSMVRLAAGRAFLTVEQQTLCFLAGANSIFYGDKLLTVENNDIDEDAEMIKLLGLIPRPSFGIERGNPCYANNS

SEQ ID NO: 54909 - protein, 382 aa, Chlamydia pneumoniae
MLCQQFLIEALARRKSKHTYRSLSLNSHLIDFTSNDYLGFASSPELRKEYITKLHAIESLGATGSRLLTGHSQLCQRIEEQLAAYHNFESCLIFNTGYTANLGLLYALATDQDRILHDLYIHASIYDGIRLSKAQSFPFNHNDLNHLEKRLASSHLGRTFVCVESVYSLHGSVAPLQAISELCERYSAYLIVDEAHAVGVFGDQGEGLVSALGLQDKVLATVYTFGKALGTHGAAIAGSSILKDYLINFCRPFIYTTAQPPHALTAIELAYEHNQRAFNQREHLSALIHHFREKAQNLGLQLMKDNTTTPIQSICVSGSHRARQAALQIQNSGYDVRPIVSPTVKQREELLRICLHAFNTKNEIDHLLHTLEQIFLCNVSSL

SEQ ID NO: 54910 - protein, 423 aa, Chlamydia pneumoniae
MDKQSSGNSGCIWHPFTQSALDSTPIKIVRGEGAYLYAESGTRYLDAISSWWCNLHGHGHPYITKKLCEQAQKLEHVIFANFTHEPALELVSKLAPLLPEGLERFFFSDNGSTSIEIAMKIAVQYYYNQNKAKSHFVGLSNAYHGDTFGAMSIAGTSPTTVPFHDLFLPSSTIAAPYYGKEELAIAQAKTVFSESNIAAFIYEPLLQGAGGMLMYNPEGLKEILKLAKHYGVLCIADEILTGFGRTGPLFASEFTDIPPDIICLSKGLTGGYLPLALTVTTKEIHDAFVSQDRMKALLHGHTFTGNPLGCSAALASLDLTLSPECLQQRQMIERCHQEFQEAHGSLWQRCEVLGTVLALDYPAEATGYFSQYRDHLNRFFLERGVLLRPLGNTLYVLPPYCIQEEDLRIIYSHLQDALCLQPQ

SEQ ID NO: 54911 - protein, 359 aa, Chlamydia pneumoniae
MKNSFGSLFSFTTWGESHGPSIGVVIDGCPAGLELHESDFVPAMKRRRPGNPGTSSRKENDIVQILSGVYKGKTTGTPLSLQILNTDVDSSPYENSERLYRPGHSQYTYEKKFGIVDPNGGGRSSARETACRVAAGVVAEKFLANQNIFTLAYLSSLGSLTLPHYLKISPELIHKIHTSPFYSPLPNEKIQEILTSLHDDSDSLGGVISFITSPIHDFLGEPLFGKVHALLASALMSIPAAKGFEIGKGFASAQMRGSQYTDPFVMEGENITLKSNNCGGTLGGITIGVPIEGRIAFKPTSSIKRPCATVTKTKKETTYRTPQTGRHDPCVAIRAVPVVEAMINLVLADLVLYQRCSKL

SEQ ID NO: 54912 - protein, 477 aa, Chlamydia pneumoniae
MLCATVSGPSFCEAKQQILKSLHLVDIIELRLDLINELDDQELHTLITTAQNPILTFRQHKEMSTALWIQKLYSLAKLEPKWMDIDVSLPKTALQTIRKSHPKIKLILSYHTDKNEDLDAIYNEMLATPAEIYKIVLSPENSSEALNYIKKARLLPKPSTVLCMGTHGLPSRVLSPLISNAMNYAAGISAPQVAPGQPKLEELLSYNYSKLSEKSHIYGLIGDPVDRSISHLSHNFLLSKLSLNATYIKFPVTIGEVVTFFSAIRDLPFSGLSVTMPLKTAIFDHVDALDASAQLCESINTLVFRNQKILGYNTDGEGVAKLLKQKNISVNNKHIAIVGAGGAAKAIAATLAMQGANLHIFNRTLSSAAALATCCKGKAYPLGSLENFKTIDIIINCLPPEVTFPWRFPPIVMDINTKPHPSPYLERAQKHGSLIIHGYEMFIEQALLQFALWFPDFLTPESCDSFRNYVKNFMAKV

SEQ ID NO: 54913 - protein, 485 aa, Chlamydia pneumoniae
MTSRTKSSKNLGTIALAGMVVSSIIGGGIFSLPQNMAATAGAGAVILSWILTGFGMFFIANTFRILSTIRPDLKEGIYMYSREGFGPYIGFTIGWGYWLCQIFGNVGYAVITMDALNYFFPPYFQGGNTLPAILGGSILIWVFNFIVLKGIRQASIINVIGTIFKIIPLIIFIILTAFFFKLAVFKTDFWGHAVTKAQPSLGSVSSQLKGTMLVTLWAFIGIEGAVVMSGRAKNPLSVGQATVLGFLGCLTIYILFSLLPFGSLFQHQLANIPNPSTAGVLDILVGKWGEVLMNVGLIIAVLSSWLSWTIIVAEIPFSAAKNGTFPEIFTIENKEKSPSVSLYITSSVMQLAMLLVYFSSNAWNTMLSITGVMVLPAYLASAAFLFKLSKSKTYPKKGSIKAPLAMITGILGVVYSLWLIYAGGLKYLFMALVLLALGIPFYIDAGKKKKNAKTFFAKKEIVGMTFIGLLALTAIFLFSTGRIKI

SEQ ID NO: 54914 - protein, 526 aa, Chlamydia pneumoniae
MERKRFIDCDSTKILQELALNPLDLTAPGVLSAERIKKFSWLGGGFTFSFATERLDDAILAALISLAEERGLHESMLAMQQGQVVNYIEGFPSEMRPALHTATRAWVTDSSFTGEAEDIAVRSRVEAQRLKDFLTKVRSQFTTIVQIGIGGSELGPKALYRALRAYCPTDKHVHFISNIDPDNGAEVLDTIDCAKALVVVVSKSGTTIETAVNEAFFADYFAKKGLSFKDHFIAVTCEGSPMDDTGKYLEVFHLWESIGGRFSSTSMVGGVVLGFAYGFEVFLQLLQGASAMDQIALQPNARENLPMLSALISIWNRNFLGYPTEAVIPYSSGLEFFPAHLQQCCMESNGKSIVQDGRRVGFSTSPVIWGEPGTNGQHSFFQCLHQGTDIIPVEFIGFEKSQKGEDISFQGTTSSQKLFANMIAQAIALACGSENTNPNKNFDGNRPSSVLVSSQLNPYSLGELLSYYENKIVFQGFCWGINSFDQEGVSLGKALANRVLELLEGADASNFPEAASLLTLFNIKFR

SEQ ID NO: 54915 - protein, 301 aa, Chlamydia pneumoniae
MTMPSTQFHTTILEQFSLFLSVDRGLCQQSIAAYRQDISSFLTISAISSPQDISQNSVYIFAEELYRRKEAETTLARRLIALKVFFLFLKDQQLLPYPPIIEHPKIWKRLPSVLTPQEVDALLAVPLQMEKNPRHLAFRDTAILHTLYSTGVRVSELCDLRLGHVSDDCIRVTGKGSKTRLVPLGSRAREAIDAYLCPFRDQYQKKNPHEDHLFLSTRGHKLERSCVWRRIHNYAKQVTSKPVSPHSLRHAFATHLLDNKADLRVIQEMLGHARIASTEVYTHVAADSLIEKFLAHHPRNL

SEQ ID NO: 54916 - protein, 565 aa, Chlamydia pneumoniae
MKVPWAFKNFIPKLYTSIKEGYSFNTFKKDFQAGITVGILAFPFAIAIAIGVGVSPIQGLLASIIGGLLASAMGGSNVLISGPSSAFISILYCLSAKYGAEALFTVTLLAGVFLIAFGLTGLGTFIKYMPYPVVTGLTTGLAIIIFSSQIKDFLGLQMGANIPADFLPKWIAYWDHLWTWDSKSFAVGLFTLLIMIYFRNYKPRYPGVMIAIVTATTLVWLLKIDIPTIGSRYGTLPTAIPLPKIPQLSITKILQLMPDALTIAVLSGLETLLSAVVADGMTGWRHQSNCQLVAQGVANIGTSLFSGIPVTGSLSRTAASIKSEATTPIAGIVHSIFICFILLLLAPLTVKIPLTCLAAVLILIAWNMSEIHHFIHLFTAPKKDIVVLLTVFILTVMTTITAAVQVGMMLAAFLFMKQMSDLSDVISTAKYFDKDSDFLSKAEVPQNTEIYEINGPFFFGIADRLKNLLNDIEKPPKIFILCMTRVPTIDASAMHALEEFFLECDRQGTLLLLAGVKKTPLADLKRYHLDELIGVDHIFSNIKSALLFAQALTNLESKTSTRHLV

SEQ ID NO: 54917 - protein, 202 aa, Chlamydia pneumoniae
MLILLNLSLLFYVLFDSPGSIPVFVALLKNFSRKKQQRVILRECLFALGALILFVTFGRSFFQFLDISLYAFQIIGGFLLFTVSIKMMLAPMPEKAKDDTSKTEPIFFPLAFPVITGPAVITALLSYMEEGIYSREIIFTAMIIAWAFSLFTLLCSSFFDRLSGNFGLLALERLFGIALLLMSVNLMLKGISIAFNIGFYIG

SEQ ID NO: 54918 - protein, 89 aa, Chlamydia pneumoniae
MSLDKGTKEEITKKFQLHEKDTGSADVQIAILTEHIAELKEHLKRSPKDQNSRLALLKLVGQRRKLLEYLNSTDTERYKNLITRLNLRK

SEQ ID NO: 54919 - protein, 694 aa, Chlamydia pneumoniae
MNFQTISINLTEGKILVFETGKIARQANGAVLVRSGETCVFASACAVDLDDKVDFLPLRVDYQEKFSSTGKTLGGFIKREGRPSEKEILVSRLIDRSLRPSFPYRLMQDVQVLSYVWSYDGQVLPDPLAICAASAALAISDIPQSNIVAGVRIGCIDNQWVINPTKTELASSTLDLVLAGTENAILMIEGHCDFFTEEQVLDAIEFGHKHIVTICKRLQLWQEEVGKSKNLSAVYPLPAEVLTAVKECAQDKFTELFNIKDKKVHAATAHEIEENILEKLQREDDDLFSSFNIKAACKTLKSDTMRALIRDREIRADGRSLTTVRPITIETSYLPRTHGSCLFTRGETQTLAVCTLGSEAMAQRYEDLNGEGLSKFYLQYFFPPFSVGEVGRIGSPGRREIGHGKLAEKALSHALPDSATFPYTIRIESNITESNGSSSMASVCGGCLALMDAGVPISSPIAGIAMGLILDDQGAIILSDISGLEDHLGDMDFKIAGSGKGITAFQMDIKVEGITPAIMKKALSQAKQGCNDILNIMNEALSAPKADLSQYAPRIETMQIKPTKIASVIGPGGKQIRQIIEETGVQIDVNDLGVVSISASSASAINKAKEIIEGLVGEVEVGKTYRGRVTSVVAFGAFVEVLPGKEGLCHISECSRQRIENISDVVKEGDIIDVKLLSINEKGQLKLSHKATLE

SEQ ID NO: 54920 - protein, 910 aa, Chlamydia pneumoniae
MSKDKKMKPEPKKNFPTVFFFLLFGVVFGVVAFQNFLAGKKARVGFSHQIEHLVNLRLIVPEDSHKIALNDNLVSFGGRFRDVQTQEGQLRYHYLELIDQGHRLDLDLQETSKSLTTLGKEVTNSILWFSAISGSPIPEQGYAISYPSEVSGSVLTEPLVVTGPATPQLINLHSLQERYPTLSRSPEALRTYGSDLYELIGKYLSPVLGIGSETLKRELKDLYQQVEVSLTQETDTEAAYTLYGQVLSTLNRISSSLVVSEGGERFSQLRSVRLYREEWNKYHKLVEARDLNQAQLEKLRGELSQTVWYFNNQELSSRSLEKQDPEVFGHWFAGAKEEWTAFKFNHSLSFKAPDQPRNLVLEKTFKSQEPSPHYLGYLFTFLPIILVLLFVYLVFSRQMRGMSGSAMSFGKSPARMLLKGQNKVTFADVAGIEEAKEELIEIVDFLKNPNKFTSLGGRIPKGVLLIGPPGTGKTLIAKAVSGEADRPFFSIAGSDFVEMFVGVGASRIRDMFEQAKRNAPCIIFIDEIDAVGRHRGAGIGGGHDEREQTLNQLLVEMDGFGTNEGVILMAATNRPDVLDKALLRPGRFDRRVVMNLPDIKGRFEILMVHAKRIKLDPTVDLMAVARSTPGASGADLENLLNEAALLAARKDRTAVTAVDVAEARDKVLYGKERRSLEMDAEERKTTAYHESGHAVVGLCVQHGDPVDKVTIIPRGLSLGATHFLPEKNKLSYWKKELYDQLAVLMGGRAAEEIFLGDISSGAQQDISQATKLVRSMVCEWGMSPQLGNVTYDERSDGLTGYGGYHEKSYSEETAKTIDTELRMLLDAAYQRALDIINEHKAEIELMTQMLIEFETLDSKDVKEIMDHTWDPEKKRARLKEEGMLFKKSSDDLPPPPPKEDTLPGLGFNAT

SEQ ID NO: 54921 - protein, 319 aa, Chlamydia pneumoniae
MVLSSDLLRDDKQLDLFFASLDVKKRYLLALSGGSDSLFLFYLLKERGVSFTAVHIDHGWRSTSAQEAKELEELCAREGVPFVLYTLTAEEQGDKDLENQARKKRYAFLYESYRQLDAGGIFLAHHANDQAETVLKRLLESAHLTNLKAMAERSYVEDVLLLRPLLHIPKSSLKEALDARGISYLQDPSNEDERYLRARMRKKLFPWLEEVFGKNITFPLLTLGEESAELSEYLEKQAQPFFSAATHQDSQGELPCPDCLIQQAFLCKWVMKKFFNNAGIAVSRHFLQMVYDHLSRSSCATLRMRNKIVIIKPGVVVID

SEQ ID NO: 54922 - protein, 339 aa, Chlamydia pneumoniae
MEMKEEIEAVKQQFHSELDQVNSSQALADLKVRYLGKKGIFRSFSEKLKQCTDKAKLGSLINDFKTYVEDLLQEKSLVLLASEQAEAFSKEKIDSSLPGDSQPSGGRHILKSILDDVVDIFVHLGFCVREAPNIESEANNFTLLNFTEDHPARQMHDTFYLNATTVLRTHTSNVQARELKKQQPPIKVVAPGLCFRNEDISARSHVLFHQVEAFYVDHNVTFSDLTAILSAFYHSFFQRKTELRFRHSYFPFVEPGIEVDVSCECCGKGCALCKHTGWLEVAGAGMIHPQVLRNGNVDPEIYSGYAVGMGIERLAMLKYGVSDIRLFSENDLRFLQQFS

SEQ ID NO: 54923 - protein, 121 aa, Chlamydia pneumoniae
MVRATGSVASRRRRKRILKQAKGFWGDRKGHIRQSRSSVMRAMAFNYMHRKDRKGDFRSLWIARLNVASRIHSLSYSRLINGLKCANISLNRKMLSEIAIHNPEGFAEIANQAKKALEATV

SEQ ID NO: 54924 - protein, 64 aa, Chlamydia pneumoniae
MPKMKTNKSVSARFKLTASGQLKRTRPGKRHKLSKKSSQEKRNLSKQPLVDKGQVGMYKRMMLV

SEQ ID NO: 54925 - protein, 186 aa, Chlamydia pneumoniae
MALNFKINRQIRAPKVRLIGSAGEQLGILAIKDALDLAREAGLDLVEVASNSEPPVCKIMDYGKYRYGLTKKEKDSKKAQHQVRIKEVKLKPNIDENDFSTKLKQARTFVEKGNKVKITCMFRGRELAYPEHGFKVVQKMSQGLEDIGFVEAEPKLAGRSLICVVAPGTVKTKKKQEKSHAQDENQ

SEQ ID NO: 54926 - protein, 163 aa, Chlamydia pneumoniae
MLVMATLSPEKFSGSPISISKEFPQQKMREIILQMLYALDMAPSAEDSLVPLLMSQTAVSQKHVLVALNQTKSILEKSQELDLIIGNALKNKSFDSLDLVEKNVLRLTLFEHFYSPPINKAILIAEAIRLVKKFSYSEACPFIQAILNDIFTDSSLNENSLSI

SEQ ID NO: 54927 - protein, 304 aa, Chlamydia pneumoniae
MKEAAPMHFPFPVRRSVWLNRYSTFRIGGPANYFKAIHTIEEAREVIRFLHSINYPFLIIGKGSNCLFDDRGFDGFVLYNAIYGKQFLEDARIKAYSGLSFAALGKATAYNGYSGLEFAAGIPGSVGGAIFMNAGTNESDISSVVRNVETINSEGELCSYSVEELELSYRSSRFHRQQEFILSATLQLSKKQVSADHSKSILQHRLMTQPYTQPSAGCIFRNPEGTSAGKLIDAAGLKGLAIGGAQISPLHANFIINTGKATSDEVKQLIAIIQSTLKTQGIDLEHEIRIIPYQPKIHSPVSEK

SEQ ID NO: 54928 - protein, 346 aa, Chlamydia pneumoniae
MEADILDGKLKRVEVSKKGLVNCNQVDVNQLVPIKYKWAWEHYLNGCANNWLPTEVPMARDIELWKSDELSEDERRVILLNLGFFSTAESLVGNNIVLAIFKHITNPEARQYLLRQAFEEAVHTHTFLYICESLGLDEGEVFNAYNERASIRAKDDFQMTLTVDVLDPNFSVQSSEGLGQFIKNLVGYYIIMEGIFFYSGFVMILSFHRQNKMTGIGEQYQYILRDETIHLNFGIDLINGIKEENPEVWTTELQEEIVALIEKAVELEIEYAKDCLPRGILGLRSSMFIDYVRHIADRRLERIGLKPIYHSRNPFPWMSETMDLNKEKNFFETRVTEYQTAGNLSW

SEQ ID NO: 54929 - protein, 1044 aa, Chlamydia pneumoniae
MVEVEEKHYTIVKRNGMFVPFNQDRIFQALEAAFRDTRSLETSSPLPKDLEESIAQITHKVVKEVLAKISEGQVVTVERIQDLVESQLYISGLQDVARDYIVYRDQRKAERGNSSSIIAIIRRDGGSAKFNPMKISAALEKAFRATLQINGMTPPATLSEINDLTLRIVEDVLSLHGEEAINLEEIQDIVEKQLMVAGYYDVAKNYILYREARARARANKDQDGQEEFVPQEETYVVQKEDGTTYLLRKTDLEKRFSWACKRFPKTTDSQLLADMAFMNLYSGIKEDEVTTACIMAARANIEREPDYAFIAAELLTSSLYEETLGCSSQDPNLSEIHKKHFKEYILNGEEYRLNPQLKDYDLDALSEVLDLSRDQQFSYMGVQNLYDRYFNLHEGRRLETAQIFWMRVSMGLALNEGEQKNFWAITFYNLLSTFRYTPATPTLFNSGMRHSQLSSCYLSTVKDDLSHIYKVISDNALLSKWAGGIGNDWTDVRATGAVIKGTNGKSQGVIPFIKVANDTAIAVNQGGKRKGAMCVYLENWHLDYEDFLELRKNTGDERRRTHDINTASWIPDLFFKRLEKKGMWTLFSPDDVPGLHEAYGLEFEKLYEEYERKVESGEIRLYKKVEAEVLWRKMLSMLYETGHPWITFKDPSNIRSNQDHVGVVRCSNLCTEILLNCSESETAVCNLGSINLVEHIRNDKLDEEKLKETISIAIRILDNVIDLNFYPTPEAKQANLTHRAVGLGVMGFQDVLYELNISYASQEAVEFSDECSEIIAYYAILASSLLAKERGTYASYSGSKWDRGYLPLDTIELLKETRGEHNVLVDTSSKKDWTPVRDTIQKYGMRNSQVMAIAPTATISNIIGVTQSIEPMYKHLFVKSNLSGEFTIPNTYLIKKLKELGLWDAEMLDDLKYFDGSLLEIERIPNHLKKLFLTAFEIEPEWIIECTSRRQKWIDMGVSLNLYLAEPDGKKLSNMYLTAWKKGLKTTYYLRSQAATSVEKSFIDINKRGIQPRWMKNKSASTSIVVERKTTPVCSMEEGCESCQ

SEQ ID NO: 54930 - protein, 488 aa, Chlamydia pneumoniae
  MISC_FEATURE (17)..(17): X=any amino acid
MITKQLRSWLAVLVGSXLLALPLSGQAVGKKESRVSELPQDVLLKEISGGFSKVATKATPAVVYIESFPKSQAVTHPSPGRRGPYENPFDYFNDEFFNRFFGLPSQREKPQSKEAVRGTGFLVSPDGYIVTNNHVVEDTGKIHVTLHDGQKYPATVIGLDPKTDLAVIKIKSQNLPYLSFGNSDHLKVGDWAIAIGNPFGLQATVTVGVISAKGRNQLHIADFEDFIQTDAAINPGNSGGPLLNIDGQVIGVNTAIVSGSGGYIGIGFAIPSLMANRIIDQLIRDGQVTRGFLGVTLQPIDAELAACYKLEKVYGALVTDVVKGSPADKAGLKQEDVIIAYNGKEVDSLSMFRNAVSLMNPDTRIVLKVVREGKVIEIPVTVSQAPKEDGMSALQRVGIRVQNLTPETAKKLGIAPETKGILIISVEPGSVAASSGIAPGQLILAVNRQKVSSIEDLNRTLKDSNNENILLMVSQGDVIRFIALKPEE

SEQ ID NO: 54931 - protein, 293 aa, Chlamydia pneumoniae
MFHSLSKNTPIITQGITGKAGSFHTEQCLAYGTNFVGGVTPGKGGTLWLDLPVYDSVLEAKQATGCRATMIFVPPPYAAEAILEAEEAGIELIVCITEGIPVRDMLEVARVMDNSTSQLIGPNCPGIIKPGECKIGIMPGYIHLPGNIGVVSRSGTLTYEAVWQLTQLKIGQSICVGIGGDPLNGTSFIDVLQALEEDPYTELILMIGEIGGSAEEEAAAWIQAHCTKPVVAFIAGVTAPKGKRMGHAGAIISGNSGDAKSKIQVLRESGVTVVESPAHIGKTVDAVLRAKEL

SEQ ID NO: 54932 - protein, 290 aa, Chlamydia pneumoniae
MFKFFRNKLQSLFKKNISLDLIEDAESLFYEADFGTELTEELCARLRRTKKADASTIKDLITVLLRESLEGLPSQASQSSQTRPIVSLLLGTNGSGKTTTAAKLAHYYKERSESVMLVATDTFRAAGMDQARLWANELGCGFVSGQPGGDAAAIAFDGIQSAIARGYSRVIIDTSGRLHVHGNLMKELSKIVSVCGKALEGAPHEIFMTVDSTLGNNAIEQVRVFHDVVPLSGLIFTKVDGSAKGGTLFQIAKRLKIPTKFIGYGESLKDLNEFDLDLFLNKLFPEVEKI

SEQ ID NO: 54933 - protein, 609 aa, Chlamydia pneumoniae
MCGIFGYLGNQDGVSIVLEGLAKLEYRGYDSAGLAAVVEQELFIRKTVGRVQELSNLFQEREIPTASVIGHTRWATHGVPTEINAHPHVDEGRSCAVVHNGIIENFKELRRELTAQGISFASDTDSEIIVQLFSLYYQESQDLVFSFCQTLAQLRGSVACALIHKDHPHTILCASQESPLILGLGKEETFIASDSRAFFKYTRHSQALASGEFAIVSQGKEPEVYNLELKKIHKDVRQITCSEDASDKSGYGYYMLKEIYDQPEVLEGLIQKHMDEEGHILSEFLSDVPIKSFKEITIVACGSSYHAGYLAKYIIESLVSIPVHIEVASEFRYRRPYIGKDTLGILISQSGETADTLAALKELRRRNIAYLLGICNVPESAIALGVDHCLFLEAGVEIGVATTKAFTSQLLLLVFLGLKLANVHGALTHAEQCSFGQGLQSLPDLCQKLLANESLHSWAQPYSYEDKFLFLGRRLMYPVVMEAALKLKEIAYIEANAYPGGEMKHGPIALISKGTPVIAFCGDDIVYEKMIGNMMEVKARHAHVIAIAPESREDIAAVSDQQIFVPDCHFLAAPVLYTIVGQVMAYAMALAKGMEIDCPRNLAKSVTVE

SEQ ID NO: 54934 - protein, 458 aa, Chlamydia pneumoniae
MQQSVRKLFGTDGVRGRANFEPMTVETTVLLGKAVARVLREGRSGKHRVVVGKDTRLSGYMFENALIAGLNSMGIETLVLGPIPTPGVAFITRAYRADAGIMISASHNPYRDNGIKIFSLEGFKISDVLEQRIETMVSEADFGPLPEDHAVGKNKRVIDAMGRYVEFVKATFPKGRTLKGLKIVLDCAHGASYKVAPSVFEELDAEVICYGCEPTGININEHCGALFPQVIQKAVIEHQAHLGIALDGDGDRIIMVDEKGHIVDGDMILSICAGDLKKRSALPHNRVVATIMTNFGVLKYLEGLGLQVFTSPVGDRHVLHAMLEHEVTLGGEQSGHMIFLDYNTTGDGIVSALQVLRIMIESESMLSDLTAPIVKSPQTLINVAVREKIPLETIPLIERTLRDVQDALGPSGRILLRYSGTENICRVMVEGHKKHQVDCLAKALADVIDAELGTGSRE

SEQ ID NO: 54935 - protein, 604 aa, Chlamydia pneumoniae
MIPSGLVYLLYPLGFLASLFFGSAFSIQWWLSKKRKEVYAPRSFWILSSIGATLMIVHGTIQSQFPVTVLHVINLIIYLRNLNITSSRPISFRATLVLMALSVVFVTLPFLYVNMEWMASPNIFHLPLPPAQLSWHLIGCLGLAIFSGRFLIQWFYIESNNTKDFPLLFWKIGLLGGLLALVYFIRIGDPINILCYGCGLFPSIANLRLFYKEQRSTPYLDTHCFLSAGEASGDILGGKLIQSIKSLYPNIRFWGVGGPAMRQEGLQPILNMEEFQVSGFAEVLGSLFRLYRNYRKILKTILKHKPATLIFIDFPDFHLLLIKKLRKHGYRGKIIHYVCPSIWAWRPKRKRILEQHLDMLLLILPFEEGLFKNTSLETVYLGHPLVEEISDYKEQASWKEKFLNSDRPIVAAFPGSRRGDISRNLRIQVQAFLNSSLSQTHQFVVSSSSAKYDEIIEDTLKAEGCQHSQIIPMNFRYELMRSCDCALAKCGTIVLETALNQTPTIVMCRLRPFDTFLAKYIFKILLPAYSLPNIIMNSVIFPEFIGGKKDFHPEEIATALDLLNQHGSKEKQKEDCRKLCKVMTTGQIASEEFLKRIFDTLPAV

SEQ ID NO: 54936 - protein, 942 aa, Chlamydia pneumoniae
MFWKLLCPILICTSLSITSCEQQFKVVPNQCPLQVSTPAAADQKIEKIICSNGLPLLIISDPNLPTSGAALLVKTGNNADPEEYPGMAHFTEHCVFLGNEKYPEVSGFPGFLSENNGVHNAFTYPNKTVFVFSVEHSAFSDALDQFVHLFINPKFRQEDLDREKYAVHQEFAAHPLSDGRRVHRIQQLVAPQGHPCARFGCGNASTLTPVTTEKMAEWFKLHYSPENMCAIAYTSAPLSKAKKQFSKIFSQIPRSKNYERQEPFLPSGDTSSLKNLYINQAIQPTSNLEIYWHIYESSHPIPLGCYKALAEVLRNESKNSLVSLLKNEQLITDLDVEFFRSSLNTGEFYISYELTEKGDKHYSQVIDSTFQYLRYIQEHGIPNYTLEEISTINALNYCYSSKSPLFDLLCKQIVSLGNEDLSTYPYHSLVYPKYSSEDESALLNLVSDPEQARFVLSSKNSEHWEEATQLHDPIFDMTYYVKALDGVQDYGKVQSLKPIALPKPNLFIPKEVTLPGVHLLKKQEFPFAPALSYQDDKLTLYHCEDHYYTAPKLSSQIRIRSPQISRSSPQFLVATELYCLAVNDQLLREYYPATQAGLSFTSALGGDGIDLRVSGYTTTVPALLNSILTSLPNLEISYETFLVYKKQLLELYQGALLNCPVRSGLDELASQVMKETYSNTTKLSALEKLSFSEFQAFASNLFNSVHLEVMVLGNLSEQQKKDYLEMLQVFTASRSSHATKPFYYELQSQEISEIHHDYPLTANGMLLLLQDKSSPSIQGKVCAEMLFEWLHHITFEELRTQQQLGYMVGARYREFASRPFGFLYIRSDAYSPEELLAKTSLFLNKVSASPEKFGISQEKFANIRKAYINKILEPEHSLDMMNSALFSLAFERPFVEFSTPDLKIAIAETLTYEEFLKYCQCFLSNELGTQTSVYIRGTQKTS

SEQ ID NO: 54937 - protein, 169 aa, Chlamydia pneumoniae
MKQQLLLLEDVDGLGRSGDLITARPGYVRNYLIPKKKAVIAGAGTLRLQAKLKEQRLIQAAADKADSERIAQALKDIVLEFQVRVDPDNNMYGSVTIADIIAEAAKKNIFLVRKNFPHAHYAIKNLGKKNIPLKLKEEVTATLLVEVTSDNEYVTVLAQGKQTEENQEG

SEQ ID NO: 54938 - protein, 82 aa, Chlamydia pneumoniae
MNKPVHNNEHRRKRFNKKCPFVSAGWKTIDYKDVETLKKFITERGKVLPRRITGVSSRFQGVLSQAIKRARHLGLLPFVGED

SEQ ID NO: 54939 - protein, 112 aa, Chlamydia pneumoniae
MGKKENQLYEGAYVFSVTLSEEARRKALDKVISGITNYGGEIHKIHDQGRKKLAYTIRGAREGYYYFIYFSVSPGAITELWKEYHLNEDLLRFMTLRADSVKEVLEFASLPE

SEQ ID NO: 54940 - protein, 185 aa, Chlamydia pneumoniae
MELVVTSRETGKKSFLKKIRQQGGIPAVVYSAGKSLANITVDALVFKKFLSNLESGALSSTVFSLSYEGRIIKALVKDIQYQITTYDVIHLDFEELVEDRPVKLNIPIRCINAVDCIGVKLGGSLRQVIRAVRVVCKPKDIVPFLELDVRSVGLSQTRKLSDIKIPAGIETITPLKEVAITVSRR

SEQ ID NO: 54941 - protein, 476 aa, Chlamydia pneumoniae
MRIVQVAVEFTPIVKVGGLGDAVASLSKELAKQNDVEVLLPHYPLISKFSSSQVLSERSFYYEFLGKQQASAISYSYEGLTLTIITLDSQIELFSTTSVYSENNVVRFSAFAAAAAAYLQEADPADIVHLHDWHVGLLAGLLKNPLNPVHSKIVFTIHNFGYRGYCSTQLLAASQIDDFHLSHYQLFRDPQTSVLMKGALYCSDYITTVSLTYVQEIINDYSDYELHDAILARNSVFSGIINGIDEDVWNPKTDPALAVQYDASLLSEPDVLFTKKEENRAVLYEKLGISSDYFPLICVISRIVEEKGPEFMKEIILHAMEHSYAFILIGTSQNEVLLNEFRNLQDCLASSPNIRLILDFNDPLARLTYAAADMICIPSHREACGLTQLIAMRYGTVPLVRKTGGLADTVIPGVNGFTFFDTNNFNEFRAMLSNAVTTYRQEPDVWLNLIESGMLRASGLDAMAKHYVNLYQSLLS

SEQ ID NO: 54942 - protein, 206 aa, Chlamydia pneumoniae
MGLPNYITFSRLFITPIFMILYLKGKWFGITPVVLPYVLLALLAISELTDAIDGYVARKFSQVTDLGKLLDPMADSIYRISIYLTFTQPPVNLPLLLVFIFLARDSVISTLRTVCAFRGRVVAARASGKLKAILQGVSFFLILLVMIPHSLGLLSQNGLEIFASVTVSIIAVYSIASGIEYFWMNKNFLSQRAKTKDSEKNHESKD

SEQ ID NO: 54943 - protein, 1010 aa, Chlamydia pneumoniae
MSEHPLTLQSMIATILRFWSEQGCVIHQGYDLEVGAGTFNPATFLRALGPEPYKAAYVEPSRRPQDGRYGVHPNRLQNYHQLQVILKPVPENFLSLYTESLRAIGLDLRDHDIRFIHDDWENPTIGAWGLGWEVWLNGMEITQLTYFQAIGSKPLDTISGEITYGIERIAMYLQKKTSIYDVLWNDTLTYGQITQASEKAWSEYNFDYANTEMWFKHFEDFAEEALRTLKNGLSVPAYDFVIKASHAFNILDARGTISVTERTRYIARIRQLTRLVADSYVEWRASLNYPLLSLSSTSEPKETSESVVPMISSTEDLLLEIGSEELPATFVPIGIQQLESLARQVLTDHNIVYEGLEVLGSPRRLALLVKNVAPEVVQKAFEKKGPMLTSLFSPDGDVSPQGQQFFASQGVDISHYQDLSRHASLAIRTVNGSEYLFLLHPEIRLRTADILMQELPLLIQRMKFPKKMVWDNSGVEYARPIRWLVALYGEHILPITLGTIIASRNSFGHRQLDPRKISISSPQDYVETLRQACVVVSQKERRMIIEQGLRAHSSDTISAIPLPRLIEEATFLSEHPFVSCGQFSEQFCALPKELLIAEMVNHQKYFPTHETSSGAISNFFIVVCDNSPNDTIIEGNEKALTPRLTDGEFLFKQDLQTPLTTFIEKLKSVTYFEALGSLYDKVERLKAHQRVFSTFSSLAASEDLDIAIQYCKADLVSAVVNEFPELQGIMGEYYLKHANLPTASAVAVGEHLRHITMGQKLSTIGTLLSLLDRLDNLLACFILGLKPTSSHDPYALRRQSLEVLTLVSASRLPIDLASLLDRLADHFPSTIEEKVWDKSKTIHEILEFIWGRLKTFMGSLEFRKDEIAAVLIDSATKNPIEILDTAEALQLLKEEHTEKLAVITTTHNRLKKILSSLKLSMTSSPIEVLGDRESNFKQVLDAFPGFPKETSAHAFLEYFLSLADLSNDIQDFLNTVHIANDDGAIRNLRISLLLTAMDKFSLCHWESVAV

SEQ ID NO: 54944 - protein, 594 aa, Chlamydia pneumoniae
MRTAMYTEESLDNLRHSIDIVDVLSEHIHLKRSGATYKACCPFHTEKTPSFIVNPAGAHYHCFGCGAHGDAIGFLMQHLGYSFTEAILVLSKKFQVDLVLQPKDSGYTPPQGLKEELRHINSEAETFFRYCLYHLPEARHALQYLYHRGFSPDTIDRFHLGYGPEQSLFLQAMEERKISQEQLHTAGFFGNKWFLFARRIIFPVHDALGHTIGFSARKFLENSQGGKYVNTPETPIFKKSRILFGLNFSRRRIAKEKKVILVEGQADCLQMIDSGFNCTVAAQGTAFTEEHVKELSKLGVLKVFLLFDSDEAGNKAALRVGDLCQTAQMSVFVCKLPQGHDPDSFLMQRGSSGLIALLEQSQDYLTFLISEKMSSYPKFGPREKALLVEEAIRQIKHWGSPILVYEHLKQLASLMMVPEDMVLSLANPQVTAEPQNIPIKQKVPKIHPHIVMETDILRCMLFCGSNTKILYTAQFYFVPEDFKHPECRKLFAFMISYYEKYRKNVPFDEACQVLSDSQILQLLTKRRLNTEALDTIFVQSLQKMADRRWREQCKPLSLNQNIQDKKLEILEDYVQLRKDRTIITLLDPESELIP

SEQ ID NO: 54945 - protein, 828 aa, Chlamydia pneumoniae
MTEKKPTPMMEQWHQCKEKAGDSVLLFRMGDFYEAFYDDAVLLSQHLELTLTQRQGIPMSGIPVSTVDTYVDRLIGKGFKVAVAEQFGEPAKEKESKKIGPMARDIQRFVTPGTLLSSTLLQEKFNNYIVAINRIGSLFGFACLDLSTGSFFIEECENTKELVDEICRLAPSEVLSCNKFYNKETAIVMQLQQHLKLTLSTYADWAFEHKFASQKLTTHFQVASLDGFGLKGLVPAINAAGGLLSYIQDKLLLPTKHIAIPQTRGKQQKLLIDTASQVNLELLAPLNDPQGKNSLLRIMDHTSTPMGGRLLRQILISPFYNPKEILVRQDAVEFFLRQVTLRKNIKTYLCQVRDIERLMTKVTTGLAGPRDIGTLRDSFSAGAQIYEQLASATLPEFFIDKCSLDTKLASLIALLSKSLNGDLPLRVSDGNIFVDEFHNDLKRLRHNQEHSQEWIWEYQERIRKETGIKKLKICFAQALGYYIEVSSEFAPQLPKDFIRRQSRLHAERFTTIELQQFQDDMSNISEKLQTLETQFFKDLCSHILQLRTEILALSQSLADLDYIISLADLAHAQGYCRPRVDMSDTLCIYRGCHPVAKTLVDTGKFIPNDTEMRGSQTRMILLTGPNMAGKSTYIRQIALLVIMAQMGSYIPAKSAHIGVIDKIFTRIGAGDNLSKGMSTFMVEMAETANILHNATDRSLVILDEVGRGTSTYDGLAIAQAVVEYLLFTDKKKAKTLFATHYKELTTLEDHCPHVENFHAGVKDKAGQPVFLYEILKGHSQKSFGIHVARLAGFPLCVVSRAQQILRQLEGPESITRPAQDKMQQLTLF

SEQ ID NO: 54946 - protein, 101 aa, Chlamydia pneumoniae
MAKKSSVAREAKRRRLVEANFKKRSDLRKIVKSLSVSEEEKENARISLNKMKRDTSPTRLHNRCLLTGRPRGYLRKFAISRICFRQMASMGEIPGVIKASW

SEQ ID NO: 54947 - protein, 45 aa, Chlamydia pneumoniae
MKVSSSVKADPSKGDKLVRRKGRLYVINKKDPNRKQRQAGPARKK

SEQ ID NO: 54948 - protein, 45 aa, Chlamydia pneumoniae
MKRTYQPSKRKRRNSVGFRTRMATRNGRKLLNRRRRHGRHSLVDL

SEQ ID NO: 54949 - protein, 139 aa, Chlamydia pneumoniae
MHPLTLPKQSRVLKRKQFLYITRSGFCCRGSQATFYVVPSRHPGTCRMGITVSKKFGKAHERNSFKRVVREVFRHVRHQLPNCQIVVFPKGHKQRPVFSKLLQDFINQIPEGLHRLGKTKATTGGECTPKSEKCVTAPR

SEQ ID NO: 54950 - protein, 474 aa, Chlamydia pneumoniae
MAFSHIEGLYFYNTASQKKELFFPNHTPVRLYTCGPTVYDYAHIGNFRTYVFEDILKRTLVFFGYSVTHVMNITDVEDKTIAGASKKNIPLQEYTQPYTEAFFEDLDTLNIARADFYPHATHYIPQMIQAITKLLEQGIAYIGQDASVYFSLNRFPNYGKLSHLDLSSLRCCSRISADEYDKENPSDFVLWKAYNPERDGVIYWESPFGKGRPGWHLECSIMAMELLGDSLDIHAGGVDNIFPHHENEIAQSEALSGKPFARYWLHSEHLLIDGKKMSKSLGNFLTLRDLLHQEFTGQEVRYMLLQSHYRTQLNFTEEALLACRHALRRLKDFVSRLEGVDLPGESPLPRTLDSSSQFIEAFSRALANDLNVSTGFASLFDFVHEINTLIDQGHFSKADSLYILDTLKKVDTVLGVLPLTTSVCIPETVMQLVAEREEARKTKNWAMADTLRDEILAAGFLVEDSKSGPKVKPL

SEQ ID NO: 54951 - protein, 527 aa, Chlamydia pneumoniae
MTARAEYLDHEDFLYRSHKLQELSELGVVLYPYEFPGVFSCEDIKKTFASQELGNSEAAMSRSTPRVRFAGRLVLFRAMGKNAFGQILDHNQTIQVMFNREFTSVHGLSEDAEITPIKFIEKKLDLGDILGIDGYLFFTHSGELTVLVETVTLLCKSLLSLPDKHAGLSDKEVRYRKRWLDLISSREVSDTFVKRSYIIKLIRNYMDAHGFLEVETPILQNIYGGAEAKPFTTTMEALHSEMFLRISLEIALKKILVGGAPRIYELGKVFRNEGIDRTHNPEFTMIEAYAAYMDYKEVMVFVENLVEHLVRAVNHDNTSLVYSYWKHGPQEVDFKAPWIRMTMKESIATYAGIDVDVHSDQKLKEILKKKTTFPETAFATASRGMLIAALFDELVSDNLIAPHHITDHPVETTPLCKTLRSGDTAFVERFESFCLGKELCNAYSELNDPIRQRELLEQQHTKKELLPDSECHPIDEEFLEALCQGMPPAGGFGIGVDRLVMILTNAASIRDVLYFPVMRRFDAEKTN

SEQ ID NO: 54952 - protein, 351 aa, Chlamydia pneumoniae
MKYSLNFKEIKIDDYERVIEVTCSKVRLHAIIAIHQTAVGPALGGVRASLYSSFEDACTDALRLARGMTYKAIISNTGTGGGKSVIILPQDAPSLTEDMLRAFGQAVNALEGTYICAEDLGVSINDISIVAEETPYVCGIADVSGDPSIYTAHGGFLCIKETAKYLWGSSSLRGKKIAIQGIGSVGRRLLQSLFFEGAELYVADVLERAVQDAARLYGATIVPTEEIHALECDIFSPCARGNVIRKDNLADLNCKAIVGVANNQLEDSSAGMMLHERGILYGPDYLVNAGGLLNVAAAIEGRVYAPKEVLLKVEELPIVLSKLYNQSKTTGKDLVALSDSFVEDKLLAYTS

SEQ ID NO: 54953 - protein, 416 aa, Chlamydia pneumoniae
MSKKRVVVTGFGVVSCLGNEVDTFYDNLLAGVSGVRPITSFPCEDYATRFAGWIPEFNPEPYVDKKQARRVDPFITYAMVAAKKAIAMSRWDKDHLPSDPVRCGVIVGSGMGGLSTLDQGMERLLVIHKKLSPFFIPYIITNMAPALIAMDFGLMGPNYSISTACATGNYCIDAAYQHLVSGRADMIICGGTEAAVNRIGLEGFIANRALSERNDAPDQASRPWDRDRDGFVLGEGAGILVLETLESALRRDAPIFAEMLGSYVTCDAFHITAPRDDGEGITACVLGALNSAGIPKERVNYVNAHGTSTPLGDLSEVLAVKKAFGSHVRNLRMNSTKSLIGHCLGAAGGVEAVVAIQAILTGKLHPTINLDNPIAEIEDFDVVANKAQDWDIDVAMSNSFGFGGHNSTILFSRYVP

SEQ ID NO: 54954 - protein, 353 aa, Chlamydia pneumoniae
MNLCKRISFEEGLELFVSSPIERLQERADAIRKERYPSNEVTYVLDANPNYTNICKIDCTFCAFYRKPKSPDAYLLSFDEVRSLLQRYVSSGVKTVLLQGGVHPGLGIDYLEELVRITVQEFPSIHPHFFSAVEIEHACRVSGISIEQGLQRLWDAGQRTIPGGGAEILSERVRKIISPKKMQPGGWINLHKLAHLMGFRTTATMMFGHVENPEDILIHLQTLRDAQDSCPGFYSFIPWSYKPGNTALRRNVPQQASIETYYRILALGRIFLDNFDHVAASWFGEGKSLGAKALHYGADDFGGVILDESVHKATGWSIQSSEEEICNIIRSEGFIPVERNTFYQHISCTVSSL

SEQ ID NO: 54955 - protein, 809 aa, Chlamydia pneumoniae
MKGTPQYHFIGIGGIGMSALAHILLDRGYEVSGSDLYESYTIESLKAKGARCFSGHDSSHVPHDAVVVYSSSIAPDNVEYLTAIQRSSRLLHRAELLSQLMEGYESILVSGSHGKTGTSSLIRAIFQEAQKDPSYAIGGLAANCLNGYSGSSKIFVAEADESDGSLKHYTPRAVVITNIDNEHLNNYAGNLDNLVQVIQDFSRKVTDLNKVFYNGDCPILKGNVQGISYGYSPECQLHIVSYNQKAWQSHFSFTFLGQEYQDIELNLPGQHNAANAAAACGVALTFGIDINIIRKALKKFSGVHRRLERKNISESFLFLEDYAHHPVEVAHTLRSVRDAVGLRRVIAIFQPHRFSRLEECLQTFPKAFQEADEVILTDVYSAGESPRESIILSDLAEQIRKSSYVHCCYVPHGDIVDYLRNYIRIHDVCVSLGAGNIYTIGEALKDFNPKKLSIGLVCGGKSCEHDISLLSAQHVSKYISPEFYDVSYFIINRQGLWRTGKDFPHLIEETQGDSPLSSEIASALAKVDCLFPVLHGPFGEDGTIQGFFEILGKPYAGPSLSLAATAMDKLLTKRIASAVGVPVVPYQPLNLCFWKRNPELCIQNLIETFSFPMIVKTAHLGSSIGIFLVRDKEELQEKISEAFLYDTDVFVEESRLGSREIEVSCIGHSSSWYCMAGPNERCGASGFIDYQEKYGFDGIDCAKISFDLQLSQESLDCVRELAERVYRAMQGKGSARIDFFLDEEGNYWLSEVNPIPGMTAASPFLQAFVHAGWTQEQIVDHFIIDALHKFDKQQTIEQAFTKEQDLVKR

SEQ ID NO: 54956 - protein, 357 aa, Chlamydia pneumoniae
MMKKIRKVALAVGGSGGHIVPALSVKEAFSREGIDVLLLGKGLKNHPSLQQGISYREIPSGLPTVLNPIKIMSRTLSLCSGYLKARKELKIFDPDLVIGFGSYHSLPVLLAGLSHKIPLFLHEQNLVPGKVNQLFSRYARGIGVNFSPVTKHFRCPAEEVFLPKRSFSLGSPMMKRCTNHTPTICVVGGSQGAQILNTCVPQALVKLVNKYPNMYVHHIVGPKSDVMKVQHVYNRGEVLCCVKPFEEQLLDVLLAADLVISRAGATILEEILWAKVPGILIPYPGAYGHQEVNAKFFVDVLEGGTMILEKELTEKLLVEKVTFALDSHNREKQRNSLAAYSQQRSTKTFHAFICECL

SEQ ID NO: 54957 - protein, 385 aa, Chlamydia pneumoniae
MKWFVISCLLGIFSLGLIMVFDTSSAEVLDRSLECSTHKALIRQVTYLILGLGVASLLYMMEWRDFLKISPVLLSGAALALICVFIPGLGICRNGARRWLGFGQLTIQPSEFVKYLVPIVALYFLTFSSLYQKQLKMFLKLTAILFIPILLIAIEPDNGSAAVISASLIPVFIMTSVRLRYWLLPLLCVLIAGGALAYRMPYVRYRLNVYLHPELDIKGRGHQPYQAKIAAGSGKLLGKGPGASLQKLTYLPEAQNDYIAAIYAEEFGFLGMLVLILLYMCFVYGGYAIAIKASSLEGAALAMVITLIISMQAFMNLGVVSGLLPSKGVNLPFFSQGGSSLIANMCGVTLLLKVYDEENSKSSLGCRRFRRPHCPSSLGKGSFFS

SEQ ID NO: 54958 - protein, 417 aa, Chlamydia pneumoniae
MCQRILILGTGITGKSVARFLYQQGHYLIGADNSLESLISVDHLHDRLLMGASEFPENIDLVIRSPGIKPYHPWVEQAVSLKIPVVTDIQVALKTPEFQRYPSFGITGSNGKTTTTLFLTHLLNTLGIPAIAMGNIGLPILDHMGQPGVRVVEISSFQLATQEEHIPALSGSVFLNFSRNHLDYHRNLDAYFDAKLRIQKCLRQDKTFWVWEECSLGNSYQIYSEEIEEILDKGDALKPIYLHDRDNYCAAYALANEVGWVSPEGFLKAIRTFEKPAHRLEYLGKKDGVHYINDSKATTVTAVEKALMAVGKDVIVILGGKDKGGDFPALASVLSQTTKHVIAMGECRQTIADALSEKIPLTLSKDLQEAVSIAQTIAQEGDTVLLSPGCASFDQFQSFKERGAYFKLLIREMQAVR

SEQ ID NO: 54959 - protein, 349 aa, Chlamydia pneumoniae
MIPLIPMFLKQSLFFSLALTGMTTLVLTVSLGVPVMKWLKRKNYRDYIHKEYCEKLEMLHKDKAEVPTGGGVLLFISLIASLLVWLPWGKFSTWFFIILLTCYAGLGWYDDRIKIKRKQGHGLKAKHKFMVQIAIAAFTLIALPYIYGSTEPLWTLKIPFMEGMLSLPFWLGKVFCLGLALVAIIGTSNAVNLTDGLDGLAAGTMSFAALGFIFVALRSSTIPIAQDVAYVLAALVGACIGFLWYNGFPAQLFMGDTGSLLLGGLLGSCAVMLRAECILVVIGGVFVAEAGSVILQVLSCRLRKKRLFLCSPLHHHYEYQGLPETKIVMRFWIFSFVCAGLGIAAVLWR

SEQ ID NO: 54960 - protein, 447 aa, Chlamydia pneumoniae
MRAMLLEDWVSLMLSDVSCPKCDKKITGFAIDSQKVQPGDLFFALPGNATDGHQFLKHAATAGAVAAVVSHDYQGDSFGLELIRVDDTKSALQEAGSNQCNLFQGTLVGITGSVGKTTTKEFSKTILSSIYKTHASPKSYNSQLTVPLSLLMAEGDEDVMILEMGVSEPGNMQDLLRIVQPEIAVITHINDQHAMHFPQGIQEILKEKSYILQKSKLQLLPKDSPYYLDLRSCSPTAEKFSFSFNDPLADFCYKAISGDSVVIQTPEENYCLPIAFSYKPAYTNLLIAVALSWILEVPEEGVIRSLPELKLPPMRFEHSMRNGMQVINDAYNACPEAMIAALDALPLPSDGGKIILILGHMAELGRYSEEGHALVAEKAASRGDMIFFIGEKWIPVQSVLKSYSCEVSFFSSAQDVKDILKQVARYGDVILLKGSRALALESLLACF

SEQ ID NO: 54961 - protein, 295 aa, Chlamydia pneumoniae
MQEKPRHVHRIIHISDVHFHVLPVNPVHCFNKRLKGLLRKVFGLVHFQATTIGQRFPKVVRSLGADSVCITGDFSLTAMDGEFLLAKHFVETLAKHSSVYLLPGNHDVYTLKSLAQQTFYTHFPNDQLQQNKVSFHKITDHWWLILLDCSCLNGWFSANGVVHLAQISAIETFLLSLSPEENVIIANHYPLLSSQNPSHDLINNTHLQNVLKKYPKVRLYLHGHEHQAAVYNCADTSPSYILNSGSISLPTNSRFHVIDLYPEKYQVHTMILKNLLDFDAPLEIANEATWDCQKL

SEQ ID NO: 54962 - protein, 293 aa, Chlamydia pneumoniae
MSKHTSESRIAQDMLERYSGSSVKQFCPYLLLTNFSYYIQTFAKLHGVPVFEGSMFSAAHAPHLKTSILDFKLGSPGAALTIDLCSFLPDLKAALMLGMCGGLRSHYQVGDYFVPVASIRGEGTSDAYFPPEVPALANFVVQKATTEVLEDKKANYHIGITHTTNIRFWEFNKKFRKKLYETKAQSAEMECATLFAAGYRRNLPIGALLLISDLPLRKEGIKTKSSGNFIFNTYTEDHILTGQEVIENLEKVMLKRAASDHKKDQQYRGLPHMEVGEADDTMASGSETSDSDY

SEQ ID NO: 54963 - protein, 665 aa, Chlamydia pneumoniae
  MISC_FEATURE (76)..(76): X=any amino acid
MINKELDIGILGKIAGAIKQISIESIQKASSGHPGLPLGCAELAAYLYGYVLRQNPRDPHWINRDRFVLSAGHGSXLLYSCLHLAGFDVSLEDLQEFRQLHSRTPGHPEYGETVGVEATTGPLGQGLGNAVGMALSMKMLESRFNRPGHEIFNGKIYCLAGDGCFMEGVSHEVCSFAGSLNLNNLVVIYDYNNVVLDGYLNEISVEDTKKRFEAYGWDVYEIDGYDFTHIHETFSSIKRGQERPVLVIAHTIIGHGSPKEGTNKAHGSPLGVEGTHETKQFWHLPEEKFFVPPAVKNFFAHKIQEDRKAQEQWLDEVRVWSKQFPELHEEFVALTSHKLPKNLESLVQSVEMPDSIAGRAASNKLIQVLVQHIPYLIGGSADLSSSDGTWIANEKVIHTYDFSGRNIKYGVREFGMATIMNGLAYSQVFRPFGGTFLVFSDYMRNAIRLAALSKLPVIYQFTHDSIFVGEDGPTHQPVEQLMSLRAIPGLYVIRPADANEVRGAWIAGLKHTGPTVIVLSRQALPTLPAAHRPFKDGVGRGAYIVLKESGEKPDYTLFATGSEVSLALSVAKELEHLDKQVRVVSFPCWELFEAQDVDYKQSIVGGDLGIRVSIEAGSALGWYKYIGSEGLAIAMDRFGYSGASDDVSEECGFTTEQILQRILSQ

SEQ ID NO: 54964 - protein, 872 aa, Chlamydia pneumoniae
MLSNTIRSNFLKFYANRHHTILPSSPVFPHNDPSILFTNAGMNQFKDIFLNKEKVSYSRATTSQKCIRAGGKHNDLDNVGHTSRHLTFFEMLGNFSFGDYFKAEAIAFAWEVSLSVFNFNPEGIYATVHEKDDEAFALWEAYLPTDRIFRLTDKDNFWSMANTGPCGYCSELLFDRGPSFGNASSPLDDTDGERFLEYWNLVFMEFNRTSEGSLLALPNKHVDTGAGLERLVSLIAGTHTVFEADVLRELIAKTEQLSGKVYHPDDSGAAFRVIADHVRSLSFAIADGLLPGNTERGYVLRKILRRSVNYGRRLGFRNPFLAEIVPSLADAMGEAYPELKNSLSQIQKVLTLEEESFFKTLDRGGNLLQQVLKSSSSSSCISGEDAFKLKDTYGMPIDEISLLAKDYDYSVDMDTFHKLEQEAKERSRKNVVQSQGTSESIYNELHLTSEFIGYDHLSCDTFIEAIISKDHIVSSLQEKQEGAIVLKVSPFYAEKGGQVGDSGEIFCSEGTFIVTHTTSPKAGLIVHHGRISQGSLTVEAAVTAQVNRYRRKRIANNHTACHLLHKALEITLGDHIRQAGSYVDDTKIRLDFTHPQAISPEDLLCIETLVNESIRENEPVDIREALYSDVMNSSEIKQFFGDKYSDVVRVVSAGHSHELCGGTHAEATGDIGFFRITKEHAVAMGIRRIEAVTGEKAEATVHQQSEVLEEIATLLQVPRDQIVSRLTATLDERKQQDKRLNELENSLIQTKLDKLIHNCHQRQGITCLVHHLAEHENHRLQQYAQCLHQRIPEKLISLWTTEKNGKYIVLSRVSDDLITQGVHAQDLLKAVLTPCGGRWGGKDQSAQGSAPALPATEVLNETLWQWISTQLI

SEQ ID NO: 54965 - protein, 1085 aa, Chlamydia pneumoniae
MAMDFNPVNLDFSISKEFKEETLPLLLENIHPGATAFLAAKMFHDCRASVIMITTPARLDDLFENLRTFLDQAPVEFPSSEIDLSPKLVNIDAVGKRDHLLYSLNQHRAPIFCVTTLKALLEKTRSPQATSQQHLDLAVGDVLDPEATTELCKSLGYSQVMLTSEKGEFSCRGGIVDIFPLSSPEPFRIEFWGEKIISIRSYNPSDQLSTGKVSKISISPAYTEEASGGNYSHSLLDYFSTPPLYLFDNLEILEDDFADISGTLSSLPDRFFSIGTLYDRISTSNQVYFSETPFPNVKNLKENRVIIEAFHRNMEASRQAIPILYPEQIIQNDENPLLAFLQHLQEYMPPHGKPLKLAIYSTKTKSLKEARALAETVARGDVEIYEKTGNLTSSFALVNEAFAAISLSEFASTKVLRRQKQRTHFSVTTEEVFVPIPGETVVHIHNGIGKFLGIEKKPNHLNIETDYLVLEYADKARLYVPSNQAYLISRYVGTSDKAADLHHLNSSKWKRSRDLTEKSLIVYAEKLLQLEAQRSTTPAFVYPPHGESVIKFAETFPYEETPDQLKTIDQIYNDMMSPKLMDRLICGDAGFGKTEVIMRAAVKAVCDGHRQVIVMVPTTILATQHYETFKERMAGLPIEIAVLSRFSQAKVQKLICEQVASGQIDIIIGTHKLINKSLEFKNPGLLIIDEEQRFGVKVKDNLKERYPMIDCLTVSATPIPRTLHMSLSGARDLSVIAMPPLDRLPVSTFVMEHNTETLTAALRHELLRGGQAYVIHNRIESIYTLAETIRNLIPEARIGVAHGQMGAEDLSNIFTKFKNQKTDILVATALIENGIDIPNANTILIDHADKFGMADLYQMKGRVGRWNKKAYCYFLVPHLDRLSGPAAKRLAALNKQEYGGGMKIALHDLEIRGAGNILGTDQSGHIGTIGFNLYCKLLKKAVSALKKHTSPLLFNDDVKIEFPYNSRIPDTYIETGSMRIEFYQKIGNAESSEELTAIQEEMRDRFGPLPQEICWLFALAEIRLFALQHGISSIKGTANALYVQKCLSKSEQTKKTLPYALSPTPELLVKEVIESIERGFLINAS

SEQ ID NO: 54966 - protein, 431 aa, Chlamydia pneumoniae
MTWLSGLYFICIASLIFCAIGVILAGVILLSRKLFIKVHPCKLKINDNEELTKTVESGQTLLVSLLSSGIPIPSPCGGKATCKQCKVRVVKNADEPLETDRSTFSKRQLEEGWRLSCQCKVQHDMSLEIEERYLNASSWEGTVISNDNVATFIKELVVAVDPNKPIPFKPGGYLQITVPSYKTNSSDWKQTMAPEYYSDWEHFHLFDQVIDNSQLPADSANKAYSLASYPAELPTIKFNIRIATPPFINGKPNSEIPWGVCSSYVFSLKPGDKITVSGPYGESFMKDDDRPLIFLIGGAGSSFGRSHILDLLLNKHSKREIDLWYGARSLKENIYQEEYENLERQFPNFHYHLVLSEPLPEDIAAGWDKDDPTKTNFLFRAFNLGQLSRLDNPEDYLYYVCGPPLHNSSILKLLGDYGVERSSIILDDFGS

SEQ ID NO: 54967 - protein, 806 aa, Chlamydia pneumoniae
MIRERKKSRHPRLPTLPLAAKASLYLFFACFSGLSLWSFHRDQPCTQNWIGLLGWSFSSFLLYFFGAAAFFIPLYFLWLSFLYFRRTPRPLFFYKAAAFLSLPFCSAILLSMLSPVGTLPALLDTRLPKFILGNNPPVSYVGGIPFYLFYEGQSFCLKHLIGSVGTALIFGFVMLFSVLYLCGGIALLKKKTFQDGVKKAFCSFFQTCFKNLKKLINRRNYLPKPSVPFVSKNPFSCTKSQPSPRRVSETIILDGSISPLPQEEIPGSKKESFFLTPHPCKRFLTKFVEPQENKAKEGKTIALSSTPTVVRESKGKERAALPKLKSLAVPENDLPQYHLLSKNREARPESLQAELERKALILKQTLTSFGIDADLGNICSGPTLAAFEVLPHSGVKVQKIKSLENDIALKLQASSIRIIAPIPGKAAVGIEIPTPFPQAVNFRDLLEDYQKTNRKLQIPLLLGKKANGDNLWADLATMPHLIIAGTTGSGKSVCINTIVMSMIMTTLPSEIKLVIIDPKKVELTGYSQLPHMLSPVITESREVYNALVWLVKEMESRYEILRYLGLRNIQAFNSRTRNKTIEASYDREIRETMPFMVGIIDELSDLLLSSSQDIETPIIRLAQMARAVGIHLILATQRPSREVITGLIKANFPSRISFKVSNKVNSQIIIDEPGAENLMGNGDMLVLLPSVFGTIRAQGAYICDEDINKVIQDLCSRFPTQYVIPSFHAFDDSDSDNSGEKDPLFAQAKTLILQTGNASTTFLQRKLKIGYARAASLIDQLEEARIIGPSEGAKPRQILIQNPLEG

SEQ ID NO: 54968 - protein, 154 aa, Chlamydia pneumoniae
MKTLKGHLSAKNLRIAIVGSCFNQAMADALVSGTQETFLKFGGSEDGLMTIRVPGAFEIPCTIKKLLSSERKFDAIVACGVLIQGETDHYNQIVNQVAAGIGALSLEFCLPITLSIVAAPSAEIAWQRSGIKGRHLGVSGMTTAIEMATLFTQI

SEQ ID NO: 54969 - protein, 418 aa, Chlamydia pneumoniae
MIETREEVGSANFVSLERAIEDLRAGKFVIVVDEASREDEGDLIIAGEKITVEKMTFLLQHTTGVVCAALSQERLLSLDLPPMVKDNRCRFKTPFTVSVDAAHGVTTGVSAADRTKVVQLLADPKSKPEDFISPGHFFPLASSPGGVLKRAGHTESTVDLMELAGLQPCGVLAELVNEDYSMMRLPQILEFARKHNIAVIPVTSIIAHRMLSDRLVSKISSARLPTIYGDFTIHVYESLLEGMQHLALVKGNVAGKSNVLVRVHSECVTGDILGSKRCDCGEQLSSAMSYIAEKGTGVLVYLRGQEGRGIGLGHKVRAYALQDNGYDTVDANLAMGFPVDSREYGIGAQILVDLKLTTIKLITHNPQKYFGLQGFGLSITERVPLPVRISEDNEQYLRTKQERMGHWLDLPCCNNRVQ

SEQ ID NO: 54970 - protein, 376 aa, Chlamydia pneumoniae
MEDFSEQQLFFMRRAIEIGEKGRITAPPNPWVGCVVVQENRIIGEGFHAYAGGPHAEELAIQNASMPISGSDVYVSLEPCSHFGSCPPCANLLIKHKVSRVFVALVDPDPKVAGQGIAMLRQAGIQVYVGIGESEAQASLQPYLYQRTHNFPWTILKSAASVDGQVADSQGKSQWITCPEARHDVGKLRAESQAILVGSRTVLSDDPWLTARQPQGMLYPKQPLRVVLDSRGSVPPTSKVFDKTSPTLYVTTERCPENYIKVLDSLDVPVLLTESTPSGVDLHKVYEYLAQKKILQVLVEGGTTLHTSLLKERFVNSLVLYSGPMILGDQKRPLVGVLGNLLESASPLTLKSSQILGNSLKVVWEISPQVFEPIRN

SEQ ID NO: 54971 - protein, 427 aa, Chlamydia pneumoniae
MLDIKIIRKTPEECETRLRKKDPKISLEPVLSLDKEVRQLKTDSETLQAQRRLLSQDIHKAKTQGVDATNLIQEVETLAADLEKIEQHLDQKNAQLHELLSHLPNYPADDIPVSEDKAGNQVIKSVGDLPIFSFPPKHHLELNQELDILDFQAAAKTTGSGWPAYKNRGVLLEWALLTYMLQKQAAHGFQLWLPPLLVKKEILFGSGQIPKFDGQYYRVEDGEQYLYLIPTAEVVLNGFRSQDILTEKELPLYYAACTPCFRREAGAAGAQERGLVRVHQFHKVEMFAFTTPNQDDIAYEKMLSIVEEMLTELKLPYRLSLLSTGDMSFTASKTIDAEVWLPGQKAFYEVSSISQCTDFQSRRSGTRYKDSQGKLQFVHTLNGSGLATPRLLVAILENNQQADGSVVIPEVLRPYLGGLEILLPKDQ

SEQ ID NO: 54972 - protein, 683 aa, Chlamydia pneumoniae
MGVRDLHHFREYYLIINEIIITGRYVFSRLFFTSFSAEVVNTFFESGMSEDTSPLLSKQNRKLSHNLPLKSAYLSLGTYLIALLSFWLHAKNLSNLFVVFTFFLAGTPALIKSLDNICQKVVNIDILMTSAAFGSIFIGGALEGALLLVLFAISEALGQMVSGKAKSTLVSLKQLAPTTGWLVLEDGNLQKVAINKIEVGNILRIKSGEVVPLDGEILHGSSSINLMHLTGEKVPKSCHPGSIVPAGAHNMEGSFDLRVLRTGSDSTIAHIINLVIQAQNSKPRLQQRLDKYSSVYALSIFAIACGIALLVPLFTSIPLLGPQSAFYRALAFLIAASPCALIIAIPIAYLSAINACAKHGVLLKGGVILDRLVSCNSVVMDKTGTLTTGELTCIGCDYFGSKNETFFPSVLALEQSSSHPIAEAIVSYLMEQKVSSLPADRYLTVPGEGVRGYFNEQEAFVGRVETGLGKVPSEYLEDIEQKIYQAKQHGEICSLAYVGNSFALFYFRDIPRPQAKEIIQDLKDLGYPVSMLTGDHKVSAENTAEILGISEVFFDLTPEDKLAKIRELATQRQIMMVGDGINDAPALAQATVGIAMGEAGSATAIEAADIVLLHDSLSSLPWIIQKAKQTKKVVSQNLALALAIILLVSWPASLGIIPLWLAVILHEGSTVIVGLNALRLLKS

SEQ ID NO: 54973 - protein, 235 aa, Chlamydia pneumoniae
MTKVRLNKFLASAGVASRRKCDEIIFSGSVTVNGRVAEGPFVLVDPEDKVQVGGTSVHLTKKVYFMVHKAIGYLCSSEKKFPGTKLVIDLFAHLPYRVFTVGRLDKETSGLILVTNDGEFANKIIHPSSGITKEYLLKVSRDVSAKDLGKLMEGTFIDGKHVRPVSVTKIRRGTVKIVVSEGKKHEIRLFADAAGLPILELKRIRIGSLVLGGLRYGEYRELTDAELGTYMKLSD

SEQ ID NO: 54974 - protein, 461 aa, Chlamydia pneumoniae
MTESVYSPSAMHVNSLADKLKAINQEHILDIWPSLSPKQQQRLFQQLTSVDIDFFRKQQQLLSSPTAILKDFHPITSFASSGEDPERAHAGTTLLKEKKVACVVLAGGQGSRLKCDGPKGLFPVSPIKKKPLFQLVAEKVRAASKLAGQPLPLAFMTSPLNTRQTRSFFESNDYFHLDPNQVDFFCQPLWPLLTLSGDLFLEDMDTLALGPNGNGCIATLLYTSGVWEKWKNAGIEMVSVIPIDNPLALPFDVELCGFHAMSNNEVTIKAALRQTAIEDVGILVKSHDSGKTSVIEYSEIPQNERFALNEDGKLKYCLANIGLYCLSMDFIRHAAYQQLPLYKVHKHAKQLGHTSLNEKNAWKFEEFIFDLFCYSDHCQTLVYPRQECFAPLKNLEGNHSPDTVRQALSDRERQLFHKVTGKKLSPNTTFELEADFYYPSTSTSLHWENKAFFEEPFFEAS

SEQ ID NO: 54975 - protein, 334 aa, Chlamydia pneumoniae
MKQHIGYLGMGIWGFCLASLLANKGYPVVAWSRNPDLIKQLQEERRHPLAPNVVISPNLSFTTDMKEAIHNAFMIVEGVTSAGIRPVAEQLKQITDLSVPFVITSKGIEQNTGLLLSEIMLEVLGDSVTPYLGYLSGPSIAKEVLNGSPCSVVVSAYDSQTLKQIHEAFSLPTFRVYPNTDIKGAALGGALKNVIAIACGIAEGLSFGNNAKAGLVTRGLHEMRKLAAIMDCKPETLNGLAGLGDLCVTCFSESSRNLRFGHLLAQGLTFEQAKAKIGMVVEGAYTALSAYQVAKHHKIDMPITTGIYRVLYENLDLKEGIALLLQRNTKEEFL

SEQ ID NO: 54976 - protein, 366 aa, Chlamydia pneumoniae
MSPHRNLFKLKNFSNRLYNRALGRFDKVFNFFSGNVGIDLGTANTLVYVRGRGIVLSEPSVVAVDAQTHAVLAVGHKAKAMLGKTPRKIMAVRPMKDGVIADFEIAEGMLKALIKRVTPSRSVFRPRILIAVPSGITGVEKRAVEDSALHAGAQEVILIEEPMAAAIGVDLPVHEPAASMIIDIGGGTTEIAIISLGGIVESRSLRIAGDEFDECIINYMRRTYNLMIGPRTAEEIKITIGSAYPLGDQELEMEVRGRDQVAGLPITKRINSVEIRECLAEPIQQIIECVRLTLEKCPPELSADLVERGMVLAGGGALIKGLDKALSKNTGLSVITAPHPLLAVCLGTGKALEHLDQFKKRKGNLV

SEQ ID NO: 54977 - protein, 421 aa, Chlamydia pneumoniae
MNKKNLTICSFCGRSEKDVEKLIAGPSVYICDYCIKLCSGILDKKPSSTISSAPVSETPSQPSDLRVLTPKEIKKHIDEYVIGQERAKKTIAVAVYNHYKRIRALLHNKQVSYGKSNVLLLGPTGSGKTLIAKTLAKILDVPFTIADATTLTEAGYVGEDVENIVLRLLQAADYDVARAERGIIYIDEIDKIGRTTANVSITRDVSGEGVQQALLKIVEGTTANVPPKGGRKHPNQEYIRVNTENILFIVGGAFVNLDKIIAKRLGKTTIGFSDDQADLSQKTRDHLLAKVETEDLIAFGMIPEFVGRFNCIVNCEELSLDELVAILTEPTNAIVKQYMELFAEENVKLVFKKEALYAIAKKAKQAKTGARALGMILENLLRDLMFEIPSDPTVEAIHIQEDTIAENKAPIIIRRTPEAIA

SEQ ID NO: 54978 - protein, 410 aa, Chlamydia pneumoniae
MTTIAIEAAKKVLIKLRNAGYQAYFVGGCVRDMLMNRPLEDIDIATNASPTIVSTIFPDVISIGVAFGIIVVKQDGRLFEVATFRSDGEYKDGRHPDRIIFSSMREDALRRDFTVNGMYYDPFEDKVFDFVEGTRDIEKKVIRAIGHPRLRFSEDKLRILRAIRFSSSLGFTLDPTTERAIIKEAPALVNSVSPERIWQELKKMLKRQPYGALSLLLKLKVLIFIFPELRDIPYSLLRTTIEFARKFNPTHFPEILFLLPLFQGVSEEAATVAFGRLRISNKELKLIESWYEALPHFQNQSGNRVFWAHFLASPTAPLFLELFSALQKDPSRQQHFISRVQELESRLEQFILRIKTSSPVVSAPDLIAKGISPGRLLGDLLREAEILSIENECLDKEKILLLLQEKGFWK

SEQ ID NO: 54979 - protein, 487 aa, Chlamydia pneumoniae
MLKIAILGRPNVGKSSLFNRLCKRSLAIVNSQEGTTRDRLYGELHAFGVPAQVIDTGGVDHNSEDYFQKHIYNQALTGAKEADVLLLVIDIRCGITEEDAHLAKLLLPLKKPLILVANKADSRQEELQIHETYKLGIRDIVVTSTAHDKHIDTLLQRIKLVANLPEPREEEEEGLEELSVDEHEESEAALPSNTFPDFSEVFTEGFSPEEPCTIPESPQQAPKTLKIALIGRPNVGKSSIINGLLNEERCIIDNTPGTTRDNIDILYSHKDRQYLFIDTAGLRKMKSVKNSIEWISSSRTEKAISRADICLLVIDATQKLSSYEKRILSLISKRKKPHIILINKWDLLEEVRMEHYCKDLRATDPYLGQAKMLCISATTKRNLKKIFSAIDELHHVVSNKVPTPIVNKTLASALHRNHPQVIQGRRLRIYYAIQKTTTPLQFLLFINAKSLLTKHYEYYLKNTLKSSFNLYGIPFDLEFKEKPKRHN

SEQ ID NO: 54980 - protein, 970 aa, Chlamydia pneumoniae
MLGFLKRFFGSSQERILKKFQKLVDKVNIYDEMLTPLSDDELRNKTAELKQRYQNGESLDSMLPEAYGVVKNVCRRLAGTPVEVSGYHQRWDMVPYDVQILGAIAMHKGFITEMQTGEGKTLTAVMPLYLNALTGKPVHLVTVNDYLAQRDCEWVGSVLRWLGLTTGVLVSGTLLEKRKKIYQCDVVYGTASEFGFDYLRDNSIATRLEEQVGRGYYFAIIDEVDSILIDEARTPLIISGPGEKHNPVYFELKEKVASLVYLQKELCSRIALEARRGLDSFLDVDILPKDKKVLEGISEFCRSLWLVSKGMPLNRVLRRVREHPDLRAMIDKWDVYYHAEQNKEESLERLSELYIIVDEHNNDFELTDKGMQQWVEYAGGSTEEFVMMDMGHEYALIENDETLSPADKINKKIAISEEDTLRKARAHGLRQLLRAQLLMERDVDYIVRDDQIVIIDEHTGRPQPGRRFSEGLHQAIEAKEHVTIRKESQTLATVTLQNFFRLYEKLAGMTGTAITESREFKEIYNLYVLQVPTFKPCLRIDHNDEFYMTEREKYHAIVNEIATIHGKGNPILVGTESVEVSEKLSRILRQNRIEHTVLNAKNHAQEAEIIAGAGKLGAVTVATNMAGRGTDIKLDNEAVIVGGLHVIGTTRHQSRRIDRQLRGRCARLGDPGAAKFFLSFEDRLMRLFASPKLNTLIRHFRPPEGEAMSDPMFNRLIETAQKRVEGRNYTIRKHTLEYDDVMNKQRQAIYAFRHDVLHAESVFDLAKEILCHVSLMVASLVMSDRQFKGWTLPNLEEWITSSFPIALNIEELRQLKDTDSIAEKIAAELIQEFQVRFDHMVEGLSKAGGEELDASAICRDVVRSVMVMHIDEQWRIHLVDMDLLRSEVGLRTVGQKDPLLEFKHESFLLFESLIRDIRITIARHLFRLELTVEPNPRVNNVIPTVATSFHNNVNYGPLELTVVTDSEDQD

SEQ ID NO: 54981 - protein, 442 aa, Chlamydia pneumoniae
MLKHDTIAAIATPPGEGSIAVVRLSGPQAIVIADRIFSGSVASFASHTIHLGQVIFEETLIDQALLLLMRSPRSFTGEDVVEFQCHGGFFACSQILDALIALGARPALPGEFSQRAFLNGKIDLVQAEAIQNLIVAENIDAFRIAQTHFQGNFSKKIQEIHTLIIEALAFLEVLADFPEEEQPDLLVPQEKIQNALHIVEDFISSFDEGQRLAQGTSLILAGKPNVGKSSLLNALLQKNRAIVTHIPGTTRDILEEQWLLQGKRIRLLDTAGQRTTDNDIEKEGIERALSAMEEADGILWVIDATQPLEDLPKILFTKPSFLLWNKADLTPPPFLDTSLPQFAISAKTGEGLTQVKQALIQWMQKQEAGKTSKVFLVSSRHHMILQEVARCLKEAQQNLYLQPPEIIALELREALHSIGMLSGKEVTESILGEIFSKFCIGK

SEQ ID NO: 54982 - protein, 412 aa, Chlamydia pneumoniae
MKKNASHKTNDKKSLSIWSIGGSIFAMFFGAGNIVFPLALGYHYNAHPWSAYFGMMLTAVCVPLLGLVSMLFYSGDYQKFFFSIGRIPGMIFITAIILLIGPFGGIPRAIAVSHATLISLSEHKSAFIPSLPIFSAICCVLIYIFSCKLSRLIQWLGSVFFPIMLVTLLWVIIRSFMIPTHPMVQEFIPNARQAWLAGFIEGFNTMDLLAAFFFCSIVLISLRQLVAEEKHPTEEEIPLSFQGISKKNKRSLALGFFLAAILLGMTYLGFVLSAARHAGLLVNVSKGHILGRISAIALGPNSILAGVSVFIACLTTEIALVGIVADFLARVVSFKKLNYASAVICTLIPTYLISILNFETISHLLLPLLQLSYPALIVLACGNIAYKLWNFRYSPVLFYLTLSLTIVLKLVN

SEQ ID NO: 54983 - protein, 461 aa, Chlamydia pneumoniae
MTQEFDCVVIGAGPSGYVAAITAAQSKLRTALIEEDQAGGTCLNRGCIPSKALIAGANVVSHIKHAEQFGIHVDGYTIDYPAMAKRKNTVVQGIRQGLEGLIRSNKITVLKGTGSLVSSTEVKVIGQDTTIIKANHIILATGSEPRPFPGVPFSSRILSSTGILELEVLPKKLAIIGGGVIGCEFASLFHTLGVEITVIEALDHILAVNNKEVSQTVTNKFTKQGIRILTKASISAIEESQNQVRITVNDQVEEFDYVLVAIGRQFNTASIGLDNAGVIRDDRGVIPVDETMRTNVPNIYAIGDITGKWLLAHVASHQGVIAAKNISGHHEVMDYSAIPSVIFTHPEIAMVGLSLQEAEQQNLPAKLTKFPFKAIGKAVALGASDGFAAIVSHEITQQILGAYVIGPHASSLIGEMTLAIRNELTLPCIYETVHAHPTLSEVWAEGALLATNHPLHFPPKS

SEQ ID NO: 54984 - protein, 307 aa, Chlamydia pneumoniae
MKCRPTLNTDQPRVRKKLPERFPKWLQRPLPQGSAFHATDATIKRSGMPTVCEEALCPNRAECWSRKTATYLALGDVCTRSCGFCNIGHSKTPPALDPTEPERIALSAKELGLKHVVITMVARDDLEDGGAQGLVDIIQKLREELPQATTEVLASDFQGNVSALHTLLDSGITIYNHNVETVARLSPLVRHKATYARSMFMLEQAANYLPDLKIKSGIMVGLGEMEGEVKQTLQDLASIGVRIVTIGQYLRPSRKHLQVKSYVTPETFDYYRRVGEAMGLFVYAGPFVRSSFNADMILASVQDKASA

SEQ ID NO: 54985 - protein, 580 aa, Chlamydia pneumoniae
MSTRRPIQLLDPLTINQIAAGEVIENSVSVVKELIENSLDAGADEIEIETLGGGQGAIIIRDNGCGFRAEDIPIALQRHATSKIREFSDIFSLNSFGFRGEALPSIASISKMEIQSSIEGDEGVRTVIHGGDIVSCEPCARQLGTTVIVNSLFYNVPVRRGFQKSMQSDRLGIRKLIENRILSTANIGWSWISEGHHEIQIAKQQGFQERVAYVMGDHFMQDALTIDKEANGVRIVGVLGSPSFHRPTRQGQKIFINDRPIESLFISKKVGDAYALLLPLHRYPVFVLKLYLPSSWCDFNVHPQKIEARILKEELVGDCIKEAIVETLACPPGILCRTHQEIEESDSVPLPMFRMLETSDVQEEESVEFDQNLFAYSSEDVSLEKQEYTSRGPKSQMDWIYSSDVRFLTSLGRVVLAEDLEGVHIIFTAAARKHLFFLSLMQENSRMYQSQALLIPLRLQVTPEEAFFFSHHGRTLCDLGIEISQVGPCVFSIESTPTVIGEEELKEWLLLLAARGSTDINSEALTALMKETLTQATFSKHQHVFDVSWLKLLWSVGKPEKGFDGARIRRLILDSDFMEG

SEQ ID NO: 54986 - protein, 231 aa, Chlamydia pneumoniae
MSKPSPRNANQPQKPSASFNKKTRSRLAELAAQKKAKADDLEQVHPVPTEEEIKKALGNIFEGLSNGLDLQQILGLSDYLLEEIYTVAYTFYSQGKYNEAVGLFQLLAAAQPQNYKYMLGLSSCYHQLHLYNEAAFGFFLAFDAQPDNPIPPYYIADSLLKLQQPEESNNFLDVTMDICGNNPEFKILKERCQIMKQSIEKQMAGETKKAPTKKPAGKSKTTTNKKSGKKR

SEQ ID NO: 54987 - protein, 444 aa, Chlamydia pneumoniae
MTSGVSGSSSQDPTLAAQLAQSSQKAGNAQSGHDTKNVTKQGAQAEVAAGGFEDLIQDASAQSTGKKEATSSTTKSSKGEKSEKSGKSKSSTSVASASETATAQAVQGPKGLRQNNYDSPSLPTPEAQTINGIVLKKGMGTLALLGLVMTLMANAAGESWKASFQSQNQAIRSQVESAPAIGEAIKRQANHQASATEAQAKQSLISGIVNIVGFTVSVGAGIFSAAKGATSALKSASFAKETGASAAGGAASKALTSASSSVQQTMASTAKAATTAASSAGSAATKAAANLTDDMAAAASKMASDGASKASGGLFGEVLNKPNWSEKVSRGMNVVKTQGARVASFAGNALSSSMQMSQLMHGLTAAVEGLSAGQTGIEVAHHQRLAGQAEAQAEVLKQMSSVYGQQAGQAGQLQEQAMQSFNTALQTLQNIADSQTQTTSAIFN

SEQ ID NO: 54988 - protein, 305 aa, Chlamydia pneumoniae
MHMSLFLVFLTAFIWSSSFALSKLVMNASAPIFATGARMVIAGAILALAAWFRGGFVGISKKIFLYIVLLALTGFYLTNIFEFIGLQSLSSSKTCFIYGLSPLMSALFSYIQLKEKVTLKKVLGLSLGLVSYICYLTFGGGGDDSQPWTWQIGLPELLILGAASLASFGWTLLRQIEKQSTLSVTAINAYAMLIAGMLSIMHSAVVEPWRPLPVQDISQFLYATLALVVISNLICYNLYAKLLRKYSSTFLSFCNLVMPLYSGFYGWILLGEKGVSLGLVLAVAFMVAGCRLIYHEEFRQGYIVS

SEQ ID NO: 54989 - protein, 635 aa, Chlamydia pneumoniae
MIQVTCDQKNYEVLEGTTAAELAKQLKNSHQFIGVLINERPRDLSTHLNEGDTLVFLTSEDPEGREIFLHTSAHLLAQAVLRLWPDAIPTIGPVIDHGFYYDFANLSISESDFPLIEDTVKQIVDEKLAISRFTYGDKQQALAQFPQNPFKTELIRELPENEEISAYSQGEFFDLCRGPHLPSTAHVKAFKVLRTSAAYWRGDPSRESLVRIYGTSFPTSKELRAHLEQIEEAKKRDHRVLGAKLDLFSQQESSPGMPFFHPRGMIVWDALIRYWKQLHTAAGYKEILTPQLMNRQLWEVSGHWDNYKANMYTLQIDDEDYAIKPMNCPGCMLYYKTRLHSYKEFPLRVAEVGHVHRQEASGALSGLMRVRAFHQDDAHVFLTPEQVEEETLNILQLVSTLYGTFGLEYHLELSTRPEKDTIGDDSLWELATDALNRALVQSGTPFIVRPGEGAFYGPKIDIHVKDAIQRTWQCGTIQLDMFLPERFELEYTTAQGTKSVPVMLHRALFGSIERFLGILIENFKGRFPLWLSPEQVRIITVADRHIPRAKELEEAWKRLGLVVTLDDSSESVSKKIRNAQNMQVNYMITLGDHEINENVLAVRTRDNRVINDVSVERFLNTILEEKNSLSLTALL

SEQ ID NO: 54990 - protein, 255 aa, Chlamydia pneumoniae
MKTIAVNSFKGGTAKTSTTLHLGAALAQYHQARVLLIDFDAQANLTSGLGLDPDCYDSLAVVLQGEKEIQEVIRPIQDTQLDLIPADTWLERIEVSGNLAADRYSHERLKYVLGSVQDKYDYVIIDTPPSLCWLTESALIAADYALICATPEFYSVKGLERLAGFIQGISARHPLTILGVALSFWNCRGKNNSAFAELIHKTFPGKLLNTKIRRDITVSEAAIHGKPVFATSPSARASEDYFNLTKELLILLRDI

SEQ ID NO: 54991 - protein, 344 aa, Chlamydia pneumoniae
MNKKKRVLTGDRPTGKLHLGHWVGSIKNRLELQNSPEYDCFFIIADLHTLTTKIRKEEVLDVDNHIYEVLADWLSVGIDPTKSIIYLQSAIPEIYELHLLFSMLISINRVMGIPSLKDMARNASIEEGSLSYGLIGYPILQSADILLAKAQFVPVGKDNEAHVELTRDIARNFNRLYGQVFPEPEVLQGELTSLVGIDGQGKMSKSANNAIYLSDSDATITEKVRKMYTDPNRIRATTPGRVEGNPLFIYHDIFNPHKDEVEEFKARYRQGCIKDIEVKARLAEELIHFLKPIKERRSEFLSKPLALQNVLEDGTHKMREVAKVTMEEVHDKFGFSHKWRSLLK

SEQ ID NO: 54992 - protein, 428 aa, Chlamydia pneumoniae [sequence omitted]

SEQ ID NO: 54993 - protein, 258 aa, Chlamydia pneumoniae
MMENLETFILKIYRGVPGKQYWESFELPLHPGENVISALMEIEKRPVNILGEKVNPVVWEQGCLEEVCGSCSILVNGVPRQACTALIQEYIDATQSREIVLAPLTKFPLIRDLIVDRSIMFDNLERIQGWVAADIEGETFGPQVTQEQQELLYALSQCMTCGCCTEACPQIDNKSDFIGPAAISQARYFNTYPGDKQSKKRWRALMGKGGIEGCGQAHNCVRVCPKKLPLTESISAVGREISKFSLRSLFSALFKKKK

SEQ ID NO: 54994 - protein, 261 aa, Chlamydia pneumoniae
MDLADAHVHLSDDAFEEDINSVLQRAQDSGVSLVVNVTTTEKELNRSFAYAERFPKIRFCHVGGTPPQDVDQDIEEDYRNFHAAAHSKKLAAIGEVGLDYCFATEEGIARQKEVLQRYLALSLECELPLVVHCRGAFNDFFRMLDQYYHNDPRSRPGMLHCFTGTLEEAQELISRGWFISISGIVTFKNAQDLRDLVVELPLEHLLIETDAPFLAPVPYRGKKNEPAHVLHTINAVANVKGMFPQELAALAYKNVLRFLHG

SEQ ID NO: 54995 - protein, 262 aa, Chlamydia pneumoniae
MMKYLPYIAITACIHGGILLLVFASPLPKKRLQPKAFQEKLVTIQPKPPVPTPSVVVDPAKTIRPSVATQPQKQAKCSPPQENVQKALQKPIPKVIKTEPPKPSPAPTVAKKTTATEKPPPSTTKKNTQLSKTQLQTLSEVAQALSLHVDKIEKSETSLKNISWPSTAQLTMHSELKATQEDELCELFRTHIALPSKGYVRIKLVLSPNGEIQECSFLSEVSAADKQLLTQRIHALPFQKFLEKYKVSKNISFHIKLVSNES

SEQ ID NO: 54996 - protein, 208 aa, Chlamydia pneumoniae
MRNNKRVEEEVFMTLSLVGKEAPDFVAQAVVNGETCTVSLKDYLGKYVVLFFYPKDFTYVCPTELHAFQDALGEFHTRGAEVIGCSVDDIATHQQWLATKKKQGGIEGITYPLLSDEDKVISRSYHVLKPEEELSFRGVFLIDKGGIIRHLVVNDLPLGRSIEEELRTLDALIFFETNGLVCPANWHEGERAMAPNEEGLQNYFGTID

SEQ ID NO: 54997 - protein, 206 aa, Chlamydia pneumoniae
MKIVIASSHGYKIRETKTFLKRLGDFDIFSLSDFPDYKLPQEQEDSITANALTKGIHAANHLGCWVIADDTMLRVPALNGLPGPLSANFAGVGAYDKDHRKKLLDLMSSLESLVDRSAYFECCVVLVSPNQEIFKTYGICEGYISHQEKGSSGFGYDPIFVKYDYKQTFAELSEDVKNQVSHRAKALQKLAPHLQSLFEKHLLTRD

SEQ ID NO: 54998 - protein, 639 aa, Chlamydia pneumoniae
MTCISELNEAQRKAVTAPLNPVLVLAGAGAGKTRVVTYRILHLINQGIAPREILAVTFTNKAARELKERIVNQCASTNEFDVPMVCTFHSLGVFILRRSINLLNRENNFTIYDQSDAEKLIKHALQQHNLKPNLASKIQAHVSQAKNRLLFPEDLDPNDYIDPVVSIYQEYQKKLIEANALDFDDLLFLTVRLLRESPEAQELYNQLWKALLIDEYQDTNHAQYTLMQLLSKQHRNVFAVGDPDQSIYSWRGANIHNILNFENDYPNAKVLCLEENYRSYGNILNAANALIKNNASRLEKELRSVKGPGEKIRLFLGSTDREEADFVAAEILQLHRVGNIKLRDICIFYRTNSQSRTFEDALLRRRIPYEIIGGLSFYKRKEIQDILAFLRIFISKSDIVAFDRTVNLPKRGIGSTTIFALTQYAIAQGLPILKACQQALDTKDVKLSKKQQEGLQEYLALFPQIEHAYNTLSLRDFIESVVRITGYLEILKEDADTFKDRKSNLEELYHKALESEQQNPKTHLELFLDDLALKGSDDDLNLTADRVNLMTLHNGKGLEFRVSFLVGLEEQLLPHANSLGGTYENIEEERRLCYVGITRAQDLLYLTAAQVRSLWGTVRMMKPSRFLKEIPKDYMIQVR

SEQ ID NO: 54999 - protein, 871 aa, Chlamydia pneumoniae
MKKSLIIVESPAKIKTLQKLLGSEFVFASSIGHIVDLPAKEFGIDVDHDFEPQYQVLPDKQEVINHIRKLAAKCEKVYLSPDPDREGEAIAWHIANQLPDSPLIQRVSFNAITKNAVTEALKHPRTIDMALVNAQQARRLLDRIVGYKISPILSRKLQQRSGISAGRVQSVALKLVVDREKAIDAFVPVEYWNLRVLMQDPKTTKTFWAHLYAVQGKKWEKEIPEGKTENDVLLINSEEKARHYAELLEKSSYTITRVEAKAKRRFAPPPFITSTLQQEASRHFRFSASRTMSIAQTLYEGVDLDSEDSTGLITYMRTDSVRVDPEALTTVREYIQQTFGKEYLPEKANVYTTKKMTQDAHEAIRPTDINLTPDKLKNKLSDDQFKVYNLIWKRFVASQITPAIYDTLAVQITTDTEIDLRASGSLLKFKGFLAVYEEKQDDENDQEEDHPLPPLHAQDALIKEEVSQEQAFTKPLPRFTEASLVKELEKSGIGRPSTYATIMNKIQSREYTTKENQRLRPTELGKIISQFLETNFPRIMDIGFTALMEDELELIADNKKPWKLLLQEFWTTFLPVVITAEKEAVIPRILTNIECSKCHKGKLVKIWSKNSYFYGCSEYPECDYRTSEEELAFNKEDYAEDTPWDSPCPLCGGVMKVRHGRYGTFLGCEKYPECRGTISIHKKGEEIEQEEPIPCPAIGCNGKIFKKRSRYNKIFYSCSEYPECSVIGNSIDAVITKYSGTEKIPYKKKTPTKKKSSAKTTKAAKTPSKKGKAKSSVKKSSEKKTGPLFLPSPDLAKMIGNEPVSRGEATKKIWDYIKEHQLQAPENKKLLVPDNNLATIIGPNPIDMFQLSKHLSQHLTKVSNDESSASS

SEQ ID NO: 55000 - protein, 335 aa, Chlamydia pneumoniae
MAAPIFIKNILLRSSIVYAPLAGFSDYPYRCMSALYQPGLMFCEMVKVEGILYAPERTSKLLDYNENMRPIGAQLCGSNPETSGEAAKILEGLGFDLIDLNCGCPTDKITKDGSGSGLLKTPELIGRILDKIINSVSIPVTVKIRSGWDMEHINVEDTVRIIRDAGASAVFVHGRTRAQGYHGPSKQEYISRAKAAAGKEFPVFGNGDIFSPEAAQAMLTTGCDGVLVARGTLGAPWIGKQIQDYLTTGSYEKIPFIKRKAAFLEHMRLVEDYYQSETKFLSETRKLCGHYLISAAKVRFLRSSLAKATSYQEVYQLVNDYEEADDSSLETFVKC

SEQ ID NO: 55001 - protein, 180 aa, Chlamydia pneumoniae
MTDPKIEKSALRKLFISIRRDLSEERKHEASSAVASFVRSFSKESVVLSFVSFNHEIDMQEANRILIQKCTLALPKIDQENLYPVLIPSIDDLISVVHPKDPFSKQTPISSDKITHVLVPGLAFDQQGYRLGYGHGFYDRWLAQHPYPSIRTIGIGYCEQKIDRLPQESHDIPLSQIYLC

SEQ ID NO: 55002 - protein, 353 aa, Chlamydia pneumoniae
MNLPDRKKALEAAVAYIEKQFGAGSIMSLGRHSATHEISTIKTGALSLDLALGIHGVPKGRVIEIFGPESSGKTTLATHIVANAQKMGGVAAYIDAEHALDPSYASLIGVNIDDLMISQPDCGEDALSIAELLARSGAVDVIVIDSVAALVPKSELEGDIGDVHVGLQARMMSQALRKLTATLSRSQTCAVFINQIREKIGVSFGNPETTTGGRALKFYSSIRLDIRRIGSIKGSDNSDIGNRIKVKVAKNKLAPPFRIAEFDILFNEGISSAGCILDLAVEYNIIEKKGSWFNYQEKKLGQGREFVREELKRNRKLFEEIEKRIYDVIAANKTPSVHANETPQEVPAQTVEA

SEQ ID NO: 55003 - protein, 170 aa, Chlamydia pneumoniae
MCKNRGVRGIVACDPRGVIGLEGKLPWHYPEDLQFFSETIQKFPIVMGRKTWETLPRKYFVDRAVVVFSHEKRQGVHGEIWVTSLEEFLLLDLSSPTFLIGGGELYSLFLENQIVRDFFISHIKKEYAGDTFFPLSLLETWTKTVLRDTQKITTCYYENHHSQNTKNISL

SEQ ID NO: 55004 - protein, 450 aa, Chlamydia pneumoniae
MSEPRFVCLSLGSNLGNRFKNLQIARTLLGEQAVLGLRSSVILETEALLLPGSPPEWDLPYFNSVLVGETTLSLRELLVTIKQIEKVVGRAEESPPWSPRTIDVDILLYGDESFCCDHTEITIPLSNLLSRPFLIALIASLCPYRRFCTQGSPYHNFTFGELAHHLPSPPGMIRRSLSPDTMLMGVVNVTNDSMSDGGMFLDPEKAVAQAEKLFTEGAAVIDFGAQATNPKVKQFLSVDQEWERLEPVLRLLKETWSNRKQYPIISLDTFYPEIILRAMDIYPIQWINDVSGGSQSMAEVARDCELSLVMNHSSSLPVDPKNILSFSVPIGEQLLSWGEKQLKMFSDVGLNANQVIFDPGIGFGKGAAQSLATLYEIAKFKRLGCPILIGHSRKSFLSLFGNHDPKDRDWETVGLSILLQQQGVDYLRVHNVAAHQKALSVAACEACAPI

SEQ ID NO: 55005 - protein, 591 aa, Chlamydia pneumoniae
MTKLSSKARNPLVLFQVRKLFMNTQNSQATEVSSEEESQKKLEELVALAKEQGFITYEEINEILPMSFDTPEQIDQVLIFLTGMDIQVLNQIDVERQKEKKKEAKELEGLARRTEGTPDDPVRMYLKEMGTVPLLTREEEVEISKRIEKAQVQIERIILRFRYSAKEAISIAHYLISGKERFDKIISEKEVEDKTHFLKLLPKLITLLKEEDTYLENLLLSLKQPDLSKQEAAKLNDSLEKCRIRTQAYLRCFHCRHNVTEDFGEVVFKAYDSFLHLEQQINDLKVRAERNKFAAAKLAAAKRKLYKREVAAGRTLEEFKKDVRMLQRWMDKSQEAKKEMVESNLRLVISIAKKYTNRGLSFLDLIQEGNMGLMKAVEKFEYRRGYKFSTYATWWIRQAVTRAIADQARTIRIPVHMIETINKVLRGAKKLMMETGKEPTPEELAEELGLTPDRVREIYKIAQHPISLQAEVGEGSESSFGDFLEDTAVESPAEATGYSMLKDKMKEVLKTLTDRERFVLIHRFGLLDGKPKTLEEVGSAFNVTRERIRQIEAKALRKMRHPIRSKQLRAFLDLLEEEKTGTSKVKSLKSK

SEQ ID NO: 55006 - protein, 99 aa, Chlamydia pneumoniae
MAPKKPNKKNVIQRRPSAEKRILTAQKRELINHSFKSKVKTIVKKFEASLKLDDTQATLSNLQSVYSVVDKAVKRGIFKDNKAARIKSKATLKVNARAS

SEQ ID NO: 55007 - protein, 176 aa, Chlamydia pneumoniae
MDQMLENHVFSGIHGTVESGVTLKNIEKIEIAEDAYVESGAYIVGPCILGSQTEVRHGAYLRGNVITGSRCVVGHCTEIKNSYLGHHTKAAHFAYLGDSVLSSEVNLGAGVRCANFRLDGRNIYVRSTSDKSKKIDTGRRKLGAFLGKGVAIGCNVVINPGQHILPHTRIRPGQVI

SEQ ID NO: 55008 - protein, 289 aa, Chlamydia pneumoniae
MLHALDTYRPSIESAIEKALEGFGPIGHPIRSPVEYALQGGGKRLRPGLVCMMAQGLGLNHDVMDSALAVEFVHTSTLIADDLPCMDNDDERRGRPTVHKAFDEATALLASYALIPAAYSHLRLNAKKLKEQGCDPREIDIAYNIIGDITDKNIGCSGVLGGQYDDMFFSNRGQEHVQSIMIKKTGSLFEIACISGWLFGGGDPQFAPIITSFSNNFGLLFQIKDDFSDLQKDSQQIGLNYALLFGEKAALELLARSQNNCLELLDRLSAGGLKNSSEFETIISSLGSF

SEQ ID NO: 55009 - protein, 169 aa, Chlamydia pneumoniae
MSSSIPTTQKITISIPTFVRFNIESINLTDEQKKTALTIGQNIATENTQVLGNFVDADGGLICQNDLSVGGNINITPQTFNTMVFNGRVNLSNSPFSYQDSLGNKRQDYANINTEQPQQYVPYGYYKLTRVMMMQRAALSGGHVGSGDIGWGESMYLGISSIKRQHKVQ

SEQ ID NO: 55010 - protein, 411 aa, Chlamydia pneumoniae
MIPTMLMFFIICFTLCSGFISLSQIALFSLPTSLISHYKRSKSKKQQRVATLLLHPHHLLITLIFCDIGLNIAIQNCLAILFGDAASWWFTVGLPLAITLILGEILPKAVALPFNTQIASSVAPLILCVTKIFKPLLHWGIVGINYVVQWILSKQQIDIIQPQELKEVLQSCKDFGVVNQEESRLLYGYLSLSDCSVKERMQPRQDILFYDIQTPLENLYLLFSKQHCSRVPICNDNLQNLLGICTARSLLLHDKPLQSSDDLLPLLKKPYYMPETISAKMALCQMAAEDETLGMIIDEYGSIEGLITQEDLFEIVAGEIVDQRDNKILYTTSGADVIIASGTLELREFSEIFDINLPTNNNIATIGGWLIEQIGTIPTTGMKLSWNNLLFQVLDAAPNRIRRVYIRKLYD

SEQ ID NO: 55011 - protein, 350 aa, Chlamydia pneumoniae
MRGLFDLDKKQKELQVLEEESSEENFWQDSVHAGKISEQIVSLRRQIQEYQELKSKIDAIEFFLEDADALEDPAICEDLEKEFLFCEKKLAVWETQRLLSGEADKNSCFLTINAGAGGTESCDWVEMLFRMYSRWATKHQWALEVVDRLDGEVVGIKHVTVKFSGMYAYGYAKAERGVHRLVRISPFDSNGKRHTSFASVDVFPEIDDQIKIEIRPNDLRIDTFRSSGAGGQHVNVTESAVRITHLPSGVVVSCQNERSQIQNRESCMKMLQAKLYQQVLQERLEKQSLDRKDKKEIAWGSQIRNYVFQPYTLVKDVRTGHETGNVQAMLDGELLDEFIKAYLAEFGEVS

SEQ ID NO: 55012 - protein, 572 aa, Chlamydia trachomatis
MNQRCRVIIIGGGLAGLSAAMQLADRGILVELFSLTKVKRSHSVCAQGGINAALNLKGENDSPYIHAYDTIKGGDFLADQPPVLEMCLTAPRIIHMLDRFGCPFNRDADGNLDVRRFGGTLYHRTVFCGASTGQQLMYTMDEQVRRRECQGKIIKRENHEFVRLITNTEGRACGVVVMNLFNHRLEVIQGDAVIIATGGLGVIFKMSTNSTICTGAANGRLFMQGMHYANPEFIQIHPTAISGLDKLRLISESVRGEGGRVWVPGCSSKTIIFPDGSRRPCGETGKPWYFLEEMYPAYGNLVSRDVGARAILQVCEAGLGIDGRHEVFLDVTHLPVETLNKLEAVLDIYHKFTGEDPKKVPMRIFPAVHYSMGGAWVDWPASDDRDRDSRYRHMTNIPGCFNCGESDFQYHGANRLGANSLLACLYAGLVAGDEAARFVESFGSCIYSQQDLNQALQQELEISREILSRQGGENAFALHEEIARVMVSNVTVKRENKALEETLHKLKEFRERIKKVSVHDSSRFANKTFHFVRQMEPMLELALAITTGALLRNEFRGSHYKPEFSKRDDVNG

SEQ ID NO: 55013 - protein, 692 aa, Chlamydia trachomatis
MIRQWYGFFLCLLFSYTSCFGVEENSGRATPTVELVSESEQAVEGEVLRIGVLIAIPEGEHIYWKNPGKLGMPLRISWDLPSGCRLLEEHWPTPEIFEEDGVVYFGYKHSTMVVADIRVSKEIETRPLEIKAQVEWLSCGASCLPGSSSRVLVIPIDQGPLIPNSKETFTFSRALAAQPRPLDAAIKISYQPDGLDVFVPAGKADRATQAWFIAENTRDFAYAQEVPLEQATTYIWKLKHPEGNMPKGIGLSGILIFKDDAGKVVASYQVEENQVEQLSALSWRFLSILLMAFIGGILLNIMPCVLPLITLKVFSLIKSAADHHSSSVIGGIGFTLGAIVSFWGLAFCAFLLKVLGQNIGWGFQLQEPMFVAVLIIVFFLFALSSLGVFEMGIICLSLGKKLQEEGGASVRKNQIWGAFFNGMLTTLVTTPCTGPFLGSVFGLVMAVSFVKQLAIFTAIGLGMASPYLLFASFPKMLAILPKPGPWMSTFKQLTGFMLLATATWLIWIFGVETSATAVTILLVGLWLAAVGAWILGRWGTLVSPRNQRLLASVVFIFCILSSLVITSIGVRYFDENVPPAHSSDWQSFSPEKLADLREKGIPVFVNFTAKWCLTCQLNKPLLHANMQAFAAKGVVTLEADWTKKDPKITEELARLGRASVPSYVYYPAGNKAPLILPERLSQSALEEMVFSQ

SEQ ID NO: 55014 - protein, 575 aa, Chlamydia trachomatis
MVSRVPGSSDPVDVNALSNLSPVQNQNSGVSVSAISLPNETVSKSGKTLKYSTELIAGIVVLGVALAIVAIALTILAPGVPQSIVLAIAFSGISVGGVTTLRSLINGIKTVVAPRMTFRQRAKSAALLGAGLTGAGLVLKLGSSYIPGGYGSALGKFGDISYNRGSGALFAGFAHYLYVRFFQSKKAASGEALTPEEMLIEGAKIRKLANGLVLLGVGFACLGIALAVVGTLAVTGGAATALIVLAPPLISLGISLVISNMLHTTLGQWRAFARAQQDQDLLVDTKLKNISQADFSYRVDNNIEVVVDPRESNLPSIERLSQGEIDAALSLTKKQQRILILSGLLLLAGVTCTLLAGFGGLPAVQVLLLFSIGGAVSSSAVPMVVSGMVHVAHQLKARLQISLARRREARLKARMIREMDNRRWGESRVGLLSKKEQEETWKLVGKPVIFQTEQAIREYVNGATKEERFQSILVATIILLAGLGVLSLTLIPGLAPISGGILAIGGALLGISITMYLQRFIQWLYEQLIKLRDYIQNRQSVIVQGASACDFDAEDIIVDLVAESFEVDGDSFVES

SEQ ID NO: 55015 - protein, 368 aa, Chlamydia trachomatis
MHENFDKRLELLLEGLALTRRSFDPEGKENELKELEQQAVQDGFWDDVVRAGKISERIARLKQQLSEFNELKNKVSAIQFFLEDEESSKDLEMQKELEKEFVFCEKKITEWETLRLLSGELDRNSCFLSINAGAGGTESCDWVEMLLRMYMRWASSHSWRIEVIDRLDGEVAGIKHITLKLVGEYAYGYAKAESGVHRLVRISPFDSNAKRHTSFASVEVFPEIDDKIEVEIRPGDIRIDTYRSSGAGGQHVNVTDSAVRITHFPTGIVVSCQNERSQIQNREACMNMLRARIYQKLLQERLEKQNIDRKNKKEISWGSQIRNYVFQPYTLVKDVRTGYEVGNIQAMMDGELLDAFIKAYLVDYGEIT

SEQ ID NO: 55016 - protein, 832 aa, Chlamydia trachomatis
MNRIHRTQGSLTDYNSTLEAIAKKIAKPDSATIVSQVAQYEQFKMEQEALKALLVSFDQKADQRYRNLIQRLEQLDVDRQTGRSTESQHIQEKPMASLQSENQVVAQAVVQSDSSMPIFTGIKQSWAVRLVQGIREILDQVLVDTSLFTEEERGDLLAIRMDAASLQDKQERLSTEDIRSLLSLSNDVMRVLQKASVSSTRQLELIQSLIDIFGTEENLEQSFAQVRLENFQAILSVIKERLTEEEFRVFQEVSEEISSIQRTSESHLSPEHIEAIARVGGHLSAKIVESELKASQKVDLCQRIAAMYQEQVDAVQAYHSLEQDALFVNSRQHSHFVQVISLVSSLMHSLSPTSEEERILLNPAMMVSVLPTVRAIGLRFDFLTAEQQQMVNAAVSSLQQQQLDEFLGVLCAHLVVVNCQNKETGLLEGLEESFSETLSGLSNNFVLTAKMQDILQVCSLQGFVTLANGDRYELFSYNDSGEAVCDEIALGDGFHKVLGTMLAVALSQAEVFKQECDRFILQADSEKNMIHKRMVQGEQKSLFLTKMQTELNAGKTIAQTKEVEASPLPSAVASVLIDHYMPKEVEFLEKISSRLYYGNKGSDIGNTILDAISLYVNSATYFGFANYIGQPPVVGKTRENIFAGSADNAKAKLDEEKKQVDVFLEITEAAKTTVTNQQSAVTNDDKLSTEQKAKIKAELTQYTDMLNAISNSLTSLKTQLAPLSVSTVEGVDGVFEVKNGIPGENGKNWRLVLQTLEDTVVSGEVGSPTNIGMFQMQALVHLNQQAYADMGQNFQLELQMHLTSMQQEWMVVATSLQLLNQIYLGLARNLLR

SEQ ID NO: 55017 - protein, 474 aa, Chlamydia trachomatis
MKIIHTAIEFAPVIKAGGLGDALYGLAKALAANHTTEVVIPLYPKLFTLPKEQDLCSIQKLSYFFAGEQEATAFSYFYEGIKVTLFKLDTQPELFENAETIYTSDDAFRFCAFSAAAASYIQKEGANIVHLHDWHTGLVAGLLKQQPCSQLQKIVLTLHNFGYRGYTTREILEASSLNEFYISQYQLFRDPQTCVLLKGALYCSDFVTTVSPTYAKEILEDYSDYEIHDAITARQHHLRGILNGIDTTIWGPETDPNLAKNYTKELFETPSIFFEAKAENKKALYERLGLSLEHSPCVCIISRIAEQKGPHFMKQAILHALENAYTLIIIGTCYGNQLHEEFANLQESLANSPDVRILLTYSDVLARQIFAAADMICIPSMFEPCGLTQMIGMRYGTVPLVRATGGLADTVANGINGFSFFNPHDFYEFRNMLSEAVTTYRTNHDKWQHIVRACLDFSSDLETAANKYLEIYKQ

SEQ ID NO: 55018 - protein, 487 aa, Chlamydia trachomatis
MSLSSSSSSDSSNLKNVLSQVIASTPQGVPNADKLTDNQVKQVQQTRQNRDDLSMESDVAVAGTAGKDRAASASQIEGQELIEQQGLAAGKETASADATSLTQSASKGASSQQCIEDTSKSLELSSLSSLSSVDATHLQEIQSIVSSAMGATNELSLTNLETPGLPKPSTTPRQEVMEISLALAKAITALGESTQAALENFQSTQSQSANMNKMSLESQGLKIDKEREEFKKMQEIQQKSGTNSTMDTVNKVMIGVTVAITVISVVSALFTCGLGLIGTAAAGATAAAAGATAAATTATSVATTVATQVTMQAVVQVVKQAIIQAVKQAIVQAIKQGIKQGIKQAIKQAVKAAVKTLAKNVGKIFSAGKNAVSKSFPKLSKVINTLGSKWVTLGVGALTAVPQLVSGITSLQLSDMQKELAQIQKEVGALTAQSEMMKAFTLFWQQASKIAAKQTESPSETQQQAAKTGAQIAKALSAISGALAAAA

SEQ ID NO: 55019 - protein, 290 aa, Chlamydia trachomatis
MPNKPSHAFRLIHCSDIHFCVLPKNPFQCFNKRFKGLLRQLIGGVSFQAFAISQRFPQLVKQLEADSVCVTGDMTITALDTEFRFAKEFLSRVESVAPVYIVPGNHDVYTHRALKKQTFYSYFPNKELQTHRIAFKKLTPTWWLVLLDCSCFNGWYTANGEVTDSQLLALEQFLSSLPASEHVIVANHYPLSPTTRPAHDLLNYAPLKSLLMNSPSVRLYLHGHDHYVELDHLPPLVVNSGSLTLPSNARFHIIDLHPEGGYQIATAALTNLKETSTPLTISIEETTISL

SEQ ID NO: 55020 - protein, 803 aa, Chlamydia trachomatis
MMKSLFYHFIGIGGIGMSALAHVLLDRGYSVSGSDLSEGKVVEKLKNKGAEFFLGNQEEHIPEGAVVVYSSSISKKNPEFLSAKSRGNRVVHRAELLAELAQDQISIFVTGSHGKTTVSSLITAILQEAKKNPSFAIGGLNQEGINGGSGSEYFVAEADESDGSIRCYTPEFSVITNIDDEHLSNFEGDRELLLASLKDFALKTQQICWYNGDCPRLRSCLQGHTFGLDSSCDLHILSYYQEGWRLYFTAKYQDVVYADIEVQLVGMHNVLNAAAAMGIALSLGIDEGAIRNAFRGFSGVQRRLQRKNSSETFLFLEDYAHHPSEISCTLRAVRTAVGQRRILAIYQPHRFSRLRECIDSFPSAFKDADEVLLTEVYSAGEEAEDISYQKLAEAISQESIVKCTHIPFHELQRHLEQSIRVHDVCVSLGAGNIVNLGEKLRDFEPQKLHLGIICGGKSCEHEISVLSAKNIAKHLSKSFYDVSYFLITREGLWESVSSLETAEDSGKSVFDPEIAQRLEKVDVVLPILHGPYGEDGAMQGFLETIGKPYTGPAIAFSAIAMNKVFTKRFMSDLGIPVVPYLPLTLAGWKQEQDKWLAHIVEAFSFPIFVKSSHLGSSIGVFEVHNVIELRDAINEAFMRDNDVFVEENRLGCKEIEVSVLGDGSGAFVVAGLHERRGSGGFIDYQEKYGLSGKSSAQIVFDTDLSKEIQEQILEAADKIYRLLLGKGSCRIDFFVDEEGNFWLSEMNPIPGMTETSPFLTSFIRKGWSYEQIVHQLVIDGLQRFNQRQRLISTSFVDQAFAIQ

SEQ ID NO: 55021 - protein, 566 aa, Chlamydia trachomatis
MKVSLSFKHLVPKLVTCLKEGYSFNTLKKDFTAGITAGILAFPLAIAIAIGIGVSPLQGLLASIIGGFLASALGGSRVLISGPTSSFISILYCIGVKYGEDGLFTITLMAGIFLIIFGLAGLGTFIKYMPYPVVTGLTTGIAVIIFSSQIRDFLGLQMGDGVPLDFIGKWAAYWDYLWTWDSKTFAVGLFTLLLMIYFRNYKPRYPGVMISIIIASTLVWILKIDIPTIGSRYGTLPSSLPGPVFPHISITKMLQLMPDALTISVLSGIETLLAAVVADGMTGWRHQSNCQLIGQGIANIGTSLFAGMPVTGSLSRTTASIKCGASTPIAGIIHAICLSFILLLLAPLTIKIPLTCLAAVLILIAWNMSEIHHFIHLFTAPKKDVVVLLTVFILTVMTTITSAVQVGMMLAAFLFMKQMSDLSDVISTAKYFDESEQPQNDLLFSKNEVPPFTEIYEINGPFFFGIADRLKNLLNEIEKPPKIFILCMTRVPTIDASAMHALEEFFLECDRQGTLLLLAGVKKTPLSDLRRYHVDELIGVDHIFPNIKGALLFAKALIKLESKSSQ

SEQ ID NO: 55022 - protein, 446 aa, Chlamydia trachomatis
MSAEILARVQFALFIGFHYLFVPISLGLSMMIVLMEGLYLFTKKSIYKQLTWFWIRIFTLTFVVGVVTGLMQIFSFGANWSRFAEYTGNVFGMFLGSEGMFAFFLESGFLGVLLFGRYKVSKKMHFFSACMVALGAHMSAFWIVCANSWMQTPSGYEMVMRNGMLVPQMTSFWAAVLSPSALQRFTHVVLGAWLSGIFLVLSVSAHYLRKERHKDFANQGLKISMFCAFLVLALQLWSADVTARGVAKHQPAKLAAFEGVFKTQGHTPIYLLGIVDMKKERVIGIPIPSGLSLLVHRNAKTPVTGLDQFPKDEWPNVAFVFQTYHLMVMLWGVMVLLALIAFAVYKKKSWSCKKGILWILSFSVLCPELCNEIGWISTEVGRQPWVVYGLLKTKDATSPIVNAGQIWQSLILFSIIFICLLSVFVSLLLKKIGEGPDEQDLIEVDL

SEQ ID NO: 55023 - protein, 273 aa, Chlamydia trachomatis
MTTPTLIVTPPSPPAPSYSANRVPQPSLMDKIKKIAAIASLILIGTIGFLALLGHLVGFLIAPQITIVLLALFIISLAGNALYLQKTANLHLYQDLQREVGSLKEINFMLSVLQKEFLHLSKEFATTSKDLSAVSQDFYSCLQGFRDNYKGFESLLDEYKNSTEEMRKLFSQEIIADLKGSVASLREEIRFLTPLAEEVRRLAHNQQSLTVVIEELKTIRDSLRDEIGQLSQLSKTLTSQIALQRKESSDLCSQIRETLSSPRKSASPSTKSS

SEQ ID NO: 55024 - protein, 252 aa, Chlamydia trachomatis
MLPKALDQLLGRYMSYSFFRRKLAGIEFIECPGDPEAPVIIFCHGYGASADHLTFFPTMCVCANLRPTWVFPHGIEQLPYQLGGGRAWFPLDTVLFEKLISSQEITPDTDRLYQQLLDVDFEKPKQALEGLIHELERDRSEVIIGGFSQGAMMTTHLMLSSRLPYRGALICSGAAVPNQSWEENASLCGKTPYIQSHGYDDPILPYFLGERLYKVLTASLKGEMVSFHGGHEIPVVMMQKIQESIALWSQLT

SEQ ID NO: 55025 - protein, 298 aa, Chlamydia trachomatis
MAHTIRFTKFSFPLYFSKTLSWFIIGGFLAACGVHMILAPNDLIDGGIVGLSMIAAHSFGHQFLPVFLVLFNLPFIILAYKRIGKYFVVQMITAVIIFSCWLWLIEVLPEWLGIQPFIFDGSEIETIVLGGVVLGAGGGLIIRHGGATDGTEILGIIVNKKRGYTVGQVILFVNFFIFSLGGIVYRNWHTAFMSLLTYAVAIKVMDMVILGFEDTKSVTIITSSPRKLGNILMETLGVGLTYLHAEGGFSGEPRSLLYIVVERLQLSQLKEIVHREDPSAFIAIENLHEVINEKRTSH

SEQ ID NO: 55026 - protein, 421 aa, Chlamydia trachomatis
MTASGGAGGLGSTQTVDVARAQAAAATQDAQEVIGSQEASEASMLKGCEDLINPAAATRIKKKGEKFESLEARRKPTADKAEKKSESTEEKGDTPLEDRFTEDLSEVSGEDFRGLKNSFDDDSSPDEILDALTSKFSDPTIKDLALDYLIQTAPSDGKLKSTLIQAKHQLMSQNPQAIVGGRNVLLASETFASRANTSPSSLRSLYFQVTSSPSNCANLHQMLASYLPSEKTAVMEFLVNGMVADLKSEGPSIPPAKLQVYMTELSNLQALHSVNSFFDRNIGNLENSLKHEGHAPIPSLTTGNLTKTFLQLVEDKFPSSSKAQKALNELVGPDTGPQTEVLNLFFRALNGCSPRIFSGAEKKQQLASVITNTLDAINADNEDYPKPGDFPRSSFSSTPPHAPVPQSEIPTSPTSTQPPSP

SEQ ID NO: 55027 - protein, 392 aa, Chlamydia trachomatis
MFKHKHPFGGAFLPEELLAPIQNLKAEWEILKTQQSFLSELDCILKNYAGRQTPLTEVKNFARAIDGPRVFLKREDLLHTGAHKLNNALGQCLLAKYLGKTRVVAETGAGQHGVATATACAYLGLDCVVYMGAKDVERQKPNVEKMRFLGAEVVSVTKGSCGLKDAVNQALQDWATTHSFTHYCLGSALGPLPYPDIVRFFQSVISAEVKEQIHAVAGRDPDILIACIGGGSNAIGFFHHFIPNPKVQLIGVEGGGLGISSGKHAARFATGRPGVFHGFYSYLLQDDDGQVLQTHSISAGLDYPSVGPDHAEMHESGRAFYTLATDEEALRAFFLLTRNEGIIPALESSHALAHLVSIAPSLPKEQIVIVNLSGRGDKDLPQIIRRNRGIYE

SEQ ID NO: 55028 - protein, 476 aa, Chlamydia trachomatis
MKVWGIVPGAVIVTMIYGWMSRRYSRGTVFISLVGGFLGFFALFATVIYPIGDALHLNKLAAKLQSILPPGGRGFVVMVQYWSYSLYYVMSELWSSIVLSTLFWGVANHITSVREAGRFYALINTGLNLSSVFAGEVSLWLGRNPVIAFPMAVDPWHEVLLNITLLIVLAGGVILYLYQKLDRLMDETSMLKEGLAAEMSVAQLKKEKKRSKAKAKSLFALLLRSRYLLGIAVVVLSYNLVIHLFEVVWKDQVCRIYASRVEFNSYMSRITTLTGIVSALTGIFAAGQTIRRWGWTIGALVPPLTMLITGALFFGAIYAVKGDAMIFGGILGISPLVLTAWLGGVQNVFSRAIKFTYFDQTKEMAFIPLEDDEKNYGKAAIDGVISRVGKSGGSLVYQGLLIIFSSVAASLNAITIVLLLALGSWIFVIAWLGREYTAKTEALFRVNVSEEDVLQEEREASSLVDAESREEPVTTL

SEQ ID NO: 55029 - protein, 155 aa, Chlamydia trachomatis
MIANHDEISFGLLRYFLGGYRPSKTARLAMSIFQIHGIMLDSQLVKTSISTLTPTLLKKSVLSLLAILHITNQKSIPKYSKGSRGLFVLSRVNSIFTATTISPSLSLRQCPDRYTIRAGRNLPDKEFRYLSTVIVTAAIHQGLGSMLRFAADISL

SEQ ID NO: 55030 - protein, 47 aa, Chlamydia trachomatis
MTSSQHGPYAQGDTRATMASTEGGKIARWSKSSKLAPVRIVVCNSTT

SEQ ID NO: 55031 - protein, 155 aa, Chlamydia trachomatis; identical to SEQ ID NO: 55029

SEQ ID NO: 55032 - protein, 47 aa, Chlamydia trachomatis; identical to SEQ ID NO: 55030

SEQ ID NO: 55033 - protein, 60 aa, Chlamydia trachomatis
MPWIFTSIRSSAPSGTPSLLNTTLSYRVSYRHTRDVGFMLSPVYYRRNDSRLVSCYALFK

SEQ ID NO: 55034 - protein, 60 aa, Chlamydia trachomatis; identical to SEQ ID NO: 55033

SEQ ID NO: 55035 - protein, 333 aa, Chlamydia trachomatis
MTRLPLLKRPRRNRKSAAIRSMIRETNMVSSDLIWPIFLKEGSGIREEIPSMPGVYRWSLDTISRELERLCLIGLKAVILFPVIEDQKKDQFGAYASHPYNIVCRGIQEIKKSFPQLCVISDIALDPFTTSGHDGIFYNNEVLNDESVRVYGDIATLHAEMGADIVAPSDMMDGRVRHIREKMDQMGFVNTGILSYSAKYASYLYGPFRDALSSHPQSGDKRQYQMDPANVREALLECRLDEEEGADMVMIKPAGFYLDVIMKAQECTHLPVVAYQVSGEYSMIMAASLHGWLSKEGAISESLLAIKRAGATAIISYATPWVLEWLARDALPF

SEQ ID NO: 55036 - protein, 1026 aa, Chlamydia trachomatis
  MISC_FEATURE (105)..(105): X=any amino acid
  MISC_FEATURE (107)..(107): X=any amino acid
  MISC_FEATURE (125)..(125): X=any amino acid
MSSFDIFSPTTSVSGKFFLEASAGTGKTFTIEQVILRSLLEGNVEQTKNILVVTFTNAATNELKLRIQESLKQALTLFSQALSHPETPLPPYVSSQETKVKQLYXKXRNSLATLDEMNIFTIHGXCRFTLEQHFPWVQPIHPSSMFSEPQTIQQYILDYLRQNSWENVLSPKQYAFLSYHHRATTQQTRHLADRLLQDYASTPNLALPPLSITLQKVKNWSSQYKHLSPLSLEELQDFSLRFKQSDLPIDRELPDFVKQFETDPNSLDILFFPGMVQKFQEENRNKKKLGPPFSPLDPFLKDWLLIAQPFCQKEPIFHTLLKSVQQHLKTYCAQSYSHDESIATLESLLAQNDHVVSQLRKQFQLVLIDEFQDTDKRQWKIFSKLFASPDYSGSLFLIGDPKQSIYEWRNADLPTYLQAKNSFPKESQLILDTNYRSTPQLMQALNHLFSLPSPFLETPQTILYHPLQSKGSASTSYSEFRPIHFFTTQDSQEEALWISKTASYLRSTFAIPFGNMAVLVQDYPQALKLITHSTIPMAYCKEKRIFDRTESPYLLILLLEALLYPENQQKIQAILLSRFFHLSATDIHQHLKIFSSLFFMLNTYLHQYSLLATFYKLMGETVFSQTIGETLLQTPLGDIIFQELEELCLYLDKTTENPHHKLFHLINILDTGKYDEELSFSSQSNDDNVLKITTVHSSKGLEYDVVFCSSLNKVKEKSPSVHMREMYVACTRAKKFLFIPFSSIEKRLQSNKKVSALANYANITQHDNIPHLVETLTASHPEFFSSGTQPPESNISIFSEPLPEQEFFSLPILSSQPIYSFSSTTESQYFTEPFQEISSSSLFPGGSLTGTLIHKLLESLSGNFNASLEEITHKAQTLLKNTILEGFESIISEKIYTAFSTKLPFVSGSFALKDVHPYNIRVEETFLLQENGELWQGIVDLFFEHNNRFFIIDWKTSFLGDEPSLYSPDKLLLYIQRQGLDKQGVLYKRAAKKFLHQFNSSLQIEMAFVFIRGIDDKGNGFLQPSP

SEQ ID NO: 55037 - protein, 865 aa, Chlamydia trachomatis
MKKSLIIVESPAKIKTLRKLLGEGFIFDSSLGHIVDLPAKGFGIDIEKGFIPDYQILEGKEEVIRKICAEAKKCDVVYLAPDPDREGEAIAWHIANQLPKNTKIQRISFNAITKGAVTEALKHPREIDMALVNAQQARRFLDRIVGYKISPILGRKLQRWSGVSAGRVQSVALKLVVDREYAIEQFVPVEFWNIRVNLQDPKSQKTFWAHLHSVNGKKWEKEIPEGKSSEDVVLIDSKEKADDLVSLLESATYCVDRVESKEKKRNAYPPFITSTLQQEASRHYRFSSSRTMNIAQTLYEGVDLDSQGAVGLITYMRTDSVRTDPEAIKQVRKYIENHFGKEYVPSSPNMYATKKMAQDAHEAIRPTDVSLSPESIRTKLTEDQYKLYSLIWKRFVASQMIAAIYDTLAIQIATNKGIDLRATGSCLKFKGFLAVYEEKRDEEGDEDENIQLPKLHERDELKKEEIEAEQSHTKPLPRFTEASLVKELEKSGIGRPSTYATIMNKIQSREYTLKEGQRLRPTELGKVVCQFLETNFPRIMDIGFTAKMEDELELIADNKKPWKQLLQEFCELFLPFVVTAEKEAFIPRIVTEMDCPRCHKGKLVKIWSKNRYFFGCSEYPTCDYKTSEEELTFDKSEYADDTPWDAPCALCGGQMKVRHGKFGSFLGCENYPQCHYIVNLFKKGEAGSEPEEIVSCPAEGCTGHLVKRRSRFNKMFYSCSEYPACSVIGNSVDAVIEKYTGTPKTPYEKKIKAKKATASKKGKATKGKASTTKTKKKSTVTTKNRKTATYTPSSALAAVIGPDPIDGFPEATKKIWAYIKEQGLQSPNNKRVIVPDSKMKHVIGDDPIDMFALSKKIQAHLTKQE

SEQ ID NO: 55038 - protein, 334 aa, Chlamydia trachomatis
MASPVFIKNLPLRSQIVYAPLAGFSDYPYRRMSALYHPALMFCEMIKMEGLHYCPKRTLRLLDFSESMRPIGGQLCGSRPDLAGESAKILEGLGFDLIDLNCGCPTDRITKDGSGSGMLKTPQLIGKVVESIVEAVSVPVTVKIRSGWDFEHINVEETVHIIKESGASAVFVHGRTRSQGYQGPSNLEFIARAKRAAGEHFPVFGNGDVFSPEAAKTMLETTHCDGVLVARGTMGAPWIGKQIEDYLTTGTYSSPSFSMRKQAFVQHLQWIEEYYQSEEKLLTDTRKLCGHYLILSPRVRSLRASLAKASSSQEVYQLINDFEESAEGEESSPE

SEQ ID NO: 55039 - protein, 178 aa, Chlamydia trachomatis
MDEILKQKSCLRHEGLAKRKQLSSKRREEASLSLMDFVQQTIPQGFVLSYIPFRSELDVRAINLWLAQENRLLLPKMQGNTIVPIEPSFAKIFHLSSPKDVNQMAGNEVGAHLVTTALVPAVVFDQEQFRLGYGGGYYDRFLARYPRIWTVGVGFKEQLIASLPRESHDIPLNTLYLT

SEQ ID NO: 55040 - protein, 354 aa, Chlamydia trachomatis
MSVPDRKRALEAAIAYIEKQFGAGSIMSLGKHSSAHEISTIKTGALSLDLALGIGGVPKGRIIEIFGPESSGKTTLATHIVANAQKMGGVAAYIDAEHALDPNYAALIGANINDLMISQPDCGEDALSIAELLARSGAVDVIVIDSVAALVPKSELEGEIGDVHVGLQARMMSQALRKLTATLARTNTCAIFINQIREKIGVSFGNPETTTGGRALKFYSSIRMDIRRIGAIKGGENFDIGNRIKVKVAKNKLAPPFRTAEFDILFNEGISSAGCIIDLAVEKNIIDKKGSWFNYQDRKLGQGREAVREELKRNKELFQELERRIYESVQASSSQALASACLDQEAREVAEAAK

SEQ ID NO: 55041 - protein, 269 aa, Chlamydia trachomatis
MFPNNKMLLIAGPCVIEDNSVFETARRLKEIVAPYSSSVHWIFKSSYDKANRSSLQNYRGPGLKLGLQTLAKIKETFDVEILTDVHSPDEAREAAKVCDIIQVPAFLCRQTDLLVTAGETQAIVNIKKGQFLSPWEMQGPIDKVLSTGNNKIILTERGCSFGYNNLVSDMRSIEVLRRFGFPVIFDGTHSIQLPGALQSQSGGQTEFIPVLTRSAIAAGVHGLFIETHPNPASALSDAASMLSLKDLERLLPSWVQLFTYIQEMDTVSI

SEQ ID NO: 55042 - protein, 78 aa, Chlamydia trachomatis
MKEFLAYIVKNLVDRPEEVHLKEVQGTNTIIYELTVAKGDIGKIIGKEGRTIKAIRTLLVSVASRDNVKVSLEIMEER

SEQ ID NO: 55043 - protein, 333 aa, Chlamydia trachomatis
MVREGEEHIDEEFSLGVIGVSYRETALQQREQVLQFLQQAQLSFYPKFPQEEGRSVLLSTCHRVELYGMATEAIFSTLEKEIREMGAIPYFYRNQDCFSHLFCVVGGMDSLVLGETEIQGQVKRAYLQAIEEQKLAFALHFLFQKALKEGKVFRTKRSSPSTEITIPAFVQHELQKQKMARSASLLFMGYSEINRSVAYYLQKQGFSRITFCSRQPLSLRSMDQVLREEVCFQDPYHVIFLGSSELRHAFPRSLWEGVWDFPGRLVFDFAVPRALPVQPACRDRYIDMEQISDWLRQHQKEVFPLQLDSLREVGYRYWESLNRRLARRRYASV

SEQ ID NO: 55044 - protein, 824 aa, Chlamydia trachomatis
MGIRLVVDKGPLSGTVLILENGTSWSLGSDGKASDILLQDEKLAPAQVRVTLKDGEYYLENLDVSRPVLVNGVAITAPTLLKEGIPFVMGSCEWSFFKGEEVEGDIELSFQTEENGGEAEQQAQGSSQVESKTNTGPRGHSSGASSADGVSASAAEKEQKLAESFLASVEKGTGAVQEDSNREVSLQENQQAAPAKEKMNLELPSVNQEQPKQATPSGSGELTQSQNVSMEENRPSPDQNQQPQLSSDSEPDAKGAENQEQLSQSSSPSQENPKQSEDSSSATKESVATPEEKLPEAEGDNSASSEEEKIEEESSEGESNEEQTVEAPAEEEKKEEKGEVLAPFNVQDLFRFDQGIFPAEIEDLAQKQVAVDLTQPSRFLLKVLAGANIGAEFHLDSGRSYIVGSDPQVADIVLSDMSISRQHAKIIIGNDSSVLIEDLGSKNGVIVEGRKIEHQSTLSANQVVALGTTLFLLVDYAAPSDTVMATISSEDYGLFGRPQSPEEIAARKEEEEEEKRKRATLPTGAFILTLFVGGLALLFGIGTASLFHTKEVVSIDQVDLIHDIEHVIQQFPTVRFTFNKNNGQLFLIGHVKNSIDKSELLYKVDALPFVKSVDDNVIDDEAVWQEMNILLSKKPEFKGISMLSPEPGVFVISGYLKTEEQAACLSDYLNLHFNYLSLLDNKVVIETQVIKALAGHLIQSGFANVHVAFTNGEAVLTGYINNKDADKFRAVVQELQDIAGIRVVKNFVVLLPAEEGVIDLNMRYPGRYRVTGFSKCGDISINVVVNGRILTRGDVLDGMTVTSIQPHSIFLEREGLKYKIEYNK

SEQ ID NO: 55045 - protein, 672 aa, Chlamydia trachomatis
MNKNSLTCQDLKEVGYTVNFEDISILELLQFVSKISGTNFVFDSNDLQFNVTIVSHDPTSVDDLATILLQVLKMHDLKVMEQGNNVLIYRNPKLSQLSTVVTDGSAKDTSEAVVVTRVFRLYSVSPSAAVEIIQPLLSHDAIISASESTRHIIVSDIAGNIEKVRELIQALDSPGASIDMSEYEVQFANPAALVSYCQDVLGAMTEEEGFQIFIQPGTNKIFVISSPRLTTKAIQLLQSLDIPEMAHTLDDVTSPASALGSSGSANPKSMRFFMYKLKYQDGSAIAQAIQDIGYNLYVTTAMDEDFINTLNTIQWLPINNSIVVIGNQANVDKVVSLLNGLDLPPKQVYIEVLILETSLEKSWDFGVQWAALGDEQGKVAYASGLLSNTGVVDPLRNQTPPVAPNPGNISLPTPGQLAGISDMMYGSSAFGLGIIGNVLSHNGKSYLTLGGLLSALDQDGDTTVVLNPRIMAQDTQQASFFVGQTIPFQTTSTVIQETGSVTQNIEYEDIGVNLVVTSTIAPNNVVTLQIEQTISELHSAQGVLTPVTDKTFAATRLQVPDGCFLVMSGHIRDKLTKIVSGVPLLSSLPLIKGLFSRTIDQRQKRNIMIFIKPKVISSFEEGTVLSNSEGYRYNWESERGSLEVAPRHAPECQNAPKVQTESDFKMLEIEAE

SEQ ID NO: 55046 - protein, 356 aa, Chlamydia trachomatis
MLPNQILTDITTVKHSFKAETFRPISTLSLSRNLSVSKFVPCLSKENKRDVLETIAKEFSNIEGEEFFVLPLKDLPIWQRECLLEHYLCPYDLSGSLEGEALIVNRAGTLLAGINLRDHLVLHGIDFVWQPEMLLQKLIDLDIRLQQSLSFAFSPDFGFLTTDPLRCGTALVARAFIHVPALRYRNKLSELLVPHQREFACSSLLPLSQESLGDILCLSNICSLGVSEEQILSSLRLVVSKILSAETEARNLLLKENSTEIKNRILRSIGMLTHSCYLDLQEALDATSWIQLGMSMQWIEDSEKHPLWSPMFWDLRRGHLALYNQDPANKTIEKEIIAQIRAQTTKPQAERLILRV

SEQ ID NO: 55047 - protein, 177 aa, Chlamydia trachomatis
MAFGMNPSEESSALCYNCQQPATICFTEISENITSRCYVCNNCPYPSRYYDRETVLASPTNETLILECGNCKTKWCIRDTDEILLGCALCYRTFKSLILSRLLRYQAISSYTADKTNNFHIGRSLGNIEKPTVNPAMRLIALHEALQETLRREDYEQAAEIRDQINQLKNQNTTDAP

SEQ ID NO: 55048 - protein, 179 aa, Chlamydia trachomatis
MTLTSAEKEMSGVLTFFQKEIRGFRTGKAHPALVETVTVEVYGTTMRLSDIASISVSDTRQLLISPYDAGNVSAISKGILAANLNLQPIVEGATVRINVPEPTEEYRREVIKQLKRKSEEAKVSIRNIRRTCNDRLKKDDSLTEDAVKGLEKKIQELTDKFCKQIEELAKQKEAELSSI

SEQ ID NO: 55049 - protein, 245 aa, Chlamydia trachomatis
MMKKRVKRVLFKISGEALSDASSSDKISEERLSRLIAELKVVRNADVEVAVVIGGGNILRGLSQSQNLQINRVSADQMGMLATLINGMALADALKTEDVPNLLTSTLSCPQLAELYNPQKASDALSQGKVVICTMGAGAPYLTTDTGAALRACELKVDVLLKATMHVDGVYDRDPREFADAVRYDHISYRDFLSQGLGAIDPSAVSLCMEAGIPIRMFSFTKHSLEEAIFNTVGTVISSTEGGQL

SEQ ID NO: 55050 - protein, 282 aa, Chlamydia trachomatis
MSDFSMETLKSLRQRTGVGLTKCKEALEHAKGNLEDAVVYLRKLGLASAGKKEHRETKEGVIAASVDEHGAAIVEVNVETDFVANNSVFRTFVTGLLSDILNNKLSDVDALAQVTSSQEPSLSVEELKAVTMQTVGENIRISRALYTPVNSNQSVGIYSHGNGKAVALVFLSGSDKQEALAKDIAMHIVASQPQFLSKESVPQEVLEREREVFSSQLSGKPQEVIEKITTGKFKAFFQETCLLEQAFIKDPDVTIQELVDRAAKASGEPLKVEHFVFWKIGA

SEQ ID NO: 55051 - protein, 281 aa, Chlamydia trachomatis
MVLSCELTLKELLESGAHFGHQTSRWNPKMKPFIFEEKNGLYIIDLAKTLAQLKKAVSCIQKTVEQGKSILFVGTKKQAKQIIKEAAIECGEFFASERWLGGMLTNMATIRNSVKTLNNIEIDLASSNSVLTKKETALLAKRHRKLLNNLEGVRHMNSLPGLLVVIDPGYERIAVAEAGKLGIPVMALVDTNCDPTPINHVIPCNDDSIKSIRLIVNALKDAIIDTKKRSGFEILSPVRPIERPAEEIVEGLPLPNEAQNDANSKEGFLVWTDTDNSEALR

SEQ ID NO: 55052 - protein, 335 aa, Chlamydia trachomatis
MEEAEKHLAKEFLCSGINLFLSGEYEQAEERLKESLELDPEAGLAYCYLGIIALETGRTAEALVWCKKGLDEEPGDSYLRYCYGVALDKADRVEEAIGHYQAYAELHPEDIECLFSLGSAYHRVLRYEDAIACFDRIAQLDPWNPQSLYNKAVILSDMEDEEGAIDLLESTVKRNPLYWKAWVKLGYLLSRNKMWDRATEAYERVVQLRPDLSDGHYNLGLCYLTLDKTRLALKAFQESLQLNSEDADAHFYIGLAHMDLKQNELAYDAFYRALGINLDHERSHYLLGYLHHIQGESDKAEKELSFLMSKESVFAPLLQKTVSSSGFIREKETLF

SEQ ID NO: 55053 - protein, 255 aa, Chlamydia trachomatis
MLHLYDLHVCCEEKKILEGLSLSIRPGELHIIMGPNGAGKSTLAKVLSGDDSVEVASGRMTLSGSDLIEMSPEKRAHAGMFISFQHPPEIPGVNNRLFLKEACNACRKARNQEVLEDSAFNELLASLEETYGFPGFHFFPDRNVNEGFSGGEKKKNELWQMLILEPKMVVLDEPDSGLDVDALKGICSVVQTYRRKHPETAFCIVTHNPRLGDLLHPDHVHILLNGRVVFSGDMHLMEELERKSYQELLDVVTRE

SEQ ID NO: 55054 - protein, 290 aa, Chlamydia trachomatis
MSNPPLIQASRLTKHYYKRSFWFQQKKIATTPLNNVSFTIPKHKIVGLIGESGSGKTTLALGLAGLIPLTSGHLTLNDKAVPLHSKQGRQYLSSQVRMVFQNPRSSLNPRKTIFDTLSHSLLYHRLVAKTDLGATVERALSLVGISTDYLYAYPHQLSGGQLQRISIARALLGAPQLIICDEVVSALDLSMQAQILNTLTSLQQQAQLTYLFISHDLAVVRSFCSELIIMYKGQLVESGPTEQIFCHPQHPYTRMLLHSQLPEFPEHRRDLRTPLITEELFQNPKDHPTL

SEQ ID NO: 55055 - protein, 321 aa, Chlamydia trachomatis
MSAQPLLQVKNLSVSLNRNTVSFPVVEDLSFNVFPGQTLAIIGESGSGKSITAQSLMQLLPEEYFSISGEAFLHKENLLDRKNLLSKTLFGSKMAMIFQNPLASFDPVFTIEQQFHEVIRTHLDLTKKVAHEQIVTVLRETGFQDPERCIKLYPHELSGGMLQRMAIAMTLLTSPDLLIADEPTTALDVSVQYQILQLLKTLQKKTGMSLLVITHDMGVVAEMADDVFVLYAGRMAEYSSVQDIFHSPAHPYTKDLLASRPSQYKKQTFVPISGHPPHYTNLPKGCCYSPRCQKALPICYKQSPHAISLNDHHHVRCWLYE

SEQ ID NO: 55056 - protein, 426 aa, Chlamydia trachomatis
MWWLLVCVVIGGFYTAWNIGANDVANAVGPSVGAGVLTLRQAVLIAAVFEFLGAVVLGDRVIGTIESGLVAPADHVLSSQDYVFGMTAALFATGVWLQIASFFGWPVSTTHAIVGGVLGFGIILKEDAVIYWDSCARIFVSWLASPIIGGYFAFLIFSFIRKAILYKRDPVSAMVRIAPFLSAIIIFALGLILILSGAVARVVAFPVAFRVVCGLVVFAFAFTIWGVHFFKLAVLPQKVGPGTLLDRLLSKSTDYGRQYLVVERIFAYLQIVIACFMSFAHGSNDVANAIAPVAGIYRALYPQSYSPKVLFIFMSLGGLGLVFGLATWGWRVIDTIGKKITELTPSRGFSVGMSSAITIAAASAFGFPISTTHVVVGAVLGVGLARGLQAINLRIIKDIVLSWFVTVPAGAALSIMFFLLLRAVFC

SEQ ID NO: 55057 - protein, 403 aa, Chlamydia trachomatis
MDKLSIKDLSPEGKKVLVRVDFNVPIKDGKILDDVRIRSAMPTINYLLKRDAAIILVSHLGRPKGDMFEEAYSLAPIVPVLEGYLGHHVPLSPDCVGEVARQAVAQLSPGRVLLLENVRFHRGEEHPEEDPSFAVELAAYADFYVNDAFGTSHRKHASVYRVPQMFPDRAAAGFLMEKELEFLGQHLLVEPKRPFTAILGGAKVSSKIGVIEALLSRVDNLVLAGGMGYTFLKAMNQQVGNSLVEETGIPLAKRVLEKARTQGVKIYLPVDAKVARRCETGEDWQELSIQEGIPEGFSGFDIGSKTIALFSEVIQDSATVFWNGPVGVYEVPPFDQGSKAIAQCLASHSSAVTVVGGGDAAAVVALAGCTSQISHVSTGGGASLEFLEKGYLPGTEILSPARS

SEQ ID NO: 55058 - protein, 444 aa, Chlamydia trachomatis
MLQNDTIAAIATPPGEGSVAIVRVSGPDAISISNRIFSGNIAGYASHTAHLGTVVHNEVCIDQALVLIMRTPRSFTGEDIVEFQCHGGYFACSQILNALLAEGARAALPGEFSQRAFLNGKIDLIQAEAIQQLISAENIDAFHIAQNQFQGHTSQAISSISSLIIEALAYIEVLADFPEEDIETERSLPVQKITEALTITQELLSSFDEGQRLAQGTSIVLAGLPNAGKSSILNALTQKNRAIVTDIPGTTRDILEENWVLQGKNLRLIDSAGIRETENIVEKEGIERARQAMSQAEGILWVMDASQPVPEFPAILYQKPTILLWNKCDVASPPQLEVPFQQIFVSAKTGKGFSELRQALNKWLHTTQLGKSSKVFLVSARHHSLLHAVHTCLTDALTGFQEHLPNECLALDLRQALHSIGNLSGSEVTENVLGEIFSKFCIGK

SEQ ID NO: 55059 - protein, 968 aa, Chlamydia trachomatis
MMDFLKRFFGSSQERILKRFQKLVEEVNACDEKFSSLSDDELREKTPQLKRRYQEGESLDKLLPEAYGIVKNVCRRLAGTPVEVSGYHQQWDMVPYDVQILGGIAMHKGFITEMQTGEGKTLTAVMPLYLNALTGKPVHLVTVNDYLAQRDCEWVGSVLRWLGLTTGVLVSGIPPERRKAIYQCDVVYGTASEFGFDYLRDNSIATRKEEQVGRGFYFAIIDEVDSVLIDEARTPLIISGPGEKHNPVYFELKDKVAELVHFQREMCNHIAAEARKTLDPFLGMDVLPKDRKIMEGISEACRALWLVSKGMPLNRVLRRVREHPDLRAMVDKWDVFYHAEQNKEECLERLSSLYIVVDEHNNDFELTDKGMQQWIEKIGGAAEDFVMMDMGHEYALIEEDTTLSPEDKLNRKIAVSEKDTQRKARAHGLRQLLRAHLLMERDIDYIVRDDQIVIIDEHTGRPQAGRRFSEGLHQAIEAKEHVTIRKESQTFATVTLQNFFRLYEKLAGMTGTAITESREFKEIYNLYVLQVPTFKPCLRIDHNDAFYMTEREKYQAIVAEIISAHRSGKPILIGTESVEVSEKLSRILRQNRIHHTVLNAKNHAQEAEIIAGAGKVGAVTVATNMAGRGTDIKLDKEAVAAGGLYVIGTSRHQSRRIDRQLRGRCARLGDPGAAKFFLSFEDRLMRLFASPKLNTLIRHFRPPEGEAMSDPMFDRLIETAQKRVEGRNYTIRKHTLEYDDVMNKQRQTIYAFRNDVLHADDLFIVAREQIEHVSLALAFLILKDARADHCSLPKVEEWLSYSFPVKLDDQEIRRLGNVDAVADYIGGLLIEAFDAKFSSMLTEFTEIIGSASGAQGVCNDILRSVIISHIDEEWKVHLMDMDLLRSEVGLRSVGQKDPLIEFKNESFLLFEGLIRDIRIAIVKHLFALELSLTRSDRPDNAIPTVATAFHNHDNFRPMELTIIGEEEN

SEQ ID NO: 55060 - protein, 490 aa, Chlamydia trachomatis
MRIAILGRPNVGKSSIFNRLCKRSLAIVNAQEGTTRDRLYGEIRAWDSIVHVIDTGGVDQESTDRFQKQIHKQALAAAEEASVLLLVVDIRCGITKQDEELAKRLLPLKKPLILVMNKADSQQDLQRIHEFYGLGISNMIATSASHDKHIDVLLERIRQVAEIPLPSAEEQENTQEEEFSSKESSVALHTFADETLFENESLSQEEASFLEELVAQTTTPSISNRPLKVALIGHPNVGKSSIVNALLKEERCITDNSPGTTRDNVDVSYTYNDKEYVFIDTAGLRKAKSIKNSVEWMSSSRTEKAISRADICLLVIDATQQLSYQDKRILSLIARYKKPHVILVNKWDLMFGVRMEHYVQDLRKMDPYIGQARILCISAKQRRNLSQIFSAVDDVYTIATTKLSTSLVNKVLAGAMQRHHPQVINGKRLRIYYAIHKTVTPFSFLLFINSNTLLTKPYELYLKNTLKAAFNLYGIPFDLEYKAKPARKSN

SEQ ID NO: 55061 - protein, 410 aa, Chlamydia trachomatis
MTQSTLETAKKIVQKLRNAGYQAYFVGGSVRDMLLDRPIEEVDIATNASPTIVTTIFPDTLSIGAAFGIIAVKENGQLFEVATFRSDEDYADGRHPNRVIFASMKDDAIRRDFTINGMYYDPFEEKLFDLVEGRADLERKVVRAIGHPKQRFLEDKLRILRAIRFAATLGFSLDPKTEIAIIKEAPSLPTSVSPERIWQELKKMLRKAPYESLQLLIKLKVLPIIFPELKASPSGFLRSTIAFAQRIRDPHIPEIAFLLPLFQEVKQEEAIAAFSRLKVSNKELGLLEDWYEALPQFRAKQNNKIFWAHFFASQTSPLLLSLFLSLQRTPHEQELFISRVHHLKTRLASFIERIQTGSPLVSAPDLMARGIAPGRLLGELLKEAEALSIEHECSDKEKILSLLKDKGFWK

SEQ ID NO: 55062 - protein, 419 aa, Chlamydia trachomatis
MTKKNLAICSFCGRSEKDVEKLIAGPSVYICDYCIKLCSGILDKTPTPAAQEVSTSQTAPQTSLKVLTPKEIKRHIDSYVVGQERAKKTISVAVYNHYKRIRALMQDKQVSYGKSNVLLLGPTGSGKTLIAKTLAKILDVPFTIADATTLTEAGYVGEDVENIVLRLLQAADYDVARAERGIIYIDEIDKIGRTTANVSITRDVSGEGVQQALLKIIEGTVANIPPKGGRKHPNQEYIRVNTENILFIVGGAFVNLDKIIAKRLGRTTIGFSEETDLAVTDRDRLLAKVETEDLIAFGMIPEFIGRFNCIVNCEELTLDELVEILTEPANAIVKQYTELFAEENVKLIFEKEALYAIAQKAKQAKTGARALGMILENLLRDLMFEIPSDPTVESIRIEEDTITQNKSPVIIQRSPEAIA

SEQ ID NO: 55063 - protein, 366 aa, Chlamydia trachomatis
MSPHRSLYKFKNFSNRLYNKALGRFDRVFNFFSGNVGIDLGTANTLVYVRGRGIVLSEPSVVAVDAQTHAVLAVGHKAKAMLGKTPRKIVAVRPMKDGVIADFEIAEGMLKALIKRVTPARSMFRPKILIAVPSGITGVEKRAVEDSALHAGAQEVILIEEPMAAAIGVDLPVHEPAASMIIDIGGGTTEIAIISLGGIVESRSLRIAGDEFDECIINYMRRTYNLMIGPRTAEEIKITIGSAYPLGDQELEMEVRGRDQVAGLPITKRINSVEIRECLAEPIQQIIECVRLTLEKCPPELSADLVERGMVLAGGGALIKGLDKALSKNTGLSVITAPHPLLAVCLGTGKALEHLDQLKKRKESLV

SEQ ID NO: 55064 - protein, 334 aa, Chlamydia trachomatis
MKETIAYLGMGMWGFSLANLLANNGHRVVGWARNPSLIEQLSTQRQHPAAPHVTIPSNLSFTSSMEEALDGATMIVEGVTSAGMRPVLNQLKSITDLQIPLVITSKGIEQNTGLLLSEIALEIFGKPAAKYLGYLSGPSIASEVLRGCPCSVVISAYDPATLKQIHQAFLTPTFRVYPNSDLKGVALGGALKNVIAIACGISDGFRFGDNAKSGLVTRGLHEIRKFATIMGCRPDTLNGLAGLGDLCTTCFSAFSRNTLFGKMLAEGLTPEQAKTKIGMVVEGVYTALSAHQIATHHKIDMPITTGVYRVLYENLDIQKGIAQLLQRNTKEEYL

SEQ ID NO: 55065 - protein, 455 aa, Chlamydia trachomatis
MTDSSYVDLSCLLDKLLPIRQEHLLDYWPSLSLQQKRCLGRQISQINIPFFFRQQELLQASPYSHPSYTPLSPTYYAGETPDYAQLGLQLSQAGKVGCIVLAGGQGSRLKFDGPKGLYPVSSVKKKPLYQLVAEKVVAASKLVGRPLPVAFMTSPLNHQQTLSYFTANRYFNLDPSQVDFFCQPLWPLLSLSGDLFLESVDSLALGPTGNGCVASLLKSSGIWDKWHQAGIDMVSVIPIDNPLALPFDRELFGFHAAEHNDVTIKTTLRQNAKEDVGVLVELAEKKISVVEYSALPDKERFAVTSTGDLTYKLANIGLYCLSMDFLAQTAQKPLPIYKANKHAKQLYPSLIEKNAWKFEEFIFDLFRYSNRSQAIVYPRYECFAPLKNYEGNHSPATVREAMRKREQALFTAVTERKLSPNTIFELEADFYYPSSHTSLEWENKIFFQEPIIEAS

SEQ ID NO: 55066 - protein, 241 aa, Chlamydia trachomatis
MAKVRLNKFLASAGVASRRKCDEIIFAGSVTINGKVAAGPFVTVDEEFDYIEVGGQRIGAEKKVYFMVHKPLGYLCSSERKFPQSKLVIDLLSHCPYRLFTVGRLDKETSGLILVTNDGEFANRVIHPSFGITKEYLLKVSRDVTAKDLESLMSGTMIDGRIVRPVSVKKVRRGTIKIIVNEGKKHEIRLFAEAAGLQLLELKRIRIGSLVLGGLPYGKYRELTDAELDSCLSGKSTALVA

SEQ ID NO: 55067 - protein, 659 aa, Chlamydia trachomatis
MLPQLFSSPFSRELLNDFFESGMAEENSPLLSRKNRLLSQNLTLKSAYISLALYIGSLLSHWTGYQPLSSLLLILTFFLAGTPALVKSFEDILNKTVNIDILMTSAAFGSIFIGGALEGALLLVLFAISESLGSMVSGKAKSTLASLKHLAPTVAWVVQQDGSLQKILVQNVKVGEVIRVKSGEVVPLDGEIIQGASSINLMHLTGEKIPKSCNIGDTVPAGAHNLEGSFDLKVLRIGAESTIAHIINLVIQAQSAKPKLQQRLDRYSSTYALTIFAISASIAIGGSLFTTLPFLGPDSAFYRALAFLIAASPCALIIAIPIAYLSTINACAKHGVLLKGGVVLDRLVSCNSVVMDKTGTLTTGDLTCCGCEDFGPESPLFYSYVLAMEQSSSHPIAQAIVNYLTEKQVLPLPATQCTTIPGEGVQGEFNGDQAFVGRVSTALRYVPEEYREQLRERAQQAQARGETCSIACSGQRVSLFYFRDAPRHDAADIVAYLKKNGYPVCMLTGDHRISAENTAQLLGIDEVFYDLTPDNKLSKIQELAKTRQIMMVGDGINDAPALAQATVGIAMGEAGSATAIEAADVVLLNQGLSSLPWLIKKAKKTRRIVSQNLALALSIILFISGPASMGIIPLWLAVILHEGSTVIVGLNALRLLKNT

SEQ ID NO: 55068 - protein, 428 aa, Chlamydia trachomatis
MLDIRLIRKEPKECEARLQKKDPSISLERLLDLDKNVRQLKADSESLLARRKALSGQIHKAKVANEDATPLIQGVNAIADQLVAFEKTLQEQEALLLDLMARLPNYPDEDVPVSPDKSGNKIIKSHGEIPTFTFPPKHHVQLNEKLQILDFKLPAKTSGSGWPAYKNEGVLLEWALLTYLLNKQQAHGFQLWLPPLLVKRDILFGSGQIPKFDGQYYRVEDGEQSLFLIPTAEVVLNGFHSQEILNEQDLPLYYAAFTPCFRREAGAGGSHERGLVRVHQFHKVEMFAFTTPEQEEIAYQKMIGIVEEILSELQLPYQLSLLSTGDMSFTAKKTIDAEVWLPGQQAFYEVSSISKCGDFQSRRSETRYRDAQGKLHFVNTLNGSGLATPRLLVAILENYQQEDGSVVIPHALRPYMNNQEILLPKTDR

SEQ ID NO: 55069 - protein, 396 aa, Chlamydia trachomatis
MVPCVLIVYPTSLHLFRYLIFQVEYMEVSSEQQLFFMREAVALGERGRIFAPPNPWVGCVIVKNGCIIGRGWHKGIGSPHAEVCAFQDQTSSLVGADVYVTLEPCCHFGRTPPCVDLLIKSKVSSVYIALLDPDPRVCKRGVARLKEAGISVYVGIGHEEAKASLQPYLHQRETGLPWVVMKTAASLDGQTSDRRGISQWISGEQARLDVGRLRAESQAVIVGSRTVCLDNPRLSARMPSGDLYERQPLRVVVDSRGSVPLDARVWNPDSGNVLLATTEQCSKEHIQKLEDRGVEVWKSSPQQVDLKRLLQYLAEKGCLQVLVEGGARLHSAFWREHLVNAGVIYWGPKFLGDQGSPMLRDLQLCLDNAEHVKITKTFLVGDSVKTCFECVGREDG

SEQ ID NO: 55070 - protein, 424 aa, Chlamydia trachomatis
MVTCEAGIASVQQAIKDIADGNFVIVIDRESRENEGDLILAGEKVSAEKMAFLLSHTTGIVCASVTREQARVLDLPAMVQENQCAFKTAFTVSVDASSGITTGVSAADRTRTVQLLSDPTSISQSFVRPGHVFPLVSQPGGVVKRPGHTEASMDLMRLAGMYPCGIFAELVNADHSMMRQQQILDFAEQHGFTVITVDDLITYRWTFDSLVEHVSSARIPTKYGEFFIHVYKSIIDGTEHFALVKGDIREQESVPVRVHSECLTGDVLGSCRCDCGAQLDMAMRYIAEQGLGVIVYLRGQEGRGIGFGHKIQAYALQDLGYDTVEANLQLSFPIDAREYGVAAQILKDLRLTSVRLITHNPKKFFELQRLGIHILDRIVLPVIVSSENERYLRTKKDRMGHWLNFPVLNESEDEYETVERTSCC

SEQ ID NO: 55071 - protein, 157 aa, Chlamydia trachomatis
MKLLKGLPVAKDVRVAIVGACFNAPIADRLVSGARETFFESGGSPDSLTVVRVPGAFEIPCAIKKMLSKGNLFQAIVACGVLIQGETSHYEHIADNVAAGIARLSVEFCLPITFSVITAPNVEAAWERAGIKGPNLGASGMRTALEMASLFSLIEKE

SEQ ID NO: 55072 - protein, 794 aa, Chlamydia trachomatis
MRKERKKASVSLSPQTVFAIKTCIYLALACFSGLSLWSFQHNQPYTQNWIGLLGWSLSSFLLYNFGVAAFLIPLYFGFLSFLNMKKTPAPLAFRKAVAFGTVPVCCAILLSMVSPAQNLPQFLATRVPMVVMDLQPPKAYLGGIPFYLLYDGNSFSLKLLIGAVGTGLIFLAILLCAICYLIPKSFVLKKKALLDALLKFLKNKSYACWSACKKLLKNLVNNKSYCPEPSLRVPAPSSFAKKEVLKLPTPVISLPLENKDLHDGDSSNRTIFLSPPHPAKRTLAPQKKPDLPDLLQKRTSSTPIPSSSPSPFIVAGEAPDLPQYHLLSKRNIRRPESLLEELKKKAAILQQTLASFGIDASIGNICSGPTLAAFEVLPNTGVKVQKIKALENDIALNLQASSIRIIAPIPGKAAVGIEIPNPDPQPVNFRDLLEDYQKGTQRLQVPLLLGKKANGDNFWTDLATMPHLIIAGTTGSGKSVCINTIVMSLIMTSPPTDVKLVIVDPKKVELTGYSQLPHMLTPVITESKEAHSALIWLVREMELRYEILRFLGLRNIQSFNSRTRNVDIEASYDKEIPEKMPFIVGIIDELSDLLLSSSHDIETPIVRLAQMARAVGIHLILATQRPSRDVITGLIKANFPSRIAFKVANKVNSQIIIDEPGAENLMGNGDMLVVSPGSFAPLRVQGAYICDDDINKVIKDLCSRFPCKYVIPSFDTYDDSSSMDPESLDPLFNQAKTLVLQTGNASTTFLQRKLKIGYARAASIIDQLEEARIVGPSEGAKPRQILVQLSNQED

SEQ ID NO: 55073 - protein, 122 aa, Chlamydia trachomatis
MLSMLILSELSYSAMLLAKQPTHHWFVHSGPLVLGTAPLKYPAPTKDRDQTVSRRFEPSSRTALIGEQPNPWDLLQPQDAMSRHRGAKPPRRYELLVAISLLSPEYLLSVKRRRFHFPRPDH

SEQ ID NO: 55074 - protein, 431 aa, Chlamydia trachomatis
MSWLSSLYPIFIASTAFCALGLLLVAIILLSRKFLIKVHPCKLRINNDDSLTKTVDSGKTLLSSLLDSGIAIPSPCGGKAACKQCKIRITKNVDEPLETDRSTFSKQQLEQGWRLSCQTKVQHDMNLEIEERYFNASSWEGTVVSNENVATFIKELVLSVDPARPIPFKPGGYLQITVPSYKTNTSDWKQTMDPQYYSDWETFHLFDKVIDHQSLDANSANKAYSLASYPAELPLIKFNIRIATPPFINKSPDPTIPWGVCSSYIFSLKPGDKVTVSGPYGESFMKEDNRPVIFLIGGAGSSFGRSHILDLLLSKHTNRELTLWYGARSLKENIYQEEYEKLEKEFPNFHYHLVLSQPLQEDLDKGWDSKDPIKTNFLFKAFELGQLSKLPNPEDYLYYVCGPALHNSSILTLLDNYGVERSSIILDDFGS

SEQ ID NO: 55075 - protein, 1080 aa, Chlamydia trachomatis
MDFDPTSINFSHFSLLKDSKLPSLVENLHSGAKAFIVAKLFKELRRSIVIITTPARVDDLFEDLTTLLKESPLEFPTSEIDLSPKLVNIDAVGKRDHILYSLQKQCAPVVCITTLKALLERTPSPESLLSDHLELKVGEELDPDTLVDLCKNLGYRHEALAREKGDFAFRGGIVDIFPLSSSEPFRIEFWGDRISSIRSYNPSDQLSTGKISQITISSATAIIPTDKLSHSLLDYFETFPLCIFDEVSSLEDNFSDIAGILSSLPKRFIPIQDLCRRILRESVPLFFEENLFPNLLTHKDTGCALEVFHEKISVQRVSLPFIYPHALIETSHEQNPLLAFLKTFQDFCSDRTLSLALYSSNTKSLKEAHDLTASFIKKPQIYDCPKALSSSFALVESGFAAISLSEFAANKVLRRQKQRNYFSSTTEEVYVPVPGETVVHLHNGIGKFIGIEKKPNHLNIETDYLVLEYADKARLYVPSDQAYLISRYVGASEKAPDLHHLNGAKWRRSRELSEKSVILYAEKLIQMEAQRSTANSFIYPTHGEEVIKFAESFPYEETPDQLKAIDQIYADMMSDKLMDRLICGDAGFGKTEIIMRAAVKAVCDGQKQVIVMVPTTILANQHFETFSQRMAGLPITIGLLSRFSQGKAMKKTLEDVAQGRIDILIGTHKVINKSIEFHNPGLLIIDEEQRFGVKAKDALKERYPTIDCLTVSATPIPRTLYLSLSGARDLSLITMPPLDRLPVSTFVMEHTEETLSAAIRHELLRGGQVYVIHNRIEGIFRLGETIRTLIPEARIGVAHGQMHSDELANIFYKFKTQQTNVLVATALIENGIDIPNANTILIDHADKFGMADLYQMKGRVGRWNKKAYCYFLVPHLDRLSGPASKRLEALNKQEYGGGMKIALHDLEIRGAGNILGTDQSGHISAVGFNLYCKLLKKAVAALKHKKKPMLFHDDVRIEFPYHSRIPEDYIDLASMRIEFYQKIGNAESKEELEAIEEELRDRFGPLPEEVYWLFALAQIRLIALEYHLSSIKGTGNALYIQQYHDKEKQVQKTLPYSLSPTPTLLVKEVQESIEKAFPKK

SEQ ID NO: 55076 - protein, 875 aa, Chlamydia trachomatis
MLSNTLRSNFLKFYTNRNHTPVASSPVFPYNDPSILFTNAGMNQFKNIFLGKEQTSYTRATTSQKCIRAGGKHNDLENVGHTSRHLTFFEMLGNFSFGDYFKQDAISFAWEVSLSVFNFDPDFIYATVHEKDDEAFALWEKYLPTNRIFRLTDKDNFWSMADTGPCGFCSELLFDRGEKFGKATSPLEDADGERFLEYWNLVFMEFNRTSDGTLLALQKKCVDTGAGLERLVSLLSETDTVFEADVLRHLIAKVENLSEITYSPTESKGSAFRVIADHVRSLSFAITDGLLPGNTERGYVLRKILRRAVNYGKRLGFHRPFLAEIVPSLIETMGEAYPELQAAETQIQEVLTTEEEHFFKTLQRGGNLLHQVLKSSASLSKISGEDAFKLKDTYGLPIDEIALLAKDHNYTVDMDTFRKLEMEAKERSRKNTVKNKNDSDSIFQDVDPTNTSEFVGYDMLSCDTFIEGIVKYNEIASTLEEGEEGAIILRTTPFYAEKGGQVGDSGEIFCESGTFLVSHTTTPKAGLIAHHGKLSQGSLQTTMAVTAQVNQNLRKKIANNHTGCHLLHKALEVSLGEHIRQAGSYVDSQKIRLDFSHNKALSPEELLTIETLVNEKIRENVPVTIREALYSDVMNSSEIKQFFGDKYGDIVRVVSAGFSHELCGGTHARATGDIGYFRITKEHAVSTGIRRIEATTGEDAENIARGQDTDLNEIATIIQSPKDQLLVKLRNVMEEKKDLAKQLANLENQLVQQQVKSLLTSCDKVNETSYLVYHLTEEEGQRIQHYANTLHKEVPAKFISLWVTEKNDRYIVLVRVSDDLVKQGIDAQALLEELLAPYGGRCGGKAVSAQGSSKELPQIEVLNTILRQWISTRLA

SEQ ID NO: 55077 - protein, 666 aa, Chlamydia trachomatis
MAGNSELDIDILEKIAGTIKQLSIESIQKASSGHPGMPLGCAEIAAYLYGCVLRYNSKDSQWMNRDRFVLSAGHGSALLYSCLHLAGFNVRLEDLQQFRQLHSQTPGHPEFRETDGVEATTGPLGQGIGNAVGMALSLKMLGSRFNQSSTSIFDAKVYCLAGDGCFMEGVSHEACSFAGSLGLDNLILIYDYNEIILDGTLQDVSVEDTKQRFLAYGWDVFEANGHDFEDLHRVFSQIKKGQQKPTLIIAHTIIGHGSPKEGTNKAHGSPLGEDGVAQTKSFWHLPEEKFFVPSSVKMFFAAKQQEGQKLQEEWQERFRVWSKRFPEQHQEYLKLTQEISIQDLEVLLNLIDMPESIAGRAASNKVIQVLAENIPSLIGGSADLSSSDGTWIAKETAVNASHFQGRNIRYGVREFGMGTIMNGLAYSQVFRPFGGTFLVFSDYLRAAIRLAALSKLPVIYQFTHDSIFVGEDGPTHQPIEQIMSLRAIPGLRVVRPADAHEVKGAWLSALENSGPTALILSRQNLPTLKETKRSFRDGVGRGAYILVKEEGGSPDYTLCASGSEVHLAMEVAQSLMALDKRVRVISFPCWELFERQDPEYRESVIGGDLGLRVSIEAGSALGWYKYIGSNGLSIAMDVFGMSGAPHEVAETCGFTVDSIVQRILSV

SEQ ID NO: 55078 - protein, 289 aa, Chlamydia trachomatis
MTEPHKKISEGTIARDMLERYTGSTIQEFQPYLLLTNFAYYVDVFAEIYQVPVSRGSMFSAAHAPQTCTSIIDFKLGSPGAALIVDLCSFLPNALAAVMLGMCGGLRSHYQVGDYFVPVASIRKDGTSDAYFPPEVPALANFVVQKTITNILEEKNLPYHIGITHTTNIRFWEFNKEFRRKLYENKAQTVEMECATLFSAGYRRNLPLGALLLISDLPLRRDGIKTKQSSSEVLATYTKKHILTGIEVFASLQETVGPGIKKTKGLPHMEFGQADDSLSEQTGISDGDF

SEQ ID NO: 55079 - protein, 290 aa, Chlamydia trachomatis
MQEKPSTVFRLIHCSDIHFCVLPKNPFQCFNKRFKGLLRQLVGGVSFRAPAISQRFPQLVAQLEANGVCVTGDVTITALDSEFRLAKEFLSRIESIAPVYIVPGNHDVYTYRALKKQTFYSYFPNKELQTHRIAFQKLTPNWWLVLLDCSCFNGWCAANGEVTDSQIVALEQFLASLPSLEHVIVANHYPLSPTTRPAHDLLNYAPLKSLLMNSPSVRMYLHGHDHHVEIDHLPPLVVNSGSLTLPSNARFHIIDLYPEGEYRISTASLTNLTETDSPLKISIEETSISL

SEQ ID NO: 55080 - protein, 452 aa, Chlamydia trachomatis
MVMRPILLKEWSSLLLDIDIPCSGKKVTGVAIDSRLVLPGDVFFALPGNRTTGHLFLKQAAQSGAVAAVVASDYRGPDYGLQLLHVADPREALRAAGRTQGALFHGEVIGITGSVGKTTTKSFTQQLLSPFYKVFASPKSYNSQLTLPLSILTADGDEDFLVLEMGVSEPNNMKDLLDVIEPSIGVITHIDVQHAMNFVDKGAQGIAEEKSLLLERCGIHLLPRDSSWFNFFMKKNAAADQFSFSMNNETADFYYRAIHSEGVLISAPDGDIELPVVFPYTPAYMNFIIAVALAWLTNVPMDRLEQASQSLFLPSMRFEQQEHNGIRIINDAYNASPDAMLAALDAVPIPSEGGKTVFILGHMAELGRYSDECHIAVARKAVTKAHVVFFVGEKWSPVREVVSDANCQIEFYGSVSEIMHVVKSLVRRGDVVLLKGSRSLELETLLPCFSIS

SEQ ID NO: 55081 - protein, 335 aa, Chlamydia trachomatis
MPPLFCVLKAFFIGLVVSLILVKPLIWLKKQGLQDRIHKDHCEKLEKLHKNKAHIPTAGGIIFVLSVVLSILLLLPCNLWSTWFLVGATLLWGALGWRDDQIKNKRKVGHGLSAKRKFFIQNCLAIGTVLPIMIAYGESFLCMHLPFVGIVSLPHCWLGYLFSFSIAVLAIVGTSNSVNLTDGLDGLAAGSMVIACLGMLIVTFAYGAPWAFISGVLLATLAGSCLGFLYYNRSPARIFMGDTGSLFLGGMLGICAVLLRAEFMLLFMGGIFVLESLSVILQVGSCKLRKKRVFLCSPLHHHYEYKGYPEKVVVRNFWIIEFLCVAIGIFAVFWG

SEQ ID NO: 55082 - protein, 433 aa, Chlamydia trachomatis
MCCHWYFRCILGLEDKRMGLKRVVVIGLGLSGKSIARFLARKGVYVLGVDSSIQALQHCPYIHEKLLETDEFPTQVDYVVRSPGISKDHPWVKAARAAQISVVTDIQLAFQTKEFIEQKSFGITGTVGKTTTILFLEYLLRKAGIPAFAMGNVGVPILDGMQNSGVRLVEMSSFQLADQETSYPVLSGGMILNISDNHLDYHGSFLEYCQSKQNLSLCMRNPEDLWVGDQRFCGRSYWEEVQKYMRLLDKESALKPLYLHDKYNYCCAYLLAQAEFPIAKSLFIEAVATFKKPSHRMEYLGEKCGVHYINDSKATTVRATEKALLSIGSRAIVILGGRNKGYSFVSLLPSLRRFAKSVVAMGECAQEIAQDLDGFPVTVVRNLHEALLCAEEQAIPGDVVLLSPACASFDQFRSYEERGAIFKQLVGMEEVLL

SEQ ID NO: 55083 - protein, 407 aa, Chlamydia trachomatis
MSRKLVSCVLEIDYEFDRSQAIVMKWFLISCLLGIFSLGLIMVFDTSSAEVLDRALSCSTHKALIRQITYLVLGLSVASFIYILGWKDFLKMSPVLLIMVGMALILVLIPGVGVCRNGARRWLGVGQLTLQPSEFVKYLIPCVAIECLTTRVAIRSSFKRFVAFVSLLFIPIFLIAIEPDNGSAAVIAFSLIPVFIVTAVRLRYWLVPLLCILCIGGIFAYRLPYVRNRLQVYLHPELDIKGRGHQPYQAKIAAGSGKLFGKGPGKGLQKLTYLPEAQNDYIAAIYAEEFGFVGMLLLILLYMGFIYSGYVIAMRASLLSGAALAISITVIIGMQAFINLGVVSGLLPSKGVNLPFFSQGGSSLIANMCGIGLLLRICDEEDQQGCIGSRGNRGTHYPRFSSQRDFH

SEQ ID NO: 55084 - protein, 353 aa, Chlamydia trachomatis
MMKKISKVVLAVGGTGGHIIPALAARETFIKEKVEVLLLGKGLTRFLEGEPDVLYYDIPSGSPFSLRPNQMFSGARQLYQGYTAALRMIKSFAPDVAVGFGSYHSLPAILASIRKRIPLFLHEQNVVPGKVNKLFSHFAKGVGMSFSAAGEHFRCRAEEVFLPIREPSEQIVFPEASPVICVVGGSQGAKILNDCVPKALAYVREKHANLYVHHIVGPKGDLEGVSRVYQDAGIQHKVTFFEKNILGVLQASDLVIGRAGATILNELLWVQVPAILIPYPGAHGHQEANAKFFTQTLGGGTMILQKHLTEESLRKQVLLALDPATSENRRKAMLDAQKNKSFKSLYQFICESL

SEQ ID NO: 55085 - protein, 833 aa, Chlamydia trachomatis
MKIGAKLCWMLKRTNPSNHYISLSANLYRLTMKSLCYHFIGIGGIGMSALAHILLDRGYSVSGSDLSEGKIVETLKNKGVKFFLGNQEEHVPEESVVVYGSGISKNNPEFLAALNKGNRLIHRAELLAELTKEQISIFVTGSHGKTTVSSLITVILQEAGKTPSFAIGGLNGEGINGSSGSEYFVAEADESDGSIRNYSPEFSVITNIDDEHLSNFGGDRERLLASLQDFSTKTRQICWYNGDCSRLRSCLVGHTFGFTSSCDLHILTYRQEGWRSFFTVRYQNVLYEDVEVRLVGEHNVMNAAAAMGVALSLGIDEDTIRDALQRFPGVQRRLQRKNSSEVFLFLEDYAHHPSEIACTLQAVRSAVGSRRVLAICQPHRFSRLKECMGCFPSAFKGADEVLLTDVYSAGEAEEDVSYKELAQSISRESLVTCAYVPFSELQGFLEKHIRVHDVCVALGAGDIEVLGESLRDFEPKKLSLGLICGGRSCEHDISILSAQNIAKYLSHSFYEVQYFLITREGLWKTGSSLELSEETGKTIFDPEIAGKLSKVDVILPILHGPYGEDGAMQGFLETIGKPYTGPSLVFAAIGMNKVLTKRFMSDLGIPVVPYLPLTLKGWKQDQEKCLAQIKAAFSFPMFVKSVHLGSSIGVFEVHDTNELRDAINEAFVRDDDVFIEESRLGCREIEVSFLGDGSGVFFVAGMHERRGRGGFIDYQEKYGLSGRASAQIVFDVDLSKETREQLLGVAEKIYRLLQGKGSCRIDFFVDNEGSFWLSEINPIPGMTTASPFLAAFVRKGWNREQIVHQLVIDGLQRFDQRQRLISTPLIDQALAAR

SEQ ID NO: 55086 - protein, 418 aa, Chlamydia trachomatis
MNKKRVVVTGMGIVSCLGNEVESFYDSLLAGISGVRTITSFPCDDYATRFAGWIEEFNSEPYLDKKQARRVDPFITYAVVAAKKAIAMSRWDQETLPANPHRCGVIIGSGMGGLRTLDEGIEKLSAGNRKLSPFFIPYIITNMAPALIAMDYGLMGPNYSISTACATANYCIDAAYQHLVEGRADVIVCGGTEAAINRVGLAGFIANRALSERNDAPEQASRPWDRDRDGFVLGEGAGVLVLETLDNALKRGAPIFAEVLGTYTTCDAFHITAPRDDGEGITACILGALNKAGIPKERVNYINAHGTSTPLGDLSEVLALKKAFGSHIKNLRMNSTKSLIGHCLGAAGGVEAVATIQAIQTGKLHPTINIENPIAEIEEFDVVANKSQDWDVDVAMSNSFGFGGHNSTILFSRYEPSL

SEQ ID NO: 55087 - protein, 524 aa, Chlamydia trachomatis
MSAEVEYLQHEDYLYRTIKLKEIRELGINPYPYQYADCVEVQEIRNRVVDNELGDSEAAFRKETPKVRFAGRLVLFRSMGKNAFGQILDRDAKIQVMFNRDFSQVAGLPADSEISSIKFIEKKLDLGDILGIDGYLFFTHSGELTVLVETVTLLCKSLISLPDKHSGLADKEIRYRKRWADLISSEEVRKTFLARSRILKLIREYMDQQDFLEVETPVLQTIYGGAEATPFVTTLKALHTEMFLRISLEIALKKILVGGMSRVYEIGKVFRNEGIDRTHNPEFTMIEAYAAYWDYNDVMKCVENLVEYVVRALNNGETKVQYSHLKSGPQIVDFKAPWIRMTMKESISVYGGVDVDQYSEHELRDILKTRTALPEKAYVSATRGEMIALLFDELVCDKLIAPHHITDHPLETTPLCKTLRSGDETLVERFESFCLGKELCNAYSELNDPLQQRKLLEEQMRKKALNPDSEYHPIDEEFLEALCQGMPPAGGFGIGIDRLVMMLTDAASIRDVLYFPVMRRIESK

SEQ ID NO: 55088 - protein, 475 aa, Chlamydia trachomatis
MDLFLYNTLSREKERFLPSNDPVKLYTCGPTVYDYAHIGNFRTYVFEDLLKRVLLFLGYSVHHVMNITDVDDKTLAGARKKGCSLEKYCQPYINAFFADLETLHILKADAYPHATHYIPQMIEAIQQLIDQGIAYVGQDQSVYFSISRFPNYGSLSHLNLEELRQSSRIDADEYDKDNLCDFVLWKAYDPNRDGEIFWESPFGKGRPGWHLECSIMSMALLGQSLDIHAGGVDNIFPHHENEIAQSESLSRKPFVRYWLHSHHLLVDGKKMSKSLGNFFTLRDLLQQGFSGEEVRYLLLQGHYRTQLNFTQEGLQAARQSLKRLRDFISRLEDPFYPDDIIHPEVGSACQNFLEAFVTSITNDLNISSALASLFDFIRKINGMIDRQSIQEETSSEFSKQDAQHILSLLRQIDQVLGVLPFSQADIPEDVLLLVKEREAARKVKNWKEADRLRDEIISRGFAIEDGKTGMKVKKI

SEQ ID NO: 55089 - protein, 119 aa, Chlamydia trachomatis
MHRLTLPKSARLLKRKQFVYVQRCGQYCRTDQATLRIVPSRHSNIRKVGVTVSKKFGKAHQRNRFKRIVREAFRHVRPNLPACQVVVSPKGGTLPNFGKLSADLLKHIPEALPLVTSSK

SEQ ID NO: 55090 - protein, 45 aa, Chlamydia trachomatis
MKRTYQPSKRKRTNSVGFRARMATKSGRNLLNRRRRHGRHSLIDL

SEQ ID NO: 55091 - protein, 45 aa, Chlamydia trachomatis
MRVSSSIKADPSKGDKLVRRKGRLYVINKKDPNRKQRQAGPARKK

SEQ ID NO: 55092 - protein, 101 aa, Chlamydia trachomatis
MAKKSAVAREVKRRKLVEANFQKRAELRKLAKSLSVSEEERERAREALNKMKRDTSPSRLHNRCLLTGRPRGYLRKFAISRICFRQMASMGDIPGVIKASW

SEQ ID NO: 55093 - protein, 820 aa, Chlamydia trachomatis
MTQKLTPMMQQWHQCKEQAGDCLLLFRLGEFYEAFFDDALVLAQNLDITLTQRQNIPMSGIPAAYLDGYVDRLVSRGFKIAIAEQADNSEGGKGLVPRTINRLITPGALLSSSLLPEKANNYIIAISQVGSLYGLSCLDLSTGTFLVAEYDNTKDLIEAVYRLAPTELLSHAKFYQKNEPVVKQLQQHLRITLSEHVSWAFEYQSATKKLYTCFQVSSLDGFGLQGLVPAINAAGALLSYIQDKLLLPISHLSIPKIYGQHKHLLIDKASQTNLELLSAIHGEHGKGSLLQVMERTSTPMGGRLLRNTLVNPFYDLKEITLRQDSVEFFLKQEPLRKTLKRHLSCVRDLERLATKISTTLASPKDIGMLRDSLLSCMHIAHDLQSYTLPEFLTNKCLISSSLKSLIEALSTDLLQELPLKVSEGNIFADHYHQDLLRLRNIKTNSKSWILEYQERIRQETGIKKLKVCYAQALGYYIEVASSFAPQLPKEFIRRQSRLHAERFTTQELQQFQDEVFSVEDKLQTLETKLFKELCCYILQHRDLILELSTTIADLDYVISLAELAAEYDYRRPLVDHSDALSITKGMHPVALTLLDRGTFIPNDTIMHSAQTRMILLTGPNMAGKSTYIRQIALLVIMAQMGSFIPARSAHIGIIDKIFTRIGAGDNLSKGMSTFMVEMAETANILHNATDRSLVILDEVGRGTSTYDGLAIAQAVVEFLLFTEGKKAKTLFATHYKELTELELHCQHVENFHAVVKENGGQPVFMYEIAKGHSKKSFGIHVAKLAGFPLSVVSRAQQILHQFEGPDLRPEPEKAQQLVMF

SEQ ID NO: 55094 - protein, 600 aa, Chlamydia trachomatis
MYYTEESLETLKHSIDIVSVLGEYVHLKRSGADYKACCPFHDEKTPSFIVYPTRGHYHCYGCGEHGDAINFLMKQQGYSFSEAVLFLAKKFHVDLVIKTKTKESSGQDSKECLRRINKEAERFFQYCLLCLPEGGEALSYLYKRGFSLDTIDRFQIGYAPEQRVFVRAMEERGISVKQLEWAGYLSKDWFLFAQRIMFPIQDSLGYTIGFSSRRFKEGGKGGKYINSPETLLFKKSRVLYGLQFSRKRIAKEKRVILVEGQADCLQMIDFGFNCTLAAQGTSFTETHVKELVKLGVSKAYLLFDGDAAGEKASLRVGDLCQVAGIAVIVCRLPSGQDPDSFLMQRGPEELRELLDRGEDYLSFLVWHKIRSYEQFTPREKARVVEEVIQQVQHWGSPIMIHEYLRQLASLVKVPEAAVLSYLSSIKSATEDKGKKADAKEVCPDPEATAVAYKGGKASKKISPRMILEADVIRCLLFAKPEEEFVPATVRHYLSPEEFHCIEYRSIFVMAMNHYNEKHMLPSMDDMMALVWGTEAMTLLVDRRINTELMRDIVVQAIQKLLDKHWRDRKRNFCHQMGKELDSLQEYVRLSEERIKVSLVS

SEQ ID NO: 55095 - protein, 1003 aa, Chlamydia trachomatis
MSSQPLTLQDMMAAILRFWSEQGCIIHQGYDLEVGAGTFNPATFLQALGPEPFKTAYIEPSRRPQDGRYGQHPNRLQKYHQLQVILKPVPENFLSLYLESLKVIGLNLVDHDIRFVHDDWENPTIGAWGLGWEVWLNGMEITQLTYFQAVGSKPLEAISGEITYGVERIAMYLQKKNSVYDVMWNDSLTYGDITQHAEQAWSQYNFETANTSMWLKHFEDFAAEALATLDKGLPLPAYDFVIKASHAFNMLDSRGVISVTERTRYITKIRQLARAVADKYVIWRESLGFPLLKTIPSTPTVTAKQIPHICQDEDFLLEIGSEELPAAFVPTGIQQLESLAKKLLADHNISYNNLEVLGTPRRLALRIQGLSHLTIRPEAEKKGPPLSLLFEEDGSVSSQGEQFFASHGLSISHRSALDQSSTICRVRSIKGTDYLFLVIPEERIETAAILVNELPLLIRSMRFPKKMTWDNGGVEYARPIRWLVALYGDQVLPISLGFVSSGNISWGHRQLDNRQLTIPSSKEYIDILRDACVIVSQKERRSIIEQGLQNLTGDQTVAIAPEHLIEETVFLTEHPFVICAQFNPDFCSLPKELLIAEMINHQRYFPTQNLQGEITNRFLIVCDNSPTDTIIEGNEKALAPRLTDGNFLFKQDLLTSLDSFVEKLKSVTYFDALGSLADKTARLKLHLEETYPLLPLCPKEDIDTAVHYCKADLVSAVVNEFPELQGIMGRYYLQNAALSKAAAIAVGEHLQHITLGSSVSTTGALLSILDRVDNLLSCFILGLLPTSSHDPYALRRQSLELLTLLYTTQSSVDIEDLFSRLVRHFPTTIPNTVWSPEDVLNKLCSFVWGRLKTILSSLGFAKEVIAAVLTENCPKNPLTIINSARSIQELQNTQTLETIASTHNRLKKILASLSFSVTEQIFSLITSEDMLFKQALERFKEATTSLPISSREYLLQLEDLSQSTALFLDSVRIADDDENIRNQRIALLVATQKCFGFYAWDAL

SEQ ID NO: 55096 - protein, 202 aa, Chlamydia trachomatis
MSVSLPNYLTFFRLFITPIFMILYLKGKWFGLSATVLPYVLLFLLIIAEITDAVDGYIARKFSQVTDLGKLLDPMADSVYRISLYLTFTQPPVNLPLILVFIFLARDSVTSTLRMLCASRGQVLAARTSGKLKAILQAISFFLIIFAMFFCAKGIISTDDLEFFATITVSLVAFYSVCSGVEYIWVNKSHLLQKNDSPDGES

SEQ ID NO: 55097 - protein, 185 aa, Chlamydia trachomatis
MELVVQSRETDKKSVIKKIRQQGGIPAVLYSGGKSLANVVIDARVFNKFLSTLESGALASTVFTLSYEGREIKALVKDIQYHVTTYDVIHLDFEELVEDREVRLNIPIRCINTVDCVGVKLGGSLRQVIRYMRVVCKPKDIVPFLELDVQSLGLSQTLKLSDIRIPEGIKPVTPLKEVAVTVARR

SEQ ID NO: 55098 - protein, 112 aa, Chlamydia trachomatis
MKKKTGQLYEGAYVFSVTLSEDARRKALEKVTSGITNYGGEVLKIHDQGRKKLAYTIRGAREGYYYFIYFTVAPEAISELWREYHLNEDLLRFMTLKASAVKEVLEFATLPE

SEQ ID NO: 55099 - protein, 81 aa, Chlamydia trachomatis
MNRPVHNEHRRKRFAKKCPFVSAGWKTIDYKDVVTLKRFITERGKILPRRITGVSSRFQALLAQAVKRARHVGLLPFVGED

SEQ ID NO: 55100 - protein, 167 aa, Chlamydia trachomatis
MKPQLLLLEDVDGLGRSGDLVVAKPGYVRNYLLPKGKAVVASAGTLRLQAKLQEQRLLQAAADKEESLRLAETLRSLVLDFQVRVDSENNMYGSVTVNDIISVADQKGVVLTRKNFPRAHSGVKTLGKHVIGLKLKEGVTADLHLEVRADHEIAEQKELQSMEEQED

SEQ ID NO: 55101 - protein, 939 aa, Chlamydia trachomatis
MKRSLLLLFFCSSSFLTSCSKSFQTIQDENPLTILTPALADQKIAKIICPNGLPLMIVSSPKASESGAALVVKTGNNADPLEFPGLAHFTEHCVFLGNEKYPQPSGFPAFLSTHGGIYNAFTYPDKTCFLFSVNNSDLDTALDQFVHLFIHPLFRQEDLNKEVHAVEQEFAMHPTKDSRRMHRIQQIIAPKEHPLKRFGCGNLSTLDTVTSQDMQTWFSTHYSPENMAAIVYTTAPLDVAVPYIAKIFSQIPKSSKYTPQTPFTKTQDTSSLNKLFINKAVEPSPQLAIYWHLYDAPASLQGWAQSLVSVLSSEKEHSLIALLKKEHLITHMEAGTYNTSLNTQDFEIIYKLTTKGEREYQKVLQLTFAFLDYVRDEQLPAYILPELHRINSLEYTYSTQTELFLTLTQMIPDFASEPLATYPYQSTIYPKYSHEDEQTFAALLADPQQARYILSATLPSSLEDADEFYDPIFDTIFYEKPLNFEPIKDYSSLGFTFPQPNKFIPQKVQLLSQKKQHEGFAFSPKLTYNQDAITLYTCEDSFYTVPKMAMELRIRSPQIQRADVRSLVLRDLYSLLANETLVKHYDEALRAGMDFSVSPGATGVDLSLFGYTETSPVLIDSLLSSLRDLPLDKSLFLYYKDQLSEQYQKGLISCPMRAGLNKLSGELLEGFFSLEEKQNALDIISYEEFEDFAHKMLTELSIEAFTLGTLSSQDLSNVLASLSHFSEASLPYDPPSYYPKRKPLFTTDFSFQYPLSGNGMLLLEQNEHPNQYEDSVATSMLLSWIHNLYYNDLRTNQQLGYMVGAKYQEFAETPCGLFYIRSNKSSPEELVNKTQLFLQKIATDPEASGLSEEIFEQLRETYIQSVLLPSATPSAMARKLFSIAFETEKHDFSRPDKKIAAARSMNYSYFKEYCKEFFNQKFGPEIQLLIYGSDSQQNE

SEQ ID NO: 55102 - protein, 459 aa, Chlamydia trachomatis
MTCDVSPLFGTDGIRGRANFEPMTVETSVLLGKAVAGVLLERHSGKHRVVVGKDTRLSGYMFENALIAGLTSMGIETLMLGPIPTPGVAFITRAYRADAGIMISASHNPYRDNGIKIFSSDGFKIGQAVEERIEAMIASKSFGGLPEDHAVGKNKRVKDAMGRYIEYAKATFPKGRTLKGLRIVLDCAHGAAYRVAPSVFEELDAEVICYGCEPSGCNINEGCGALWPSIIQKAVIEHEADVGIALDGDGDRLIMVDEKGHIVDGDMLLSICASDLKRRQALPENRVVATVMTNFGVLRYLESLGIQVTISPVGDRHVLQHMLETKAILGGEQSGHMIFLDYNTTGDGIVSALQVLRIMIESESTLSDLTACIVKSPQSLINVPVAKKVPLDSLSNVQVVLQEVKEILGDSGRILLRYSGTENICRVMVEGTKKHQVDSLAKTIVDVVEAEIGGAEISE

SEQ ID NO: 55103 - protein, 606 aa, Chlamydia trachomatis
MCGIFGYLGQRNAVPLVLEGLSKLEYRGYDSAGIAALTKDHLFVEKSVGPVSQLCSKVSSDMHSQVAIGHTRWATHGEPSRFNAHPHVDMYESCALVHNGIIENFQTLREDLSSKGVEFSSDTDTEVIVQLFASRYRETGDLVQSFSWTLKQLQGSFACALVHQDHPEILLCATYESPLILGLGEEEVFISSDVHAFLKYSCQIQTLASGELAVLRIGRPVEIYNFELSRIQKEVRCIDHAEGSLDKQGFDYYMLKEIYEQPEVFERILHFVCEENGFAESFLKEFSFEGIESLHIVACGSSYHAGCLAKYVIESMVSIPVYVETASEFRYRQPYIAKRSLAILISQSGETADTLAALNEFRKLDEVRVLGICNVRGSVLASRVDHCVFIEAGLEVGVASTKAFTAQLLVLILLGLKLASQRQEISKQDLMQAVQGLRELPRLTRLFLDSSIHDWRCRQSKETSFIFLGRRFMYPICMEAALKLKEIAYVEANAYPAGEMKHGPIALIQEGTPVIVYCGDPFVYTKTIGAIMEVKARKAYVIALARESNQDIAAVSDEQIYIPDSHDLAAPILFAIAGQIMAYTMALQKGTEVDRPRNLAKSVTVE

SEQ ID NO: 55104 - protein, 284 aa, Chlamydia trachomatis
MFKFFGNKLRSLFKKTLPSDLLEYAEALLYEGDFGPKLTEAFCNELRRHKHPDERLIKELIRSFLSDIIAKLPQKKSSSAHPHVTLILGTNGSGKTTTVAKLAHYCLSQNQTVLIVATDTFRSAGMEQMRCWADSLGCGFISGKPGGDAAAIAFDGISAAVARNYDQVIIDTSGRLHTHTNLLKELQKIATVCNKAFPGAPHETLMTVDATLGSNTLSQVKLFHEAVPIDGLIFTKIEGSAKGGSLFRIADELKIPTRFVGYGETVYDFEPFSIDRFLDKLLDV

SEQ ID NO: 55105 - protein, 291 aa, Chlamydia trachomatis
MLELLNKDLPIITQGITGKAGSFHTTQCVAYGSNFVGGVTPGKGGTQFLDLPIFDSVLEAKQATGCRASMIFVPPPFAAEAIFEAEDAGIELIVCITEGIPVQDMLAVNSLMEKSSCRLVGPNCPGVIKPGACKIGIMPGYIHLPGNVGVISRSGTLTYEAVWQLTQRKIGQSVCIGIGGDPLNGTSFIDVLQELEKDEQTEAILMIGEIGGSAEEDAADWISQHCSKPVIAFIAGATAPKGKRMGHAGAIISGNSGDAFSKQRALREAGVVVVESPALIGEAVASVLNSH

SEQ ID NO: 55106 - protein, 497 aa, Chlamydia trachomatis
MMKRLLCVLLSTSVFSSPMLGYSAPKKDSSTGICLAASQSDRELSQEDLLKEVSRGFSKVAAQATPGVVYIENFPKTGSQAIASPGNKRGFQENPFDYFNDEFFNRFFGLPSHREQPRPQQRDAVRGTGFIVSEDGYVVTNHHVVEDAGKIHVTLHDGQKYTAKIIGLDPKTDLAVIKIQAKNLPFLTFGNSDQLQIGDWSIAIGNPFGLQATVTVGVISAKGRNQLHIVDFEDFIQTDAAINPGNSGGPLLNIDGQVIGVNTAIVSGSGGYIGIGFAIPSLMAKRVIDQLISDGQVTRGFLGVTLQPIDSELAACYKLEKVYGALITDVVKGSPAEKAGLRQEDVIVAYNGKEVESLSALRNAISLMMPGTRVVLKVVREGKFIEIPVTVTQIPAEDGVSALQKMGVRVQNLTPEICKKLGLASDTRGIFVVSVEAGSPAASAGVVPGQLILAVNRQRVSSVEELNQVLKNAKGENVLLMVSQGEVIRFVVLKSDE

SEQ ID NO: 55107 - protein, 1047 aa, Chlamydia trachomatis
MVDLQEKQCTIVKRNGMFVPFDRNRIFQALEAAFRDTRRIDDHMPLPEDLENSIRSITHQVVKEVVQKITDGQVVTVERIQDMVESQLYINGLQDVARDYVVYRDDRKAHREKSWQSLSVIRRCGTTVHFNPMKISAALEKAFRATDRIEGMTPDFVREEVNALTQKIVAEIEERCSQQDSRIDIEQIQDIVEQQLMVVGHYATAKNYILYREARARVRDNRVEDQIVEEAPSEETFEVLSKDGSTYMITHSQLLARLARACSRFPETTDAALLTDMAFSNFYSGIKESEVVLACIMAARANIEKEPDYAFVAAELLLDVVYKEALDRSRGDEDLEQVYRDHFKRYIMEGDSYRLNPELKNLFDLDALANAMDLSRDLQFSYMGIQNLYDRYFNHDDGRRLETPQIFWMRVAMGLALKEQDKTYWAITFYNLLSTFRYTPATPTLFNSGMRHSQLSSCYLSTVQDDLVNIYKVISDNAMLSKWAGGIGNDWTAIRATGALIKGTNGKSQGVIPFIKVTNDTAVAVNQGGKRKGAVCVYLEVWHLDYEDFLELRKNTGDDRRRAHDVNTASWIPDLFFKRLQQKGSWTLFSPDDVPGLHDAYGEEFERLYEEYERKVDSGEIRLYKKVEAEDLWRKMLSMLFETGHPWMTFKDPSNIRSAQDHTGVVRCSNLCTEILLNCSETETAVCNLGSVNLVQHILDDGLDEEKLSETISIAVRMLDNVIDINFYPTKEAKEANFAHRAIGLGVMGFQDALYKLDISYASQEAVEFADYSSELISYYAIQASCLLAKERGTYSSYKGSKWDRGLLPIDTIQLLANYRGKDNLQMDTSVRKDWEPIRSLIREHGMRNCQLMAIAPTATISNIIGVTQSIEPTYKHLFVKSNLSGEFTIPNVYLIEKLKKLGIWDADMLDDLKYFDGSLLEIERVPDHIKHIFLTAFEIEPEWILECASRRQKWIDMGQSLNLYLAQPDGKKLSNMYLTAWKKGLKTTYYLRSSSATTVEKSFVDINKRGIQPRWMKNKSASAGIVVERASKTPVCSLEEGCEVCQ

SEQ ID NO: 55108 - protein, 346 aa, Chlamydia trachomatis
MQADILDGKQKRVNLNSKRLVNCNQVDVNQLVPIKYKWAWEHYLNGCANNWLPTEISMGKDIELWKSNVLSEDERRVILLNLGFFSTAESLVGNNIVLAIFKHVTNPEARQYLLRQAFEEAVHTHTFLYICESLGLDEKEIFNAYNERASIKAKDDFQMEITGKVLDPNFRTDSVEGLQEFIKNLVGYYIIMEGIFFYSGFVMILSFHRQNKMVGIGEQYQYILRDETIHLNFGVDLINGIKEENPEIWTTELQQEIIEMIQRAVDLEIDYARDCLPRGILGLRASMFIDYVQHIADRRLERIGLKPIYHTKNPFPWMSETIDLNKEKNFFETRVTEYQHAASLTW

SEQ ID NO: 55109 - protein, 296 aa, Chlamydia trachomatis
MTNAFPFSVQESVPLNRFSTFRIGGPARYFKELVSVDEALKVFSFLHTSPIPYIIIGKGSNCLFHDQGFNGLVLYNNIQGQTFLSDTQIKVLSGVSFSLLGRQLSSKGFSGLEFAVGIPGTVGGAVFMNAGTALANTASSLVSVEIIDHAGNLLSLSREELLFSYRTSPFQKKTAFIVSATFQLTRDSQAAQRAKALIEERILKQPYEYPSVGCIFRNPEGVSAGALIDQAGLKGLTIGGGQISQKHGNFIINTGNASAADVLELIETIQKTLKQQGIALEKEVRIIPFQPNLGVS

SEQ ID NO: 55110 - protein, 164 aa, Chlamydia trachomatis
MIMSVMASDSARAVVCTSRPFPKQKLRELVLQALYALEMAPKGEDSLVSLLMTEASVSKKNVLYALMFCKAIRANQSELDALLNATIRTTTLANLTIIERNILRMMLFEHQQNQESSPIPTAVLIAETTRLIKKFSYVEGSSLILAVLGSIFDQVAQEPASMCG

SEQ ID NO: 55111 - protein, 186 aa, Chlamydia trachomatis
MALNLKINRQIRAPRVRVIGSSGEQLGILSIKEALDLAREADLDLVEVASNSEPPVCKIMDYGKYRYDVTKKEKDSKKAQHQVRVKEVKLKPNIDDNDFLTKVKQARAFIEKGNKVKVSCMFRGRELAYPEHGHKVVQRMCQGLEDVGFVESEPKLNGRSLICVIAPGTLKTKKKQEKVHAQDEKQ

SEQ ID NO: 55112 - protein, 64 aa, Chlamydia trachomatis
MPKMKSNKSVAARFKLTGSGQLKRTRPGKRHKLSKRSSQQKRNLSKQPLVDQGQVGMYKRMMLV

SEQ ID NO: 55113 - protein, 123 aa, Chlamydia trachomatis
MVRATGSVASRARRKRILKQAKGFWGDRKGHFRQSRSSVMRAMAFNYMHRKDRKGDFRSLWISRLNVASRIHGLSYSRLINGLKQAGINLNRKMLSEMAIHDPQGFALVAAQAKLALEASIQG

SEQ ID NO: 55114 - protein, 341 aa, Chlamydia trachomatis
MTIQEELEAVKQQFSCDLSLVHSSKDLFDLKVKYLGKKGIFRGFADQLRECPVEQKATIGASINACKQYIEEVLLEKSQVILAKEEAEEFLKEKVDVSLPGEDAPLGGKHIIKKVLDDVVDIFVRFGFCVREAPNIESEKNNFSLLNFEEDHPARQMQDTFYLDPVTVLRTHTSNVQSRELARNKPPVRVVAPGECFRNEDISARSHVTFHQVEAFHVDRDVSFSDLTSMLSGFYHIFFGRKVELRYRHSYFPFVEPGIEVDISCECRGAGCSLCKHSGWLEVAGAGMIHPNVLRQANIDPEEYSGYALGMGIERLAMLKYGISDIRLFSENDLRFLRQFS

SEQ ID NO: 55115 - protein, 321 aa, Chlamydia trachomatis
MVIRLFENDKQLEVFFSSLDKKKKYLLALSGGSDSLLLMYLLRSRGISFTAVHVDYGWRETSYQEACDLASLCEREQIPFILDRQEVANPMDFSDIENIARQYRYELFYRLCKERLFAGVFLGHHADDQAETILKRVFEGAHLGNLKGMARYGTYKGITLLRPLLHITKRQIVEALDNYRIEYVQDATNADERFLRARMREQLFPYLQEIFGKNIRQPLLFLAEDSAELREYLDQQAAPFLSQVIDNEIGQFLPVGQELLQTAFLTKWVCKQFFFKQGLVASKGFLQTVYDHLVRRSEARLRLRNRTVLVKARGVIIESIY

SEQ ID NO: 55116 - protein, 920 aa, Chlamydia trachomatis
MISIVVSFMAKDKKTNPESKKSFPTAFFFLLFGVIFGVVTVQNFFSAKKASVGFSHQLEHLVNLKLLIPEESRKIALNDNLVSFSGRFRESVPAEGQVRYQYLNLIDRKHQIDFELEETTTSLSVLSKEVRNAVTWFSAISGMPIPESGYTISPRTDVGLSVLEPLVIHGPVSVQIVNLATLEDRVRSLPRSAESLRVFGSDLYALIGKYLSPALGIGSESLKKEIKDLYQQVESSLTQVVEGEQAITLYKTVLETLHRISLSLVSPEDGARFNQLRSVRLYREDFNRCMKLLGESDEIQAQLDKIRGELVQAVWYFNNQELSSRALEKQDPEVFSRWFEGAKQEWAAFSGNKSLSFRAPDQPRNLVLEKTFRSEEPTPHYSSYLFTFMPIILVLLFIYFIFSRQVKGMNGSAMSFGKSPARLLTKGQNKVTFADVAGIEEAKEELVEIVDFLKNPTKFTSLGGRIPKGILLIGAPGTGKTLIAKAVAGEADRPFFSIAGSDFVEMFVGVGASRIRDMFEQAKRNAPCIIFIDEIDAVGRHRGAGIGGGHDEREQTLNQLLVEMDGFGTNEGVILMAATNRPDVLDKALLRPGRFDRRVVVNLPDIKGRFEILSVHAKRIKLDPTVDLMAVARSTPGASGADLENLLNEAALLAARKDRTAVTAVEVAEARDKVLYGKERRSLEMDVQEKKTTAYHESGHAIVGLCVEHSDPVDKVTIIPRGLSLGATHFLPEKNKLSYWKKELYDQLAVLMGGRAAEQIFLGDVSSGAQQDIAQATKIVRSMICEWGMSDQLGTVAYDERSDAAPTGYGSYHEKNYSEETAKSIDNELKTLLDAAYQRALDIINSHKEELELMTQMLIEFETLDSKDVKEIMDHSWDAEKKRARMKEEGMLYKKVSEDLPPPPPQEDVQDGTLKFNIGT

SEQ ID NO: 55117 - protein, 693 aa, Chlamydia trachomatis
MAFETFSVALDKDKTLIFETGKIARQANGAVLVKMNETWVFSSACAASLSEAVDFLPFRVDYQEKFSSAGKTSGGFLKREGRPSEKEILISRLIDRSLRPSFPNRLMQDIQVLSYVWSYDGKTLPDPLAICGASAALAISEVPQNCIVAGVRVGLVEGKWVVNPTKDELDASKLDLVMAGTASAVLMIEGHCDFLTEEQVLEAIAFGQKYIAKICDAIEAWQKAIGKEKQLSAVLDLPEDVQNVVSNFIREKFEKALSFRDRDALEQVSKELEESVVANLVQEESDFSLLNVKAAFKNAKSNQMRALIRDLGIRVDGRSTTEIRPISIEVSFLPRTHGSCLFTRGETQSVAVCTLGGESMAQRFEDLNGDGAARFYLQYFFPPFSVGEVGRIGSPGRREIGHGKLAEKALSHVLPEASRFPYTVRVESNITESNGSSSMASVCGGCLSLMDAGVPIKAPVAGIAMGLILDQDKAIVLSDISGIEDHLGDMDFKVAGTEEGITAFQMDIKVEGITHEIMEQALAQAKQGRSHILNLMTQVMSSPNDSVSRYAPRIETMQINTSKIATVIGPGGKQIRQIIERSGAQVDINDNGLINISANTQESIDKAKELIEGLTGEVEVGKIYNGRVTSVVAFGAFVEVLPGKEGLCHISELSKQKVDNVADFVKEGDRLAVKLLSINEKGQLKLSHKATLE

SEQ ID NO: 55118 - protein, 89 aa, Chlamydia trachomatis
MSLDKGTKEEITKKFQLHEKDTGSADVQIAILTEHITELKEHLKRSPKDQNSRLALLKLVGQRRKLLEYLNSTDTERYKNLIARLNLRK

SEQ ID NO: 55119 - protein, 204 aa, Chlamydia trachomatis
MLHSLFRLTLLFYALFNSLGSLPVFVALLKKFSFRKQQRIILRECIFALLTLILFITFGQGFFRLLEVSLPAFQLTGGILLGSLAINMMKALPSQEETFDQYEDEPIFYPLAFPVITGPATITSTLGHMEEGIFPKELVLGAIMLAWAFSLITLFFSSSINRLFGQMGLLALERLFGISLALMAGNLMLKAISTAFNIGYYVMA

SEQ ID NO: 55120 - protein, 605 aa, Chlamydia trachomatis
MIKNRKIVLRKSSLPLFSLDKFLSTIRKEPSFSNTEEVLVKVSLSFKHLVPKLVTCLKEGYSFNTLKKDFIAGLTAGILAFPLAIAIAIGIGVSPLQGLLASIIGGFLASALGGSRVLISGPTSSFISILYCIGVKYGEDGLFTITLMAGIFLIIFGLAGLGTFIKYMPYPVVTGLTTGIAVIIFSSQIRDFLGLQMGDGVPLDFIGKWVAYWDYLWTWDSKTFAVGLFTLLLMIYFRNYKPRYPGVMISIIIASTLVWILKIDIPTIGSRYGTLPSSLPGPVFPHISITKMLQLMPDALTIAVLSGIETLLAAVVADGMTGWRHQSNCQLIGQGIANIGTSLFAGMPVTGSLSRTTASIKCGASTPIAGIIHAICLTFILLLLAPLTIKIPLTCLAAVLILIAWNMSEIHHFIHLFTAPKEDILVLLTVFILTVMTTITSAVQVGMMLAAFLFMKRMSDLSDVISTAQYFDESEQPQNDLLFSKNEVPPFTEIYEINGPFFFGIADRLKNLLNEIEKPPRIFILCMTRVPTIDASAMHALEEFFLECDRQGTLLLLAGVKKTPLNDLRRYHVDELIGVDHIFSNIKGALLFAKALIKLESKSSQ

SEQ ID NO: 55121 - protein, 301 aa, Chlamydia trachomatis
MSMLFPLHQQLIEQFTIFLSVDRGIAPLSVQAYCQDILLFLQRVPIETTDMINQESVFLFVEKCHQAKESETTLARRLIALKVFFHFLKDAKLIHQQPFIEHPKVWKRLPSILSTEEVNSLLNQPLNTLNLDAYIANRDTAILYTFYATGIRVSELCDLCIGDISDDFIRVTGKGRKTRLVPISIKARQTIDSYLTMFRERFQKKNPSEEHVFLSIRGKKLERSCVWKRITFYAKLVTTKHISPHSLRHAFATHLLNNQADLRIIQEMLGHARISSTEIYTHVASESIIEKFHTHHPRSSS

SEQ ID NO: 55122 - protein, 100 aa, Chlamydia trachomatis
MTQSYVNKEEIISLAKNAALELEEAHVEEFVTSMNNVIALMQEVVAIDISDIILEATVHHFVGPEDLREDMVTSDFTREEFLANVPVSLGGLVKVPTVIK

SEQ ID NO: 55123 - protein, 491 aa, Chlamydia trachomatis
MYRKSALELRDAVVNREISVTAITEYFYHRIESYDEQIGSFLSLCKERALLRASRIDDKLAKGDPIGILAGIPIGVKDNIHITGVKTTCASKMLENFVAPFDATVVRRIEMEDGILLGKLNMDEFAMGSTTRYSAFQHTNNPWDLERVPGGSSGGSAAAVSARFCPIALGSDTGGSIRQPAAFCGVVGFKPSYGAVSRYGLVAFGSSLDQIGPLTTVVEDVALAMDAFAGRDIKDATTRDFFRGTFSQALSLEVPKLIGVPRGFLDGLQEDCKENFFEALAVMERQGSRIIDIDLSVLKHAVPVYYIVASAEAATNLARFDGVRYGHRCAQADNMQEMYARSRKEGFGKEVTRRILLGNYVLSAERQNIFYKKGTAVRATLIEAFQSAFECCDVIAMPVCASPAIRDTDVLDPVSLYLQDIYTVAVNLAYLPAISVPSGLSKEGLPLGVQFIGKRGADQQICQVGYSFQEHSQIKQLYPKAVNGLFDGGME

SEQ ID NO: 55124 - protein, 488 aa, Chlamydia trachomatis
MGIAHTEWESVIGLEVHVELNTASKLFSPARNHFGDEPNTNISPVCTGMPGALPVLNKDAVRKAVLFGCAVEGDVALFSRFDRKSYFYPDSPRNFQITQYEHPIVRGGCVRAIVEGEEKTFELAQTHLEDDAGMLKHFGDFAGVDYNRAGVPLIEIVSKPCMFSAEDAVAYANALVSILSYIGISDCNMEEGSVRFDVNISVRPKGSKELRNKVEIKNMNSFTFMAQALEAEKHRQIEEYLSHPNEDPKKVVPAATYRWDPEKKKTVLMRLKERAEDYMYFVEPDLPVLQITESYIDEVRQTLPELPHSKYMRYITDFDLAEDLAMILVSDRHTAHFFETATMSCKNYRALSNWITVEFAGRCKATGKTLPFTGILPEWVAQLVNFIDRGVITGKIAKEIADKMVSSFGESPEDILRRHPSLLPMTDDHALRAIVKEVVAQNAASVEDYKNGKAKALGFLVGQIMKRTEGKAPPKRVNELLLAAMRDA

SEQ ID NO: 55125 - protein, 151 aa, Chlamydia trachomatis
MGANKRNYMSEHVHKELLHLGGVFRSQREEKAISLKDVEAATSIRLSALEAIEAGHLGKLISPVYAQGFMKKYADFLGLDGDKLLKEHPYVLKIFQEFSDQNVDMLLDLESMEGRNSPEKAIRSWLNLGWAGAFVLGVACIWWLGTLLHFF

SEQ ID NO: 55126 - protein, 446 aa, Chlamydia trachomatis
MRTLSISMLILALSCGENTCLCAADSPKAKVDASIGNGASFSPFTGEIKGNRVRLRLAPHTDSSIIKELSKGDCLAVLGESKDYYVVAAPEGVRGYVFRTFVLDNVIEGEKVNVRLEPSTSAPILARLSKGTVVKTLGAAQGKWVEIALPKQCVFYVAKNFVKNVGALELYNQKEGQKKIALDLLNSAMSFADAELQKKVEDIDLDAIYKKMNLAQAEEFKDVPGLQPLVQKALERVQEAFLAKSLEKGSHKTVESYKPVETQAQLQPQRQVIEEKNVSVVPEAPVLSQVEEPKSVLTSSSEVEPLQDVGPIKGSLLSHYIRKKGFVKTSPVVEGRESFERSLFEVWVNLQPEEIRNGLTMESFYRDEQKKKRVLTGELEVYPHIVKNNPGDYLLKNGEDVVAFVYATSIDLSKWLGKRVVLECVSRPNNHFAFPAYIVLSIKEGA

SEQ ID NO: 55127 - protein, 1036 aa, Chlamydia trachomatis
MDNEDKVSFPAKEEKVLTFWKEQNIFQKTLENRDGSPTFSFYDGPPFATGLPHYGHLLAGTIKDVVCRYATMDGHYVPRRFGWDCHGVPVEYEVEKSLGLTEPGAIDRFGIANFNEECRKIVFRYVDEWKYFVDRIGRWVDFSATWKTMDLSFMESVWWVFHSLYKQGLVYEGTKVVPFSTKLGTPLSNFEAGQNYKEVDDPSVVAKFALQDDQGILLAWTTTPWTLVSNMALAVHPGLTYVRIQDKESGEEYILGQESLARWFPDRESYKWIGQLSGESLVGRRYCPLFPYFQDQQDRGAFRVIPADFIEESEGTGVVHMAPAFGEADFFACQEHNVPLVCPVDNQGCFTSEVTDFVGEYIKFADKGIARRLKNENKLFYQGTIRHRYPFCWRTDSPLIYKAVNSWFVSVEKVKHKMLKANESIHWTPGHIKHGRFGKWLEGARDWAISRNRYWGTPIPIWRSEDGELLVIRSIQELEELSGQKIVDLHRHFIDEIVIHKNGKSFHRIPYVFDCWFDSGAMPYAQNHYPFERAEETEARFPADFIAEGLDQTRGWFYTLTVIAAALFDQPAFKNVIVNGIVLAEDGNKMSKRLNNYPSPKKIMDTYGADALRLYLLNSVVVKAEDLRFSDKGVEAVLKQVLLPLSNALAFYKTYAELYGFSPNETTDLELAEIDRWILSSLYSLVGKTRENMAQYDLHAAVSPFIDFIEDLTNWYIRRSRRRFWESEDSPDRRAAFATLYEVLMVFSKIIAPFIPFTAEDMYQQLRVETDPESVHLCDFPHVVLEKILPDLEKKMQDIREIVALGHSLRKEHKLKVRQPLQHMYIVGAKERMAALAQVDSLIGEELNVKEVHFCSETPEYVTTLVKPNFRSLGKRVGNRLPEIQKALAGLSQEQIQAFMHNGFMVLSLGEETISLNEEDITVSWEAAPGFVARSSASFVAILDCQLTSPLIMEGIAREIVNKINTMRRNGKLHVSDRIAIRLHAPKIVQEAFSQYEEYICEETLTTSVSFIDDKEGEEWDVNGHAVSLSLEVIGH

SEQ ID NO: 55128 - protein, 627 aa, Chlamydia trachomatis
MTSNYMSRLYSLNKSRRILHSSYKLLKNKKMLSYPDTQKELLEILKQLEEAILDQNREDASLFAKQAQAIQKRFPRSKIQATFDLIYALAFAAVLAFLIRQFWFELYEVPTGSMRPTILEQDRILVSKTTFGLRLPFSNESIGYTPETITRGELVVFTVGDLPIPNADTKYFGIIPGKKRYIKRCMGKPGDTLYFYGGKIYGIDRNGVPITTKNTENLYHIPYISFDGVTEIVNHSDDQTDVIFNQFHTPCGKISFPHYSHGQFFYKDAWHKDTPYALKDLHTEPLSYADLFGIKNFAMVRILTKKQAALTHVLSSPLADAYLEIAHTPNVSYPHPHLRPLETQLIPTIEPMKTLLPLRKEHMHLIRNNLTTSRFTVIDGYAYKYQPTPINTSGIAKIFALPMPNIPDGCYEFSKGDVFKISIGGFRTKLKQPHPLTQLSHSQIIDLFNCGISFHTVYIPKNPQYAPFPNRYAFFNQGNLFVMDSPVFIDSDPSLQKFILAEKEKELQSSEEKPYIAFIDRGPPPESAEEFTSFITNFGLKIPEGHVLVLGDNCPMSADSRDFGFVPVENLLGSPVAIFWPINRIGSLSSSITPLSLPGYLVNGLALGALIYFVGAWYYRKNHRLFP

SEQ ID NO: 55129 - protein, 108 aa, Chlamydia trachomatis
MKKNTHPEYRQVLFVDSSTGYKFVCGSTYQTDKTEVFEGQEYPVCYVSVSSSSHPFFTGSKKLVDAEGRVDKFLKRYSGVKQMAPKPETSVEEVLPKGKKKAPAKKKK

SEQ ID NO: 55130 - protein, 359 aa, Chlamydia trachomatis
MEVKVLECLRRLEEVEKLISDPNIFSNPKEYSSLSKEHARLSEIKNAHESILAAKKILHDDKLALSTEKDPEMIAMLEEGIQGGEESLERLSKQLENLLIPPDPDDDLSVIMELRAGTGGDEAALFVGDCVRMYHLYASIKGWQCEVLSASESDLGGYKEYIMGVSGTSVKRFLQYEAGTHRVQRVPETETQGRVHTSAVTIAVLPEPAEDDEEVFIDEKDLRIDTFRSSGAGGQHVNVTDSAVRITHIPTGVVVSCQDERSQHKNKAKAMRVLKARIRDAEVQKREQEASAMRSAQVGSGDRSERIRTYNFPQNRVTDHRIGLTLYNLDRVMQGELDMITTALVSHAHRQLFGHEETN

SEQ ID NO: 55131 - protein, 448 aa, Chlamydia trachomatis
MINSLSQKLSSIFSSLFTAKRVTEESISDSIREIRLALLDADVNYQAVKDFISKVKQKVIGEEVWKHVSPGQQFVKCLHEELAALLSSQQASLLLQGRPAVVLFCGLQGAGKTTTCAKLADYVLREKKAKKVLVASCDLKRFSAVDQLEGLIKQTGADFFRKKGENPVSMASEAVRYAKDQGYDLLIVDTAGRLHVDDALMDELVAIARVTNPSEILFVMNLAMGQDAVTTAKAFDERLGLTGIVVSMADGDARAGAVLSVKSLLGRPIKFEGCGEKIKDLRPFNAQSMAERILGMGDTISLVDKMRECVSEEENKELEEKLTKATFTYEDFYKQMRAFRRLGPLRKIMNMMPSFGGMRPSDKDLEESEKQMKRNEAIILSMTPEERKELVELNMSRMKRIAAGCGLTLGDVNQFRKQMMQSKKFFKGMTREKMEQMGKKMSGGNLWR

SEQ ID NO: 55132 - protein, 116 aa, Chlamydia trachomatis
MALKIRLRQQGRKNHVVYRLVLADVESPRDGKYIELLGWYDPHSEQNYQLKSERIFYWLNQGAELTEKAGALVKQGAPGVYAELMAKKNARRAVVRQKRRAYRQRLAARRAEAAAK

SEQ ID NO: 55133 - protein, 352 aa, Chlamydia trachomatis
MEIDILSLFPDYFTSPLQATILGRAIKQGALSIRSRDIREFGLGKWKQVDDAPYSGEGMLLMAEPVVQAIRSVKREKSKVVYLSPQGQLLSAKKSRELSLCPHLILLCGHYEGIDERALASEVDEEISIGDYVLTNGCAAALVLVDALARFIPGVLGNQESAECDSLENGLLEGPHYTRPRVFEGVQVPEILFCGDHQRIANWRKKVSLERTRERRPDLYLQYFYGDRAFWGAQEDPLKMRETSPQAFSVVLEVKDLRKAKKFYSRMFGKEHWDGDKLLLGEKTSLYLQQTNERRGATKVFVELETEDGFVRFLRRWEMLGGQLGEVGMGNLPLRQVFDLDGHIWVVSCVQK

SEQ ID NO: 55134 - protein, 121 aa, Chlamydia trachomatis
MGNLIKELQDEQCRTDLVDFCVGDTIRVATNISEGGKERVQVFQGTVMARKGGGAGETVSLHRVAYGEGMEKSFLLNSPKVVSIEVVKRGKVSRARLFYLRGKTGKAAKVKELIGPRAAKK

SEQ ID NO: 55135 - protein, 217 aa, Chlamydia trachomatis
MKSIVEQELLFREKSVFEDQAIKQGYSRIAGVDEAGRGPLAGPVVAGACILPGGKLFLGIDDSKKLSPKQRRYLYELLLEDPEVTCGVGVVSVERIDEINILEATKEAMVQAIASLRSTPDFLLVDGLFLPHEIPCLKIIKGDSRSVSIAAASIIAKEYRDELMRKLHSEYPEYGFDKHKGYGTVAHLQALKQFGPCVYHRKSFSPVKESIREGICQ

SEQ ID NO: 55136 - protein, 550 aa, Chlamydia trachomatis
MASSRILITSALPYANGPLHFGHITGAYLPADVYARFQRLLGKEVLYICGSDEYGIAITLNAELAGMGYQEYVDMYHKLHKDTLKKLGISVDFFSRTTNPHHPAIVQDFYRNLQDKGLMENLVTDQLYSEEEEKFLADRYVVGTCPKCGFDRARGDECQQCGADYEARDLKDPRSKLTGKALSLRETEHAYFHLERMKEELLTFVEGIYLRPHMRNFVIDYIKNLRPRAVTRDLSWGVPVPGLENKVFYVWFDAPIGYISGTMDWAASIGDPDAWKKFWLDDKVTYTQFVGKDNTSFHSVIFPAMEMGQSLPYKKVDALVTSEFLLLEGFQFSKSEGNIIDMDAFLETYSLDKLRYVLAAIAPETSDSEFAFQEFKTRCNSDLVGKFGNFVNRVVAFAAKNGCTELSHPQLEQQDLEFIAEAQKLAKEAADHYQQYSLRKACSTIMELAALGNGYFNDQAPWKLAKEDLWNRVRSILFCACYCQKLLALISYPIMPETAWTIWGMIAPGSLDLRSQDPERLQSIWTEAFFDYSEESFSLKEPELLFTVVE

SEQ ID NO: 55137 - protein, 744 aa, Chlamydia trachomatis
MGCEEKLSGTLELILPEDSLSNQMGYAFLRVPYKNSLVTICGNSSLSLFKIGASVDLTGYWSVDASGALVFRFTTAKTYSPSLGIIAYLTSQIKGVGPKLAQKIIATFGEETLSVLDSCPSKLVEVDGISLARCEDFSRQLHEQKDLRNALLFLQRHGIAIHYGLRLYKKYQNQTIDKVCQDPFLLAKEMYGVGFKTADLIASCLGVPLNSPNRIVAGIQYSLDELQEEGHTCYPLNDFIVLVEKLLNEDTPEKIVRKEEILTQVHFLSRQKAVYIKELEQDSYIWSRQLFLAEQQIAIDIRRLLFSSKRIQPINTQEAILEVENLLDLKLEDKQKEALYASSSQKIHIISGGPGTGKSTITRAILSIFEKISSPQKIILAAPTGKAAKRMTEITGKRTQTIHSLLQYDFKTLSFRKNHEDPIDCDLVIIDESGMIDTILLQRFLAALPDHAILILIGDVHQLPSVGPGNVLKDLILSNHIEVTYLTKIFRQLQNSNIITNAHKVNQGEFPVLNSSSGKKDFLFFQKEDPEEAIKHIIHLVSDFVPKKFGIFMKDIQVLAPMKKGVLGIFNLNKELKAALNPNKPFIQGKFHSFSTGDRVMQTRNNYNKEVFNGDIGYIASIDFAKKSLVACVDGRYICYSQTELNDLTPAYATSIHKYQGSEASCVILPIHTSHYVMLYRNLLYTAITRGKKLVILVGTKKAIAIAVRNDKVQHRCTGLQQSVQTLLNKPIPLFSPTYTICKP

SEQ ID NO: 55138 - protein, 666 aa, Chlamydia trachomatis
MGSLSIHLTTPLPLGAQKLSSDRYRFSLVAPRAQQVILVLLDPFSEIHEIPLSSTDHRTGAIWHIEISGISNEWSYAYKLRQSDSAFPNFSTNAYIADPYSKNIFSPQLFGSSKQPNDYTFSYLKQEDFDWEGDTPLRLPKENYFIYEMHVRSFTQDPSSQVTHPGTFLGIIEKIDHLKKLGVNAVELLPIFEFDETIHPFKNKDFPHLCNYWGYSSINFFCPSRRYTYGTDPCAPAREFKTLVKTLHRAGIEVILDVVFNHTGFEGTSCPLPWIDLESYYMVNDNGDLLNFSGCGNTVNTNTPIAIKWILDALRYWVQEMHVDGFRFDLAAVFSRDLQGVPRSLTPILQAISSDSILSETKLIAEPWDAGGLYQLGHFPSISTRWSEWNGCYRDHVKAFLNGDPHQVSSFASRISGSRDIYPAGNSTNSINYICSHDGFTLYDSVAYNHKHNEENGENNRDGTSANYSYNFGCEGETTDPNICQLRERQMKNFFLALFLSQGIPMIKSGDEYGHTAYGNNNHWCLDTKINHFLWDRLAERKEFFSFLCQIITLRTTHAELFNTNFLSEETITWLNSQGLPREWTPDHYLAFELKHPNYSLFIAFYSGNERIEIALPKLRQEHLAYEKIVDSTTGFFSQILSPKLSLEPYSSLVAISRKKKPIEPK

SEQ ID NO: 55139 - protein, 160 aa, Chlamydia trachomatis
MVFMLFGYLVGFLAADPEERMTSGGKRVVVLRLGVKSRVGSKDETVWCRCNIWNNRYDKMIPYLKKGSSVIVAGELSVESYMGRDGSPQASISVSVDTLKFNSGSSRPESRGSDEGRQRSNDNVSLGFEGESLDTEIALDKEVYAGFGEDQQYASEDVPF

SEQ ID NO: 55140 - protein, 499 aa, Chlamydia trachomatis
MVLLYSQASWDKRSKADALVLPFWMKNVKAQEAAVVDEDYKLVYQNALQNFSGKKGEAVFLFGNDKTKEQKIVLLGLGKSEEVSGTAILDAYAHVTTVLRKAKCKTVNILLPTISQLRFSVEEFLTNLAAGVLSLNYNYPTYHKVDASLPLLEKVTVLGIVPKVGDKIFRKEESLFEGVYLTRDLVNTNADEVTPEKLAAVAKGLAGEFASLDVKILDRKAILKEKMGLLAAVAKGSAVEPRFIVLDYQGKPKSKDRTVLIGKGVTFDSGGLDLKPGKAMITMKEDMAGAATVLGIFSALASLELPINVTGIIPATENAIGSAAYKMGDVYVGMSGLSVEIGSTDAEGRLILADAITYALKYCAPTRIIDFATLTGAMVVSLGEAVAGFFANNDVLARDLAEAASETGEALWRMPLVEKYDRALHSDIADMKNIGSNRAGSITAALFLQRFLEDNPVAWAHLDIAGTAYHEKEELPYPKYATGFGVRCLIYYMNKFLSK

SEQ ID NO: 55141 - protein, 237 aa, Chlamydia trachomatis
MTLYLLPNTLGNKRVEDLPSIVGEIVRNKIQGLIVESDRGGRLFLSLWKVKDPHKFPLAVMSKNDTSVKACDFYLEPIIKKGESWGVISDAGLPCIADPGVRLVQRARSLGVPVQAVAGPCSITQALMLSGLPGQNFTFHGYLPQNPKERARYVRGCSGKAHTHICIETPYRNQYTFEALLDQLPAHGELCVAIDLMGDQEYVSTRSVAVWNQSSDLEEVRERLKKVPAIFLFVNSF

SEQ ID NO: 55142 - protein, 905 aa, Chlamydia trachomatis
MDSDFAKHVHSLDIDWIESLLERFENHESLDASWKYFFEGYQVGKIDGCPKADAGDQAFEALQEKKAQSLLMVYRYYGYLQGQISPIASVEESSLVAEKVQGFDLQEMIPSLGLLPQSHVRVTDFIQVLKDKYCRSIAVETLTCSPEIQEYIWQLMEGEKPILTKEELLSRYQAVKKAVAFEEFLQVKFTGQKRFSLEGGESLIPMLEHLIAFGAKQGTNRYVMGMPHRGRLNVLGNIFGKPYRQIFMEFEDTPQIRGLQSVGDVKYHKGYVADRPKENVIMALLPNPSHLEAVDPVVEGAVAAIQHQGEAGKEQSCLAVLMHGDAALSGQGIVYETFQLSGIPGYSTEGTLHIVVNNQIGFTAHPRESRSTPYCTDIAKMMGIPVFRVNGDDVLACLQVIEYAMRVRNRFHCDVIIDLCCYRKYGHNESDDPSVTAPFLYEEIKKKQPVSLLFKERLISCPDWQISPQELDKIDEEIEHVLNQEFASLKDSGVEQLDKKECMHCSRMAVGELLVDNIDTSLDKDSLFDVSAKLCDIPDHFTPHTKIRSLLNKRMSMANGDIGYDWGMAEEIAFASLLQEGFSLRLSGQDSIRGTFSQRQLVWTDVRTGDTFSPLYHLSSSQGSVELYNSPLSEYAVLGFEYGYAQQAEKTLVIWEAQFGDFSNGAQIIFDQYISSGIQKWDLHSDVVVLLPHGYEGQGPEHSSARIERYLQLAADWNFQVVLPSTPVQYFRILREHTKRDLSLPLIVFSPKMLLRHPQCVSSIEEFGIKGGFKPFLEDANPNYYAKVLVLCSGKIYYDYRAALPKDYECNFACIRVESLYPLYLEDLLALIGKYPQVEHYVWLQEEPQNMGVFSYFALATDEIFPSKLQCVCRPRSSSTATGSANLSQKELSTLMETLFSIGRE

SEQ ID NO: 55143 - protein, 601 aa, Chlamydia trachomatis
MAESYLQNGFRRKTLSVKVGNLFVGSEHSIKIQSMTTTATTDVEGTVRQIYALQECGCEIVRVTVQGLKEVGACEQIKDRLVQQNVTIPLVADIHFFPQAAIHVADFVDKVRINPGNYVDKRNMFSGKIYSDEQYTRSLERLFEKFSPLVAKCKRLGRAMRIGVNHGSLSERIMQRYGDTIEGMVFSALEYAEVCVNMDYHNIVFSMKSSNPRTMVAAYRALARELDQRKWLYPLHLGVTEAGSGMDGMIKSSVGIGTLLSEGLGDTIRCSLTGSPTLEIPVCLDLLKETAKYSKSTKKYNPFEIYHSKQLTTQTTPKHFPVENVYGFLVGLTKDHLLTIEPNTLLQCLGVDITTGKKDLTSPDGVVIPKSMRSSAIVSEIEKHLRIFYKEDAPILNEMNEELWLSDKTLATPFVYFEVESIYQARRFFALRQNYSQPVCLSFSLKANLSKNSAAIDLSIRLGALLLDGLGSCVLFNFSDLKLARTLGFSILQSANIRSTTVEYISCPGCGRTLFDLPEVSQRIKERTKHLPGGLKIAVMGCIVNGPGEMADADFGYVGSKPGMIDLYVKHKCVKSYVPMENAEEELIQLLKEHGVWKEPE

SEQ ID NO: 55144 - protein, 412 aa, Chlamydia trachomatis
MQQLIDSLQKRGILDNSSAGLESLTAPVSAYLGFDPTAPSLHIGHWIGICFLRRLSAYGITPIALVGGATGMIGDPSGKSVERSLLDQEQVLDNSKKIEVALANYLPDIRIVNNADWLGSLSMVDFLRDIGKYFRLGSMLAKDVVKQRVYSEEGISYTEFSYLLLQSYDFAHLFKHHGVVLQCGGSDQWGNITSGIDYIRRKGLGQAFGLTYPLLTDSKGKKIGKTESGTVWLDPELTSPYELFQYFLRLSDQEIPKIARMLTLLDDDEVLALDKRLENDPQAVKRYVAEVIVKDVHGAEGLAQALATTESFFANKGKNITESELAALVQSGVGINVARADVIGKRWLDVVVQLGFCSSKGEARRLIQQRGLYVNQEPLIDEQSVLDGTYLCFDRYILLSQGKKKKQVIDLN

SEQ ID NO: 55145 - protein, 479 aa, Chlamydia trachomatis
MAPADIGLIGLAVMGKNLVLNMIDHGFAVSVYNRSPEKTEEFLKEHGENISLQGFTAIEEFVQSLKRPRKIMIMIKAGAPVDEMISSLLPFLEEGDILIDGGNSYYLDSERRYIDLKKKGILFVGMGVSGGEEGARKGPSIMPGGNIEAWPVIAPIFQSIAAQVDGQPCCSWIGTGGAGHFVKAVHNGIEYGDIQLICETYEILKSRLDLSLEQIGNIFFEWNQTDLNSYLMGASAAVLTAKDENGVAVASTILDVAGQKGTGRWVAEDAIKAGVPMSLIIESVLARYLSAWKEVRRQAAREFPVASLLYQPSQEASVLIEDAREALYAAKIISYAQGFMLLKQISEERNWDLNLGELALIWRGGCIIQSAFLDKIHQGFESCPDAHSLMLQDYFKNVLLNSETGFRRAILHAVGAGVAIPCLASALAFYDGYRTENSPLFLVQGLRDYFGAHGYERQDRPRGEFYHTDWLGSKNASRM

SEQ ID NO: 55146 - protein, 529 aa, Chlamydia trachomatis
MTQTAEKPFGKLRSFLWPIHMHELKKVLPMFLMFFCISFNYTILRDTKDTLIVTAPGSGAEAIPFIKLWLVVPSAVVFMLIYAKLSNILSKQALFYAVLSPFVVFFALFPLVIYPYRHILHPTDFADTLQAILPSGFLGFIAMLRNWTFAAFYVLSELWGSVMLSLMFWGFANEITKISEAKRFYALFGVGANVALLISGPAIVWSSKLRASLGEGVDPWGVTLYFLMAMFLCSCAIIAACYWWMNRYVLTDPRFYNPAELKAKKSKPKMSMGESFSYLLRSPYMLLLALLVICYGVCINLVEVTWKSQLKMQFPNPNEYSAFMGTFSFWTGVVSVFVMLFIGGNVIRRFGWLTGALVTPVMVLVTGAIFFALVIFRDHATGLVAALGTTPLMLAVVVGAVQNILSKSTKYALFDATKEMAYIPLDQEQKVKGKAAIDVVAARFGKSGGSLIQQGLLVVCGSISAMTPFLAVALFAIIMVWLTSATKLNKLFLAASAAKEQELAEATAAAEKEASPAAKEVSPAIEGVS

SEQ ID NO: 55147 - protein, 259 aa, Chlamydia trachomatis
MNRDNTIAWAVDDLCVNYDHSDVLCHIAFSLPSGAMAAIIGPNGAGKSTLLKASLGLIRASSGQSLFFGQKFAKVHQRIAYMPQRASVDWDFPMTVLDLVLMGCYGYKGMWNRISTGDRREAMNILERVGLADFANRQIGKLSGGQQQRAFLARSLMQKADLYLMDELFSAIDMASYRMVVDVLQDLKKEGKTIVVIHHDLSNVRQLFDHVILLNKHLVCSGSVEKCLTKEAIFQAYGCELELLDYTLKLSRGKYQGSC

SEQ ID NO: 55148 - protein, 366 aa, Chlamydia trachomatis
MKFVISRNELGNLIKKVQNVVPQSTPIPVLTHVLIESCNDELVFTATDLTVSTRCVVKAKVYESGSVTIPSRRFFQLIRELTEANIEVAANSGEMATITSGSSCFRLLSMGKEDFPMLPDMQNALRFTLDSEQLKDMFQRTSFAVSREESRYVLTGVLLSISNGTMTVVGTDGKRLAKIDTNISLDPSFSGDYIIPIKAVEEIIRMASEDVQSTIFLDQTKIAVECGNTLLVTKLLSGEFPDFSPVISTQSSVQLNLHREELISLLKQVALFTNESSHSVKFSFSPGELTLTANCTKVGEGKVSMAVNYTGETLEIAFNPFFFLDILKHSRDELVQLGISDSYNPGIITDSTRSLFVIMPMRLHDD

SEQ ID NO: 55149 - protein, 151 aa, Chlamydia trachomatis
MSVKEIVSNRKAFHNYEVLETFDAGIVLTGTEIKSLRDHGGNLGDAYVTISKGEAWLLQSSIAPYRFGNINNHEERRKRKLLLHKYELQKLDSRVSQKGLTIIPLSFFFSKGFVKVRIGCCRGKKSHDKRQALIEREKNRELAAAMKRSYR

SEQ ID NO: 55150 - protein, 89 aa, Chlamydia trachomatis
MSKKCALTGRKPRRGYSYAIRGISKKKKGIGLKVTGRTKRRFLPNMMTKRLWSTEENRFLKLKISAAALRLVDKLGLDKVVARAKSKGF

SEQ ID NO: 55151 - protein, 360 aa, Chlamydia trachomatis
MGEKTEKATPKRLRDARKKGQVAKSQDFPSAITFIVSMFMTFSLSSFFAEHLGGFLVSIFRTAPQQHDPRLAVYYLKNCLMLILTVSLPLLGAVGFVGLLIGFLVVGPTFSTEVFKPDLKKFNPIENLKQKFKLKTFIELLKSIFKISGAALILYIVLKNRVELVIETAGVPPLVTAQIFKEILYKAVTSIGMFFLVVAVIDLVYQRHSFAKELKMEKFEVKQEFKDTEGNPEIKGRRRQIAQEIAYEDTSSQIKHASAVVSNPKDIAVAIGYMPEKYKAPWIIAMGVNLRARRIIAEAEKYGVPIMRNVPLAHQLLDEGKELKFIPETTYEAVGEILLYITSLNAQNIENKNINQFDNL

SEQ ID NO: 55152 - protein, 364 aa, Chlamydia trachomatis
MGQTECGIVGLPNVGKSGLFNALTGAQVASCNYPFCTIDPNVGIVPVVDSRLEILARISQSHKIIYADMKFVDIAGLVKGAASGAGLGNRFLSHIRETHAIAHVVRCFDNDDVTHVSGKIDPEEDIAVINLELILADFSSATSVRDKLSKQAKGKKDIGQLIPILDRVIEHLESGNPVRTLSLSSEEGSLLKPYPFLTGKPMLYIANIDEDSLTDLDNPYVQKVRRIAQQEGANVVPICVKLEEEILSLPPEERQDFLHSLGLQESGLNRLVASAYQTLGLISYFTTGPQETRAWTISKGATAAEAAGEIHSDIQKGFIRAEVVTLEDIVTYNGRAGAREAGKLRAEGRDYIVQDGDIMLFLHN

SEQ ID NO: 55153 - protein, 295 aa, Chlamydia trachomatis
MDLSYSLLPSSDPIESITIGFFDGCHLGHQALLSSLKQFPGKSGVITFSEHPKHTLSNSPPETITSLEERIQLLTNCHIDYLAILPFNQEIANEEAEMFILSLYESLHPSRIIFGYDSRLGRGGLGNAQTLKPFASSLGISLEEIPPLSINGTIVSSRKIRQFLREGDLLSAEKFLGRPFSYTGTVTRGQGIGSSLGYATINLNLTRSLLPLGVYSCSIKIGRESYLGVMNLGMAPTVQRNQLCLEAHILDLSADLYEQRVTVIPKQFLREEKTFSSQKELALAIQEDIRKARLS

SEQ ID NO: 55154 - protein, 241 aa, Chlamydia trachomatis
MELATEPIEGVLLVDKPQGRTSFSLIRSLVRLIGVKKIGHAGTLDPFATGVMVMLIGRKFTRLSDIMLFEDKEYSAVAHLGTTTDTYDCDGKIVGRSKKVPTMEEVLECTSYFQGEIQQVPPMFSAKKVQGKKLYEYARQGLSIERSFATVRVDLRLIKYEYPRLHFVVKCSKGTYIRSIAHELGNMLGCGAYLEELRRLRSGNFSIDQCIDGNHLDEPGFDVFPHLRDANGLILQPTPVL

SEQ ID NO: 55155 - protein, 896 aa, Chlamydia trachomatis
MEHAKLTKNLKLKIKNAQLTKAAGLDKLKQKLAQAGSSDTKNSPVSKAQTKEKSSKKTAGTTASAPEIESGATESTARRIRAKDRSSFAAEEPSTTVALPGDASHLTLDALPSADSTEPLSNSSQEKIVEDAVETPNSPQEDGKELQEEVANEQPARNEETPIIRTRTEPKSVVSIKPKFGPTGKHINHLLAKTFKAPAKETKAAAPAEETTQQTRPSVETASTKQQQPSGTNTRPAQSAPAYRRESTNNNNNSKRGPDRDRTKRSDENVKAFTGRDRYGLNEGSSEEDKWRKKRVHKTKKQSEEHVVQCPSHIKIALPITVKDLAAEMKLKASELIQKLFIHGMTYVVNDVLDSQTVVQYIGLEFGCTIEIDSSEKEKLCLVENTVRDEINETNPQKLVIRSPIVAFMGHVDHGKTTLIDALRQSNMAASEAGAITQHMGAFKCSTPVGEITVLDTPGHEAFSAMRARGAEVCDIVVLVVAGDEGIKEQTVEAIEHAKAANITIVVAINKCDKPNFNEETVYRQLAELNLLPEAWGGSIATINTSAKTGEGLQDLLEMLALQAEVLELKADPSARARGLVIESELHKGLGAVATVLVQNGTLHLGEALVFNDCYGKIKTMHNEHNQLLQSASPSTPVLITGLSAIPKAGDPFIVVKNEKVAKEIISARLAGQQRSAALQKKRPNFDAVLQNKKTLKLIIKADVQGSIEALAHSILNIRSEKVDVEILSSGVGDISESDIRLASASKATVIGFHTSVESHAESLIKSLNVKVCLFDIIYHAVDAIKEIMTGLLDPIAEEKNLGAAEIKATFKSSQLGTIYGCLVTEGTMVRNQKVRIIRDKEVLWKCSLSSLKRLKEDVKEVKKGMECGILLDNYQQAQIGDTLQCYEVIYHPQKL

SEQ ID NO: 55156 - protein, 434 aa, Chlamydia trachomatis
MNKDLVAIFDYMEREKGIQRSTIVGAIESALKIAAKKTLRDDANVSVSINPRTGDIEVFCEKQIVEKCQNPSKEIPLDKAREYDPDCQIGQYMDVPFVSDQFGRIAAHAARQIIGQKLRHAERDVIYEEYRHRKNEIISGVIKSFSRGSNLVVDLGKVEGLLPARFYPKTEKHKVGDKIYALLYEVQESENGGAEVILSRSHPEFVKQLFMQEVPELEEGSVEIVKIAREAGYRTKMAVRSSSPQTDAVGAFVGMRGSRIKNIIRELNDEKIDVVNYSPVSTELLQNLLYPVEIQKIAILEDDKVIAIIVQDSDYATVIGKRGINARLISQILGYELEVQRMSEYNKLLEIQRLQLAEFEDPRLDQPLEVEGINTLIVQNLEHAGYDTIRKILLASASELASVPGISLELAYKILEQVSKYGACKVDEKPKVED

SEQ ID NO: 55157 - protein, 536 aa, Chlamydia trachomatis
MHGFTATEEEPTSEVQPGAILKGTVVDISKDFVVVDVGLKSEGVIPMSEFIDSSEGLSVGAEVEVYLDQTEDEEGKVVLSREKATRQRQWEYILAHCEEGSIVKGQITRKVKGGLIVDIGMEAFLPGSQIDNKKIKNLDDYVGKVCEFKILKINVDRRNVVVSRRELLEAERISKKAELIEQITIGERRKGIVKNITDFGVFLDLDGIDGLLHITDMTWKRIRHPSEMVELNQELEVIILSVDKEKGRVALGLKQKEHNPWEDIEKKYPPGKRVRGKIVKLLPYGAFIEIEEGIEGLIHVSEMSWVKNIVDPNEVVNKGDEVEVVVLSIQKDEGKISLGLKQTEHNPWDNIEEKYPIGLRVTAEIKNLTNYGAFVELEPGIEGLIHISDMSWIKKVSHPSELFKKGNTVEAVILSVDKESKKITLGVKQLTPNPWDEIEAMFPVGSDISGIVTKITAFGAFVELQNGIEGLIHVSKLSDKPFAKIEDILSIGDKVSAKVIKLDPDHKKVSLSIKEFLAHGGHAGQDAEEETSSNRD

SEQ ID NO: 55158 - protein, 125 aa, Chlamydia trachomatis
MFGIGTDIIEIDRIRRAYHTYGDRFLNKIFTKGEQAYCFSKSDPYASLAVRFAAKEAVSKALGTGIGKSLKWKEIEISRGTQHPQVSVPESLLALLEVKRILLSMSHCREYATAVAIAEVTNSSK

SEQ ID NO: 55159 - protein, 298 aa, Chlamydia trachomatis
MSLDKLLVTDIDGTITHQPHQLDDRVIEALYQYHEAGWDLFFLTGRYFSYAYPLFQNLSVPFLLGSQNGSSVWSSTEKEFIYFQNMPRDFLRVLERYFEGLDLIVCIESGASNRDTYFRQGLGNKTRELKAILDTVYFPSEESAELLVDVQGCLSDEFTYENFAVAKFFGRREEVKKIMDRFVEAPEVSSRVTMNYMRWPFDFNYAVLLLTLKDISKGFAVDQVVHTFYKGNKPFIMASGDDANDIDLLSRGDFRIVMQTAPEEMHGLADFLAPPAKDLGILSAWEAGELHHKQLLNP

SEQ ID NO: 55160 - protein, 298 aa, Chlamydia trachomatis
MLKIDLTGKIAFIAGIGDDNGYGWGIAKMLAEAGATILVGTWVPIYKIFSQSWELGKLNESRKLSNGELLTLAKIYPMDASFDTPEDVPQDILENKRYKDLSGYTVSEVVEQVKKDFGHIDILVHSLANSPEIAKPLLDTSRKGYLAALSTSSYSFISLLSHFGPIMNEGASTISLTYLASMRAVPGYGGGMSAAKAALESDTKVLAWEAGRRWGIRVNTISAGPLASRAGKAIGFIERMVDYYLDWAPLPSPMEAEQVGAAAAFLVSPLANAITGETLYVDHGANIMGIGPEMLPKD

SEQ ID NO: 55161 - protein, 544 aa, Chlamydia trachomatis
MVAKNIKYNEEARKKIQKGVKTLAEAVKVTLGPKGRHVVIDKSFGSPQVTKDGVTVAKEVELADKHENMGAQMVKEVASKTADKAGDGTTTATVLAEAIYTEGLRNVTAGANPMDLKRGIDKAVKVVVDQIKKISKPVQHHKEIAQVATISANNDAEIGNLIAEAMEKVGKNGSITVEEAKGFETVLDVVEGMNFNRGYLSSYFATNPETQECVLEDALVLIYDKKISGIKDFLPVLQQVAESGRPLLIIAEDIEGEALATLVVNRIRGGFRVCAVKAPGFGDRRKAMLEDIAILTGGQLISEELGMKLENASLAMLGKAKKVIVSKEDTTIVEGMGEKEALDARCESIKKQIEDSTSDYDKEKLQERLAKLSGGVAVIRVGAATEIEMKEKKDRVDDAQHATIAAVEEGILPGGGTALIRCIPTLEAFLPMLTNEDERIGARIVLKALSAPLKQIAANAGKEGAIIFQQVMSRSANEGYDALRDAYTDMIEAGILDPAKVTRSALESAASVAGLLLTTEALIAEIPEEKPAAAPAMPGAGMDY

SEQ ID NO: 55162 - protein, 867 aa, Chlamydia trachomatis
MEKFSDAVSEALEKAFELAKDAKHSYVTENHLLKSLLQNPGSLFCLVIKDVHGNLGLLTSAVDDALHREPTVVEGAAIPKPSPSLQQLLLNAQEEARSMGDEYLSGDHLLLAFWKTTKEPFASWRKTVKTSPEALKELIIKLRQGSRMDSPSAEENLKGLEKYCKNLTILAREGKLDPVIGRDEEIRRTIQVLSRRTKNNPMLIGEPGVGKTAIAEGLALRIVQGDVPESLKDKHLYVLDMGALIAGAKYRGEFEERLKSVLKGVEASEGACILFIDEVHTLVGAGATDGAMDAANLLKPALARGTLHCIGATTLNEYQKYIEKDAALERRFQPIFVTEPSLEDAVFILRGLREKYEIFHGVRITEGALNAAVVLSYRYITDRFLPDKAIDLIDEAASLIRMQIGSLPLPIDEKERELSALIVKQEAIKREQAPAYQEEANEMQKAIDRVKEELAALRLRWDEEKGLIAGLKEKKNSLENLKFAEEEAERTADYNRVAELRYSLIPSLEKEIRLAEEALNQRDGRLLQEEVDERLIAQVVANWTGIPVQKMLEGESEKLLVLEESLEERVVGQPFAITAVSDSIRSARVGLSDPQRPLGVFLFLGPTGVGKTELAKALAELLFNKEEAMIRFDMTEYMEKHSVSKLIGSPPGYVGYEEGGSLSEALRRRPYSVVLFDEIEKADKEVFNILLQIFDDGILTDSKKRKVNCKNALFIMTSNIGSQELADYCAKKGTIVDKEAVLSVVAPALKNYFSPEFINRIDEILPFVPLTTEDIVKIVGIQMNRVALRLLERRISLTWDDSVVLFLSEQGYDGAFGARPLKRLIQQKVVTMLSKALLKGDIKSGMSVELTMAKDVVVFKTKTNSVV

SEQ ID NO: 55163 - protein, 163 aa, Chlamydia trachomatis
MDLKQIEKLMIAMGRNKMKRIAIKRDGFELELERDTGPNIQEPVFYDNRLFAGFTQERPIPSDQNLGNPIVKEVGEKKEDKPVEGDFIVSPLVGTFYGAPSPESPAFVKPGDIVSEDTVVCIVEAMKVMNEVKAGMAGRVEEVLITNGDPVQFGSKLFRIVKA

SEQ ID NO: 55164 - protein, 457 aa, Chlamydia trachomatis
MKKVLIANRGEIAVRIIRACHDLGLSTVAIYSVADQEALHVLLADEAVCIGEAQAAKSYLKIANILAACEITGADAVHPGYGFLSENANFASICESCGLTFIGPSAESIATMGDKVAAKQLAKKIKCPVIPGSDGVVKDEVEGIRIAEKIGFPIVIKAVAGGGGRGIRIVREKDEFYRAFTAARAEAESGFNNPDVYIEKFIENPRHLEVQVIGDKYGNYVYLGERDCTVQRRRQKLIEETPSPILTPEMRAKVGKVAVDLARSAGYFSVGTVEFLLDAEKRFYFMEMNTRIQVEHTITEEITGIDLLKAQISVAKGEKLPWKQKNIEFTGHVIQCRINAEDPCNNFAPSPGRLDYYLPPAGPSVRVDGACYSGYAIPPYYDSMIAKVITKGKTREEAIAIMKRALKEFHIGGVHSTIPFHQFMLDNPKFIHSDYDINYVDRLLAEGSTFLKLAEGD

SEQ ID NO: 55165 - protein, 150 aa, Chlamydia trachomatis
MEKRKDTKTTLAKASDDQNKAWYVINAEGKTLGRLSSEVAKILRGKHKVTFTPHVAMGDGVIVINAEKVRLTGAKRAQKVYHYYTGFISGMREVPFENMIARKPAYVIEHAVKGMLPKTKLGRRQMKSLRVVKGSSYAQYEAIKPIVLDA

SEQ ID NO: 55166 - protein, 133 aa, Chlamydia trachomatis
MTKNTIQESVATGRRKQAVSSVRLRSGNGKIDVNGKTLEQYFPLEVQRATILAPLKMLGDVNSFDLIIRVSGGGVQGQVIATRLGLARAVLQEKEDMKQELKSQGFLTRDPRKKERKKYGRKKARKSFQFSKR

SEQ ID NO: 55167 - protein, 253 aa, Chlamydia trachomatis
MDRSPLFLIIMGAPGSGKGTQSKLLASQLSLQHISSGDLLRNAVSQNTPLGQEIKSYLDQGKLLPDQLVWKLVHEKLDELQQDTLLRKLSFLSRSENGAILDGFPRTVAQAKLLNEFLCSYFPDYKIILLDISDEEVLNRLTSRYICPSCQGIYNKQQGFSRCPKCLVELTRRSDDTPEVILDRIQTYKQETQPVLDYYAALQRLITIDANAPTQQVFKNILDALPESNYTIHKKSCCDCCDCDCYDGCDCEE

SEQ ID NO: 55168 - protein, 315 aa, Chlamydia trachomatis
MIVDMHCDMLSHENFSPANPAVRSSPDQLIEGGVNVQVCALFTESQEFTTLDQQNQLFFSLIEQDERLTPIAYEPQMEGSLQMIRSVENASGLGSDKIPLQALFQKLLILHSQGPLAYVGLVWNFANRFGGGVLEPKRLSKDGKNLLEFLYALAIPVDLSHCSDQLTEDILDFTVDKLPNMFILASHSNFRKVQGVARNLLDVHAKEIFARNGVIGLNGVNYFVGESLEDMRKHIAYAQELGILDGLVLGTDFFYTDEEKFFPNFSTAKDHPKLQALIEDTLSVNQARALLAGTAQQFLTKVVTAQKSVVNTITL

SEQ ID NO: 55169 - protein, 660 aa, Chlamydia trachomatis
MRALSQDYYIALCTELIEHDRRYYVLDRPTISDYSYDMKMRELQKIEAQHPEWKVPWSPTIYLGDRPSGQFPVVPHSHPMVSIANVYSLEELEEFFSRTEKLLGYFPTYSLELKIDGIAVAIRYENRTFAQALSRGNGVKGEDITANVSTIRSLPMTLPQDAPEEVEVRGEVFLSYQAFEKLNICQREQGKLEFANPRNAAGGTLKLLSSREAAKRNLDLSIYGLITNREEHSHFENLGLCAHWGFPIAGMPKQCRTKEEVIERIREVEGMRSRLPMAIDGVVVKVDSVAEQHRLGLTSKHYRWAIAYKYAPERAETILQDITVQVGKTGILTPVAELTPVLLSGSRVSRASLYNEDEIEKKDIRIGDSVYVEKGGEIIPKIVGINLAKRSPDSKPWKMPSLCPMCHNPVIKERVSVRCTNPLCLGGMLEKICFFASKGALNIDHLGEKVIAKLFEMGLIRSCSDVFALTENDLKQVPGFKDRSVHNLLASIAGAKEVTLDRFLTALSIPFVGSSGAIALADHFGTLDKVMKASLDELLSIEGIGQKVAASIIDFFSKTENVEEICRMQELGVRILPKQVDRWAPLQGKIFVLTGTLQEMTRLQAEERIRSLGGKISSSVSKNTYAVVVGREAGSKLKKAQELGVQVLEESDLLKILNQN

SEQ ID NO: 55170 - protein, 52 aa, Chlamydia trachomatis
MASKNREIIKLKSTESSEMYWTVKNKRKTTGRLELKKYDRKLRKHVIFKEAK

SEQ ID NO: 55171 - protein, 506 aa, Chlamydia trachomatis
MGVMKLELLLAFKYLIPRRKSFSSSIVSVFSVGIVALVVWLSVVFMSVIHGLQQRWVGDLARLHASIRIEPSDKYYESYYYQIDSHAEASQYIYKTIGEKLLSDQTDPYDPDVDFALPETFPAPEFSVSGKIVDPVHIANEKMLSFLPSRKGSFVEFEEGMGYVHMDRASQSSRIEPRSLSQYIAYSSEAFYQQRVLPFEETDYSTEVLNRFNASSEGWLADFLLLQEKFRGVSVILPVHYRDLGYRVGDTASLSIFSVKKEGEVRFPLRVIGFYNPGVSPFGGKTIFIDKDLVASIRSESEGLGMHNGWQVFLPDIKEISVVKRTLQKLLQEADVSSYWEVSSLYDYEFFKPILDQLQSDQVLFSIVSFIVLIVACSNIVTMSILLVNNKKREIGILKAMGVSSSRLRLVFGVCGACSGMLGALLGSILAALTLKNLGVLTHWLSVLQGREAFNPSFFGEQLPQDFHLPTVICLSLGAFVLAAISGALPAQHVARMQVSDILKAE

SEQ ID NO: 55172 - protein, 512 aa, Chlamydia trachomatis
MSNILILDFGSQYTNVLAKKIRLLSVFCEVLPWNTPLEKILQKSPSGLIFSGGPHSVYQNNSPEVDKEIYNSNIPILGVCYGMQLIARDFGSEVQGGKSEFGYTPIVFYPSELFKGLADQDAFHTEIRMSHCDCVVVPPKDFFVIASSQHCPIAAIECPKKKLFGLQFHPEVSDSQDIGDKILSNFVKHICQTSETWKIETIEKQLIQGIREKVGETERVLLGLSGGVDSSVLAVLLHNALGDRLSCVFVDTGLLRKNEVEEVKQQFSSLGLEILVVDASEKFFHDLSGIEDPEQKRKVIGAAFIEVFDEASKNLDVQWLAQGTIYSDVIESAKSCDATQVIKSHHNVGGLPEKLNLKLLEPLRFLFKDEVRALGKVLGLPDVLISRHPFPGPGLGVRVLGEVRREYVEIVKNADSIFIEELKKANLYHKVSQAFAVFLPCKSVAVKGDCRHYGYTIALRAVESTDFMTACWPSLSREFLNRCSSRIINEIPEVCRVVYDISDKPPATIEWE

SEQ ID NO: 55173 - protein, 536 aa, Chlamydia trachomatis
MSFKSIFLTGGVVSSLGKGLTAASLALLLERQGLKVAMLKLDPYLNVDPGTMNPYEHGEVYVTDDGVETDLDLGHYHRFSSVQLSKHSTATSGQIYTRVITKERNGEFLGSTVQVIPHVTNEIINVIQACAEHHKPDVLIIEIGGTIGDIESLPFLEAVRQFRCEHPQDCLSIHMTYVPYLKSAKEIKTKPTQHSVQNLRSIGISPDVILCRSEVSLSSEVKRKISLFCNVPENAVFNAIDLENSIYEMPLLLARENIVDFLLSKFGFSPKSLDLTDWQNLVTTLCDGNRHLVRIGLVGKYLEHKDAYKSVFESLSHASIPANCSLEIVPISPESEALTNQLSQCDGCLIPGGFGTRSWEGKIAAARYCRDNNIPCFGICLGMQALVVEYARYALSLPLANSLEMDPNTPDPVVCMMQGQDTMIKGGTMRLGAYPCQITPKSLAFEAYKTDLVQERHRHRYEVNPAYVDLLQKNGLRIVGVCPQGDLCEIIEIPNHRWMLGVQFHPEFLSKLAAPHPLFVKFLSAALDYSLEKGRE

SEQ ID NO: 55174 - protein, 148 aa, Chlamydia trachomatis
MNSMKQKEAFLGVDYGKKRIGLAFASAPLLITLPIGSINTCSSLALTAQALITIIKERAVTTVVFGNPLPMQKSYASSVQSEIQELAALVRDMTSLEVILWDERLSSAQAERMLKNDCGLSRKQRKNSSDSLAATLILSSFLDSRKLY

SEQ ID NO: 55175 - protein, 507 aa, Chlamydia trachomatis
MEEIKEMGPTLPACPPCVMVIFGATGDLTARKLFPALYNLTKEGRLSENFVCVGFARRPKSHEQFREEMRQAIQNFSHSSEIDIRVWESLEHRIFYHQANFSEAEGYSSLRSFLESVDQKYGTKGNRLFYLSTPPDYFQEIIRNLNRHQLFYHEQGAQQPWSRLIIEKPFGVDLQTAQELQQCIDANINEESVYRIDHYLGKETVQNILTIRFANTLFESCWNSQYIDHVQISVSESIGIGSRGNFFEKSGMLRDMVQNHLMQLLCLLTMEPPSEFSSAEIKKEKIKILKKILPIREEDVIRGQYGEGVVQGVSVSGYREEENVDPNSLVETYVALKLFIDNPRWKGVPFYLQAGKRLPKRTTDIAVIFKKSSYDLFNSENCPLCPLENDLLIIRIQPDEGVALQFNCKVPGTNKLVRPVKMDFRYDSYFNTVTPEAYERLLCDCILGDRTLFTSNEEVLASWELFSPLLEQWSKIRPIFPNYIAGSLRPQGADELLSRDGRAWRSY

SEQ ID NO: 55176 - protein, 203 aa, Chlamydia trachomatis [sequence omitted]

SEQ ID NO: 55177 - protein, 833 aa, Chlamydia trachomatis
MLNKEEIIVPKNLEEEMKESYLRYSMSVIISRALPDVRDGLKPSQRRILYAMKQLNLTPGAKHRKCAKICGDTSGDYHPHGEAVIYPTLVRMAQDWAMRYPLVDGQGNFGSIDGDPAAAMRYTEARLTHSSIFLLEDLDKDTVDMVPNYDETKYEPVVFPSKFPNLLCNGSSGIAVGMATNIPPHNLGELIEATLLVLANPQTSIEEILEVMPGPDFPTGGIICGTEGIRSTYYTGRGKLRLRARIHVEENSDKQRENIILTEMPYNVNKSRLVEQIAELINEKTLTGISDVRDESDKDGIRVVLELKKGESSEVIINRLYKFTDVQVTFGANMLALDKNLPRTMSIHRMISAWIRHRMDVIRRRTRYELNKAETRAHILEGFLKALSCMDEVVKTIRESSNKEHAKQQLVELFGFSEAQSLAILELRLYQLTGLEIDKVQKEYNELLEKIAYYRRVLAEEELVKDIIREELQELHKVHKTPRRTTIEMDAGDVRDIEDIIADESVIITISGDDYVKRMPVKVFREQKRGGQGVTGFDMKKGSDFLKAVYSASTKDYLLIFTNMGQCYWLKVWQLPEGERRAKGKPIINFLEGIRPGEQVAAVLNVKRFEQGEYLLLATKKGVVKKVSLDAFGSPRKKGIRALEIDDGDELIAARHIVNDEEKVMLFTRLGMAVRFPHDKVRPMGRAARGVRGVSLKNEEDFVVSCQVVTDDQSVLVVCDNGFGKRSLVCDFRETNRGSVGVRSILINQRNGDVLGAISVTDFDSILLMSAQGQAIRINMQDVRVMGRATQGVRLVNLREGDTLVAMEKLSVNTESGETEESVSIQVGHAVEE

SEQ ID NO: 55178 - protein, 804 aa, Chlamydia trachomatis
MDAQEKKYDASAITVLEGLQAVRERPGMYIGDTGVTGLHHLVYEVVDNSIDEAMAGFCTEVVVRILEDGGISVSDNGRGIPVQIHEKESAKQGREISALEVVLTVLHAGGKFDKDSYKVSGGLHGVGVSCVNALSEKFIANVFKDGQAYSMEFSKGAPLTALQVLGSTDKRGTEILFYPDPTVFSTCVFDRAILMKRLRELAFLNRGITIIFEDDRDAGFDKVTFFYEGGIQSFVSYLNQNKESLFPTPIYIQGSKRGDDGDIEFEAALQWNSGYSELIYSYANNIPTRQGGTHLTGFSTALTRAVNSYIKSHNLAKSDKLSLTGEDIREGLVAIVSVKVPNPQFEGQTKQKLGNSDVGSVAQQISGEVLTTFFEENPQIAKTIVDKVFVAAQAREAAKRARELTIRKSALDSARLPGKLVDCLEKDPEKCEMYIVEGDSAGGSAKQGRDRRFQAILPIRGKILNVEKARLQKIFQNQEIGSIIAALGCGIGTDNFNLSKLRYKRVIIMTDADVDGSHIRTLLLTFFYRHMSALIENGCVYIAQPPLYRVSKKKDFRYILSEKEMDGYLLNLGTRESRVVFDDTARELEGTALESFVNLILEVESFIIALEKRAIPFSEFLDMFRDGAYPLYYYPPESGKQGGNYLYSNEEKEAAVAANEEAAARIIELYKASAFEEIQHNLNEYGYDIRHYLHPKGTGITVSTEDSKTPNYTCYTLKEVIDYLKGLGRKGIEIQRYKGLGEMNADQLWDTTMNPEQRTLVRVSLKDAVEADHIFTMLMGEEVPPRREFIESHALSIRMSNLDI

SEQ ID NO: 55179 - protein, 372 aa, Chlamydia trachomatis
MALRFEILHQSKKSRARVGRIETEHGCIDTPAFVPVATNGALKGVLDHSNIPLMFCNTYHLIVHPGAEAVAAMGGLHQFIGRNAPIITDSGGFQIFSLAYGSVAEEIKSCGKKKGENSIIKINDEGVWFKSYRDGRKLFLSPEVSVQAQKHLGADIIIPLDELLPFHTDPAYFQQSSQRTYAWEKRSLDYHLANPGYQSMYGVIHGGTFPDQRKLGCQFVEDLPFDGSAIGGSLGKNLRDIVGVVDVTTANLSIERPRHLLGIGDLPSIWATVGFGIDSFDSSYPTKAARHGMILTSQGSLKINNQRYASDLNPIEPGCACPACSQGISRAYLRHLFKVHEPNAGIWASIHNMHYMQKIMSKIREKILNDQL

SEQ ID NO: 55180 - protein, 490 aa, Chlamydia trachomatis
MGEQNRNEEKLDVALTSGNLMDSKTSHLDDELSFKLEEAFDTLTAGEHSQDLTSIVSAYNPIDLAYAVSCLPSDSRSILYKSLDSIASKIAFIINTDSASRWAIFRNLSDGEICALIEQMPPDEAIWVLDDIPDRRYRRILDLIDVKKALKIRDLQKHGRNTAGRLMTNEFFAFLMETTVKEVATCIRNNPGVDLTRLVFVLDFKGELQGFVTDRSLIIASPEMPLKQIMRPVEHKVLADTTREEVVDLVERYKVAVLPVVDEENFLIGAITYEDVVETIEDIADETIARMAGTTEDVGYHDCHVVQRFLLRAPWLLITLCAGLVSASVMAYFQKIAPTLLAMVIFFIPLVNGLSGNVGVQCSTILVRSMATGTLSFGRRRETILKEMSIGLLTGVALGILCGLVVCCMGCLGLGLFSTGGVQLGVTVSVGILGASLTATTLGVLSPFFFAKIGVDPALASGPIVTALNDIMSMVIFLLITGTLNVLFFK

SEQ ID NO: 55181 - protein, 340 aa, Chlamydia trachomatis
MLTLGLESSCDETSCALVENGKILANRIASQDIHAAYGGVIPELASRAHLQIFPKLLAAVAQDAEVSLEDVELISVANTPGLIGALSVGVNFAKGLASGLKKTLIGVNHVEAHLYAACLEEPSIRFPALGLAISGAHTSLFLMPNATTFLLIGKTRDDAIGETFDKVARFLGLPYPGGQKLEELAQDGDEEAYPFSRAKVSGNDFSFSGLKTAVLYALKGNNSSAKAPFPEVSETQKRNIAASFQKAAFMTIAQKLPDIVKAFSCESLIVGGGVANNRYFRRLLNQTCSLPTYFPSSQLCSDNAAMIAGLGERLFCNQTYVSKEVIPCARYQWESACLSH

SEQ ID NO: 55182 - protein, 548 aa, Chlamydia trachomatis
MELLSVNKSYFELQRLHYRPVTLALLDNLCSLHIKESASSEPNPGLLAKHIPHLCALPNLTIQKGDRSSSEPLRIGVLLSGGQAPGGHNVVIGLFEGLRAFNKETKLFGFIKGPLGLIRGLYKDLDISVIYDYYNAGGFDMLSSSKEKIKTKEQKSAILSTVKKMKLHGLLIVGGDNSNTDTAMLAEYFIEHNCPTAVIGVPKTIDGDLKNSWIETPLGFHTSCRTYSEMIGNLEKDILSTRKYHHFVKLMGEQASHSTLECGLQALPNITLIGEEVAIHHTSLRSLSHHIARGLIKRFRKDKNYSTILIPEGLIKQIPDTKLLIHELNALIAEGQFSVNHFDQQLSPMALQTFSSLPENIREQLLLDRDSYGNVRVSKIAIEELLASLVSDEIAKLEPTMPFAPVTHFLGYESRASFPSNFDSNYGLALGIAASLFLVRGKTGYMVTIGNLAEEYAHWTIAATPLYKMMHLEKRFNEETPVIKTDSVSPHSPMVQYLHKIKEACLLEDLYRFPGPLQYFEEQALIDQRPLTLLWEKGALSENNANRL

SEQ ID NO: 55183 - protein, 819 aa, Chlamydia trachomatis
MRYDPSLIEEKWQKFWKEEQTFRAEEDETKTKYYVLDMFPYPSGAGLHVGHLIGYTATDIVARYKRAKGFSVLHPMGWDSFGLPAEQYAIRTGTHPRETTEKNIANFKQQLTSMGFSYDESREFATSDPEYYKWTQKLFLILYEKGLAYMADMAVNYCPELGTVLSNEEVENGFSVEGGYPVERRMLRQWVLRITAFADQLLGGLDELDWPESVKQLQRNWIGKSVGASVHFETEHGVLEVFTTRPDTLIGVSFLVLAPEHPLVDLLTSDEQKTIVAQYVKETQSKSERDRISEMKTKSGVFTGAYAKHPVTQNPIPIWIADYVLMGYGSGAVMGVPAHDDRDLLFAQQFDLPIISVVSEDGVCINSCHEDFSLDGLSGEEAKQYVINFLEKNNLGSAKVAYKLRDWLFSRQRYWGEPIPVIHFEDGSCRPLKDDELPLLPPEIQDYRPEGVGQGPLAKVKEWVNVFDSETQKEGKRETHTMPQWAGSCWYYLRFCDAHNSCAPWAEEKEQYWMPVDLYIGGAEHAVLHLLYARFWHQVFYEAGIVSTPEPFKKLVNQGLVLSTSYRIPGKGYIAPEMAKEENGQWISPSGELLDVRQEKMSKSKLNGVDPKVLIDEFGADAVRMYAMFSGPLDKNKLWSNQGVAGCRRFLNRFYEMATSSRVKDEDIFEGMSLAHKLVQRVTDDIEKLSLNTITSSFMEFINEFVKLPVYPKNAVEMAVRALAPIAPHISEELWVLLGNASGIEKAGWPKALPEYLEGKIVTIVVQVNGKLRARLDISKDAIEEEVVALAKEAVSKYLEGGVVRKTIFVLNRLVNFVI

SEQ ID NO: 55184 - protein, 349 aa, Chlamydia trachomatis
MTTILDLLGKDADYLLNHQCIIKKEALTLPSGDFVSRVFAESDRNNRVLRSLQQMFDHGRLGGSGYLSILPVDQGVEHTAGASFAKNPMYFDPENIVRLAIESGCSAVASSYGVLSILARRYAHKIPFLLKLNHNELLSYPTTYHQIFFSQVEDAYNMGAVAVGATVYFGSESSNEEIVSVAKAFSRARELGLATVLWCYLRNPHFTRNGVDYHTAADLTGQADHLGATLGADIVKQKLPTLQEGFKTINFSKTDDLVYSELSSNHPIDLCRYQVLNSYCGKVGLINSGGPSSGQNDFTEAAKTAVINKRAGGMGLILGRKAFQRPFSEGVQLLNLIQDIYLDPTISIS

SEQ ID NO: 55185 - protein, 466 aa, Chlamydia trachomatis
MHHRKSSTPLGTFTVGMLSLAVVISLRNLPLTAKHGLSTLFFYAISVACFMIPYALIAAELASFKPQGIYVWTRDALGKRWGFFAIWMQWFHNMTWYPAMLAFIASTLVYQISPDLANNRLYLASVILLGFWGLTFFNFLGIGTSALFSSICVIIGTLIPGAILVAFAAYWIHSGNPIAITFSWGELFPDFSSLSSFVLLSGMLLALCGLEANANLASDMEDPKRNYPKAVFIGAVATLAILVLGSLAIAIVIPKEEISLVSGLIRAFSLFFEKYNLSWMTGIIVAMTIAGSLGELNAWMFAGTKGLFISTQNDCLPKIFKKTNSRNVPTNLMLFQAIVVTLFTFIFIYVDSADLAYWILSALSVQMYLVMYICLFISGPVLRIKEPKAQRLYCVPGKLVGMCILSALGILSCLFALGISFLPPQAVISSSTMGGGFGYTALLLLAFTINCCIPFGMYYSHKKLIK

SEQ ID NO: 55186 - protein, 77 aa, Chlamydia trachomatis
MSLEDDVKAIIVDQLGVSPEDVKESSSFIEDLNADSLDLTELIMTLEEKFAFEISENDAEQLRTVGDVIKYIQERQN

SEQ ID NO: 55187 - protein, 248 aa, Chlamydia trachomatis
MNSLLVNKAAIVTGGSRGIGFGIAKLFAEHGANVQIWGINEEAGKSAAQDLSDKTGSKVSFALVDVSKNDMVSAQVQKFLAEYGTIDVVVNNAGITRDSLLMRMSEEEWSSVIDTNLGSIYNVCSAVIRPMIKARSGAIVNISSIVGLRGSPGQTNYAAAKAGIIGFSKALSKEVGSKNIRVNCIAPGFIDTDMTKGLSDNLKNEWLKGVPLGRVGTPEEIAMAALFLASNQSSYITGQVLSVDGGMA

SEQ ID NO: 55188 - protein, 308 aa, Chlamydia trachomatis
MERIGLLFPGQGSQFVGMGKDLYQQYPEVTQLFAQADEFLGFSLSSIMFEGPEETLLKTTNSQLAIYLHSLAVLEILSARCSFNPVLVSGLSLGEYTALTASKRISLEDGLRVVQKRAELMNAACEQSLGAMAAVLGLTADIVLPALESLGSGIWVANYNAPKQIVIAGVRDKVEEAAVVLRELGAKKVVMLKVSGAFHTPLMQSAQDELAPYLYQLAIRDSSIAFASNVVGELVQESEMIRSLMVKQMTSPTLWYQTCFQIDSKVDLFLELGSGNVLTGLCRSIGLASPCKHLGSVEDIENFCRSFE

SEQ ID NO: 55189 - protein, 327 aa, Chlamydia trachomatis
MRASIWGTGSYLPKKVLTNADLEKMVETSDEWISTRTGIKERRIASAEEFSSFMGAKAAEKAIEAAKISKSQIDCIVFATAAPDYIFPSSAALAQAYLGIKEVPAFDCLVACTGFLYGLSIAKAYVEAGMYQCVLVIAADKLSSFVNYEDRNTCVLFGDGGSACVVGPSRPGSLKISKVNLGADGKQGDLLRLPAGGSRCPASQDTIQNQQHFITMEGKEVFKHAVRRMEFAAKTCITEAGLQEEDIDWLVPHQANERIIDAIAKRFAVEDSRVFKTLAKYGNTAASSVGIALDELLRTHDIHSKERLLLVAFGGGLSWGAVILQQM

SEQ ID NO: 55190 - protein, 203 aa, Chlamydia trachomatis
MKDMLKYPDYISKLISFLKKLPGIGFKSAEKIAFELLEWDPSQVEAMGLAMQEFSASHATCPDCFCLKTSKTSSCDFCSESRDSSFLCIVATPKDVFSFEKSKIFKGRYFVLGNLLSPITGKHLSLEKLNILKQRIEDFAPKEMIIALDATLEGDATALFLKQEFSHLPIKISRLALGMPVGLSFDFIDSNTLARAFSGRNCF

SEQ ID NO: 55191 - protein, 354 aa, Chlamydia trachomatis
MSQPVYSLKQLADFLNVEFQGNGATLLSGVEEIGEAKAAHVTFLDNEKYAKHLKSSEAGAIILSRTQFQKYRELNKNFLIVSESPSLVFQKCLELFIAPVDSGFPGIHPTAVIHPTAIIEEHVCIEPYVVICQHARIGAACHIGTGSVIGAHSSIGEHSYIYPRVVVRERVSIGKRVIIQPGAIIGSCGFGYVTSAFGQHKHLKHLGTVIIEDDVEIGANTTIDRGRFKHSIVREGSKIDNLVQIAHQVEVGQHSMVVAQAGIAGSTKIGNHVIIGGQAGVTGHICIADHVIMMAQTGVTKSITSPGIYGGAPARPYQEVHRQVAKIRNLPRLEERIASLEKLVQKLEALSEQH

SEQ ID NO: 55192 - protein, 787 aa, Chlamydia trachomatis
MRMNKRTLLFVSLVSAAFLGCQIFFGYQDLKSCQDLAEKQRAISEQILASTEQLSVVPWTASAEESESVNQYAVRLGNRLLVLTKGGAHSEVHSKGTSWKLIDQTSTFGGILVSLYGEDGQEVLSKGGSVYLPNQQDALPVLVAEFRRNQEPLVFFGEYKNGKLSNKAGTIYGTSLVFLNTGNEFVPLGIYNSKEECVESLDLPMARAVVFADKENLTTSGSYYMLANEYMQVIVSQESGAIEGINLPFASDREGNKSIVNEIGFDRELAAGSPSEASFPGVQAIDSQRQNVSSVVGGYYPLLRRGTLSDTRKMVSPQYQALNIVSGRELSSPVATGFRVVSFDNKTLVLESGDGGIRKTYTLGEQPYAFDLEIQTTRGQEDLWITSGVPEVEIMSNAFVPAVKYHAVKKNKSDLINVKLPKAKDSLLVRNDASPQWILNSNGYFGVILTPKTPLPTGYASSFIPGNAVPTRLTQLSPKDQAYPASKYPGYTAMLPLPKEAGRYQFMVYAGPLSEPTLKALDRAHTNHKGESPEYVDAIAFRGFFSFITEPFAALLFIIMKFFQFLTGSWGISIILLTIVLKLVLYPLNAWSIRSMRRMQKLSPYIQDIQQKYKREPKRAQMEIMALYKVNKVNPITGCLPLIIQIPFLIAMFDLLKSSFLLRGASFIPGWIDNLTAPDVLFSWETPIWFIGKEFHLLPILLGIVMFAQQKISAIKRSGPVSDQQRQQEAMGTMMALLFTFMFYNFPSGLNIYWLSSMLLGVIQQWATNKILDEKHLQHEVIVNKKR

SEQ ID NO: 55193 - protein, 127 aa, Chlamydia trachomatis
MEESHILQLAAVSRAMALQGVCPWTNLQSIDSMLRYILGECQELADAVKENKASLEIASEAGDVLTLVLTLCFLLEREGKLKAEEVFAEAIAKLRRRSPHVFDPDNQISLEEAAEYWSRMKEQEKIS

SEQ ID NO: 55194 - protein, 412 aa, Chlamydia trachomatis
MFSPVIIVLTAVFVLCSGFISLSHIALFSLPSSLIAHYNHSKNKQLRQIANLMAYPNHLLITLVFFDIGINIGVQNCIATLVGDSASFLMTVGVPLALTLVLGEIIPKVIAIPYNVRIARLVTPIIFVSTKSFRPIFDWAISGINFIIQKMLVHQEGDFIQPQELKEVLRSCKDFGVVNHEESRLLFGYLSMEEGSIKERMKPKQEIVFYDVLTPIENLYRLFSGQRYSRILVCKDGLQNLLGVCSAKSLVLHKEQLQSSEDLLPLLRKPHYIPETVSAKTALYHLAKEDSGLGIIIDEYGSIEGLITQNDLFEIVSNEVSHIRPASKQFAHSDKNVIIAAGTYELSDFYDLFGVDLPTTSNCVTIGGWLTEQLGEIPETGTKFAWGQFVFQVLDAAPNCVKRVYIRKTHGN

SEQ ID NO: 55195 - protein, 647 aa, Chlamydia trachomatis
MKLLLKAVLRHKKHLVLLGFSLLSILGLTITSQAEIFSLGLIAKTGPDTFLLFGKQDHNTLVKSKELSKEQLLEQWDSIVGDGDTLSLAQANAYIAKHSGGSQSITKRLSAYLSGCFDLSRLQYLALFLVVVAILKSTTLFFQRFLAQLIAIRVSCSLRKDYFLALQTLPMTFFHAHDMGNLSSRVIADSSMIALAINALMVNYIQAPITMALALVVCLSISWKFCACVCLAFPILILPIIIVAKKIKSLAKRIQKNQDHFTAVLLDFLLGILTVKVFRTEQFSFHKYCQKNDEIARLEERSAAYSLIPRPLLHTIAALFFAFVVMIGLYKFHIPPEELIVFCGLLYLIYDPIKKFADENATIMRGCAAAERFYEVLDLSKQQTTVSEQLNEFQGLQHSIQFCNVSFGYSEDSLVLSDFNLVLKKGEAIGIVGPTGSGKSTIAKLLPRLYEISQGELLVDSLPITSYSKNSLRKHIGCVLQQPFLFYDTIWNNLTCGRDFSEEEVFESLKQSRAYEFVCKMPQGVHSLLEESGKNLSGGQQQRLTIARALLHNTSILLLDEATSSLDAISENYIKEMVGKLKGRCTQIIIAHKLSTLEYVDRIVYLEQGKKIAEGTKEELLVSCPAFQRMWVLSGAKDWELSPVMNP

SEQ ID NO: 55196 - protein, 324 aa, Chlamydia trachomatis
MELLPHEKQVVEYEKTIADFKEKNKENSLLSSSEIQKLENRLDRLKEKIYSNLTPWERVQICRHPSRPRTINYIEGMCEEFVELCGDRTFRDDPAVVGGFAKIQGQRFMLIGQEKGCDTTSRMHRNFGMLCPEGFRKALRLAKMAEKFGLPIIFLVDTPGAFPGLTAEERGQGWAIATNLFELARLATPIIVVVIGEGCSGGALGMAIGDVVAMLEHSYYSVISPEGCASILWKDPKKNSDAAAMLKMHGEDLKGFAIVDAVIKEPIGGAHHNPVATYRSVQEYVLQEWLKLKDLPVEELLEKRYQKFRTIGLYETSSESSSEA

SEQ ID NO: 55197 - protein, 100 aa, Chlamydia trachomatis
MATMTKKKLISTISQDHKIHPNHVRTVIQNFLDKMTDALVQGDRLEFRDFGVLQVVERKPKVGRNPKNAAVPIHIPARRAVKFTPGKRMKRLIETPTKSS

SEQ ID NO: 55198 - protein, 268 aa, Chlamydia trachomatis
MQGRDMRYIRSSNIRRLSLMIERLCVKLWPRFINSKFLFLLLALGVGPDKCFSDAVNTPVVPKVSRNELIVIDPGHGGKDEGTADKELRYKEKSLALSIALSVQGYLRRMGYKTIMTRSTDVYVDLNKRAAIANQNKADVFVSIHCNYSSNTSALGTEVYFYNDKNVLRTKKSENLGKSILAFMQKNGALRERKVKEGNFAVIRETSMPAVLVETGFLSNPKERAALLDSRYRSHLAKGISEGIHAFILNRQIKKTTAGNSGVKKVYK

SEQ ID NO: 55199 - protein, 486 aa, Chlamydia trachomatis
MFGMHLDQLLRDIPAKIYGKVESIPVRNLTRDSRCTGVGDIFIARQGQMCNGNDYSGQAVENGAIAILSSLYNPFLSVVQIVTEDLTALEACLAARFYNDPSKRLDVIGVTGTNGKTTVSALARELMEYKGRCTGLVGTIEHILGEHRIIDSFTTPDAILLQKYFAEMVKQNLSSAVVEVSSIGLALGRVRETEFLAGVLTNVSLDHLDFHGSFEEYVVAKKQLFVSLPEHGVAVVNSDCEYAQSFLEISPARGVSYAVHQEADYRAVNLKFSSLGSTFDILYQGNVFSCETSLVGEHNVYNVLAALSVVHQILGGDFAELVHYVRYLSAPKGRLEPVLSGPCPIYIDYAHTPDALDNVCKILSQLLPADGRLIIVFGCGGDRDHSKRPIMAKVAETYGFSVVTSDNPRTEDPDQIIADICSGFSTDRYVIESDRRLAIVKAISMALDKDIVLVAGKGHEVYQIFKHQTIVFDDREVVCEALASIY

SEQ ID NO: 55200 - protein, 656 aa, Chlamydia trachomatis
MRRKSAFYLMNYRRQLTLIVVGVLSLYALLIVRYYKIQICDGERWAMEAANQHEFRVEDPFQRGTFFANTSLRKGEKEQFQPLAIDVTKFHLCLDAVVVPEEYRDEIAHMVVVMVGEGDYQSIRNEFDRKSRYRKLYVSLDSSIRDRILSWWKPFAIKHKIPTNALFFISDYQRSYPFGQLLGQVLHTLREVKDEKSGEAFPTGGLEAYFNHLLKGENGERKLLRSPLNRLDVDKVTKIPRDGSDVYLTIDANIQTIAEQEIAIGVLEAKARSGRVVVLNSHTGEILALAQYPFFNPVGYREFFNCEDRIEDTKVKAVSDVFEPGSIMKPLTIAIALLANEESQKRYGEVLFDPYAPIDVSRRLFPGRQKMPLRDIVNNRYLNMYMAIQKSSNVYMAQLADRIVQKLGADWYEQRLQDFGFGKKTGIELPAEAVGLVPSRKRFHRNGSPEWSLSTPYSLAMGYNLLATSMQMVQAYAVFGNGGFLVRPTLVKRVVSPSGEEIIFSEKPEKIRLLSETIVSDVVRAMRFTTCLGGTGFRAAPKGYSSAGKTGTTEKLVNGRYDKKRHIASFIGLAPITALSETAVPLVILVSIDDPAHGVREDGTKNYMGGRCAAPVFSRIASRILPYLGVPEDQQQNDWKEEITQLKILYNDWNGK

SEQ ID NO: 55201 - protein, 302 aa, Chlamydia trachomatis
MTDSIPHIPVLVKESLSLFQDQHPTTFCDVTVGAGGHAEAFLTSFPSIEHYDGSDRDLSALALSEKRLLPFKGRVCLRHASFDEVNALTPDGMYDGVLADLGVSSMQLTDLERGFSFQGEDHPLDMRMDTSRGITASEVLNSLREEEIGEIFRKYGEEPLWRSAANAVVHFRKKKKILTVKDLKDATSGVFPSYRLRKKIHPLTLIFQALRIYVNQEGAQLKVLLDSALRWLRPGGRLAIISFCSLDDRPVKWAFREAEARGEGRVLTKKVIMPTYEETRKNPRSRSAKLRCFEKSLKISDE

SEQ ID NO: 55202 - protein, 455 aa, Chlamydia trachomatis
MLTCNDCSTWEQFVNYIKTRCSKTAFENWIAPIQVLEESREKIRLEIPNIFVQSYLLDNYKKDLCSFVPLDAEGNPALEFVVSEIKRSSPQIAASVTKPAVEVSEENKDFQLKLNGAYRFDNFIEGPSNQFVKSAALGIAARPGRSYNPLFIHGGVGLGKTHLLHAVGHYVREHHKNLRIHCITTEAFINDLVHHLRVKSIDKMKNFYRSLDLLLVDDIQFLQNRQNFEEEFCNTFETLIHLSKQIVVTSDKPPGQLKLSERIIARMEWGLVAHVGVPDLETRVAILQHKAEQKGLNIPNEIAFYIADHVYGNVRQLEGAINKLTAYCLLFNKPLTETTVRDTLKELFRTPSKQKVSVESILKSVATVFQVKIQDLKGTSRAKNVPLARQVAMYLAKTLITDSLVAIGAAFGKTHSTVLYACKTIEQKIEKDALLKNQISLCKNNIAIDSPQHFV

SEQ ID NO: 55203 - protein, 870 aa, Chlamydia trachomatis
MSYMLKSIPPRHIQVFMFEKFTNRAKQVIKLAKKEAQRLNHNYLGTEHILLGLLKLGQGVAVNVLRTLGVDFDTAKNEVERLIGYGPEIQVYGDPALTGRVKKSFESANEEASILEHNYVGTEHLLLGILNQADGVALQVLENLHIDPKEIRKEILKELETFNLQLPPSSSITPRNTNSSSSSSSKSSSLGGHSLGGDKPEKLSALKAYGYDLTEMFKEARLDPVIGRSAEVERLILILCRRRKNNPVLIGEAGVGKTAIVEGLAQKIVSGEVPEALRKKRLITLDLALMIAGTKYRGQFEERIKAVMDEVRKHGNILLFIDELHTIVGAGAAEGAIDASHILKPALARGEIQCIGATTLDEYRKHIEKDAALERRFQKIVVQPPSVDETVEILRGLKKKYEEHHNVFITDEALVAAAKLSDQYVHGRFLPDKAIDLLDEAGARVRVNTMGQPSELLRLEAEIESTKQAKEQAIGTQEYEKAASLRDEEKKLREKLSNMKQQWESNKEEHQVPVDEEAVAQVVSVQTGIPAARLTEAESEKLLMLENTLQKKVIGQDQAVASICRAIRRSRTGIKDPNRPMGSFLFLGPTGVGKTLLAQQIAVEMFGGEDSLIQVDMSEYMEKFAATKMMGSPPGYVGHEEGGHLTEQVRRRPYCVVLFDEIEKAHPDIMDLMLQILEQGRLTDSFGRKIDFRNTIIIMTSNLGADLIRKTGEIGFGLRSHMDYGVIKEKIDAAVKKHLKPEFINRLDESVIFKPLEKEALSEIIHLEINKLGSRLQNHQMALNIPDSVVSFLVDKGHSPEMGARPLRRVVEQYLEDPLAEMLLKESCRQEARKLCARLIEERVIFEREDEISALAVEGDGPASVTADES

SEQ ID NO: 55204 - protein, 373 aa, Chlamydia trachomatis
MYLNFNKPKTFPRFIVRKTVIVAMSGGVDSSVVAYLLKKQGKYDVIGLFMKNWEEQDENGECTATKDFLDVEQIAEQLSIPYYTVSFAKEYKERVFSRFLKEYTNGYTPNPDVLCNREIKFDLLQKKVRELKGDFLATGHYCRGGLDGTGLFRGVDPNKDQSYFLCGTPKEALSNVLFPLGGMYKTEVRQLAIEAGLATATKKDSTGICFIGKRPFKSFLEQFVPNSPGDIVDFDTQKVVGCHEGAHYYTIGQRRGLNVGGMEKPCYVLGKDMQKNVVYIVRGEDHPLLYRKELIAKELNWFVPLQGSITCSAKVRYRSPDEKCSVYPLEDGTVQVVFDIPVKAVTPGQTVAFYQGDVCLGGGVIAVPMIHQL

SEQ ID NO: 55205 - protein, 165 aa, Chlamydia trachomatis
MSCISDHEPAFTLSSLLSSDLVAFLHSDTREDILFELSELAFKAGFLEDRESFFRALLARERIMSTGIGMGVAIPHGKIDGNADFFIALGIHSEGVLWDAIDGLSVRLVFLIGGPSDAPSKYLKLLSALTQSLRDEARRSQLLQVQTVEEVMSIFQESSYGFAIR

SEQ ID NO: 55206 - protein, 283 aa, Chlamydia trachomatis
MRLFSYDKPKIKVQKIKTDSFNGWLKCTHCSEMIHANELGQNFNCCPKCSYHYRISASERIALLADEGSWNPLFSELKSQDPLHFVDTDTYSNRLEKARKNNPDSEGVLVGNCTIGGHSVALAVMDFSFMAGSMGAVVGEKLTRLIEKAIDSRWPVIIVSASGGARMQESVFSLMQMAKTSAALAKLHEAKLPYISVLTNPTSGGVTASFASLGDVIIAEPKALICFAGPRVVSQVIGEDLPEGAQKSEFLLEHGMIDKVVERKQLKATLESLLNFFNCQAYS

SEQ ID NO: 55207 - protein, 593 aa, Chlamydia trachomatis
MEIPKKKIEEMFDPQTAKNILSWLQDNACDNTLILDLLDKDPEKLKERFGDILTFGTAGLRSLMGVGTNRLNVFTVRRATQSLAQVLKQRYPDEDISVVVGYDTRHHSLEFGQETAKVLAGNGILTYLFQVPEPLALVSYSVREFQAKAGVMITASHNPPAYNGYKVYMSTGGQVLPPMDQEIVKEFQMIDQVLSVDTLDHPCIRLIQEEIEADYEKALHQLQLCREDNRQHGSLLRMSYSPLHGTGVSMVPRILKDWGFSSVCLVEKQMIPDGDFPTIVLPNPEDPEALVLGIQQMLDQKDDLFIATDPDADRIGIVSLEKDGPYRFNGNQIACLLAAHILSRESQKAPLGVEDKVVKSIVTTELLTAITESYGGSVVNVGAGFKYIGEKIELWRSGMERFIFGAEESYGYLYGSHVEDKDAMISAALIAETALQQKLRGYTLRDALLELYEIHGYYANLTESIDLPVDQPNQKQELLERWETQDPLYMSLPGRKLVAFENYKTGEGCDLVTGITYKLALPKMSMLCFYYEGSGRVIVRPSGTEPKIKLYFELKHHFSEFSKERTVRESREKESFEALENFVKETKMRLFRT

SEQ ID NO: 55208 - protein, 494 aa, Chlamydia trachomatis
MALLDTMYKSSLMKNFGERALLDQKRKQKNLQLNRRYQHMTTTKIKTQWACSECGSYSPKWLGQCPGCFQWNTLVEEIHSSKLKTSSYPLSSTTPVPLNTVKFQEEIRISTRSKGWNRLLGGGTVCGSLTLLGGEPGIGKSTLLLQISSQFAEQGYKVLYVCGEESVSQTSLRAQRLQISSSNIFLFPETNLEDIKQQISDLAPDILIIDSIQIIFSPSLSSAPGSVAQVRETTAELMHIAKQKQITTFIIGHVTKSGEIAGPRILEHLVDTVLYFEGNAHTNYRMIRSVKNRFGPTNELLILSMQTDGLHEVENPSGFFLQEKVVETTGSTIIPIVEGSETLLVEVQALVSSSPFSNPVRKTSGFDPNRFSLLLAVLEKRANVKLYTSDVFLSIAGGLKITQPSADLGAVLSVVSSLYNRYLPKNYTYTGEIGLGGEIRHVTHIEHRIKESIIMGFKGIVMPSGQIKGLPKEYLDQIDIIGVKTIKDAVRLLQ

SEQ ID NO: 55209 - protein, 242 aa, Chlamydia trachomatis
MLSAYYNDPFLSDFCLGKIPLRLASRKSPLAVLQAHECLRRLQTFFPRLWGQVITETTQGDLDQHTPLHSVENTGFFTDDIDFLVQSGKCDLAIHSAKDLPEKPKARVIAITASIDPRDILVFQEKYLLQPFPSRLRIGCSSDRRRALISSLYPSAVITDIRGTIQTRLALLDQQKFDAIVMANAAVSRLGLRLPCTVVLPPPYHPFQGRLAITSCHHIASWEKLFLTCKITENINLLHFFS

SEQ ID NO: 55210 - protein, 934 aa, Chlamydia trachomatis
MQRYELIRLIGRGGMGEVYLAHDKACSRRVALKKIREDLSDNPLLRKRFLREAKIAADLIHPGIVPVYSICSDGESVYYTMPYIEGFSLKHLLKSVWQKEILSKELEEKTSVKAFLPIFDKICATVEYIHSKGVLHRDLKPDNILLGLFGEVVIVDWGAAIFKHAKELQQEKDEEGFSSYGQKNICYSSMTVPGKIVGTPDYMAPESLLGAEASEKTDIYALGLILYQMLTLSFPYRRKKGRKLPYEDSILSPIEMAPYREIPPSLSQIAMKAIAVDPVQRFSSVQELRKALQPHLQGESEWTTRDILSTKDRKNWKYYEPILLSRYFPVLASSPAQWYNFMLSDMEVNSSVRVECSVTKSSVQEGVGIFFPPSKEADKGEFYCGYGLWFSSQNNELSVSLIKNGIEIQKESQGIIPQQSRFAISIEKSNNKITVFVDQILFILHIDYLPSLGERIEIIIQDLQGISNITILESIGALRVSCLAVPDAFLAEKLYDQAARFYRKIRDSFPGRKESYEAQFRLGVTLLTQIEEQGGDLMQALSTFDLLHGSTGAPLEYLGKALVYQRNGSFVEEIRSLLLALKRYPQHPEIPRLKDHLCFRLYDSLHKHRSEALVFMLLILWIAPEKIGLREEERFLEFLHHRQQSTLFCRIDKTPLQFKSSKMELFLSFWTGFTLFLPELFQRARDLRDYQALIDIFYVVCASGNKEVFSQFAEDLAIFVDEVVFPKSLHNQRGEELVLFVQGLAALQNREYRQAKEFISAVPFALQLYALDLFSLQAFIDEEVKVFSDFLQDIYNSASAEDHKHVLVYMIQVSLWNQDLKQAYELLSKNFPQDKGLIEYSEAFVLWGCYLALTGDRSAVKAHFSRCQFKYGRSALIGKCIDDDSLDYLEGLVWWEKKKTLFQSYFLLRCLHAPKERYEVYRQAYISMENSFFG

SEQ ID NO: 55211 - protein, 939 aa, Chlamydia trachomatis
MNEDQFPKAYDPKSSESGVYSFWERSGMFIADANSKKPAYSIVMPPPNVTGILHMGHALVNTLQDMLIRYKRMKGFEVCWVPGTDHAGIATQTVVERHLRSSLGKRRTDFSREEFLKHVWEWKEKSQNVILSQLRQLGCSCDWSRQRFTMDPEANRAVKKAFKVLFDKGVIYRGYYLVNWDPILQTALADDEVEYEEREGWLYYIRYPVVNSEEFITVATTRPETLLGDTAIAVSPEDERYSHLIGAKVIVPFVDREIPIIGDFSVDASFGTGAVKITPAHDKDDYRTGMNHRLPMINILTPTGEINENGGIFTGLAKESARENIITSLEALGLFVRKEAYSSRVGVSYRSGAIIEPYLSKQWFVSVDSFRESLREFVNSKEINLFPPEFIRNYLTWVNNLKDWCISRQLWWGHRIPVWHNKHDEEYVICFDGDGVPEEVAQDPESWYQDPDVLDTWFSSGLWPLTCFGWPEESADLRKFYPTSVLVTGHDILFFWVTRMVLMCSAMVDTKPFADVFLHGLIFGKSYKQYDDNGEWTYVSGDQKREYDKGKALPKNVVAKWEKLSKSKGNVIDPIEMIDMYGADAVRFTLCSCANRGEQIDLDYRLFEEYKNFVNKLWNGARFIFGHISELTSRDLEEGVNKDLLGLEDFYILDRFNELLALIDSHYNCYSFDKIAALAYDFFKNDLCSTYLEIIKPTLFGKQGNDEQRATKRKLLATLLVNILGVLHPIVPYITETLFQKIKTTLGVVGDGLGDAVTGHAVSMLRSEACMIAGYPQPIELSFPQGLRESFAIAEKLVYTIRNIRGEMQLDPRDLLQAFIISSEKKELLDACIPIMCALGGIKTIEQLSEAPKDCIFSLGVVEGIQVGVILPAEHLAKEHARLEKEKIRLENSIESLSKLLASEDFRTRANPNLVQAKEDALRNSRQELQSILDKIASL

SEQ ID NO: 55212 - protein, 327 aa, Chlamydia trachomatis
MSSQFDQLKLWSVLVGDSGDPDLIKTLDVQDATTNPSLILKVAQEPKYQSMLTEAISWGIRQNGDDVQTLTFVLDKIQVNLGLEILKYVPGRVSLEIDARLSFNTEAMVQRAIFLSQLFEKMGGDKKRLLIKIPGTWEGIRAAEVLENQGIACNVTLIFSLVQAIAAAKAKVTLVSPFVGRIYDWWIAAYGAEGYSIEADPGVASVANIYSYYKKFDIPTQIMAASFRTKEQVLALAGCDFLTISPKILEELKKEQQPVERKLSVEEAKKLDIQPVELSESVFRFLMNEDAMATEKLAEGIRIFSGDTQILESAVTEFIRQIAAQEA

SEQ ID NO: 55213 - protein, 1396 aa, Chlamydia trachomatis
MFKEGSRDDAALAKEGLFDKLEIGIASDVTIRDKWSCGEIKKPETINYRTFKPEKGGLFCEKIFGPTKDWECYCGKYKKIKHKGIVCDRCGVEVTLSKVRRERMAHIELAVPIVHIWFFKTTPSRIGNVLGMTASDLERVIYYEEYVVIDPGNTDLVKKQLLNDAKYREVVEKWGKDAFVAKMGGEAVYDLLKSEDLESLLGELKDRLRKTKSQQARMKLAKRLKIVEGFVSSSNRPEWMVLKNIPVVPPDLRPLVPLDGGRFATSDLNDLYRRVINRNNRLKAILRLKTPEVIVRNEKRMLQEAVDALFDNGRHGHPVMGAGNRPLKSLSEMLKGKNGRFRQNLLGKRVDYSGRSVIIVGPELKFNQCGLPKEMALELFEPFIIKRLKDQGSVYTIRSAKKMIQRGAPEVWDVLEEIIKGHPVLLNRAPTLHRLGIQAFEPVLIEGKAIRVHPLVCAAFNADFDGDQMAVHVPLSIEAQLEAKVLMMAPDNIFLPSSGKPVATPSKDMTLGIYYLMADPTYFPEEHGGKTKVFKDEVEVLRALNAGGFILKDEICGSRRDETGRGIHIHEAIKVRIDGQIIETTPGRVFFNTIVPKELGFQNYSMPSKRISELILQCYKKVGLEATVRFLDDLKELGFVQSTKAAISMGLKDVRIPEIKKEILKDAYDKVAVVKKQYEDGIITDGERHSKTISIWTEVSDLLSNALYAEIKKQTNSKHNPLFLMIDSGARGNKSQLKQLGALRGLMAKPNGAIIESPITSNFREGLTVLEYSISSHGARKGLADTALKTADSGYLTRRLVDVAQDVIITEKDCGTLNHIEVSTIRQGSEELLPLKDRIYGRTVSENVYQPGDKSNVLAYAGDVLTSSQAEAIDDAGIDSVKIRSTLTCESRRGVCAKCYGLNLANGRLIGLGEAVGIIAAQSIGEPGTQLTMRTFHLGGIAATSSTPEIVAECDGILVYLDLRFVVDQEGNNLVLNKMGALHLVRDEGRSLSEYKKLLSTKSIESLATFPVELGAKILVDDGAAVTAGQRIAEVELHNIPIICDKPGFVHYEDLVEGVSTEKVTNKNTGLVELIVKQHRGELHPQIAIYADANMQELVGTYAIPSGAIISVEEGQRIAPGMLLARLPRGAIKTKDITGGLPRVAELVEARKPEDAADIAKIDGVVDFKGIQKNKRILVVRDEVTGMEEEHLISLTKHLIVQRGDSVIKGQQLTDGLVVPHEILEICGVRELQKYLVNEVQEVYRLQGVDINDKHIEIIVRQMLQKVRITDPGDTTLLFGEDVDKKEFYEENRRTEEDGGKPAQAVPVLLGITKASLGTESFISAASFQDTTRVLTDAACSSKTDYLLGFKENVIMGHMIPGGTGFDTHKRIKQHLEKEQEDLVFDFDSEFESVAG

SEQ ID NO: 55214 - protein, 1252 aa, Chlamydia trachomatis
MFKCPERVSIKKKEDILDLPNLVEVQIKSYKQFLQIGKLAEERENIGLEEVFREIFPIKSYNEATILEYLSYNLGVPKYSPEECIRRGITYSVTLKVRFRLTDETGIKEEEVYMGTIPIMTDKGTFIINGAERVVVSQVHRSPGINFEQEKHSKGNVLFSFRIIPYRGSWLEASFDINDLIYIHIDRKKRRRKILAMTFIRALGYSTDADIIEEFFAVEEHSLRSEKDFVALVGKVLADNVVDADSSLVYGKAGEKLSTAMLKRILDAGVQSLKIAVGADENHPIIKMLAKDPTDSYEAALKDFYRRLRPGEPATLANARSTIMRLFFDSKRYNLGRVGRYKLNKKLGFPLDDETLSQVTLRKEDVIGALKYLIRLRMGDEKTSIDDIDHLANRRVRSVGELIQNHCRSGLARMEKIVRERMNLFDFSSDTLTPGKIISAKGLVSVLKDFFSRSQLSQFMDQTNPVAELTHKRRLSALGPGGLNRERAGFEVRDVHSSHYGRICPIETPEGPNIGLITSLSSFAKINEFGFIETPYRVVRDGIVTDEIEYMTADVEEDCVIAQASAELDEYNMFKDSVCWARYKGEAFEADTSTVTHMDVSPKQLVSVVTGLIPFLEHDDANRALMGSNMQRQAVPLLKTEAAIVGTGLEGRAAKDSGAIVVAQEDGVVEYVDSYEIVVAKKNNPTLKDTYPLKKFLRSNSGTCINQTPLCSVGDVVTHGDVLADGPATDKGELALGKNVLVAFMPWYGYNFEDAIIISEKLIKQDAYTSIYIEEFELTARDTKLGKEEITRDIPNVSEEVLANLGEDGIVRIGAEVKPGDILVGKITPKSETELAPEERLLRAIFGEKAADVKDASLTVPPGTEGVVMDVKVFSRKDRLSKSDDELVEEAVHLKDLQKEYKSQLAQLKMEHREKLGALLLNEKAPAAIIHRRSADILVQEGAVFDQETIELLERESLVDLLMAPCDMYDVLKDILSNYETAVQRLEVNYKTEAEHIKEGDADLDHGVIRQVKVYVASKRKLQVGDKMAGRHGNKGVVSKIVPEADMPFLANGETVQMILNPLGVPSRMNLGQVLETHLGYAAKTAGIYVKTPVFEGFPESRIWDMMIEQGLPEDGKSYLFDGKTGERFDSKVVVGYIYMLKLSHLIADKIHARSIGPYSLVTQQPLGGKAQMGGQRFGEMEVWALEAYGVAHMLQEILTVKSDDVSGRTRIYESIVKGENLLRSGTPESFNVLIKEMQGLGLDVRPMVVDA

SEQ ID NO: 55215 - protein, 130 aa, Chlamydia trachomatis
MTTESLETLVEQLSGLTVLELSQLKKMLEEKWDVTAAAPVVAVAGAAAAGDAPASAEPTEFAVILEDVPADKKIGVLKVVREVTGLALKEAKEMTEGLPKTVKEKTSKSDAEDTVKKLQEAGAKAVAKGL

SEQ ID NO: 55216 - protein, 172 aa, Chlamydia trachomatis
MKEEKKLLLREVEEKITASQGFILLRYLGFTAAHSRSFRNNLSGVSAEFEVLKKKIFFKALESSGVEMDPEDSEGHLGVVFAYGDPVSAAKQVLDFNKQHNDSLVFLAGRIDNASLSGKEVEAVAKLPSMKELRQQVVGLIAAPMSQVVGIMNSVLSGVISCVDQKAEKTQE

SEQ ID NO: 55217 - protein, 232 aa, Chlamydia trachomatis
MTKHGKRIRGIQEKYDFTKPYSLGEAIDILKQCPAVRFDQTVDVSVKLGIDPRKSDQQIRGSVSLPHGTGKVLRILVFAAGDKAAEAIEAGADFVGSDDLVEKIKGGWVDFDVAVATPDMMREVGKLGKVLGPRNLMPTPKSGTVTTDVVKAIAELRKGKIEFKADRAGVCNVGVAKLSFDSAQIKENIEALCAALVKAKPATAKGQYLVNFTISSTMGPGVTVDTRELIAL

SEQ ID NO: 55218 - protein, 141 aa, Chlamydia trachomatis
MSNKKIIKIIKLQIPGGKANPAPPIGPALGAAGVNIMGFCKEFNAATQDRPGDLLPVVITVYSDKTFSFVMKQPPVSSLIKKALGLESGSKIPNRNKVGKLARAQITAIAEQKMKDMDVVLLESAERMVEGTARSMGVDVE

SEQ ID NO: 55219 - protein, 182 aa, Chlamydia trachomatis
MFKWYVVQVFTAQEKKVKKSLEDFKEASGMSDFIQQIILPSENVMEVKKGEHKIVEKYIWPGYLLVKMHLTDESWSYVKKTQGVVEFLGGGAPVALSEEEVKNILADLEEKKSGVVQKHKFEVGSQVKINDGVFVNFVGVVSEVFHDKGRLSVMVSIFGRETRVDDLEFWQVEEVAPGQESE

SEQ ID NO: 55220 - protein, 82 aa, Chlamydia trachomatis
MGQDHRRKFLKKVSSAKKQAAFAGDFMEEIKKIEWVTKRDLKRYVKLVLMSIFGFGFSIYCVDLVLRKSLSLLGKVTSFFFG

SEQ ID NO: 55221 - protein, 399 aa, Chlamydia trachomatis
  MISC_FEATURE (322)..(322): X=any amino acid
MRIFEMSKETFQRNKPHINIGTIGHVDHGKTTLTAAITRALSGDGLADFRDYSSIDNTPEEKARGITINASHVEYETPNRHYAHVDCPGHADYVKNMITGAAQMDGAILVVSATDGAMPQTKEHILLARQVGVPYIVVFLNKIDMISEEDAELVDLVEMELSELLEEKGYKGCPIIRGSALKALEGDAAYIEKVRELMQAVDDNIPTPEREIDKPFLMPIEDVFSISGRGTVVTGRIERGIVKVSDKVQLVGLRDTKETIVTGVEMFRKELPEGRAGENVGLLLRGIGKNDVERGMVVCLPNSVKPHTQFKCAVYVLQKEEXGRHKPFFTGYRPQFFFRTTDVTGVVTLPEGVEMVMPGDNVEFEVQLISPVALEEGMRFAIREGGRTIGAGTISKIIA

SEQ ID NO: 55222 - protein, 73 aa, Chlamydia trachomatis
MAKKEDTIVLEGRVEELLPGMHFRVMLENGVPITAHLCGKMRMSNIRLLVGDRVTVEMSTYDLTKARVVYRHR

SEQ ID NO: 55223 - protein, 208 aa, Chlamydia trachomatis
MKVKICGVTHPDDAWEAAKAGADYVGMIFAKDSQRCVTKETAKCIVEAIRDGGSEPVGVFSEHSIGEIIAISSATGITSIQLSGRNIDFKFSQLRELFSIFYVVSVYSNGQPSAAIPPMSNTVTVIYDHIGGERGTPFDWRAFSPFQHDNWMLGGGVNPGNVGEAVRLLSPRGIDVSSGVERPGVLRKDVTLMQALIDSAKGVGNLTS

SEQ ID NO: 55224 - protein, 516 aa, Chlamydia trachomatis
MSITSPPVEVSVLTDSIKNLLEKNFLRVVVKGELSNVSLQTSGHLYFAIKDSKAVLNGAFFHFRSKYFDRRPKDGDYVILHGKLTVYAPRGQYQIVAYALTFSGEGNLLQQFEERKQRLAAEGYFDPKRKRQIPSEARTIGVITSPTGAVIQDILRVLSRRCHQFQVILYPVTVQGPTAAQEISRAIQVFNQENIKIDTLIVARGGGSIEDLWAFNEEILVKAIAASSIPIISAVGHETDFTLCDFAADVRAPTPSAAAEIVCKSSEQYHQELQNLLRHLSSHSRQFIAAKKNLLSHWKKHLATADFYHTAQQTLDYTRLSLERTLDAKLEHYKQHLAQYKRWLKSDILIRVEKHLSNLNQALESAIKNKLYSNKVSLHQLYTSRFKNELPNLQHRTQHAKHLLNQLSRRLHFVMANSQETKLQRFARLQEEFSFMIQHLLTKAKERCQSVQEQMASLNPKNVLKRGFAQLFDFNKHSVIISAESLKQSDLVRVCLQDGEAVLSVKEVWLNNDKKG

SEQ ID NO: 55225 - protein, 481 aa, Chlamydia trachomatis
MIARTKIICTIGPATNTPEMLEKLLDAGMNVARLNFSHGTHESHGRTIAILKELREKRQVPLAIMLDTKGPEIRLGQVESPIKVKPGDRLTLTSKEILGSKEAGVTLYPSCVFPFVRERAPVLIDDGYIQAVVVNAQEHLIEIEFQNSGEIKSNKSLSIKDIDVALPFMTEKDITDLKFGVEQELDLIAASFVRCNEDIDSMRKVLENFGRPNMPIIAKIENHLGVQNFQEIAKASDGIMIARGDLGIELSIVEVPALQKFMARVSRETGRFCITATQMLESMIRNPLPTRAEVSDVANAIHDGTSAVMLSGETASGTYPIEAVKTMRSIIQETEKSFDYQAFFQLNDKNSALKVSPYLEAIGASGIQIAEKASAKAIIVYTQTGGSPMFLSKYRPYLPIIAVTPNRNVYYRLAVEWGVYPMLTSESNRTVWRHQACVYGVEKGILSNYDKILVFSRGAGMQDTNNLTLTTVNDVLSPSLE

SEQ ID NO: 55226 - protein, 1787 aa, Chlamydia trachomatis
MPSIVRLSGITVRNLKNVTVEFCPREIVLFTGVSGSGKSSLAFNTIYAAGRKRYITTLPSFFATRIHSLPDPAVKKVEGLSPTVAVKQNFFAQHVHATVGSTTEINSYLALLFSLDGQAYDPITLRPLTLYSKEKILAEIAAIPDGTQLTLLAPLPAGDILRVRECLRQGFTKILIDGEISPIHKFLATGVPVPSQLIIDTLIKNASNTPRLKVSLFTTLDIGHGECCLHFDNQKRVFSTQTTLPETQNTYTPLSPDLFSSHSHKDRCPQCHGSGIFVSINDPSIIQQNLSIEKNCCPFAGSCSILLYKTIYQSLADNLGFSLSTPWQDLSPEIQHIFLYGKEGLSLPVKLFDGTLGKTTQTHKQWKGVLNEIGEKIRFANKPSRYLPKGTSYTECPRCQKTGLSDYANAAKWHGKSFADLQQMSLQELFIFLNQLPPKDPAIEEVIQGLKARLAMLIDLGLPYLSPERSVNTLSGGEQERTALAKHLGAELMGVTYVLDEPSIGLHPQDTYKLMDVIKKLRDQGNTILLVEHDEQMISLADRVIDVGPGAGIFGGEVVFNGTPKEFLANSHSLTAQYLRQEQQIPIPAKRQTSLGSITLSRANKHNLKNLTVSIPLGQLTVVTGVSGSGKSSLINDTLVPCVEEFIEQGSCPNLAVQGKLSRLVHINRDLPGRSQRSISLTYIKAFDELRQLFAEQPRCKPLGLTKSHFSFNTPLGACSECGGLGSITAMDNQDSITCPSCSGKRFLPQVLEIRYKNKTIADILEMTAYEAESFFLDQPSIHNKIQALCTLGLQYLPLGRPLYSLSGGEIQRLKLACELSNPVKHPTLYVLDEPTTGLHTHDVKQLIHVLQSLTDQGHSVVIIEHNMHVVKIADYVLELGPEGGNKGGCLIASCSPEELIHKHTPTSLALRPFLSQHQELPHLPDLRQQPPIPAAIIITNAHHHNLKHIDVSIPRYALTTVTGPSASGKHSLVFDVLHAAGNISYAELFPPYIRQALIKKTPLPSVDKVIGLSPVIAIEKNSAKNSSHSVASALEISDMLEELFTQIGRPYSPVSGDLLKEVSPQTIAEELLENYAQGYVTITIPFPPEEDFFSYTQEMLREGFLKLYANEQLYDLEGPFPDCLESPALVIHHVKILEKNIPSILSSLSLAFSKSSSIRLHIENYGITTSKTYQLGLQDSLGNSFPSNDNTTHLCPFCHGNGSLSTFSILPYKNRFAEHTPLSLFTSLFPNQDPTPIYPLLEELGIPSIALFQEMDDHSFQKLCLGTLQNPGFDALCTKAMLAHPTTNFPTYLISETPCNQCQGNGTYTYEHCTRIHDISLSDIYQSDVPFLKKFLLSLGKDLPLVSDIFQKLELLERVGLSQVILGQEQSSLSDGERYQLLLAKAFSSGLTDVIYLLEDPLAGIHPKDAPSLLSVIKDLVANHNTVVVTDREGSLSKHADHVIHLGPEPGPNGGYLLETSAFRDLQPISQSTYISDQIPKLSVSVLTSAIQIDNLSIPLRSLSTISGVSGSGKTTLLLEGIYKSGCAMLEKDPSLFSEIIFLDSHPQPASSRSDISTYFDIAPSLRNFFSSLTQAKALNISASMFSPNTKQGQCSDCWGLGYQLIDRAFYAMEKRSCPTCGGFRVQPLVQEVVYEGKHFGQLLQSSLNEVAKDFSFLKKVQKPLQTLIANGLGYLPLGQNMSSLSLSEKIAIKITKYLFLPPKHPTLFLLDGVATSLDNQQKYTLLSQLKTLVSLGHTVVIIENHPAFSQYADFLIQMGHKTDKTSSRIIFSGINQSPSLSNKLE

SEQ ID NO: 55227 - protein, 465 aa, Chlamydia trachomatis
MTSYQVSSRRHRPNTFSEILGQDMVVSILKNSLRLNRSAHAYIFSGIRGTGKTTLARVFAKALNCQSPTENQEPCNQCAICKEISLGTSMDVMEIDGASHRGIEDIRQINETVLFVPSKSRYKIYIIDEVHMLTKEAFNSLLKTLEEPPAHVKFFLATTEIAKIPNTISSRCQKMLLKRIPEETIIDKLTTIAKLGKIEASREALLPIAKAAQGSLRDAESLYDYVVGLFPESFTPEDTAKALGILSDDTLYQIAEAITTQNYEQALSPVSDAMHMGVAPAHFLQDLTLLFRSLLLKQHSQKFDSIAVKYSSESLLEILDFLGESARHVNLALFEKTFLETVIIRLLRIYSRPTLSQLVSQIKQPAQSPLRPIPSSPVLDPGPSPTKSIVKEEVKALPQPVEAKFSQGSLLTPPPSQPKKETLNQEVSAPSSSTPSCSEAAAIDTLLQFAVVEFSGVLTKEPKHG

SEQ ID NO: 55228 - protein, 96 aa, Chlamydia trachomatis
MGSGYAKKKKEAKLMERQFMEMEASLEQKRFSGEAGNGLVSVTINGKCNLVDVKIKPDCLDPEDPEVVADLFRAAFKAAKAALDSEMSAMHMGMPF

SEQ ID NO: 55229 - protein, 567 aa, Chlamydia trachomatis
MGATSQKELQQEFVIVGEPVVPGIGLGKSLLLGKSSLRIRELTLPQEEVEHEINRYYKALKESRSDLAALEKKAKGKQGYQEIASILQAHLEIIKDPLLTEEVVKTIRKDRKNAEFVFSSVMGEIEKSLCAVQKTTAIAVDRIQDIHDISNRVIGHLCCQHKSSLGESDQNLIVFSEELTPSEAANANPKYIRGFVSLEGSKTSHTAIVSLAKNIPYVANFSAESWQRIREYNGNLVLINGEKGEITFNPKLSTIQAYYRKQSAVSMTVPIQIEKTQPLISLSAQIVGVDELGSISREFPGTTIGLFRSEFMAFSLGRLPFVEEQVAEYTKLVQFSCSDINVLRLFDFGEDKVCPFIASAHRSVRWLLEQETILRGQLQAIAIASRQGKLKVLIPGVLDASEIILVKQMFQEEVQLQNGISENIIWGSMIEIPSAVWMIEEILQESSFIALGTNDLAQYTLGMSRERSLPGNWKQVPHPSVIRMIHYVAARAKQRNIPVSVCGEMAGDHLLLPMFIGFGVRELSVVAPAIHSLKMRLLALNSKECSRLAKQLLRARTYEEVHKLLNM

SEQ ID NO: 55230 - protein, 104 aa, Chlamydia trachomatis
MSGGDDLVLHNPVEDGELSAIFMIRNPSGIHVRPAGTIVKLFDGEDCEATFTYLGKTVNARSVMSILMLGASYNGEITVRIKGPSASRVMQKLAEVFNSGFGEL

SEQ ID NO: 55231 - protein, 678 aa, Chlamydia trachomatis
MRHSIYQLDSAVENVFRLAWTLRFSERKMLLLSRQSGSGGSFQLSCAGHELAGVVAAKSLIPGKDWAFPYYRDQGFPLGLGCDLSEIFASFLARTTQNHSDGRMMPYHYSHKKLRICCQSSVVGTQFLQAAGRAWAVKNSGKNEVVYVSGGDGSTSQGEFHEMLNFASLHQLPLVIVIQNNQWAISVPFADQCGADLVALGKSYSGLATYKVDGGDLSALTQTFDCAVSDARHHHIPALVIVDVVRLESHSNSDNQTKYRSEEELLYCQEQDPLVRLEKSLIDDFGVAQETIEQIKEELQETISKACELAESTPFHCKGATKHEVFAPYNVSLIDYENSLESASLQGSEPRVMRDAITEALVEEMHRDPGVVVFGEDVAGNKGGVFGVTRTLTERFGRNRCFNTPLAEATIIGTAIGMAFDGFHKPVAEIQFADYIWPGINQLFSEAASIYYRSAGEWEMPIVIRTPCGGYIQGGPYHSQNIEAFLAHCPGLKVAYPSNAADAKALLKAAIRDPNPVVFLEHKALYQRRAFSTTPVFSSDYVLPFGKARIVHSGTDLTIVSWGMSLVMSVEVAKDLLGLGVSVEVIDLRTIVPCDFATVCESVKKTGKLLVVHEASEFCGFGSELVALVAERAYRYLDAPIKRIGGRHSPIPYSKVLENEVLPQKEMIFQEAKSLAEF

SEQ ID NO: 55232 - protein, 58 aa, Chlamydia trachomatis
MPSVKVRVGEPIDRALRILKKKIDKEGILKTSKSHRFYDKPSVKKRAKSKAAAKYRGR

SEQ ID NO: 55233 - protein, 819 aa, Chlamydia trachomatis
MNSTNNTDSQNLDPNASEVEKLLDESAEAEEKTDDHTPPSELFILPLNKRPFFPGMAAPLLIEAGPHYEVLTLLAKSSQKHIGLVLTKKEDANTLKIGFNQLHRVGVSARILRIMPIEGGSAQVLLSIEDRIRIVKPVQDKYLKAKVAYHKENKELTEELKAYSISIVSIIKDLLKLNPLFKEELQIFLGHSDFTEPGKLADFSVALTTATREELQEVLETTDMHDRIDKALVLLKKELDLSRLQSSINQKIEATITKSQKEFFLKEQLKTIKKELGLEKDDHAVDLEKFMERLNKRDVPQYAMDVIQDEMDKLQTLETSSAEYAVCRNYLDWLTIVPWGIQTKEYHDLKKAESILNKDHYGLEDIKQRILELISVGKLANGMKGSIICLVGPPGVGKTSIGRSIAKVLHRKFFRFSVGGMRDEAEIKGHRRTYIGAMPGKLVQALKQSAIMNPVIMIDEVDKIGSSYHGDPASALLEVLDPEQNKDFLDHYLDVRVDLSNVLFILTANVLDSIPDPLLDRMEVLRLSGYILEEKLQIATKYLVPRARKEMGLSAQNVSFQPEALKHMINNYAREAGVRTLNENIKKVLRKVALKIVQNQEKNPSKKSRFTITPKNLQDYLGKPIFSSDRFYEKTPVGVATGLAWTSLGGATLYIESVQVPSSSGKADMHLTGQAGDVMKESSQIAWTYLHSALERYAPGRPFFEKSQVHIHIPEGATPKDGPSAGITMVTSLLSLLLDVPVLNNLGMTGELTLTGRVLGIGGIREKLIAARRSKLNVLIFPEDNRRDYDELPAYLKKGLKVHFVTHYDDVFKIAFPGV

SEQ ID NO: 55234 - protein, 528 aa, Chlamydia trachomatis
MSIVLDKIGKTLGTRVLFDDVSVVFNPGNRYGLTGPNGAGKSTLLKIITGVIEPSRGTISLPKKIGILRQNIDSFSDVVVLDCVIMGNSRLWEAMQRRDALYAEEFTDAVGMELGEIEEIIGEEDGYRAESEAEELLLGIGIPEEFFSQKMATIPLDLQFRVLLCQALFGHPEALLLDEPTNHLDLHSINWLGNFLKDYNGTVIVVSHDRHFLNTITTHIADIDYDTIIIYPGNYDAMVEMKTASREQEKADIKSKEKKIAQLREFVAKFGAGSRASQVQSRLREIKKLQPQELKKSNIQRPYIRFPVSDKASGKVVFSIEGISKTYDADPLFNPFSLEIYQGDKIGVIGNNGLGKTTLMKLLAGVEQPSAGQIKLGHNVAFSYFPQNHADVLRDCGEETLFEWLRRRKTGITDQEIRSVLGKMLFGGDDAFKQVKALSGGETARLLMAGMMLENHNMLVLDEANNHLDLESVSALAWAINDYPGTAIFVSHDRTLIEECATKLLIFDKGVISFFDGPMSEYLASKKK

SEQ ID NO: 55235 - protein, 277 aa, Chlamydia trachomatis
MARSSIEQLTSFLKSVNGRAKKALSQNFLVDGNILRKILATADVQPGDWVLEIGPGFGALSEVLVSQGANVIALEKDPMFEESLSQLPIDIEITDACKYPLASLDDKGWKGKGRIVANLPYHITTPLLTKFFLECPNRWKTVTVMIQDEVARRITANPGDKDYSSLTVFLRFFADVQYAFKVSPNCFYPKPSVSSAVVHMRVHEDFPLSGSEIDEFFALTRAAFGQRRKLLANSLKNLYPKDKVFQVLEHLGFSEKTRPETISLEEYLKIFRLLKDF

SEQ ID NO: 55236 - protein, 334 aa, Chlamydia trachomatis
MTMRIAILGATGLVGQKLIALLQRHKQWEIAELSASPKKHSLRYESACLWQEPLMAMPESVQDLTIRSIEEIESDIVVSCLPTSVAFSAETACLSSGKIVFSNSGAYRMHESVPILIPEVNSDHISLLDDQPFLGKIVTNSNCCVSGIALALRPLLPFDIEHVHVVTLQSASGAGYPGVSSLDLIGNTIPHILGEEEKIHQETLKILGSPSSPAEFSITASVHRVPVMYGHVISMHVMFAQEVSLEKIFCCYEKYSDTYVLYDSPWHPQVQKDLLHDDMRLHIGPISHGGSAKTIKMCVLLHNLVRGAAGALISNMNFLQDRVNLFYQEGLAHV

SEQ ID NO: 55237 - protein, 246 aa, Chlamydia trachomatis
MKKSVGLIGNTGRMGGLLTEALRSHPRCLLGKGFSRRSQTLLKEVVLENDILIDFSAPEVTETLMDILLVTPKPVIIGTTGFSDNSVIRDKLSLLSEYVPVIFSPNMSLGAYVQRRLTACAAKLFDASYDVRILETHHRTKVDAISGTALSLAEAICSAKKDHFGDEQEPCIEMFGSRVGNIFGEHEVSFVGKNERFVIRHEAFSRQTFSDGVLIILRKIMEERLPAGYYTSDVLYESLFQEVVFD

SEQ ID NO: 55238 - protein, 357 aa, Chlamydia trachomatis
MHNQYGSLFSITTWGESHGPSIGVVIDGCPAGLPLAPEDFLPAMKRRRPGQLHTSPRQETDSVTILSGVYQQKTTGTPISLLIQNEDASSTSYEQLNDCYRPGHAQFAYEGKYGFADNRGGGRSSARETAARVAAGVVAKKILSSQGIKTLAFLSGFGPLENKTYPKLTDPLIRKVYSSPFYTILSQEEIQNLLLHDPEDSFGGIVSFITSPLPIGLGEPVFGKLPALLAAGMMSIPATKGFEIGEGFASAHMTGSTYLDSFIAKEGEISFQTNRCGGTLGGISIGQPLEGRVAFKPTSSIRKPCPSVSKDGEPITYKTPKQGRHDPCVAIRAVTVVEAMLDLTLVDLLLQHRCAKL

SEQ ID NO: 55239 - protein, 478 aa, Chlamydia trachomatis
MLCTIIRGPSFLEARNQLLRSLKKCRCFEMRADLLTVSDAELQKLILLAPISVLTWKKPPSCTPQAWVKKIQSLAKLHPTYLDLDKDFPEEEILHIRHLHPNIKIIRSLHTSEHTDITQLYTQMLASSIDYYKLAVSPASTTDLLNICRQKHSLPQNTTVLCLGKIGQSSRILSPILQNPFTYTIPTGADPVAPGQLSLNHHYFYNFTNLSPQSQICALIGDTSRSIGHLTHNPFFSQLSIPCPYVKLPLTPQELPEFFSSIRALPFLGISVTSPLKTAIIPFLDKQDSSVKLSGSCNTLVIRQGEIIGYDTDGEGLFSVLTQHNMDLSNQRVAILGAGGAARSIAARLSRTGCELLIFNRTKIHAEAIASRYQAQAFDIKDLPLHSVSLIINCLPPSSIIPQALAPLIVDINTLPKHNSFTQYARLKGCSIIYGHEMFAQQALLQFRLWFPTHSFNHLEKNFSRRAAVLASLFSIAA

SEQ ID NO: 55240 - protein, 483 aa, Chlamydia trachomatis
MFLKKRSSSGILGTLSLTGVVISSMVGGGIFSLPQNMAASASAGAIIIAWLLSGIGIFFIANTFKTLSLVRPDLKAGIYTYSREGFGPYVGFTIAWGYWLCQIFGNVGYAVITMDALNYFFPPYFEGGNTLPAILLGSILIWVFNSIVLRGIRQAAFMNVIGVIFTLIPLLIFILITALFFKFSIFKTDFWGTAPQHHLGSIGSQLKSTMLVTLWAFIGIEGAVVMSGRASNPSSVGKATILGFSGCLLIYVLLSLLPFGSLSQYQLAKIADPSTAGVLKFLVGKWGEVLMNTGLLIAVLTSWLSWTILTAEIPYAAAKNGTFPECFAIENAKHSPAFSLFITSGLMQITMLLVYFSSNAWHTMLEITSVMVLPAYLTSSLFLVKLSLSKKYPKQAPIKARVAIFTGILGTLYSLWLIYAGGLQHLFMVAVLLALGIPFYIDSGIRHDQEKTFLNRKEVMKMTTLALIALLAVFLFSANKIHL

SEQ ID NO: 55241 - protein, 524 aa, Chlamydia trachomatis
MGKSFLDCESLIALQEIATNPVDLTLPGTLSQDRIQQYALSAEGFTYSYATERVDDRSLNALRMLAEERELIKQMESMQQGAVMNYIEGFQSESRSVLHTATRAWVRDHDLKDEAASIANHSEREAHRLAEFLYAARSKFSTLVQIGIGGSELGPKAMYFAMQGICPSDKRIFFVSNIDPDNAAEVLKEVDLKQTLIVVVSKSGTTLEPSVNEELFKRAYQDKGLSVADHFVAVTAEGSPMDDKTHYLEVFHLWDSVGGRFSATSMVGGVVLGFAFGYEVFFEFLQGAASMDAHALTPIMEKNLPLLSAMLGIWNRNVLKYPTTAVIPYATGLKYFTAHLQQCGMESNGKSISRQGKEVHFATSPIIWGDVGTNCQHSFFQSLHQGTDIVPVEFIGFLQNQRGIDCVLSGSSSSQKLFANLVAQSLALAQGRDNDNPNKRFKGNRPSSILVAQQLSPRIAGGLLAFYEHKFAFQGFCWGINSFDQEGVSLGKELATQIIGLMSGAAPIEFPEARELLRLFNVLQ

SEQ ID NO: 55242 - protein, 259 aa, Chlamydia trachomatis
MSMYIKRKKAWMTFLAIVCSFCLAGCSKESKDSVSEKFIVGTNATYPPFEFVDERGETVGFDIDLAREISKKLGKKLEVREFAFDALVLNLKQHRIDAIMAGVSITSSRLKEILMIPYYGEEIKSLVLVFKDGDSKSLPLDQYNSVAVQTGTYQEEYLQSLPGVRIRSFDSTLEVLMEVLHSKSPIAVLEPSIAQVVLKDFPTLTTETIDLPEDKWVLGYGIGVASDRPSLASDIEAAVQEIKKEGVLAELEQKWGLNG

SEQ ID NO: 55243 - protein, 393 aa, Chlamydia trachomatis
MKRNPNFTSLTQNYLFSDLRNRIAQFHSENPQHQVINLSIGDTTQPLDTSVAEAFSQAIARFSSPSTYCGYGPDFGLPSLRQKLSEKLYHGCVNAEEIFISDGAKVDLFRLLSFFGPNQIVAVQDPSYPAYIDIARLTGAKEIVSLPCLQENDFLPVFPENTHIDILCLCSPNNPTGTALNKNQLRAIVRYAIEHNILILFDAAYSAFISAPSLPKSIFEIPDARFCAIEINSFSKSLGFAGIRLGWTVIPKELTYEDGQPIIRDWKRFLSTTFNGASIPAQEAATAGLSTLSKLEAVHYYKENSHLLKTSLLKAGFQVFGGEHAPYLWVKPTIETVPYRDLFDFFLQEYHIAITPGIGFGLCGSGFVRFSSLGKREDVLVACERLQMTPALQ

SEQ ID NO: 55244 - protein, 579 aa, Chlamydia trachomatis
MKTSLLFYRTSKNANKEASVLSYELLEKAGYLFKTSKGIYSYTPLFQRVILKMTEIIREELNAIGGQEVCLPLLQSAELWQKTGRWEAFLSEKLLYVLKDRENKEMCLAPTHEEVVSEFVSQWLTGRKQLPVHLYQIGTKFRDEIRPRFGLMRAKEFLMEDSYTFSDSPEQMEEQYAKLRLAYQRIFDRLNLKYVIVTADGGKIGKGKSEEFHVLCSLGEDTICVSGSYGANIEAAQAIPPSYTYSSELLPMKEVATPNVRTIEDLETFFNTPRQQIIKTLVVKVHKKGSEQFFAICIRGDRQVNLTKVSSFLQADDCELASDEEIIKHLHVEKGFIGPLHCPVPCYADETTRPMTNFICANNQKDIHCRYVNWERDIPLPIFGDFLLAESGDLCPQNNEAPYEIFQGVEVAHIFNLGTRYTECFSVGFQDENGEKQLCWMGTYGIGVGRTLAACIEQLADSKGIVWPLAVAPFSITILYNGGDTEGEAVASQFYQSLNTAGFEPLLDDRNERLGFKLKDSDLLGIPYKLIIGKSFQKTGMLEIESRSGEKYNISPENLLDWCSKNLPCHTRKIPPIRE

SEQ ID NO: 55245 - protein, 658 aa, Chlamydia trachomatis
MFNMSEKRKSNKIIGIDLGTTNSCVSVMEGGQPKVIASSEGTRTTPSIVAFKGSETLVGIPAKRQAVTNPEKTLASTKRFIGRKFSEVESEIKTVPYKVAPNSKGDAVFEVENKLYTPEEIGAQILMKMKETAEAYLGETVTEAVITVPAYFNDSQRASTKDAGRIAGLDVKRIIPEPTAAALAYGIDKEGDKKIAVFDLGGGTFDISILEIGDGVFEVLSTNGDTHLGGDDFDEVIINWMLGEFKKQEGIDLSKDNMALQRLKDAAEKAKIELSGVSSTEINQPFITIDANGPKHLALTLTRAQFEHLASSLIERTKQPCAQALKDAKLSASDIDDVLLVGGMSRMPAVQAVVKEIFGKEPNKGVNPDEVVAIGAAIQGGVLGGEVKDVLLLDVIPLSLGIETLGGVMTPLVERNTTIPTQKKQIFSTAADNQPAVTIVVLQGERPMAKDNKEIGRFDLTDIPPAPRGHPQIEVTFDIDANGILHVSAKDAASGREQKIRIEASSGLKEEEIQQMIRDAELNKEEDKKRREASDIKNEADGMIFRAEKAIKDYQDKIPADLVKEIEEQIEKVRQAVKEDASTTAIKAASDELSARMQKIGEAMQAQSASAANAQGGPNINSEDLKKHSFSTRPPAGDNSSSTDNIEDADVEIVDKPE

SEQ ID NO: 55246 - protein, 328 aa, Chlamydia trachomatis
MYVPDVAEDLCLDIFHKQKQVISRYFANFHCDVVRQLTERLLCHQGAVFFSGIGKSGCIARKLVATMQSFGEKAFFLSGDLLHGDLGVVSSGDIVCLFSNSGETREILEWIPHLKNRQVFLVGITSSPCSSLAVFSDFVVMLPKLEELDPFNLIPTTSTTCQLLFSDLLAMTVLRCRKISLSDYGKNHPSGQIGLKANGKVRDYLSPRTEVPFCSPSITVSEALTVLSSYGYGCVCVVNEQFELLGIFTDGDLRRGLSECGGAILECPLEQVMTRKPKVISEDSDVLLGLEMMESGNPVTVLPVVDAQHQRFIVGLLHMHTLARAGLL

SEQ ID NO: 55247 - protein, 410 aa, Chlamydia trachomatis
MPSLHVELKNTKTFTSSEIRGFMFEFRFPKIGETASGGIVVRWLKQVGDSIQKDEPLIEVSTDKIATELSPSQAGVLEECLVQEGEEVSPGDVLARLREISPVDTSVPTSVEESPIKEESLVNRENQWLSPAVLGIVQREGLDLQELQKISGTGENSRITRKDVERYLSDKREARAPICSKEENRIPMSPLRRAIASSLRQSSEEVPHASLVVDVDVTDLMNLISLERERFAAAHGVKLTITSFIIQCLAKSLEQFPLLNGSLDGDTIVLKKAVNVGVAVNLNKEGVVVPVIHNCQDRGLVSIAKALADLSSRARASKLDASEAKGGSVTLTNFGMTGALIGMPIIRYPEVAILGIGTIQKRVVVREDDSLAIRKMMYVTLTFDHRVLDGIYGGEFLTALKNRLESVTMS

SEQ ID NO: 55248 - protein, 409 aa, Chlamydia trachomatis
MKLWMKIFIGLIIGVVSGLVLEDKAVFVKPFGDIFLNLLSMVVYPLVFCSMVLGIASISDMKKLGRIGLRSLGLYLGTTAVAIGIGLAFALFFCPGRGCDLQGFNGIDFSAGQPSEINFLTAFAQVFPSNPMRSFVEGNILQIIIFALFTGIALRLAGEVARPVEQVIHGCNEIMLRMVNMIMSFAPYGVAASMAWISGNHGLTVLLQLGKFLVVYYIACICHAVLVFGGLVRLGCRRSFSGFLSSMMDAISCAVSTASSSATLPVTMRCVSKNLGVSSEISGFVLPLGATVNMNGTAIFQGMAAVFIAQAYNCPLSLTSLLLLVVTATFSAVGSAGVPGGGMITLGSVLASVGLPIQGIAVLAGIDRLRDIIGTPMNILGDSVVALYVANGEGELASPEEEEALPQNG

SEQ ID NO: 55249 - protein, 265 aa, Chlamydia trachomatis
MEFIGKNNARVKAALALKRQRARNSSYFLLEGFREIHRALISGYHCLHVFCGELISDKERDLDKELTALGIEKLPCPKEILERLSFKEHPDNFIAVFEKKRLSCQEFLRLQRKNQQPFYLIVEQAEKPGNIGALLRIADGAGVDGVILCDPVVDLYNPNVIRSSLGAVFTVPIWQASLEEVLALVREQEWKIFTTTPSTQTFYFDQNFCQPLAVVFGSEKDGLSPSWLDGSFCNIALPMLGKADSLNLSSSVAAVAYEVVRQRSR

SEQ ID NO: 55250 - protein, 275 aa, Chlamydia trachomatis
MMDYELLDSGDGKKLERFKDVVLIRPSATAIWPKTSPALWKQYSAEFVRVGEKGEWKYRNSHLKEWWITIDSVSCLLKLTPFGHVGIFPEHATFWQDLSPSLSKPSCKVLNLFAYTGASSIFCAQQGAAVYHVDASKAAVKWAQKNVEGNSFSEKRIFWIIEDVFSFLKKEIRRGKTYDVILLDPPTYGRGPDGETFKIDRDFFPLLEACSQLLSSSFSHMLITSHTPGHTPEFLHCLAKRALPMLSSQKWRLGENFCGEGDQRLPSGVFAQWSL

SEQ ID NO: 55251 - protein, 198 aa, Chlamydia trachomatis
MFSGIIQEVARVDLIHHYGDSMEIGIFARNLVDGVPGSSIAVDGICLTLVKREFELLFFDVTEETMACTTIKNYTVGSMVNLERSVRLGDEIGGHFVSGHVCGVGTIIAVEKSYMFFKAPTNLVPYVLEKGFIAIDGISLTIAQVRGDIFSVSVIPETRARTSLGYKQVGSHVNMEPDMMTKMQVDTVMRFQAEKIGK

SEQ ID NO: 55252 - protein, 134 aa, Chlamydia trachomatis
MKNKYEKENFMPLTDEEIADFKTRLLEMKAKLSHTLEGNAQEVKKPNEATGYSQHQADQGTDTFDRTISLEVTTKEYKLLRQIDRALEKIEESSYGICDVSGEEIPLARLMAIPYATMTVKSQEKFEKGLLSGN

SEQ ID NO: 55253 - protein, 607 aa, Chlamydia trachomatis
MFPQKITLWLYPLGLFANLFFGTAFCVQWFLIKKRGCSFVPKIFWHLSCSGAVLMICHGFIQSQYPIALLHSFNLIIYFRNLNIASSTPLPISKIVSLLVVSATAITLSFAIGTQYLPHMTWMASPNILHLNLPEANFLWQLIGCIGLTIFSLRFFIQWFYLEYKNQSSLPTPFWKASLVGGSICLIYFLRTGDIVNVLCYGCGLFPSLANLRIASREAIQKPFSCSCFISAGEHSGDTLGGNLLKEIHAKYPDIHCFGVGGPQMRAQNFCTLFSMEKFQISGFWEVLLALPKLWYRRRILYKTILKRNPQAVICIDFPDFHFLLIKKLRSLGYKGKIVHYVCPSIWAWRPSRKTTLEKYLDLLLLILPFEQKLFKDSPLRTVYIGHPLSETIKLFCPKQNWKERLHLPTDKPFVAAFPGSRHSDILRNLTIQVQAFQASDFASTHHLLVSSANPAYDHLILEILQQNRCLHSNIVPSQFRYELMRECDCALAKCGTIVLETALNLTPTIVTCQLRPLDTFLAKYIFNIILPAYSLPNIILGRTIFPEFIGGKKDFRYEDVAAALNILKTSQAQEKQKNACKDVYQAINESASTIKECLPFIFEASY

SEQ ID NO: 55254 - protein, 1672 aa, Chlamydia trachomatis
MSSMKWLSATAVFAAVLPSVSGFCFPESKELNFSRTGTSSSTTFTETIGENGTEYIVSGNSSFTNFTNIPVKKPTTDDSSTSTPTTSSAVDPTEKIVRASSSSSPNSGDTSATPDPKGGGAFYNEHSGILSFMARSGVEGSLTLSNIKMTGDGGAIYSQGELLFTDLTGLTIQGNLSQLSGGGIFGGSTISFSGINQATFSSNTAEVVPEETTPNPNPGTQTTTSQPSPTSKVQSLFTYSSSTQANGNGADSQTPSHKPGSGGAIYATGDLTISDSQEIVFSVNKASKDGGAIFAEKNVSFENITTLKVQNNGAEEKGGGIYASGDLSIQSSKQSLFNSNTSKQGGGALYIEGNVDFKDLEEIRIKYNKSGTFETKKVTLSLPEAQTNKSSVTAASQSGPNTTPTPTPPVTAKGGGLYTEKNLSISNITGIIEITNNKATDVGGGAYVKGTLTCKDSHRLQFQKNSSEKKGGGLYTEDTITLSNLTGKTLFQENTAKEEGGGLYIQGDDKTLTMTGLDSFCLIDNTSATHGGGAYVTKEISQTYTSDVEEFPGITPVHGETIISGNKATGGSGGGVCTKHLVLSNLQTISISENFASENGGGACTCPDNFPAPTASTPSTNQTAAPKDDKDFLIDYVVSTTIDKNKATKKGAGVYAKKAKLSRIDELNISDNAAQETGGGFCCTESLELDTIASLSVTKNLAGKEGGGLHAKTLNISNLKSGLSFSNNTANSSSTGVATTATTSQSPTVSSFLPRATAGSSPAPAQTTPTYAGVVGGAIYGETVSFSKCSGLCQFTENSAIDNTPSSPSLNVQGGAIYAKTSLSIEAEDPSTSYVFSKNSVSTGKAQTTGQIAGGAIYSPSVTLNCQTVFSGNSASMATTNPPSGTSPKDTIGGAIAGTTISLSKTSHFSENTADLGAAIGTLSGGSSSNLTEKITLSNGSFTFEKNKANKRGVIYAPSVSIKGNNITFNQNTSTHDGSAIYFTKDATIESLGSVLFTGNNVTAEQASSTATGGQTTNTTNYGAAIFGDPGTQTTDTTLKLIASSGNITFSNNSQNTATNNPATKFCSISGYVKLTLQAAQGKTISFFDSIRTSTKKTGQAQNSYETLDINKTENSNTYAGTVLFSSELHEVKSYVPQNVVLHNGTLVLKKNAELHVVSFEQKEGSKLIMEPGAVLSNQNIANGALAINGLTIDLSSLGAPQTGEVFSPPELRIVATTSNSGGGGGVGGYVTASKNLSAASPTVAATNPTMADNKVFLTGALTLIDPDGNFYQNPILGTDLTDVPLIKLPTTANQVDVSNLTLSGDLSPKKGYTGTWTLNPDPQTGKVVANWKFDMYRRWEYIPRDNHFYANSILGSQNSMIVVKQGLINNMLHNARFDDAAYNNFWVSGVGTFLSQQGTPLSEEFSYYSRGTSVAIDAKPRPDFILGAAFSKMVGRTKAIKKVHNYSHKGSEYSYQASVYGGKFLYFLLNKQHGWALPFLLQGVVSYGHIKHDTTTLYPSIHEKNKGDWEDLGWLVDLRVSMDVKEPSKRSSKRVALYGELEYSSIRQKSFTEIDYDPRRFDDCAYRNLSIPMGCYFEGAIMSYDILMYNKLSLAYMPSIYRNNPVCKYWVLSSNETSKVVCGVPTRTSARAEYSTQLYLGPFWTLYGNYTIDVGMYTLAQMTSCGARMIF

SEQ ID NO: 55255 - protein, 1460 aa, Chlamydia trachomatis
MKFLSATAVFAAALPSITSASSVESQIETKDLNSSRTGSSSSQSFTEIIPENGAEYRVSGDVSFSDFSNIPEEAETLAISHKEQPNNEVVLSEENHQASFQDSAQNQTENASEGNSPNSENTNQSSTTETESITTDEQVQNDNESAASVPTTVETATAMRLPSYHLQTESLVEGATEEDQNQPNSQNTSSGGGAFYNSQQGPLSFINDPDKDSSLTLSKIRVIGEGGAIYSKGPLSITGLKKLALKENLSQKAGGAICAESTISISSVDSIIFSKNTVTPPAANKPELPNDPSGSNGNDGSDDSNSSGNTDSNESNPNNSASNNTGSENELSSSTPSAQLPNPATPFLSSVSTNSQPIDTEPENAWHAESGSGGAIYSKGKLSIASSKEVVFDHNSATKNGGAIFGEEEIALEKIASLKFDSNTTGEKGGAIHAKTVTLSDIKNTLIFVNNTAKTPEENSLKSSQLNNQNPSEEEHQDTSEGEESQSLETSPITNQDSASSHVAIFRSIAASSSQSNSENIPNADGSTSAGGDAGSSSQPSTPGSDSSINHVIGGGAIYGEAVKIENLSGYGTFSNNNAVDHQISGSTSDVLGGAIYAKTSLTIDSGNSSGTITFSENTTSSKSTTGQVAGGAIFSPSVTITTPVTFSKNSAINATTSSKKDTFGGAIGAISTVSLSKGARFSENIADLGSAIGLVPTTQDAETVQLTTGSYYFEKNKALKRATVYAPIVSIKAHTATFDQNISAEEGSAIYFTKEATIESLGSVLFTGNLVTPIQSTTVLTSGNTSKYGAAIFGQIANASGSQTDNLPLKLIASGGNISFRNNEYRPDATNTGQSTFCSIAGDIKLTMQAAEGKVISFFDAIRTSTKKTGTLASAYDTLDINKSNDSGSINSAFTGTIMFSSELHENKSYIPQNVVLHSGSLILKANTELHVLSFDQKEGSSLIMEPGSVLSNQDIADGSLVVNSLTIDLSSVGRNSASGDNIFMPPELRIVDTSTNSGNSSSTPPSSNTPPNSTPTAQAPISKNFAATTTTPTTPPTTGNIVFLNGVIKLIDPNGTFFQNPALGSDQKISLLVLPSDQTKLQAQKVVLTGDISPKKGYTGTLTLDPQQLQNGVIQALWTFKSYRQWAYIPRDNHFYANSILGSQMSMATVKQGLINDKLNLARFDEVAYNNLWISGLGTMLSQRGGQRSEEMTYYSRGASVALDAKPTQDLIIGAAFSKMIGRSKSLKLERNYTHKGSEYSYQASVYGGSPFYLTINKEAGRSLPLLLQGVISYGYIKHDTVTHYPTIRELNKGEWEDLGWLTALRVSSILKTPKQGDSKRITVYGEVEYSSIRQKQFTETEYDPRYFSNCTYRNLAVPVGLALEGEFKGNDILMYNRFSVAYMPSIYRNSPVCKYQVLSSGEGGEIVCGVPTRNSSRAEYSTQLYLGPLWTLYGSYTLEADAHTLANMINCGARMTF

SEQ ID NO: 55256 - protein, 335 aa, Chlamydia trachomatis
MFVDQITLELRAGKGGNGVVAWRKEKYLPKGGPYGGNGGNGGSILIEAVTNMYSFEEYRNLRFLKAGDGQAGASNNRTGKNGKDFVLKVPEGTLLRDAETGELIHDFTKDGERIVVCQGGRGGKGNVFFKTSTNRAPTKATPGKPGEIRLVELELKLIADIGLVGFPNAGKSTLFNTLARTEVKVGAYPFTTLHPSLGLVHQEGYLYQKPWIMADIPGIIEGASQNRGLGLDFLRHIERTRLLLFVVDISGIERSSPEKDLQILIGELLAYKEDLKNKSMVIALNKIDQLLPDEREERLALLKQQFPDQEFILLSGLTGEGVDVLHDLFKSKLSE

SEQ ID NO: 55257 - protein, 83 aa, Chlamydia trachomatis
MAHKKGQGASRNGRDSESKRLGLKVGAGQRVSTGSILVRQRGTKWHPAVNVGRGKDDTLFALVDGIVVMKKTDRTYVSVIPQA

SEQ ID NO: 55258 - protein, 107 aa, Chlamydia trachomatis
MEPYAVVQTGNKQYQVRKGDVIDVELLDGISEENKEVLFQEVLFVFDGEKASVGSPTVGNAVVKGELISFVRGEKVVAYKYKKRKNYHKKIGHRQNYLRVKICDLVM

SEQ ID NO: 55259 - protein, 374 aa, Chlamydia trachomatis
MLYILLATIILFLFLGSAINRRVTTLAYGTDGIPVPPSSSRLLPLLCLLYGILGAPIYQYINTFFSIPLPIFWGTFLFLILVACKFLPSFYGCSKNWWGSQIPISTVKALEKCLMGLKKSSSTTIPQLPAPTPSNELSANISCLEDMIAREIMTPKADIFALPSEIPISQAFPLIIDEGYSRVPLFTKNIDDITGMVLVKDLLPVYYKDPHTTQPLSSIAYPPLYTPEIRRVSLLLQEFRQKRCHLAIVVNEYGFTEGLVSMEDIVEEIFGEIADEYDDQEDVHYKKVGNAWIVDGRMNISDAEEYFGLRIAHESSYDTLGGYVFHKLGAVPEKGMKIYYEDFAIDILSCSDRSVEKMKITPRKRKPLSRNNRF

SEQ ID NO: 55260 - protein, 239 aa, Chlamydia trachomatis
MQVYNSLRTIMTNFQDKPNIRIMFDSLAPTYDKINKILSLGLHLTWNHSFVSLLGRSDHLLDLCAGTGHVALSYIQKYPQASATLVDFSTKMLENVQECHPLAPFSYVISDVTSMPLPNDTFHLASMAYGLRNLSSPLEALKEVHRVLKPKGRLGILELTRPATYNPVHLLHKLYLNLVVPSVGRFYSGNSYAYSYLKESIRNLPCDTSLERVFHKSGLHIIRKRKLLFGTATIWILEK

SEQ ID NO: 55261 - protein, 497 aa, Chlamydia trachomatis
MTSLLDKYLRNISGKGQQSLASVAYLAALDHLLHSFPSIGQSIVQELKSQRSRLKMIASENFSSLSVQLAMGNLLTDKYCEGSPFKRFYSCCENVDAIEWECVETAKELFGAESACVQPHSGADANLLAIMSIITQKIQSPAVQRLGYKTINDLPEQEYEALKAEMSQYKCLGPSLNSGGHLTHGTVRINVMSKLMHCLPYEVNLDTELFDYDVIAKIAKEHRPTVLIAGYSSYSRRLNFATLKQIAEDCGAVLWVDMAHFAGLVAGGVFIGEENPIPYADIVTTTTHKTLRGPRGGLVLAKKEYSDTLNKACPLMMGGPLPHVIAAKAVALKEAMTINFRKYAHQVVENARTLAEIFQRNGLRLLTGGTDNHMLIIDLTSLGVPGRIAEDMLTSVGIAVNRNSIPSDASGQWKTSGIRLGTPALTTLGMGSAEMEEVANIIAKVLRNITVRRNAEGSSSKSEGVLSEEIAQEARQRVADLLGRFPLYPEIDLETLV

SEQ ID NO: 55262 - protein, 178 aa, Chlamydia trachomatis
MSEPSSCFVLPDPEWIYRVGIGQDSHRFLPSDNPKPCVLGGIIFENTPGFEANSDGDVVFHAICNAFSSVTHQVILGALADELLKAKGISDSAVYLKEAVASLKPTQKISHLAITIEGQRPKLLPKISAMREKIAEILRISLDSVNITATSGEGLTSMGQGHGVQCFCVLTVMEFCPR

SEQ ID NO: 55263 - protein, 105 aa, Chlamydia trachomatis
MKQQKQRIRIRLKGFDQGQLDQSTANIVETAKRTGARVVGPIPLPTKREVYTVLRSPHVDKKSREQFEIRTHKRLIDILDPTGKTIDALKMLSLPAGVDIKIKAA

SEQ ID NO: 55264 - protein, 694 aa, Chlamydia trachomatis
MSDQEFGLDAIRNIGIMAHIDAGKTTTTERILFYAGRTHKIGEVHEGGATMDWMEQEQERGITITSAATTVFWLGSKINIIDTPGHVDFTIEVERSLRVLDGAVAVFDAVSGVEPQSETVWRQANKYGVPRVAFVNKMDRMGANYFGAVESMREKLGANAIPVHCPIGAESQFVGMVDLISQKALYFLDDSLGAKWEEREIPEDLQEQCEVLRMQLLEELATVDETNEAFMEKVLEAPESITEEEIHRVMRKGVIEGKINPVLCGSAFKNKGVQQLLDVIVKWLPSPLDRGNVRGMNLKTGEEVCLKPSKDGPLAALAFKIMTDPYVGRITFIRIYSGTLKKGSAILNSTKDKKERISRLLEMHANERTDRDEFTVGDIGACVGLKFSVTGDTLCDENQEIVLERIEAPEPVIDMAIEPKSKGDREKLAQALSALSEEDPTFRVSTNEETGQTIISGMGELHLDILRDRMIREFKVEANVGKPQVSYKETITKASDSETKYVKQSGGRGQYAHVCLEIEPNEPGKGNEVVSKIVGGVIPKEYIPAVIKGVEEGLNSGVLAGYGLVDVKVSIVFGSYHEVDSSEMAFKICGSMAVKEACRKALPVILEPIMKVTVITPEDHLGDVIGDLNRRRGKILGQEASRNMAQVNAEVPLSEMFGYMTSLRSLTSGRATSTMEPAFFAKVPQKIQEEIVKK

SEQ ID NO: 55265 - protein, 157 aa, Chlamydia trachomatis
MSRRHAAEKKVIPGDPVYGSVVLERFINKVMLHGKKSIARKIVYGALERFAKRLGLENPLEGFEEALENAKPILEVRSRRVGGATYQVPVEVAPDRRSCLAMQWIIKHARSKPGKCMEIGLANELIDCFNKQGATIKKREDTHRMAEANKAFAHYKW

SEQ ID NO: 55266 - protein, 123 aa, Chlamydia trachomatis
MPTINQLIRKKRQSGATRKKSPALQKSPQKRGVCLQVKTKTPKKPNSALRKVAWVRLSNGQEVIAYIGGEGHNLQEHSIVLVQGGRVKDLPGVRYHIVRGALDCAAVKNRKQSRSRYGAKRPK

SEQ ID NO: 55267 - protein, 506 aa, Chlamydia trachomatis
MTFQNVRVRVAPSPTGDPHVGTAYMALFNEVFARKFNGKMILRIEDTDQTRSRDDYEKNIFSALKWCGIRWDEGPDIGGPYGPYRQSERTEIYKKYAEILLQTDYAYKCFATPQELQEMRAVASTLGYRGGYDRRYRYLSAEEVRQREEQGQPYTIRLKVPLTGESVFEDQCKGRVVFPWADVDDQVLVKSDGFPTYHFANVVDDHLMGITHVLRGEEWLSSTPKHLLLYEAFGWEPPQFFHMPLLLNPDGSKLSKRKNPTSIFYYRDAGYKKEAFMNFLTLMGYSMEGDEEIYSMQRLIEAFDPKRIGRSGAVFDIRKLDWMNKHYLNHEGSPESLLKELKDWLWNDEFLLKILPLCQTRITTLADFIRLTSFFFMAIPEYSKEDLLPSSLGHQQAAVMLYSLVKYLEKKDLWEKDFFYQGSKWLAEAFQVHHKKAVIPLLYVTITGEKQGLPLFDSMELLGKARTRARLTHAQNLLGGVPKKLQQQIDKALQDQPLEEIRFLDF

SEQ ID NO: 55268 - protein, 582 aa, Chlamydia trachomatis
MEKDKLSALGQKWTYPKHNEEFLKKIIKELYLHPVIAQVLVSRGFQSVQEIRDFLYPQFPSLHPASSFLDMEKAVARLLKSKENNEHVMIYGDGDVDGITGVTLLVEFLQMLGVKTSYCCSGTLFKQHGEITSLISQMLQDGVSLLITVDCGITAGREVRSINKQGIDVIVTDHHTPTGKLPHCIATLNPKLDKNSYPNKELTGVGVAFKLVCATYEELIKQDASWKDKIDLLHFLDLVSLGTIADVGRLSGENRILVSYGIKEITKGKRLGLKKLCSLSGVDKSDISSTNLGIRITPKLNSLGRLADSSQGVKLLLSQDPRTVGTIVSELAIVNQERQRIEAEVLRDVERILAANPKLTAQSAIVLASPYWHSRVIPIISARLARTYNKPVAIIALQDGIGKGSLRTIGAFPLLGVLRKCESFFLSYGGHDFAAGLMIKEEQIEGFRKKFIHLVNSSLRKDEATLTLPLDVCMDFSQISQDLISSMELLEPFGKGNPSPVFYTRAIQVRYPKLLSGNHVKLYLNSGERNLEGTAFGQGDKISLLKANWNMPLDIAYTLRVMKRSVHGAVRLLIQDFRIQAP

SEQ ID NO: 55269 - protein, 253 aa, Chlamydia trachomatis
MSLALEQANPIQENFLREPPLPKHIAIIMDGNRRWQKKHEQFCKSNAISGHRRGADSIPQIVDTAALLGVEALTLFAFSTENFSRSKTEVAELFSLFNSQLHSKLSFLHDREIRLRCIGDLSKLPQELQNNIAKAVSATTHYSHMELIFAINYGSKNELVRAFKELHQDLTNKKISINEISEELISSYLDTSGLPDPDLLIRTGGEMRVSNFLLWQIAYTELYVTDVLWPDFTAHDLLEAIKTYQQRSRRGGK

SEQ ID NO: 55270 - protein, 305 aa, Chlamydia trachomatis
MFDSDKNSILQSDFCQRLVVHSLLLVFLVILLCTSLYPSSAFIVGLLSSTCAAIGTYEMSSMVRMKFPFSFTRYSSIGSAIFVALTCLTARCKMLLPEHVDLIPWFFLFFWTVHLVFKSRHYKLGPIGSTGLALFCMLYVSVPIRLFLHILYGFVHTDTPFIGIWWAIFLIATTKSSDIFGYFFGKAFGKKRIAPVISPNKTVVGFVAGCIASILVSLIFYSHLPKSFANQIAMPWILVALGIILGISGFFGDIIESTFKRDAQIKNSSDLESIGGMLDVLDSLLLSTPIVYAILLITQNGTFLG

SEQ ID NO: 55271 - protein, 216 aa, Chlamydia trachomatis
MIITIDGPAGTGKSTLAKALAKTLQFNYCNTGAMYRTLAYARLQPDWQEVPLEDFLASPPFSFSFSKDAPLQAFYENRPLTSELISQEVANFASIFSKEPKVRAYMQTLQKRYASVGSCVFEGRDMGSKVFPHAEVKIFLTAEPEIRAKRRLKDLPEGSLSQEALTAELIARDQADQQRELDPLVIPADALVIDSSDLTISQILEKIVPLIHSRLA

SEQ ID NO: 55272 - protein, 216 aa, Chlamydia trachomatis
MIFTIAKSLVRLLFPLFYRRKIFRSKASASVTGAAIIAANHVSFLDPIIIPLSFPGKIYHLAKSGLFANSFAHWLFHELGCYPISRNAGNSAAFKAALNIFSRGEKLIIYPEGTRHSDGEIHQGKVGVGMLALKGNVPVIPVYVAGTLEAFGKHQKFPKLWKTLTTVIGTPISFQDLIDNPAIDKKEAYQLATERIMAKIAKLRTWFQQGCIGEIP

SEQ ID NO: 55273 - protein, 563 aa, Chlamydia trachomatis
MTTLLSFLTSLCSSAIRQAFPELEELTLDITPSTKEHFGHYQCNDAMKLARALRKSPRAIAEEIVAHIPATPFSSIEIAGAGFINFTFSKEFLANQLQIFSQELAKGFPVSSPQKVIIDFSSPNIAKDMHVGHLRSTIIGDCLARCFSFVGHDVLRLNHIGDWGTAFGMLITYLQETAQTDIHQLENLTELYKKAHVRFAEDPEFKKRSQYNVVALQSGDPQALALWKQICAVSEKSFQKIYSILDVELHTRGESFYNPFLADVVSDLESKNLVTLSDGAKCVFHEEFSIPLMIQKSDGGYNYATTDVAAMRYRIQQDHADRILIVTDSGQSLHFQLLEATCLAAGYLPHKGIFSHVGFGLVLDTQGRKFKTRSGENIKLQELLDTAIEKAKESLREHRPEISEEELAYQGPILGINAIKYADLSAHRINDYVFSFEKMLRFEGNTAMSLLYAYVRIQGIKRRMKLDTLPQKGPLSIHEPAEETLALTLLRFPEVLDLTLRELCPHFLTDYLYVLTNKFNAFFRDCHIEGSDYQQERLYLCGLTEKTLETGMHLLGLKTLDHL

SEQ ID NO: 55274 - protein, 442 aa, Chlamydia trachomatis
MPGIKVFGGTVLQGSVRVSGAKNATTKLLVASLLSDKRTILKNVPNIEDVQQTVDLCRALGAIVDWDKQAQVIDIHTPRILLSKVPPQFSCVNRIPILLLGALLRRCPYGIFVPILGGDAIGPRTLHFHLEGLKKLGAEIIVSDEGYWAAAPDGLIGAHITLPYPSVGATENLILASVGAQGRTIIKNAALEVEIIDLIVFLQKAGVEITTDNDKTIEIFGCQDFYSVEHSIIPDKIEAASFGMAAVVSQGRVFVEHARHEHMIPFLKALRSIGGGFSVQENGIEFFYDKPLKGGVLLETDVHPGFITDWQQPFAVLLSQAEGCSVIHETVHENRLGYLSGLAKMGAHCDLFHECLSAKSCRYSTGNHPHSAVIHGPTPLQATHLVIPDLRAGFAYVMAALIAEGGVSKIENTKMLDRGYTDWLGNLERLGAKILTEKTRCV

SEQ ID NO: 55275 - protein, 218 aa, Chlamydia trachomatis
MNLSCSLVLLGGGRGERFNSPQPKQYTPLCGEPLILHALHSYQSLPFIQEIVVVCEEHYQELFSPYSVKFASPGALRQDSVFSGLQQVSLPWVCVHDGVRPFVYANEVSEVCSAALKTGAAALATSATYTIKSRTPVRTLDRDAVAVIHTPQCINTEILKEGLLLANMMDFTLSDDSEAAELLGIEPTLVFSNRVQMKITYPEDLLFAEALLSKAHIR

SEQ ID NO: 55276 - protein, 267 aa, Chlamydia trachomatis
MTKKIILRIAYQGTAYSGWQYQPNALSIQEVLETLLQKISRTRISVIASGRTDAGVHAQGQVAHFCCPDHPHFSDPGQIKKMLNALLPHDIVIRDVIATNEDFHSRFSAITKEYHYTLSLLPKPLPHHRLFCFSPRHKLCLESMREAAKYLVGTHDFASFANLGREYSSTVRTLYALDLLEQEHLVTVICKGNGFLYKMVRNIVGALLDIGKGKYPPEHLLEMLEKKDRKKGPPSAPPYGLSLHHVCYPSPYHWFCKHEHNSSNEEK

SEQ ID NO: 55277 - protein, 352 aa, Chlamydia trachomatis
MPKIDTCDSCVSNDELLAIRARVTQSYSEAQTILTSIPDGIILLSEVGEILMCNSQARSILGIPEDIQLIHQKFHDFFPDTFFGFSVQEALEKEIPPKTIRLTLSQDLSHKEVEVFVRKNISNQFLFLLIRDRSDYRQLEQAIEKYRSISELGKIAATLAHEIRNPLTGISGFATILKEELSSERHQRMLNAIIEGSRSLNSLVSSMLEYTKIQPLNLRSIDIQDFFSSLIPELSLTFPSCTFRRTYSSPILHSIDPDRLRCVIWNLVKNAVEASDDEVFLELHEKGLSVVNTGTLPLHVQEKLFIPFFTTKPQGNGLGLAEAHKIMRLHGGDLIVSNQDNLITFTILWTPA

SEQ ID NO: 55278 - protein, 790 aa, Chlamydia trachomatis
MLTPIPLLQRFFSSPLSIKEILQACDRIGIEAECSNVFPDSLNTVVTGKVLSTSPHPDAERLSVAIVFDGKEERQIICGAPNCRAGIIVPVALPGAKIRNALGEVTTIKKSKIRGLESLGMCCGADELGFPHLQTGERGIFEFPENTPLGESACLLLAGASLECSLTPNLGHCASLLGLAREISFLSDTSLTIPEEFSFSPLPQESHSCDTHNLEASPVFYSVKISGLSWKQSPEDLQASLIALGQKPLNAIVDITNYVMLSLGQPLHAYDSQAVDQKSLHATTVRSPQQLTLLNKETYTLPEGALVVADQHNILGLAGVMGSAASAYSESTTEIILEAAYFLPQAVRKYQRTIQLHTEAAYRFTRGIDPQGVLPALYAAIHMIRALFPEAQISPIQKIGEYKSDPLSLNIRPKTLKRLLDLSLSPSEIAEKLSPLGFQTIAEESSVRVEVPLYRHDIQEETDLVEEICRTTPFVQKTQKILPTYTPIYALKRSLSTFLADSGLQQFFTCSLLDSEIAALSLQESSLIPVQNSSLKLRDSLLSGMLKSAATNLNRQAPYVYAFEIGNVYSKEHNQYREEEHIAILLTRQVMDDSWHVKTPLSFYTIKSWVEKLLCHAGVSIEDFVLQASQHPNFHPYRQAALYHKKQLLGVFGTLHPQLCKKSQIKHDVVFAELSLNVLLSLKKKTEPHYVPYPIYPSSSRDITITIDKDLPADLVRRELLSFESKWLESVHIVSVYQGKDVTSQSKNISLRLVFRDHERTLSGQEIEKEYERLTTLLDKNLANIGKGNS

SEQ ID NO: 55279 - protein, 173 aa, Chlamydia trachomatis
MGAPMTEKFFVVSPTSKNFLAQACSQGLSIDKYPPIQIIVHFRGDSIFHSRLSLAPVFTCLFLGPGAHKAMEGMVHWCEAYAKKNPSPLSFLDLSSFKEKQLEILKAVSQISFGIRSTYQAIAEQTETSKEEVLATCKQNPLPLLIPCHRVLSVKDYPGGQALYEILTRFEGI

SEQ ID NO: 55280 - protein, 243 aa, Chlamydia trachomatis
MLRVLAYRQVAFSKFPYALRSFLDFLHSLKQHYSFILPGDPLPNRKAIILTFDYASVDFYKHVFPFLQKFQIPAVVGVAWRYVSRLESENLPIDMRISPSDFLAFQDEIFSYYQPFCSVKELCHMAQSSIIRFASSGFAIRNLKNSPPYLHTEISLSKILLEEAIQAPVEVFFYPFGKSDLVSQHFVQEVYRYSFVLGDAASFFYSMQSQHSIPRIDMALDSRGIPSLYQLSFRQLKRFLILH

SEQ ID NO: 55281 - protein, 419 aa, Chlamydia trachomatis
MAVTKIAKLQRMGINELNVLARQYGVKNVGSLTKSQVVFEIVKAKSERPDEFLIGEGVLEVLPDGFGFLRSPTYNYLPSAEDIYVSPAQIRRFDLKKGDTIVGTIRSPKEKEKYFALLKVDKINGSTPDKAKERVLFENLTPLHPNERLIMEMGKENLAERVLDLTAPIGKGQRGLIVAPPRSGKTVILQSIAHAIAVNNPDAELIVLLIDERPEEVTDMIRQVRGEVVASTFDEQPDRHIQVAEMVIEKARRLVEHGKDVVILLDSITRLARAYNTVQPHSGKILTGGVDASALHKPKRFFGAARNIEGGGSLTILATALIDTGSRMDEVIFEEFKGTGNMELVLDRHLSDRRIYPAIDLIKSGTRKEELLYHPGELEKVRLFRQAIAGLTAIDAMQLLLGRLKKTNSNTEFLLSLKD

SEQ ID NO: 55282 - protein, 866 aa, Chlamydia trachomatis
MKKLFILDASGFIFRAYFALPEMRGPNGGSTQAVFGFIRSLDKLVNDLSPEYMVAVFDGPNNKQSRQELYADYKSNRDRKFEDLPEQIALVKQYCELIGIPCLEKEGVEADDVIASVAKKAVAEGFEVCICTADKDLLQLVNSQVSVFNPWKEQEIKYNEVLLQFGVAPDQIADYLALVGDSSDNIPGVVGCGPKKAQAFLKEFQSVEDLVANTQRLSSKNKQMIEEQIETLLLSKRLATLHTDLMIPLKTEEMSFSSQTADVAQLNAFYLQHGFKALVKHAPTSETSISLQVVKDPSVLQMVLKNLKGREVGYCVAYTGEHLPSLRLHGVALSGGDEVFYIEISGDQEIALLKAFFADATTKFFGYRTKRDNHALKNHGIDVHVTADLVLAQHLVNGGAKISFQTLLVESGHIQEAAFFAKEWGASSLPVQNLPQNPAQYFGIFVSRLPSIKNYLFEKLEEKGLKSIFKNVEQPLEEILFAMECAGMPLDSEGLLVLDRDLSKELETYTQEIYDLAGCEFNIKSPKQLSDVLYHRLGIKPVDKAKSTKAEVLEALEGSHEIISKILAFRATEKMLSTYVRALPRQIDLGTHRVHPTFNQVGTVTGRLSCQDPNLQNIPVRYERGKSLREAFRFTKENDYFLAADYSQVELRFLAHLSQDETLKRAFDSGEDIHTFTASQVFNVPLDQVTERQRYQAKAVNFGLAYGQQAYGLSKNLKISVNEAQGLIDAYFARYPQASEFITHTIEQASKEQKVTTMLGRERILSDWESSPGARAASGRLAVNTRIQGSAAELIKLAMLNISRELVSRGLKSRLLLQIHDELLFEVPKEELEEMKVLVQEKMESAMSLSVPLVVNVLIGKNWAEC

SEQ ID NO: 55283 - protein, 472 aa, Chlamydia trachomatis
MATQTKKPHSPQLLSLPNSKESEMIVLGCMLTNVNHLNLAANLLQEEDFYFLEHRIIFRVLQDAFKSDRPMDPHLTGEELKRRDQLNVIGGASYLITLSEFAGTSAYIEEYADIIRSKSILRKMIQAAKDIEKKAAEEPRDVTTALDDAQNLLFRISQTTNFAPYVLVSDKLKGLSSTKDKSFLLALQERQEAFQASSHDARIPTLSGFPTHFLDLDRMLNGFSPSNLIILAARPAMGKTALALNIVENFCFESRLPVGIFSLEMTVDQLIHRIICSRSEVEAKKISVGDISGRDFQRVVSVVREMEEHTLLIDDYPGLKITDLRARARRMKESYDIQFLVIDYLQLISSSGNLRNSDSRNQEISEISRMLKNLARELNIPILCLSQLSRKVEDRANHRPLMSDLRESGSIEQDADQIMFLLRREYYDPNDKPGTAELIVAKNRHGSIGSVQLVFEKDFARFRNYAGCEFPG

SEQ ID NO: 55284 - protein, 610 aa, Chlamydia trachomatis
MWTFPVEYDVIVIGAGHAGCEAAYCAAKMGASVLLLTSNLDTIAKLSCNPAVGGIGKGHIVREIDALGGVMAEVTDLSGIQFRILNQTKGPAVRAPRAQVDKQLYHIHMKQLLEQVPGLHIMQGTAEALLDDGEKVLGVSTKEGWAYSGETVVLSSGTFMRGLIHIGTQNFSGGRLGDAASLGLSKDLKRLGFPLGRLKTGTPARLLSSSIDFSIMEEQPGDQNVCFVHREEAFVPKLPQVSCHITYTTDKTKDLIANNLHRSALYGGRIEGVGPRYCPSIEDKIVKFADKDRHHIFIEPEGLNTREVYVNGLSTSMPFDVQYEIIRSVAGLENAVITRPAYAIEYDYIQGNVILPSLESKILEGLFLCGQINGTTGYEEAAAQGLIAGVNAVNKVLHRPAFIPSRQESYIGVMLDDLTTQVLDEPYRMFTSRAEHRLLLRQDNAGMRLSHYGHALGLLSSERYAMFQKQKNCIEHEKERLAKTFRKYGDSIVPLTKILCRPEVSYQQLLTEFPEDVKDWGPIIGASLEMEIKYSGYISRQQTLIRSMEKAENTLIPEGIDYHSISALSLEAREKLSKFTPRTIGSAARISGISVADIQVLMVSLKKDAY

SEQ ID NO: 55285 - protein, 335 aa, Chlamydia trachomatis
MRIVINGFGRIGRLVLRQILKRNAPIEVVAINDLVSGDLLTYLFKYDSTHGSFASQATFSDGCLVVGERKIRFLAEKDVQKLPWKDLDVDVVVESTGLFVNKDDAAKHLDSGAKRVLITAPAKGDVPTFVMGVNHQKFDPANDVIISNASCTTNCLAPLAKVLLDNFGIEEGLMTTVHAATATQSVVDGPSRKDWRGGRGAFQNIIPASTGAAKAVGLCLPELKGKLTGMAFRVPVADVSVVDLTVKLSSATTYEAVCEAVKHAASTSMRNIMHYTEEAVVSSDFIGCEYSSVFDAQAGVALNDRFFKLIAWYDNEIGYATRIVDLLEYIQGNSK

SEQ ID NO: 55286 - protein, 142 aa, Chlamydia trachomatis
MQHARKKFRVGRTSSHNRCMLANMLKSLIHNERIETTLPKAKELRRHADKMVTLAKKNTLAARRLAVGRLMVRYNTLTGKEARQVKAGDLSAYNVDRRVIGKLFDVLATRFSSRNGGYTRILKLQNRVGDNAQKCIIEFLAD

SEQ ID NO: 55287 - protein, 394 aa, Chlamydia trachomatis
MSTKKTTKSVVIAKEFGMSDNSHNLLYNKFELPESVKMSPVEGAAGGIDKVARFVADPLEKGMGHTLGSALRRALLIGLEAPAIVSFSMTGVLHEYMAVEGIIEDVTNIVLNLKGSLLKKYPLQDCEGGRASQKLRATISIDASDLAAAGGQKAITLGDLLQEGTFEAVNPEHVIFTVTRPMQLDVMLRVAFGRGYTPSERIVLEEREMNEIVLDAAFSPVVLVNYFVEDTRVGQDTDFDRLILQVETDGRVAPKEAVAFATQILSKHFSVFEKMDEKRIVFEEAISVEKENKDDILHKLVLGINEIELSVRSTNCLSNANIETIGELVIMPEPRLLQFRNFGKKSLCEIKNKLKEMKLELGMDLSQFGVGLDNVKEKMKWYAEKIRSSKNTKG

SEQ ID NO: 55288 - protein, 132 aa, Chlamydia trachomatis
MVKNQTQKKGVKRKQVKNIPSGVVHVKATFNNTIVTITDPAGNVISWASAGKVGYSGSRKSSAFAATVAAQDAAKTAMSSGLKEVEVSLKGTGAGRESAVRALISSGLIVSVIRDETPVPHNGCRPRKRRRV

SEQ ID NO: 55289 - protein, 122 aa, Chlamydia trachomatis
MPRIIGIDIPAKKKLKISLTYIYGIGPALSEEIIARLQLNPEARAAELTEEEVGRLNALLQSDYVVEGDLRRRVQSDIKRLITIHAYRGQRHRLSLPVRGQRTKTNSRTRKGKRKTVAGKKK

SEQ ID NO: 55290 - protein, 457 aa, Chlamydia trachomatis
MATLRQVFSISELRQKIFFTFSLLALCRIGVFIPVPGINGDRAVAYFNQLLGSSQNLFQLADIFSGGAFAQMTVIALGVVPYISASIIVQLLVVFMPTLQREMREAPDQGKRKLGRMTRLFTLLLACVQSLLFAKFALRMNLVVPGIVLPAMLSLKLFGIPCVFYLTTVVVMTTGTLLLMWIGEQISDKGIGNGISLIITLGMLASFPSVLGSIFNKLNLGSQDPSEFGIVSLLVLCAVFVFVLMATVLIIEGVRKVPVQHARRIIGRREVLGGGSYLPLKVNYAGVIPVIFASSLLMFPATIGQFLSSESSWLKRIATMLSPGSVVYSIFYVLLIIFFTYFWTATQFRPEQIASEMKKNGAFIPGIRQGKPTQSYLEYTMNRVTLLGAVFLAVVAILPSILGRILRVDANVSYFLGGTAMLIVVGVVLDTMKQIDAFLLVRRYDGVLKKDRPKGRR

SEQ ID NO: 55291 - protein, 144 aa, Chlamydia trachomatis
MIKLEYLQDPSPRKRRTKLLGRGPSSGHGKTSGRGHKGDGSRSGYKRRFGYEGGGVPLYRRVPTRGFSHKRFDKCVEEITTQRLNGIFENGEEVSLETLKQRKVIHRETSRVKVILKGALDKKLVWKDAAIVLSEGVKSLIETV

SEQ ID NO: 55292 - protein, 165 aa, Chlamydia trachomatis
MTLSRNSHKEDQLEEKVLVVNRCCKVVKGGRKFSFSALILVGDRKGRLGFGFAKANELTDAIRKGGDAARKNLVSINSLEGGSIPHEVLVNHDGAELLLKPAKPGTGIVAGSRIRLILEMAGVKDIVAKSLGSNNPMNQVKAAFKALLTLSCKDDIMKRRAVIND

SEQ ID NO: 55293 - protein, 123 aa, Chlamydia trachomatis
MESSLYKKTSGKARRALRVRKALKGSSLKPRLSVVKTNKHIYVQLIDDVEGKTLASISTLAKISKTSGLTKKNQDNAKALGVKIAELGKSLQVDRIVFDRGAHKYHGVVAMVADGAREGGLQF

SEQ ID NO: 55294 - protein, 183 aa, Chlamydia trachomatis
MSRKARDPIVLPQGVEVSIQNDEISVKGPKGSLTQVLAKEVEIAVKGNEVFVSPAAHIIDRPGRMQGLYWALIANMVKGVHLGFEKRLEMIGVGFRASVQGSFLDLSIGVSHPTKMPIPTGLEVSVEKNTLISIKGINKQLVGEFAACVRAKRPPEPYKGKGIRYENEYVRRKAGKAAKTGKK

SEQ ID NO: 55295 - protein, 133 aa, Chlamydia trachomatis
MGITSDSIANLLTRIRNALMAEHLYIDIEHSKMLEAIVRILKQHGFVAHFLVKEENRKRLMRVFLRYGEDRRPVIHALKRVSKPSRRVYVSAAKIPYVFGNMGIAVLSTPQGVLEGSEARAKNVGGELLCLVW

SEQ ID NO: 55296 - protein, 180 aa, Chlamydia trachomatis
MSRLKKLYTEEIRKTLQDKFQYENVMQIPVLKKIVISMGLAEAAKDKNLFQSHLEELAVISGQKPLVTRAKNSIAGFKLREGQGIGAKVTLRGIRMYDFMDRFCNIVSPRIRDFRGFSCKGDGRGCYSLGLDDQQIFPEVDLDRVKRSQGMNITWVTTAQTDAECLTLLECMGLRFKKAQ

SEQ ID NO: 55297 - protein, 111 aa, Chlamydia trachomatis
MKRRSVCVGDTVYVLAGNDKGKQGKVLRCLKDKVVVEGINVRVKNIKRSQENPKGKRINIEAPLHISNVRLSIDNQPARLFVKVTEKGRELWNKHSDGSSSLYRLVRERKG

SEQ ID NO: 55298 - protein, 122 aa, Chlamydia trachomatis
MIQQESQLKVADNTGAKKVKCFKVLGGSRRRYATVGDVIVCSVRDVEPDSSVKKGDVVKAVIVRTRNDIRRKDGSTLRFDTNSCVIIDDKGNPKGTRIFGPVAREIRDRGFIKISSLAPEVI

SEQ ID NO: 55299 - protein, 83 aa, Chlamydia trachomatis
MASDVRGRRKTKIGVVVSSKMEKTVVVRVERVYSHPQYAKVVRDSSKYYAHNELDVKEGDTVRIQETRPLSKTKRWRVVDRVN

SEQ ID NO: 55300 - protein, 72 aa, Chlamydia trachomatis
MGAKKNLLAELREKSSEELDEFIRDNKKALFTLRAEAALQNKAVKTHQFSLYKKSIARALTIKQEKKDRVHG

SEQ ID NO: 55301 - protein, 138 aa, Chlamydia trachomatis
MLMPKRTKFRKQQKGQFAGLSKGATFVDFGEFGMQTLERGWITSRQIEACRVAINRYLKRKGKVWIRVFPDKSVTKKPAETRMGKGKGAPDHWVAVVRPGRILFEVANVSKEDAQDALRRAAAKLGIRTRFVKRVERV

SEQ ID NO: 55302 - protein, 224 aa, Chlamydia trachomatis
MGQKGCPVGFRTAVTKKWRSLWYGNNQEFGKFLIEDVRIREFLKKKPSCQGAAGFVVKRMSGKIEVTIHTARPGLVIGKKGAEVESLKAELKKLTGKDVWVEIAEVKRPELNAQLVADGIAKQIERRVSFRRAMKKALQSVMDAGALGVKVQVSGRLAGAEIARSEWYKNGRVPLHTLRADIDYATASAETTYGIIGIKVWINLGEKKAVPAANHAGAASTAAA

SEQ ID NO: 55303 - protein, 111 aa, Chlamydia trachomatis
MFKATARYIRVQPRKARLAAGLMRNRSVVEAQQQLSFSQMKAGRCLKKVLDSAVANAESNENVKRENLCVVEVRVDAGPMFKRVKSKSRGGRAPVLKRTSHLTVIVGERGQ

SEQ ID NO: 55304 - protein, 88 aa, Chlamydia trachomatis
MSRSLRKGPFVDHHLLKKVRDMNALEKKTPIKTWSRRSMITPEMIGHTFEVHNGRKFLTVFVSETMVGHKLGEFSPTRMFKSHPVKKG

SEQ ID NO: 55305 - protein, 284 aa, Chlamydia trachomatis
MFKKFKPVTPGTRQLILPSFDELTTQGELEGSSSKRSVRPNKKLSFFKKSSGGRDNLGHISCRHRGGGVRRHYRVIDFKRNKDGVEAKVASVEYDPNRSAYIALLNYVDGEKRYILAPKGIKRGDRVISGEGSPFKTGCCMTLKSIPLGISVHNVEMRPGSGGKLVRSAGLSAQIIAKTDGYVTLKMPSGEFRMLNEMCRATVGEVSNADHNLCVDGKAGRRRWKGIRPTVRGTAMNPVDHPHGGGEGRHNGYISQTPWGKVTKGLKTRDKRKSNKWIVKDRRK

SEQ ID NO: 55306 - protein, 111 aa, Chlamydia trachomatis
MKDPYDVVKRHYVTEKAKMLEGLSLGGGEGKKKGSFCKDPKYTFVVAGDATKPMIAEAIEAIYSNKGVKVKKVNTVCVKPQPTRIFRGKRKGRTAGFKKAIVTFVDGHSIG

SEQ ID NO: 55307 - protein, 222 aa, Chlamydia trachomatis
MVLLSKFDFSGKESGKVELPDAFFAEGKEQSVKDYLVAIQANKRQWSACTRGRSEVSHSTRKPFRQKGTGNARQGCLAAPQFRGGGIVFGPKPKFDQHVRINKKERRAAIRLLLAQKIQTGKLIVADNSVFISSLNAPKTKEALRFLKECNVECRGVLFVDGLDHVGSNENLRLSVRNLAAVRGFTYGENINGYDIAAARNIVVSEKALELLVENLVSTTKD

SEQ ID NO: 55308 - protein, 221 aa, Chlamydia trachomatis
MRSQLSLIGKKEGMMHVFDKNGNLVACSVISIEPNVVAQLKTASSDGYNAVQMGADAVKAPEKTIEKRFSKALLGHFKKSGGCAFRVLKEVVVSEEAVQSVSLGDEFGVEIFDGVSNVDVCGISKGKGFQGVMKKFGFRGGPKSHGSGFHRHAGSIGMRSTPGRCFPGSKRPSHMGCDRVTVKNLEVVKVDLDRKVMLVKGAIPGFKGSVVVVKRSCGVEG

SEQ ID NO: 55309 - protein, 280 aa, Chlamydia trachomatis
MTNIHPTAIVEDGAQIGNNVTIEPYAIVKKNVKLCDDVVVKSYAYIDGFTTIGRGTTIWPSAMIGNKPQDLKFKGEKTFVEIGEHCEIREFAMITSSTFEGTTVSIGNNCLIMPWAHIAHNCSVGNNVVFSTHVQLAGHVQVGDCVTIGSMVGVHQFVRIGSYAMVGAMSGIRRDIPPFTIGTGNPYALGGVNKVGLQRRRVPFETRLALIKTFKRVFRSGESFQDSLGSVLEDFGDVPEVRHFVEFCRQPSKRGIERGIDCEASLDEPIDKKEGAFVES

SEQ ID NO: 55310 - protein, 153 aa, Chlamydia trachomatis
MSEKPVLGIQDIQNLLPHRYPFLLVDKILSYDLNTRSIVAQKNVTINEPFFVGHFPEAPIMPGVLILEALAQAAGVLLGIILENDRDKKIALFLGIQKAKFRQPVKPGDVLILKAEFSLISAKGGKAIAQAFVGSQIVAEGELSFVLVKKESI

SEQ ID NO: 55311 - protein, 291 aa, Chlamydia trachomatis
MSRFCMLGRAQRTLKRKVCYSGVGVHFGKPAMLTLEPAEENTGVVFSRHAASGQYIPARLANVCGTGRSTTLSSQGGVVSTVEHLLAALYSCGVDNVRIHCSEDEIPIGDGSSQVFVDLIDQAGVEEQGQTVPIARLTHPVYYQHQDTILAAFPSEEFKISYTLHYSHNSAIGTQYRSQVISEESFRKEIAPCRTFALYNELCFLMERGLIGGGCLGNAVLFKDDSVISLGKLRFPDEPVRHKMLDLIGDLSLIGKPFLAHIIAVGSGHSSNIALGNKILEALQYEQELVK

SEQ ID NO: 55312 - protein, 542 aa, Chlamydia trachomatis
MFKSVLYIGLSWVLVCFAQPDISTLASVICCMCGYGLLWRGLLSLVDSSSWRKIWCLAFFWTWSVEGFHFSWMLEDFYVGTSIYFVWCLLISYLAVTFASFSCLVVLCFRKQYWGALFWLPGVWVAIESVRYYGLLSGVSFDFIGWPLAATAYGRQFGSFFGWAGQSFVVIATNLGCCSVLVFRKSFSYGLWLVCCAFPYFLGGTYYEYVRRHFSNEEVLRVAIVQPGYSPHMQGARTASAIWSNLVSLCQGICPPVDVIVFPEVSVPFGLHRQAYSFHENQQVLESLVPNKFWNEFFTNLDWIRALSERFQCAVIMGMERWEDKNGVMHLYNAAECLSLQGEVTSYDKRILVPGGEYIPGGKFGFSLCKAFFPEFALPFQRLPGEKSGIVQITERIKAGISICYEETFGYAILPYKRQKADILVNLTNDGWYPHSRLPLVHFYHGVLRNQELGMPCIRACHTGVSAAVDSLGRIVGVLPWESKTCPVCPDVLQVSVPVYSYPTIYAKFGDAPLLFVAVSSVLGVVGYFLKRRGKTLTGSDI

SEQ ID NO: 55313 - protein, 159 aa, Chlamydia trachomatis
MRKNIKDKKKTVSASCINDHIYKIFPNDLNTNNTIFGGLLMSLLDRLALVVAERHCESICVTALVDAVRFYAPAYMGENLICCASVNRSWRTSLEVGVKVWAENIYKQEQRHITSAYFTFVAVDENNSPVEIPELVPETQEEIRRFHEADQRRASRLKL

SEQ ID NO: 55314 - protein, 250 aa, Chlamydia trachomatis
MVLLKDIEFVCLDCETTGLDVKKDRVIEFAAIRFTFDEVIDSVEFLIHPERAVSAESQKIHKISDAMLKDKPKFSEVFSTIKGFFKERDYIVGHHVGFDLQVLSQESERLGETLLPKQHYVIDTLRLAKEYGDSPNNSLEALARHFNVPHQGNHRAMKDVEMNVKVFKHLTKRFRTLSQVTHILSKPIKMKYMPLGKYKGRLFTDIPLEYLLWASKMDFDQDLLFSIRSEIKSRKKGTGFTQANNPFLGL

SEQ ID NO: 55315 - protein, 151 aa, Chlamydia trachomatis
MRIVLHNPDIPQNTGNIGRTCVALGAELILVRPLGFSLADKFVKRAGMDYWDRLSLSVVDSLEEALRGIPREKIFCLTTKGSSYYGERELPLDGTYIFGAESRGLPQTVLDAYSSQCLYIPMIEGTRSLNLATSVGIVMYEVARQNYQNLF

SEQ ID NO: 55316 - protein, 582 aa, Chlamydia trachomatis
MKYRTHKCNELSLNHVGEHVRLSGWVHRYRNHGGVVFIDLRDRFGITQIVCRQEENPELHRLMDQVRSEWVLCVEGLVCARLGGMENPNLVTGSIEVEVSHLEVLSRAQNLPFSISDEHINVNEELRLTYRYLDMRRGDIVDRLMCRHKVMLACRQYLDEQGFTEVVTPVLGKSTPEGARDYLVPSRIYPGNFYALPQSPQLFKQILMVGGLDRYFQIATCFRDEDLRADRQPEFSQIDMEMSFGGPEDLFPIVEELVTRLFAVKGIELSIPFQRMTYQEAKEFYGTDKPDLRFGLRLKNCCEYAKKFSFSIFLDQLAQGGTVKGFCVPGGADISRKQLDVYTDFVKRYGAMGLVWIKNQDGGISSNVAKFASEEVFHEMFEAFEAKDQDILLLIAAPEAIANQSLDHLRRLIAKERQLYDAEQYNFVWITDFPLFAKEEGELCSEHHPFTAPLEEDIPLLDKDPLSVRSSSYDLVLNGYEIASGSQRIHNPDLQNKIFSLLRLSQESVKEKFGFFIDALSFGTPPHLGIALGLDRIMMVLTGAETIREVIAFPKTQKAGDLMMSAPSEILPIQLKELGLKL

SEQ ID NO: 55317 - protein, 428 aa, Chlamydia trachomatis
MSNVLPKGVFDIFPYVTNSKNLWRNSFLWKTVEHAAHRICNLYGFDEIRTPVFEKTETFLRVGEHSDIVKKEVYTFLDKKGRSLTLRPEGTAAVVRALLDHSADMRKDNKIYYILPMFRYERQQSGRYRQHHQFGLEAIGVRHPLRDAEVLSLLWDFYAAVGLKHMQIQVNFLGGRKTRARYDEALREFFRKDLDKLSTLSQERFHANLLRILDSKEPEDQAFIEQAPSILDYVDDQDLNYFDSVLAELKVLGIPYKINPRLVRGLDYYTDLVFEAVTVVGDHSYALGGGGRYDELVAQSGGPAMPAFGFGVGLERVIQTLLEQGAALPTAPRRLRLIPMDESADAFCFSWAKHLRHLGVATEVDWAHKKPKTALKDAADQQVGFVCFVGEQELSTKQFIVKDMSLHQSFSGAQQDVEQRLVYEVQNA

SEQ ID NO: 55318 - protein, 1237 aa, Chlamydia trachomatis
MTWIPLHCHSQYSILDATCSIKKFVAKAVEYHIPALALTDHGNLFGAVDFYKTCKQNAIKPIIGCELYVAPSSRFDKKKERKSQVANHLILLCKDEEGYRNLCLLSSLAYTEGFYYFPRIDRELLKQHSKGLICLSACLSGSIAQAALESEEALEKDLLWYQDLFQEDFFSEVQLHKSSEEKIALFEEEWLRQNYYQFIEKQLKVKDAVLTVSKRLGISSVATNDIHYLDPDDWLAHEILLNVQSREPIRTAKQNTYVPNPKRKTYPSREFYFKSPQEMAELFADHPETISNTLIVADRCNLELDFVTKHYPIYVPEDLQKKGSYSEEERYNASSAFLEQLCEQGLKTKYTPELLGHIAQKFPEKDPLTVVKERLSLESTIIISKGMCDYLLIVWDIINWAKDHGIPVGPGRGSGAGSVMLFLLGITEIEPIRFDLFFERFINPERLSYPDIDIDICMIGREKVINYAIERHGKENVAQIITFGTMKAKMAIKDVGRTLDTPLSKVNLIAKKIPDLNATIASALESDPDLRQLYIDDAEAAEIIDMAKKLEGSIRNTGVHAAGVIICGDPLTNHIPICVPKDSSMISTQYSMKPVESVGMLKVDFLGLKTLTSIHVATKAIYKKTGILLQAATLPLNDRNTFSLLHQGKTMGIFQMESRGMQELAKNLRPDAFEEIIAIGALYRPGPMDMIPSFINRKHGKENIEYDHPLMEPILKETFGIMVYQEQVMQIAGSLAKYSLGEGDVLRRAMGKKDHEQMVKEREKFCSRASANGIDPSIATTIFDKMEKFASYGFNKSHAAAYGLITYTTAYLKANYPKEWLAALLTCDYDDIEKVGKLIQEAHSMNIPVLPPDINESGQDFEATQEGIRFSLGAVKGVGVSIVDSIVEEREKNGPYRSLQDFVQRSDFKKVTKKQLESLVDAGSFNCFEPNKDLAIAILNDLYDTFSREKKEAATGVLTFFSLNSMTKDPVKVTISPENIVRRSDKELLKREKELLGVYLTAHPMDAVKHLLPFLSVVQSKDFEGLPHGSVVRTVFLIDKVTTKISSVEHKKFALLQVSDEEDSYELPIWSDMYAEYQDLLEEDRLIYAILTIDRRSDSLRLSCRWMRDLSSVNDTVITECDEVYDRLKNQKIYSSTKKSTGGQSQAMVKKEEPKAIPPVTISLDLNRLRHSHLFTLKGLIRKYSGSRALSLVFTKDNQRIASISPDSDFFVTEDISAFLQEIETTDIPARILATAV

SEQ ID NO: 55319 - protein, 303 aa, Chlamydia trachomatis
MHIIMKTILATLCLILCASCCSKGACETRIKHTFSEKKFQKYSPVPKHPLSEQTHLYAKSCSIELEQTQLPTSTLTRYVSSTPTDSLSSKPLAAVYVLSHPLIQHKASLLRNKNTKSKIFRECLKEISLGVCYEATRDLALKNISIQTPLMQAECPHLTGTKIVVIPVLRAGLGMVDGFLALVPNAKVGLIGMSRNHETFQPSSYCCKLPEDIADCHVFIVDPMLATGGSASATIQLVKEHGAKNITLLNVLAVPEGIERIQKDHPDVTIYVASLDEKLNESAYILPGLGDAGDRLCGTSNPS

SEQ ID NO: 55320 - protein, 368 aa, Chlamydia trachomatis
MIPFRLHHLYTLLDSLFSSPIGESNRVAAYFKEHPALGSKDRQWINSRIFTILRHRRLLETLILEEGKEISSQTLVEKVEEGVTENIEHFQHLPWAVRYSVSDDLAECLSADYGEEEAIRLAKIFLEEAPCSIRVNTRRISVDKLQEVLPFSSQRGAAPSSLRFDKRYPLQHTRAFRRGLFEIQDESSQIITNAILVKDSDTVLDFCAGAGGKSLIFAQRAQHVTLHDSRPQALEEARQRLSRSGIKNFTIASLPLKQHGFSLVVVDAPCTGSGVFRRHPEKKLLFSKQLLKNNSVAQGKILKQAQTYVAPRGRLVYITCSLLKEENEKHTLQMEALGWKCIKEVKIPLISQQGDAFFSTHFIRRRDF

SEQ ID NO: 55321 - protein, 413 aa, Chlamydia trachomatis
MIMHKKTQSPSQEGFSVWSIGGSIFAMFFGAGNVVFPLALGHHFYHHTSYACLGMMLTAVLTPLLGLFAMMLYSGDYRSFFSSIGRMPGMIVMVAILCIIGPFGGVPRTIAVSYDTLASLGNTQSTLLPSLPWFSLVFCVLVYLFVCKLSKLIQWLGSVFFPVMLATLAWLIIKGLSIPSHAPSLENEPFSKQQAFVAGLTEGFNTMDLLAAFFFCSIVLVSIQQFVVQQDHKSSEEKPLEFHHIGKAEKYKLGMSFLLAAALLSLVYLGFAYCAARHAGALVNIQRGQILGRISAIIFGPNSFLTGICVFLACLTTAIAATGIFADFIARVVSSQKMSYSNAIIVTLVPSYLVSILSFENISKILLPILEVSYPALIALTCGVIAKKLWGFRQAKTLFYLVFVLTLLYKLSV

SEQ ID NO: 55322 - protein, 159 aa, Chlamydia trachomatis
MPFAKEADLQRTCWKCEGSVSACMPQCPYCSAFLQDPPVTNKGFSSCHITFPSEASQKSGDSDLFAVSSEDWEAVLNSQDSFETPVQEPTSSQWEWLQYWPTAALFLGCGFLAFSLIILLFSTDSGLVLCWPKNRSYIYALVGSFLAYRGYRSLPDSSK

SEQ ID NO: 55323 - protein, 465 aa, Chlamydia trachomatis
MNEAFDCVVIGAGPGGYVAAITAAQAGLKTALIEEREAGGTCLNRGCIPSKALLASAEIVAQIRHADQFGIHINGFSIDYPAMVQRKDTVVRSIRDGLNGLIRSNKITVFSGRGSLISSTEVKILGETPSVIKAQSIILATGSEPRAFPGVPFSQQSPRILCSTGVLNLKEIPQKMAIIGGGVIGCEFASLFHTLGSEVSVIEASQQILALNNPDISKTMFDKFTRHGIRFMLGASVSSIEDMGDRVRLTINGNIEEYDYVLVSIGRRLNTENIGLDKAGVICDERGVIPTDSTMRTNVPNIYAIGDITGKWQLAHVASHQGIVAARNIAGHKDEIDYSAVPSVIFTFPEVASVGLSPTSAQQQGIPVKVTKFPFRAIGKAVAMGESDGFAAIISHETSQQILGAYVIGPHASSLISEITLAIRNELTLPCIYETIHAHPTLAEVWAESALLAVDTPLHMPPTRK

SEQ ID NO: 55324 - protein, 308 aa, Chlamydia trachomatis
MSNSPESSTPKQSIPARFPKWLRQKLPLGKVFSRTDGTIKNKGLPTVCEEASCPNRTHCWSRHTATYLALGDACTRRCGFCDIDFTKKPLPPDPQEGEKIAASAKALGLKHIVITMVSRDDLEDGGADALARIITTLHIELPEATIEVLASDFEGNIDALHHLLDARIAIYNHNVETVERLSPLVRHKATYRRSLMMLEQAAQYLPDLMIKSGIMVGLGEQESEIKQTLKDLADHGVKIVTIGQYLRPSRRHIPVKSYVSPETFDYYRSVGEALGLFIYAGPFVRSSFNADAVFEAMSQRERLSASIQ

SEQ ID NO: 55325 - protein, 576 aa, Chlamydia trachomatis
MSLSSSRIRLLDSATVNQIAAGEVIENAASVVKELIENALDAGADEISIETLGGGKGQIVVRDNGIGMDADEVAVAIQRHATSKISHFADIFSLASFGFRGEALPAIASISKMEIHTAKVNGLGSKTLIEKGEPVCCEACPRQPGTTISVNSLFYNVPMRQSFQKSPQMDRLAIRRLLENSILSTEGIKWTWISERRQELNIAKNQGFTERVALVMGEAFVNEAFLIDKRQNELHLTGFLGSPSMHRSTRQGQRLFINNRAVESSFISRKVAEAYAWMLPAQRYPAFVLKLSVPPMWCDFNVHPQKTEVRLLQEGQIGALLVEAISEVLLHRSPSLEEKMVEPTMESPLIENGGLEIPSIRPVAISTPLSCPNFLQQSFVETEANRALCKEQENLALPIIERVRFLASLGKVILVEDSEGVHALFVQAARKHLFYISLLSKRSDSLLACQMFLVPPTVQMTKLEADFLQTRLESLAAQGIELCRISPDSFAIESAPPFIQEEELKEWIISLAHEGAFQVNESFEQLVENTVQKLAFSKNTRAFDHSWINVLWQIGKPEKAFDGETIRRLVLEEDFM

SEQ ID NO: 55326 - protein, 246 aa, Chlamydia trachomatis
MLVEVVIFYFLGIIAMSTPSSNNSKKPSASFNKKSRSRLAEIAAQKKAKAEDLEQKYPVPTEEETKKVLLEILQGLGDGLTLQQILGLSDVLLEEIYTVAYTFYSQGKYREAIGLFQILTASKPQCYKYILGLSSCYHQLKMYDEAAFGFFLAFDAQPENPIPPYYIADSLMQLDQPEESQNFLDITIDMCKNKPEYKVLKERCSIMKQSLDAMLKKEKRASAKSSESKTSTTKAKKSSPNKKKAK

SEQ ID NO: 55327 - protein, 436 aa, Chlamydia trachomatis [sequence omitted]

SEQ ID NO: 55328 - protein, 635 aa, Chlamydia trachomatis
MIHVTCNQEAFELPEGASAMDLASKMKNSHCFAGALINDQEKDLSTTLKDGDTVLFLTWDDPQGREIFLHTSAHILAQAVLRLWPSAQPTIGPVIDQGFYYDFANLSISEEDFPAIEAMAKAIAEEKLAISRQVFSDKEETLAYFSDNPFKIELITELPEEATISAYKQGEFLDLCRGPHLPSTAPVKAFKLLRTSAAYWRGDPSKESLIRIYGIAFPTTKELKEHLHQLEEAKKRDHRVLGTKLDLFSQQSYSAGMPFFHPRGMVIWNALIDYWKRLHQLAGYQQIQTPQLMSRELWEISGHWENYKENMYTLTVDEEDYAIKPMNCPGCMLYYKTQLHSYREFPLRIAEIGHVHRHELSGALSGLMRVRTFHQDDAHVFLTPEQVEEETLNILNLVSELYGTFGLDYHLELSTRPEQGTIGSDDLWELATEALKNALVKSQKPFIISPGEGAFYGPKIDIHVKDAINRTWQCGTIQLDMFLPERFDLKYTNPQGEKSTPIMLHRALFGSIERFLGILIEHFKGRFPLWLSPEHVRIITVADRHEARAQELAKYFTQQGILATVDQASESVSKKIRNAQNMQVNYMITIGDKELETQLLAVRTRDNRVLNDISVEHFTNTILEELRSLSLTSSL

SEQ ID NO: 55329 - protein, 255 aa, Chlamydia trachomatis
MKTIAVNSFKGGTAKTSTTLHLGAALAQYHKARVLLIDFDAQANLTAGLGLDPDCYDSLAVVLQGEKQISEVIRSIDSSGLDLIPADTWLERVEVSGSLAADRYSHERLKTILSTIEHQYDYVIIDTPPSLCWLTESALIAAQHALICATPEFYSVKGLERLATFIQGISSRHPLNILGVTLSFWNYRGKNNAAFTELIQKTFPGKLLNTRIRRDITISEAAIHGKPVFSTAPSARASEDYLKLTEELLFLLRDI

SEQ ID NO: 55330 - protein, 346 aa, Chlamydia trachomatis
MNKKRVLTGDRPTGKLHLGHWIGSIMNRLQLQNDPRYDCFFIIADLHTLTTKTRKEEVLHIDSHIYDVLADWLSVGIDPEKSAIYLQSAIPEIYELNLLFSMLTPLNHIMGIPSIKEMARNASINEESLSHGLIGYPVLQSADILLAKAHLVPVGKDNEAHVELTRDIAKTFNRLYGSVFPEPDILQGELTSLVGTNGQGKMSKSANNAIYLSDDEKTVQEKIRKMYTDPNRVHATTPGRVEGNPLFIYHDLFNPHKEEVEEFKTRYRQGCIKDVEVKARLAEEINLFLNPFREKRSEFVAQPKILEEALQKGTEKMRSVARETMEEVHNNLGLSRKWRSILASSK

SEQ ID NO: 55331 - protein, 424 aa, Chlamydia trachomatis
MFDVVISDIEAREILDSRGYPTLYVKVITNTGIFGEACVPSGASTGIKEALELRDQDPKRYQGKGVLQAVANVEKVLLPALQGFSVFDQITADAIMIDADGTSNKEKLGANAILGVSLALAKAAAATLERPLYRYLGGAFSHVLPCPMMNLINGGMHATNGLQFQEFMIRPISAPSLTEAVRMGAEVFHTLKKILQNRQLSTGVGDEGGFAPQLASNSEALDLLLAAIEKAGFIPGEDISLALDCAASSFYNTQDKTYDGKSAADQVAVLTELCDRYPIDSIEDGLAEEDFEGWKLLSETLGDRIQLVGDDLFVTNSALIAEGIAQGLANAVLIKPNQIGTLTETAEAIRLATTQGYATILSHRSGETEDTTIADLAVAFNTGQIKTGSLSRSERIAKYNRLIAIEEEIGPEAVFQDSNPFSKA

SEQ ID NO: 55332 - protein, 263 aa, Chlamydia trachomatis
MEITDAHVHLSSEEFIEDFGEVCLRGKTAGVTRVVNVTTTKAELLRSFAYAEQYPSWLFYHVAGTPPQDAQEDIEEDFQEFCRAAEGGKLAAIGEVGLDYLFAVQESEQERQKEVLHRYLQLALQHELPLVVHCRGAFEDFFHILDHAYRADKRARPGMLHCFTGTYEEAKELLARDWYISISGIVTFKNAQGLRDLVKEIPLERLLVETDAPYLAPTPLRGKRNEPANIIYTLMQIAEIKGIPLNELQEAVSANVQRWLRGS

SEQ ID NO: 55333 - protein, 240 aa, Chlamydia trachomatis
MTKFKYSPFFCTSVAVHIVLGGILFFSSAQKPKPKLHPFKERIVHLPPEPKMTCPTQTPSAPSSHQTSTPLPPPKKVNNIPPPTSNKPSKTPLTHFQSRSPHPPTKPTPSREKQQATLKKLAQLAHQLAEEAASQETHIAQLSWPTQVQVSTDTESCQQEAFCALFQQYVCLPFPGEVRIKLEFSKEGRLLICSILSAISPTDKQHIIKQIQQIPFQTFFNTYKPSKNIVFHIRLQGNSA

SEQ ID NO: 55334 - protein, 195 aa, Chlamydia trachomatis
MGSLVGKQAPDFSGKAIVCGEEKEISLSDFRGKYVILFFYPKDFTYVCPTELHAFQDRLGDFEERGAVVIGCSVDDIETHSRWLAVERRAGGIQGTQYPLLADDSLEISKAFGVLNPEGSVALRATFLIDKDGVIRHAVINDLPLGRSIEEELRVLDSQIFFENHGMVCPANWQSGERGMVPSEEGLKEYFQTID

SEQ ID NO: 55335 - protein, 209 aa, Chlamydia trachomatis
MKILIASSHGYKVRETKAFLKKIGEFDIFSLVDYPSYTPPKETGETPEENAIQKGVFAAQTFRCWTIADDSMLIIPALGGLPGKLSASFSGEHASDKDHRKKLLEEMLLLENPIDRSAYFECCVVLVSPFGKIFKAHASCEGTIVFKERGSSGFGYDPLFSKHDYKQTYAELPEEIKNQVSHRAKALAKLQPYVEMAFANHLLARNESL

SEQ ID NO: 55336 - protein, 634 aa, Chlamydia trachomatis
MLTSELNAAQVTAVTAPLQPVLVLAGAGAGKTRVVSHRILYLIEEAQLDPSQILAITFTNKAAKELNERVLTQCNFPDYRGIPMVSTFHSLGVYILRRSIQLLDRQSNFAIYDQSDSEKLIKQCLRKLNLDNKLCNAMQFTISQAKNRLQDPEDLDSREYPDPARAVYTEYQEQLRAANALDFDDLLFLTEKLLRIPEIQQEYSNLWKALLIDEYQDTNHAQYLIAKRLAASHNNIFVVGDPDQSIYSWRGANISNILNFEQDYPKALVVRLEENYRSCGTILEAANALIQNNSARLDKTLRSVKGPGDKIFCFTGKNDRDEAEQVLEEISNLHSYKDIPLSHICILYRTNFQSQSFEAALLKRGYPYEIIGGISFYKRKEIQDILAFLRLFSNNYDMAAFERTIGLKKCGIGATTLSSLMSYAKSMDLPILQACWDVLEKKPIRLTKKQQQGLFSYLTHFHQMEKLYGNCDLHEFINETIRITDYLAILKEDPETYDDRKNNLEQLLAETQIWGKSSENLPNFLEDLALKSSADETASSHDRLKLMTIHNSKGLEFPVVFLVGLEENLLPHANSKGMHENIEEERRLCYVGITRAQEYLYLSRAKTRFLWGTERTMVPSRFISELPRALLKFV

SEQ ID NO: 55337 - protein, 159 aa, Chlamydia trachomatis
MIQATGIVAIDPRGVMGGAGKLPWNYPEDLRFFSETIQDHPIIMGRKTWESLPDRYKCGRTVIVFSRQHSCAQGIWISSLVEYEKLSLNSPFLIGGAELFDWFFQYNLLKSCFVTHIKREYQGDTFFPVERLSGWKRESVLKTEDFNIYHYENYANQNP

SEQ ID NO: 55338 - protein, 450 aa, Chlamydia trachomatis
MTTWNFVCLGLGSNLGNRHEYIKRAYESLKKAGIRNLKSSVILETKALLLEGSPKEWDLPYFNCVAIGETQLSPDELVKEIKMIENRLSRDSSLKWGPRSIDIDVLLYGDESYSCCSERCIIPHPRLLERPFLLSMMASLCPYRYFRLRGSPYDGKTFAELAAIYPLTEKDVLGSFAPTTQIMGIVNVTDDSISDTGLFLEAKRAAAHAERLFAEGASIIDLGAQATNPRVRDLGSVEQEWERLEPVLQILAESWKDAKQYPDVSIDTFRPEVIRRAIQVFPIRWINDVSGGSLEMAHLAKDLGLRLLINHSCSLPPRPDCVLSYEESPVTQMLRWGESQLETFAQIGLDTSWQVVFDPGIGFGKTPVQSMQLMEGVAKFKHILKCPVLIGHSRKSCLSLLGRFSSQDRDWETIGCSVALHNQGVDYLRVHQVEGNRRVLAAAAWSGMPV

SEQ ID NO: 55339 - protein, 571 aa, Chlamydia trachomatis
MRMDTLDSQAADAAQEEEIQRKLEELVTLAKDQGFITYEEINEILPPSFDSPEQIDQVLIFLAGMDVQVLNQADVERQKERKKEAKELEGLAKRSEGTPDDPVRMYLKEMGTVPLLTREEEVEISKRIEKAQVQIERIILRFRYSTKEAVSIAQYLINGKERFDKIVSEKEVEDKTHFLNLLPKLISLLKEEDSYLEERLLALKDPALSKQDQAKLNDELEKCRIRTQAYLRCFHCRHNVTEDFGEVVFKAYDSFLQLEQQINDLKVRAERNKFAAAKLAAARRKLYKREVAAGRTLEEFKKDVRMLQRWMDKSQEAKKEMVESNLRLVISIAKKYTNRGLSFLDLIQEGNMGLMKAVEKFEYRRGYKFSTYATWWIRQAVTRAIADQARTIRIPVHMIETINKVLRGAKKLMMETGKEPTPEELGEELGFTPDRVREIYKIAQHPISLQAEVGDSGESSFGDFLEDTAVESPAEATGYSMLKDKMKEVLKTLTDRERFVLIHRFGLLDGRPKTLEEVGSAFNVTRERIRQIEAKALRKMRHPIRSKQLRAFLDLLEEEKTGSGKIKSYKN

SEQ ID NO: 55340 - protein, 419 aa, Chlamydia trachomatis
MTWGFLKQGIFRERSRVGKQKFYHCVSRYFHYLPPVLAILLPVGSWPFLSEQQWRYSYFLFPVVSSLGWLFAIGLRERQLRAAAGQLLETKIRKLTERDEGLKNIRETIEKRQKEANRLKLHNDKLVERLGQAREVVIQAKGRYDHMEEKSRKLHEENKQLQMQLEAAVRERNEKILENQELRQELKETLAYQQELHDEYQATFVEQHNMLDKRQAYIGNLEAKVQDLMCELRNLLQLEVGAKTELPGRPMASRDVVAQLVLEFRKIVFRVETTEAADSLTALRYTRTDPSAHNYSLACRQLFDDLREENLGMLFIYAPFAQRVLFANALFKDWTGHGLEDFLNKEGDVVLEGFAQWERDLLTESRTERSGKIVIKTKAFGATPFYYCVVTLDKGPLAEHVLGVLYPAKASFFTNLSYI

SEQ ID NO: 55341 - protein, 102 aa, Chlamydia trachomatis
MGEIMAPRKPSKKVGPQKRPSAEKRVITSKKKQLRNQSFKSRVKTTLKKFELAVQSGDVASISAGLSSVYSIADKAVKRGIFKKGKADRVKARASGRACPTA

SEQ ID NO: 55342 - protein, 548 aa, Chlamydia trachomatis
MKKLKSNRKRGVMSKDDEGSLVRSLFNLLSGTFFSRLTGMLREIVMATYFGADPLVASFWLAFRTIFFLRKLLGGPILGLAFIPHFEFLRAQNISRAAFFFRSFSKFFCYSAIVFTLVIELGLGVWCSCVTGSLFDTLLLTIILLPSGIFLMMYTVNSTLLHCEKKFLSVGLAPSVVNVLWIGTVFLARNYNPRNRIFGLAIVLVIGFILEWAVTLPGVIKFLGRSTETPKERDSIRALIAPLSLGLLSMGIFQLNLLCDMWLARYINEVGPLYLMYSVRIQQLPVHLFGLGVFTVLLPAISRCVQDNEHQQGYDLLRFSLKLTVAVMLVMTMGLLLLALPGVRVLYEHGVFPTTAVHAIVEVLRGYSGSIIPMALAPLVSALFYARRNYKVPMLVGIAAAVANIVLNVIGCLVFKHVSVLAYATSLASWGQLVILWYCAGKSLPTYKGLMWRTFRESGKTVFTTVLAAFITVGINVFTNTTYIVFIHPLTTPIKPLTSLLDQCGVFFAESALFLAILFGLAKVLKAEDLMNLTSFQYWKGHQSILRN

SEQ ID NO: 55343 - protein, 288 aa, Chlamydia trachomatis
MFVLPPPQEPLLGAHTSAAGGLHNALYEGRDIGATTIQLFTANQRQWKRRSLTQNMIEQFQTALDETSLSYIMSHAGYLNNPGAPNPEILEKTRICMYQEIADCIALGISFVNFHPGAALSDSKESCLDRAITSFSQMAPLFETNPPLVVLLETTAGQGSLIGSSFEELAYLIQGIKAHIPVGVCLDTCHIFAAGYDISSPEGWEQVLKHFDEVIGLSFLRAIHLNDSIFPLGKNKDRHAPIGEGCIGSESFCFLMRDERTRKLPKYLETPGGPDLWTKEIRYLQKVS

SEQ ID NO: 55344 - protein, 209 aa, Chlamydia trachomatis
MARYCGPKNRIARRFGANIFGRGRNPLLRKPNPPGQHGMQRKKKSDYGLQLEEKQKLKACYGMILEKQLVKAYKEVVHKQGNVAQMFLEKFECRLDNIVYRLGFAKTIFAAQQLVSHGHVLVNGKKVDRRSFFVRPGMQISLKEKSRRLAIVTESLENKDQSSLPAYLSLDKAAFKGELVVSPELDQISSQLPLPVNVSVICEFLSHRT

SEQ ID NO: 55345 - protein, 328 aa, Chlamydia trachomatis
MEKNYYALAYYYFGPVSNPHEEIALHKQLFKTMDVSCRIYISEEGINGQFSGYQPDAERYMAWLKQRPDFATVKFKIHHIKENVFPRVTVKYRKELVALGCSVDTSKQGKHISPEEWHEKLQENRCLVLDVRNNYEWKIGHFENAVLPDIETFREFPAYADRLAQEHAPETTPVMMYCTGGIRCELYSALLLEKGFKEVYQLDGGVIAYGLKMGTGKWKGKLFVFDDRMAVPINEADPNVSPISKCSLCDIESDTYYNCANTDCNNLFLCCESCITSQKGCCSEECSQAPRIRTFSAERGNKPFRRKHLCPTIEQTRCCLREKDNQPA

SEQ ID NO: 55346 - protein, 292 aa, Chlamydia trachomatis
MDDFNVYRSKIEKRLRDSLEDFGKTQSGLRNPIEYALLGGGKRVRPLLVCLFADSIQKRRDVLDTAIAVEYIHTSTLIADDLPCMDNDDMRRGKPSVHKAFDEASALLASYALIPAAYARIRKNAKALKEVVSVQREIEDAYEDVLDLIELRFGVEGVLGGQYEDVFFQSFTEESVINIINKKTSALFEIACVSGWLFGGGAREKTPLVIEFARNFGILFQIGDDLADLSQDNQEEKHMNYALLFGEQAAKDLLNRSFNSCIEILHLLKEKGVKPLEELCKKVFMGGNKHSL

SEQ ID NO: 55347 - protein, 218 aa, Chlamydia trachomatis
MFKYQTMLYQELSMVLASSLFSPEEFLYPEIVSQAEFVWSILTLLEQKLSSHSFSGIQGHLEEGVYLKNKETIEIQEGAYVESGAYLCGPCIIGPYTQVRHGAYIRGGVITGAHCVVGHCSEIKNSYLGHYAKAAHFAYVGDSVLGSRVNLGAGVRCANFRLDGGNIFLRYSGDRYDTQRKKLGAFLGKGVSIGCNTVLNPGCCVVSATKILPNQTIY

SEQ ID NO: 55348 - protein, 159 aa, Enterobacter cloacae
NSKVWLQADDVDVKPWLAAQNISETARFSLEGWLTLTKGEFASGDIWLKQGGASWKGEKQQHQLSVDNLTAHVTQEKGGWQFAIPDTRITMDGKSWPRGAVTLAWMPEQDVGGTASKRSDELAIRASNLDLAAIEGLRSMAAKLSPDLGEIWLATQPSG

SEQ ID NO: 55349 - protein, 118 aa, Enterobacter cloacae
SHALVDMAHVAGLIAAGVYPNPVPHAHVVFITTHKTLEGPRGGLILAKGGDEELYKKLNSAVFPSAQGGPLMHVIAAKTVSLKEAMSPEFKVYQQQVANNAKRLVKCPNRGYKLVSGG

SEQ ID NO: 55350 - protein, 38 aa, Enterobacter cloacae
NADDLTKSYVSAGFKKIHLDCSMSCEDDPVPLTDAIVA

SEQ ID NO: 55351 - protein, 102 aa, Enterobacter cloacae
AGRVIIVISHFDRKSILTTDTHTLHIEEILELLPFRYPFLLVDRVLDFEEGRFLRAVKNVSVNEPFFQGHFPGKPIFPGVLILEAMAQATGILAFKSVGTLD

SEQ ID NO: 55352 - protein, 38 aa, Enterobacter cloacae; identical to SEQ ID NO: 55350

SEQ ID NO: 55353 - protein, 102 aa, Enterobacter cloacae; identical to SEQ ID NO: 55351

SEQ ID NO: 55354 - protein, 149 aa, Enterobacter cloacae
TEGALRRRRRPASVFPDRPLRVTVRRVQRASTAGVLIFIVLLLGTVAFLVGTTTGLHLLFNAANRWVPGLEIGQVTGGWRDLRLKNIRYEQPGVAVNAGEFHLAVKLGCLRDSKLCVNDLSLKDVNVGNRSEKMPKPAPVEEEDSRPLK

SEQ ID NO: 55355 - protein, 85 aa, Enterobacter cloacae
MLDADSVMSGDCLSGLVRLMEANPNAGIIQSSPKASGMDTLYARCQQFATRVYGPLFTAGLHFWQLGESHYWGHNAIADVSASCH

SEQ ID NO: 55356 - protein, 65 aa, Enterobacter cloacae
MYDGALIARALAGRRVSPEVSRIMAKEQTDRTTLDLFANERRPGRPKTNTVSRDEQLRINKRNQL

SEQ ID NO: 55357 - protein, 81 aa, Enterobacter cloacae
NVPVLWDQYNNIVGWETVPAWPHPTLYIRSGNSPYVTERTRDTLMAKFPQIAHHVIADAEHWMHAEKPDSMTRAIRRYIAN

SEQ ID NO: 55358 - protein, 46 aa, Enterobacter cloacae [sequence omitted]

SEQ ID NO: 55359 - protein, 91 aa, Enterobacter cloacae
  MISC_FEATURE (61)..(61): X=any amino acid
VVKLAFPRELRLLTPAHFTFVFQQPLRAGTPQITILGRQNSLGHPRIGLTVAKKNVKRAHXRNRIKRLTRESFRLRQHELPSMDFVVVAKK

SEQ ID NO: 55360 - protein, 149 aa, Enterobacter cloacae
AEEIQLDIRGNIYANACQVDSATRNLTVNLGKANTGDFKDVGDTGQWTSFDLTLSKCPTTAVLATATFHGQPDSIHPTKFASSGTAKGLALELADPQDQISLAPDASFSVLINQDNHTADFPLAARYYATSLPVTAGTFSSVVQVTFIY

SEQ ID NO: 55361 - protein, 114 aa, Enterobacter cloacae
MIKQRTLKRIVQATGVGLHTGKKVTLTLRPAPANTGVIYRRTDLNPPVDFPADAKSVRDTMLCTCLVNEHDVRISTVEHLNAALAGLGIDNIIVEVDAPEIPIMDGSAAPFVYL

SEQ ID NO: 55362 - protein, 80 aa, Enterobacter cloacae
AVVAPVWAATQTVTLSVPGMTCASCPITVKHALSKVEGVTKTDVSFDKRQAVVTFDDAKTNVQKLTKATEDAGYPSSLKR

SEQ ID NO: 55363 - protein, 267 aa, Enterobacter cloacae
MSKRRVVVTGLGMLSPVGNTVESTWKALLAGQSGISLIDHFDTSAYATKFAGLVKDFNCEDIISRKEQRKMDAFIQYGIVAGVQAMQDSGLEITEENATRIGAAIGSGIGGLGLIEENHTSLMNGGPRKISPFFVPSTIVNMVAGHLTIMFGLRGPSISIATACTSGVHNIGQAARIIAYGDADAMVAGGAEKASTPLGVGGFGAARALSTRNDNPQAASRPWDKDRDGFVLGDGAGMIVLEEYEHAKTRGGKIYAEIVGFGMNNDA

SEQ ID NO: 55364 - protein, 91 aa, Enterobacter cloacae
MFCVIYRSTSRDQTYLYVEKKDDFSRVPEELMKNFGRPQLAMLLPLDGRKKLINADLDKVKTALSEQGYYLQLPPPPENLLKQHLEANGKK

SEQ ID NO: 55365 - protein, 109 aa, Enterobacter cloacae
MQFNIPTLLTLFRVVLIPFFVLAFYLPVVWAPFACALLFLIAAVTDWFDGYLARRWNQSTRFGAFLDPVADKVMVVIAMVLVAEHYHTWWVTLPAATMIGREIIISALR

SEQ ID NO: 55366 - protein, 295 aa, Enterobacter cloacae
ADGCVDLVLTNALIVDHWGIVKADIGVKNGRIFAVGKAGNPDIQPGVTIPIGAATEVIAAEGKIVTAGGIDTHIHWICPQQAEEALVSGVTTMIGGGTGPAAGTNATTCTPGPWYIARMLQAADTLPVNIGLLGKGNGSSPDALREQIAAGAIGLKIHEDWGATPAAINCSLEVADEMDIQVALHSDTLNESGFVEDTLAAIAGRTIHTFHTEGAGGGHAPDIITACAHPNILPSSTNPTLPYTVNTIDEHLDMLMVCHHLDPDIAEDVAFAESRIRRETIAAEDMLNDIGAVSL

SEQ ID NO: 55367 - protein, 220 aa, Enterobacter cloacae
LNDQLPVLKRGHLWVMALLYLAHFGSFIGFSAGFAMLSKTQFPDVQILQFAFFGPFIGALARSLGGMVSDRLGGTRVTLVDFVVMAVFCALLFLTLPADGQGGNFIAFFGVFMVLFLTAGLGSASTFQMISVIFRKLTMDRVKAQGGSEEQAMREAATDTAAAAGFISAIGAIGGFFIPKAFGISLDLTGSPAGAMKVFLVFYIACVVITWLVYGRNTKK

SEQ ID NO: 55368 - protein, 317 aa, Enterobacter cloacae
MTESFAQLFEESLKEIETRPGSIVRGVVVAIDKDVVLVDAGLKSESAIPAEQFKNAQGELEIQVGDEVDVALDAVEDGFGETLLSREKAKLSEAWITLEKAYEEAETVVGVINGKVKGGFTVELNGIRAFLPGSLVDVRPVRDTLHLEGKELEFKVIKLDQKRNNVVVSRRAVIESENSAERDQLLENLQEGMEVKGIVKNLTDYGAFVDLGGVDGLLHITDMAWKRVKHPSEIVNVGDEITVKVLKFDRERTRVSLGLKQLGEDPWVAIAKRYPEGTKLTGRVTNLTDYGCFVEIEEGVEGLVHVSEMDWTNKNIH

SEQ ID NO: 55369 - protein, 234 aa, Enterobacter cloacae
DGHFTAIIGPNGCGKSSLLGTLSRLMTPAEGSVFLDGDQVQRFASKGVARRIGLLAQNATTPGDITVQELVSRGRYPHQPLFTRWRKEDDEAVNRAMQATGITGLAQQSVDTLSGGQRQRAWIAMVVAQETSIMLLDEPTTWLDISHQIDLLELLSELNRTQGYTLAAVLHDLNQACRTATHLICFADGEIVAQGAPKEIVTPELIERIYGMRCMIIDDPVAGTPLVVPLGKRA

SEQ ID NO: 55370 - protein, 82 aa, Enterobacter cloacae
MGILSWIIFGLIAGIQAKWIMPGKDGGGFIVTVILGIIGAVVGGWISTLFGFGKVDGFNFGSFAVAVIGALVVLFIYRKIKS

SEQ ID NO: 55371 - protein, 181 aa, Enterobacter cloacae
LRWQKELIAHFGSLYRLLTADLAQFKHVEGIGVAKYAQLRGIAELARRFYNVRMEKEDPILTPEMTREFLQSQLTDIEREIFMVIFVDNRNRVLKHSCLFAGTLSHVEVHPREIVREAIKVNAAGVILAHNHPSGCAEPSRADKEITERIIKCCQFMDIRVLDHLIIGRGEYISFAEHGWI

SEQ ID NO: 55372 - protein, 464 aa, Enterobacter cloacae
MKIKTRFAPSPTGYLHVGGARTALYSWLFARHNKGEFVLRIEDTDLERSTPEAIEAIMDGMNWLNLEWDEGPYFQTKRFDRYNAVIDEMLVAGTAYKCYCSKERLDELRESEMANGEKPRYDGRCRHDHSEHAADEPCVVRFANPQEGSVIFDDQIRGPIEFSNQELDDLIIRRTDGSPTYNFCVVVDDWDMEITHVVRGEDHINNTPRQINILKALNAPVPVYAHVSMINGDDGKKLSKRHGAVSVMQYRDDGYLPEALLNYLVRLGWAHGDQEIFSREEMIELFSLSSVSKSASAFNTDKLLWLNHHYINTMQPEYVATYLQWHIEQANIDTRTGPELADLVKLLGERCKTLKEIAESCRYFYEEFDEFDADAAKKHLRPVARHPLEVVRDKLAALSEWTAENVHQAIQATADELEVGMGKVGMPLRVAVTGAGQSPALDVTVHAIGKSRSVARINKALDFI

SEQ ID NO: 55373 - protein, 111 aa, Enterobacter cloacae
  MISC_FEATURE (63)..(63): X=any amino acid
LFKILSDETRLAIVMLLRESGELCVCDICAATSESQPKISRHMAILREAGLVLDRREGKWIHXRLSPHIPAWAAETIMTSWQCCGRMCVNGWINQPAPPAEKEKTHLHNHI

SEQ ID NO: 55374 - protein, 286 aa, Enterobacter cloacae
  MISC_FEATURE (3)..(3): X=any amino acid
VVXPRLPRAYATRLLTALRRQTMFGFPTWQLKSTSTEAGVVAPDERLPLGQTMVMGVQHAVAMFGATVLMPMLMGLDPNLSILMSGIGTLLFFFVTGGRVPSYLGSSAAFVGVVIASTGFNGQGINPNLSVALGGIIACGLVYTLIGLVVMKIGTRWIERMMPPVVTGAVVMAIGLNLAPIAVRSVSASPFESWMAVITVLCIGLVAVFTRGMIQRLLILVGLIAACMVYALLANVFGLGKPVDFTLLHQAAWFGLPKVTSPTFNTQAMMLIAPVAVILVAENLGH

SEQ ID NO: 55375 - protein, 179 aa, Enterobacter cloacae
MKLIRGIHNLSSAPHGCVLTIGNFDGVHRGHQALLQGLRKEGEARGLPVVVMIFEPQPLELFAGDKSPARLTRLREKLRYLAESGVDYVLCLRFDRRFAALTAQNFVSDLLVKRLGVQFLAVGDDFRFGAGRQGDFLLLQKAGLEYGFDVTSAMTFCEGGVRVSSTAVRQALANDDLDT

SEQ ID NO: 55376 - protein, 165 aa, Enterobacter cloacae
MDILVNNAGITRDNLLMRMKDDEWNDIIETNLSSVFRLSKAVMRAMMKKRHGRIITVGSVVGTMGNAGQANYAAAKAGLIGFSKSLAREVASRGITVNVVAPGFIETDMTRALTDEQRAGTLAAVPAGRLGDPKEIASAVAFLASDEAGYITGETLHVNGGMYMV

SEQ ID NO: 55377 - protein, 239 aa, Enterobacter cloacae
VALWAVWQQQGGKAPGLLAGHSLGEYSALVCAGVIAFADAVRLVELRGKFMQEAVPEGTGGMSAIIGLDDAAIAKACEESAEGQVVSPVNFNSPGQVVIAGHKEAVERAGAACKAAGAKRALPLPVSVPSHCALMKPAAEKLAVELEKITFNTPTISVVNNVDVKCETAPEAIRDALVRQLYSPVQWTKTVEFMAAQGVEHLYEVGPGKVLTGLTKRIVDTLTASAINEPEAMSAALSQ

SEQ ID NO: 55378 - protein, 197 aa, Enterobacter cloacae
EHRNILPAERDLSQLTGVSRITVRKAMQALEEEGVVTRSRGYGTQINNIFEYSLKEARGFSQQVVCRGQKPNTLWVNKRVVKCPEEVANHLSIPPDSEVFLLKRIRYVDDDAVSIEESWVPVGLIPDPDAIGISLYDYFRSQNIFPQRTRSRVSARMPDSEFQAHIKMDEKIPVLVIKQVALDQQHRPIEYSISYCR

SEQ ID NO: 55379 - protein, 278 aa, Enterobacter cloacae
GESGSGKSVTAMLAMRLLPEGSYRIHNGQVKLLGENVLTASEKQLRQWRGARVAMIFQEPMTALNPTRRIGKQMVEVIRQHQPLSRAEAHRRAITLLEEMQIPDAKQVMERYPFELSGGMRQRVMIALAFSCEPELIIADEPTTALDVTVQLQVLRLLKHKARASGTSVLFISHDMAVVSQLFDRMYVMYAGSVIESGATQTLIHRPVHPYSIGLLRCAPENGQPRDLLPAIPGTVPNLSQLPQGCAFRERCFAAGAKCSETPRLQPNGAEGQQAACW

SEQ ID NO: 55380 - protein, 247 aa, Enterobacter cloacae
MSSNFRHHLLSLSLLVGIAAPWAAFAQAPISSVGSGSVEDRVTQLERISNAHSQLLTQLQQQLSDNQNDIDSLRGQIQESQYQLNQVVERQKQILLQMDSLSSGGAAAQAQPAAGDQTGAATSAPAADASASTGAPVQSGDANTDYNAAIALVQDQSRQDDALAAFQNFVKKYPDSTYQPNANYWLGQLNYNKGKKDDAAFYFASVVKNYPKSPKAPDAISKVGVIMQDKVASARAKPVYRPSTSSR

SEQ ID NO: 55381 - protein, 239 aa, Enterobacter cloacae
FLPTVSSNNDVPLWNKLVAPLMAAAAGALTTSLFFHPHFSLSLPHYGQMQIADIFSGAIVVAIAIALGMVAVCCVPRLHRLMHKLKHPVLILGAGGLILGILGVIGGPVTLFKGLDEMQQLAFSQVFSVSDYLLFAVIKLAALVVAAACGFRGGRIFPMVFVGVALGLMLHEHVDAVPAAITVSCSILGLVLVVTRDAWLSLFMAAVVVPDSTLFPLLCIVMLPAWLLLAGKPMMMAWR

SEQ ID NO: 55382 - protein, 414 aa, Enterobacter cloacae
KSDLDSMANIDAQSSELTFKEAEISKLYTRCHPAYRTMLEKRRTLEEEKANSDDRVTAMPKTQKEIVRLTRDVESGQQVYMQLLNKQQELKITEASTVGDVRIVDPAITQPGVLKPKKALIILGSIILGLMLSIVGVLLRSLFNRGIESPQVLEESGINVYASIPVSEWQKSRDSVKTIKGVKRYKQSQLLAVGNPTDLAIEAIRSLRTSLHFAMMQAKNNVLMLTGVSPSIGKTFVCANLAAVVSQTNKRVLLIDCDMRKGYTHELLGTNNVNGLSEILLGKGEISQSAKPTTVPKFDLIPRGQVPPNPSELLMSERFTQLIEWASKNYDLVLIDTPPILAVTDAAVVGRHAGTTLMVARYAVNTLKEVETSLSRFEQNGIEVKGVILNSIFRRATGYQDYGYYEYEYKSDSK

SEQ ID NO: 55383 - protein, 183 aa, Enterobacter cloacae
MAYVDMLNKWNKAYNLTSVRDPNEMLVRHILDSIVVAPWLKGERFIDVGTGPGLPGVPLSIVRPESHFTLLDSLGKRVRFLRQVQHELKLENITPVQSRVEEFPAEPPFDGVISRAFASLNDMVSWCKHLPAENGRFYALKGQLPGDEIEQLPDGFAVESIEKLHIPQLDGERHLVIIKPNNF

SEQ ID NO: 55384 - protein, 232 aa, Enterobacter cloacae
SGSPAAIFCAVCYIVTLSMLVAGGHVEGISWYRARLFETVATLLIIFVLLYDVFRLYRDSHIKYEQSYQNSIRDPLTRLYNRSYFYESLKQALDIARPSRPVSVIVSDLDRFKRINDTYGHLQGDKVLQFVANLLMDSVRPQDIAARIGGEEFVLMMANTSSDAAYQVAERIRLNLSSFDNASSGGQLPEPITISMGVFTATSAAVAAETCVENADKAMYEAKETGRNRVVV

SEQ ID NO: 55385 - protein, 128 aa, Enterobacter cloacae
MRQQQGECPPGHAVITLAGNLPARAVIHAVGPVWHGGDQHEASILEEAYRNCLRLAADNGYKTMAFPAISTGVYGYPKAAAATIAVETVYRYLSLKPLPEKVIFVCFDDDTTHLYQRLLTQRRQELES

SEQ ID NO: 55386 - protein, 305 aa, Enterobacter cloacae
  MISC_FEATURE (10)..(10): X=any amino acid
  MISC_FEATURE (265)..(265): X=any amino acid
ADLKAKKLPXETEGATVVFLDEYKNKEGEPMGVIIQKKDGGYLYTTTDIACAKYRYETLHADRVLYYIDSRQHQHLMQAWTIVRKAGYVPDCVPLEHHMFGMMLGKDGKPFKTRAGGTVKLSDLLDEALERARRLVAEKNPDMPADELEKLANAVGIGAVKYADLSKNRTTDYIFDWDNMLAFEGNTAPYMQYAYTRVLSVFRKANIDESVLANATVTITEDREAQLAARLLQFEETLTVVARDGTPHVMCAYLYDLAGPFSGFXDHWAHRAADNDSVRNSCLKLAELTATTLDLGLHTLGMATI

SEQ ID NO: 55387 - protein, 205 aa, Enterobacter cloacae
MNMTSMTLDLPRRFPWPTLLSVVIHGAVVAGLLYTSVHQVIEMPAPAHPISVTMVSPADLEPPQVAPPPPQPVAEPEPEPEPEPVPEPPKEAPVVIHKPEPKPKPKPKPKPVKKVEERPKREERPVEPRATQTVENAAPSRPVMNNTAAAPKPTVSAPAGPRALSRNQPQYPGRAQALRIEGRVRVKFDVTADGRVDNVEILSAQ

SEQ ID NO: 55388 - protein, 187 aa, Enterobacter cloacae
MSHSSAPERENGAVITDWRPEDPAFWQQRGHRVASRNLWISVPCLLLAFCVWMLFSAVAVNLPKVGFTFTTDQLFMLTALPSLSGALLRVPYAFMVPVFGGRRWTAFSTGIMIVPCVWLGFAVQDTSTPFSVFVIISLLCGFAGANFASSMANISFFFPKAKQGGALGINGGLGNMGVSVMQLIAPL

SEQ ID NO: 55389 - protein, 331 aa, Enterobacter cloacae
INGMSCASCVSRVPNSLQAVPGVAQARVNPAERTALVMGSASAADLVQAVEKAGYGAEAIEDDAERRERQQETAIATMKRFRWQAIVALLVGIPVMVWGMMGDNMMVTDDNRTLWLVIGLITLAVMVFAGGHFYTSAWKSLKNRTATMDTLVALGTGAAWLYSMSVNVWPQWFPMEARHLYYEASAMIIGLINLGHMLEARARQRSSKALERLLDLTPPTARVVTDEGEKSVPLAEVQPGMTLRLTTGDRVPVDGKITQGEAWLDEAMLTGEPIPQQKTDGDAVHAGTVLQDGSVLFTASAVGSHTTLSRIIRMVARAQSSKPEIGQLADR

SEQ ID NO: 55390 - protein, 277 aa, Enterobacter cloacae
MKTKVQLSFMMFVEWFIWGAWFVPLWLWLSKSGFTAGEIGWSYACTAIAAILSPILVGSLTDRFFAAQKVLSALMFAGAILMYFAAQQTQFSTFFPLLLVYSLTYMPTIALTNSIAFANVDDVEADFPRIRVMGTIGWIASGLACGFLPQMLGYSDISDTNIPLLMTAASSALLGVFALFLPNTPPKSTGKLDFKVMLGLDALILLRDRNFLVFFFCSFLFAMPLAFYYIFANGYLTEVGMKNATGWMTLGQFSEIFFMLALPFFTKRFGIKKVLLL

SEQ ID NO: 55391 - protein, 388 aa, Enterobacter cloacae
LIDAGMLVTNDQGRSYDRFRERVMFPIRDKRGRVIGFGGRVLGDALPKYLNSPETDIFHKGRQLYGLYEAHSNNAEPPRLLVVEGYMDVVALAQYDINYAVASLGTSTTADHIQLLFRVTNNVICCYDGDRAGRDAAWRALETALPYMTDGRQLRFMFLPDGEDPDTLVRKEGKAAFEARMEQAQPLSTFLFNSLMPQVDLSTPDGRAQLSTLALPLISQVPGETLRIYLRQELGNKLGILDDSQLERLMPKQAENGAVRPAPQLKRTTMRILIGLLVQNPELAPQVPSLAGLNHEKLPGLGLFSELVNTCLSQPGLTTGQLLEHYRGTKEAATLEKLSMWDDIADKDIAEKTFTDSLNHMFDSMLDCRQEELIARERTHGLSSEERR

SEQ ID NO: 55392 - protein, 134 aa, Enterobacter cloacae
PKPVICALNGLQAGACANLGLGCDMVIAARSASFVMAFSKLGLVPDCGGTWAAPRVAGRARAMGLALLGDKLSAEQAQAWGMIWQVVDDEQLSTTAQQDGAHFASQPTFGLGLIKQAINAAETNTLDAQLDLER

SEQ ID NO: 55393 - protein, 345 aa, Enterobacter cloacae
  MISC_FEATURE (313)..(313): X=any amino acid
  MISC_FEATURE (318)..(318): X=any amino acid
TISAWPGAATIIARASAPSWRSARRTLRGNKMLNIRTVAVIGSGTMGAGIAEVAASHGHQVLIYDISSDAISRAIDGIRQRLASRVTRGKLSADAGSQILARLLPVTDIEALAAADLVIEAASERLEVKKALFARLAEICPPQTVLTSNTSSISVTAIAADVHHPERVAGLHFFNPAPVMKLVEVVSGLATSSEVADALCELSLNWGKQPVRCQSTPGFIVNRVARPFYSEAWRALEEQVAPPEVIDAALRDGGGFPMGPLELTDMIGQDVNFAVHCSVFNAFWQERRFLPSLVQQELVLAGKLGKKSGKGVXRLAGXQTAVQWVPAVKDSFRPMRVEIRRDGVT

SEQ ID NO: 55394 - protein, 222 aa, Enterobacter cloacae
  MISC_FEATURE (11)..(11): X=any amino acid
AEQMLGSYAPXIKVDSARSCGLYHGRLEKQTTFDPQAYWDEYQLDGLTIKTLPGVFSRDALDTGSKLLLSTLTPHTKGKVLDVGCGAGVLSTVLASHSPKVRLTLCDVSAPAVEASRATLAANGIEGEVIASNVFSDVTGRFDMIISNPPFHDGMETSLEAAQTLIRGAVRHLNSGGELRIVANAFLAYPKVLDETFGFHEVIAQTGRFKVYRTVMTRQAKK

SEQ ID NO: 55395 - protein, 188 aa, Enterobacter cloacae
MSKEKFERTKPHVNVGTIGHVDHGKTTLTAAITTVLAKTYGGSARAFDQIDNAPEEKARGITINTSHVEYDTPTRHYAHVDCPGHADYVKNMITGAAQMDGAILVVAATDGPMPQTREHILLGRQVGVPFIIVFLNKCDMVDDEELLELVEMEVRELLSQYDFPGDDTPIVRGSALKALEGDAEWEAK

SEQ ID NO: 55396 - protein, 97 aa, Enterobacter cloacae
  MISC_FEATURE (77)..(77): X=any amino acid
MTELEQLQASAGQAATLLKAMSNPRRLLILCTLCGTPGTSAGELARPTGLSPSATSQHLARMREEGLIDSTRDAHAXLYSIKNNAVHQLISTLKTLY

SEQ ID NO: 55397 - protein, 70 aa, Enterobacter cloacae
RRIIVVSDEVAADTVRKTFLTQVAPPGVTAHVVDVAKMIRVYNNPKYAGERVMLLFTNPTDVERIVEGGV

SEQ ID NO: 55398 - protein, 206 aa, Enterobacter cloacae
MSDTTYAIIYDLHSHTQASDGLLTPEALVHRAVEMRVGTLAITDHDTTDAIPAARAEIARSGLALNLVSGVEISTVWENHEIHIVGLNIDIDHPALTAFLQEQKTRRNQRAEMIGERLEKAHIPGALQGAQKMANGGAVTRGHFARFLVDAGKATNMADVFKKYLARGKTGYVPPQWCTIKQAIDVIHHSGGKAVLAHPGRYNLSA

SEQ ID NO: 55399 - protein, 205 aa, Enterobacter cloacae
MGPGPINADPRVVRAMSSQLIGQYDPAMTHYMNEVMALYRGVFRTENRWTMLVDGTSRAGIEAILVSAIRPGDKVLVPVFGRFGHLLCEIARRCRAEVHTIEVPWGEVFTPDQVEDAIKRIRPRLLLTVQGDTSTTMLQPLAELGAICRRYDVLFYTDATRSLGGNALETDAWGWTPSPAGMQKMLCGPSGTSPMILSSRMEESI

SEQ ID NO: 55400 - protein, 360 aa, Enterobacter cloacae
GSSDGLAAGTALTVTVNGKDYAATVLADGTWSAAIPSTDVSAWPEGTVKISVTGDSSAGNPITISHDVTVDLATVAISINAIATDDVINAAEKGADLVLSGATTNVEAGQTVTISLNGKIYSATVDDSGNWTYTVPSADLVHLKDGDASVQVSVTNVNGNSASAGREYSVDATAPSVTINTLAADDILNAAEAQSDLTVSGTTTAEAGQTVTVTLNGKDYTTAAGADGSWTLSVPAADLASLGDGSVTVTASVTAKAGNPASVDHTLTVDVTVPAVTINTVAGDDVINIAEHAQAHIVSGTATGAAAGDKVTVTIGGQTYTTVLDAAGNWNAGVPASVISGLNDGTRTVTASVTDAAGHT

SEQ ID NO: 55401 - protein, 372 aa, Enterobacter cloacae
  MISC_FEATURE (13)..(13): X=any amino acid
TGFGDGRREPGAXPGGSAAAVVLMAGLQGAGKTTSVGKLGKFLREKHKKKVLVVSADVYRPAAIKQLETLAEQVGVDFFPSDVAQKPVDIVNAALKEAKLKFYDVLLVDTAGRLHVDEAMMDEIKQVHASINPVETLFVVDAMTGQDAANTAKAFNEALPLTGVVLTKVDGDARGGAALSIRHITGKPIKFLGVGEKTEALEPFHPDRIASRILGMGDVLSLIEDIESKVDRAQAEKLASKLKKGDGFDLTDFLEQLRQMKNMGGMASLMGKLPGMGQIPDNVKAQMDDKVLVRMEAIINSVTLKERANPDIIKGSRKRRIAAGCGMQVQDVNRLLKQFDDMQRMMKKMKKGGMAKMMRGMKRMVPPVFRGR

SEQ ID NO: 55402 - protein, 310 aa, Enterobacter cloacae
MYTKILGTGSYLPKQVRTNADLEKMVDTSDEWIVTRTGIRERRIAAPDETVSTMGYEAAQRAIEMAGIDKEQIGLIVVATTSATHAFPSAACQVQNMLGIKGCPAFDVAAACAGFTYALSVADQYVKSGAVKYALVIGADVLARTCDPTDRGTIIIFGDGAGAVLLGQSEEPGIISTHLHADGSYGELLTLPNADRVNPDNSIYLTMAGNEVFKVAVTELAHIVDETLEANNLERTALDWLVPHQANRRIISATAKKLGMSMDNVVVTLDRHGNTSAASVPCAFDEAVPNGRIKRGQLVLLEAFGGGFTW

SEQ ID NO: 55403 - protein, 304 aa, Enterobacter cloacae
RQWAHGADMVVGQLEAQGVKQVFGIPGAKIDKVFDSLLDSSIEIIPVRHEANAAFMAAAVGRLTGKAGVALVTSGPGCSNLITGIATANSEGDPVVALGGAVKRADKAKLVHQSMDTVAMFSPVTKYAVEVSSPDAIAEVVSNAFRAAEHGRPGGAFVSLPQDIVDQPAMGAILPASGPALMGPAPESAINDVAKLIENAKNPVILLGLMASQPANSAAVRKLLEKSRIPVTSTYQAAGAVNQEHFTRSAGRVGLFNNQAGDRLLHLADLIICIGYSPVEYEPSMWNSGGLRLVHIDVLPAYEE

SEQ ID NO: 55404 - protein, 335 aa, Enterobacter cloacae
MRVLGIETSCDETGIAIYDDEKGLLANQLYSQVKLHADYGGVVPELASRDHVRKTVPLIQAALKEAGLSSNDIDAVAYTASPGLVGALLVGATVGRSLAFAWDVPAIPVHHMEGHLLAPMLEENPPEFPFVALLVSGGHTQLISVTGIGKYELLGESIDDAAGEAFDKTAKLLGLDYPGGPMLSKMASQGTEGRFVFPRPMTDRPGLDFSFSGLKTFAANTIRNNDDSEQTRADIARAFEDAVVDTLMIKCKRALDQTGFKRLVMAGGVSANRTLRAKLAGMMQKRRGEVFYARPEFCTDNGAMIAYAGMVRLNAGATSDLSVSVRPRWPLAELP

SEQ ID NO: 55405 - protein, 216 aa, Enterobacter cloacae
MTAVAPVITIDGPSGAGKGTLCKAMAEALQWHLLDSGAIYRVLALAALHHHVDVASEEALVPLAAHLDVRFVSTDGNLEVILEGEDVSGEIRTQEVANAASQVAAFPRVREALLRRQRAFREAPGLIADGRDMGTVVFPDAPVKIFLDASSEERAQRRMLQLQEKGFSVNFDRLLSEIKERDDRDRNRAVAPLVPAEDALVLDSTSLTIEQVIEKA

SEQ ID NO: 55406 - protein, 394 aa, Enterobacter cloacae
PMSMSSIPSHSPSGKLYGWVERIGNKVPHPFLLFIYLIVILMVATAVLSAFDVSVRSPSDGSLVAVKNLLSVDGLHWFLPNVIKNFTRFAPLAAILALVLGAGLAERVGLLPALMVKMASHVSARYASYMVLFIAFFSHISSDAALVIMPPMGALIFLAVGRHPVAGLLSAIAGVGCGFTANLLIVTTDVLLSGISTEAAKTIDAAMHVSVIDNWYFMASSVIVLTIVGGLITDKIIEPRLGKWEGRSDEKLETLSKEQRFGLRVAGVVSLAFIALVALMVVPENGILRDPVKHTVLPSPFIQGIVPLIILFFFVVSLAYGIATGKIRRQGDLPQLMIEPMKEMAGFIVMVFPLAQFVAMFNWSNMGKFMAVGLTDALEAAGLSGVPAFVGLAL

SEQ ID NO: 55407 - protein, 238 aa, Enterobacter cloacae
MQSLQRKVLRTICPDQKGLIARITNIGYKHELNIVQNNEFVDHRTGRFFMRTELEGIFNDTTLLADLDSALPEGSVRELTPAGRRRIVILVTKEAHCLGDLLMKANYGGLDVEIAAVIGNHETLRTLVERFDIPFELVSHEGHTREEHDDLMAQAIEAHNPDYVVLAKYMRVLTPSFVARFPNKIINIHHSFLPAFIGARPYHQAYERGVKIIGATAHYVNDPWTRSIIMQDVIHVDQ

SEQ ID NO: 55408 - protein, 152 aa, Enterobacter cloacae
VSQLCPCGSALEYSLCCQRYLSGDQVAPDPSHLMRSRYTAFVIKDADYLIKTWHPSCQAAEFRQDIEAGFANTQWLGLTVYESSTGSHVDEGYVSFVARFTENNKPGAIIERSRFLKESGQWYYIDGTRPQFGRNDPCPCGSGKKFKKCCGQ

SEQ ID NO: 55409 - protein, 140 aa, Enterobacter cloacae
MKDSDFFTWRRDCSLRFQELTNTDEVYRELERQTQALEFDYYALCVRHPVPFTRPKISLQTTYPKPWMAQYQSANYFAIDPVLKAENFIQGHLPWTDALFAEAQELWHSAQDHGLRAGITQCLMLPNHAFRCLSRASTSV

SEQ ID NO: 55410 - protein, 250 aa, Enterobacter cloacae
MSAIDVKNLVKKFHGQTVLHGIDLEVEQGEVVAIIGPSGSGKTTLLRQINLLEQPEGGTIRVGDITIDTGKSISQQKGLIRRLRQHVGFVFQNFNLFPHRTVLENIIEGPVIVKGESKEEATVRARELLAKVGLAGKETSYPRRLSGGQQQRVAIARALAMRPDVILFDEPTSALDPELVGEVLNTIRQLAQEKRTMVIVTHEMSFARDVADRAIFMDQGRIVEQGPAKSLFANPQQPRTRQFLEKFLMQ

SEQ ID NO: 55411 - protein, 279 aa, Enterobacter cloacae
MTTNTVSRRVAWLRVVTLAVAAFIFNTTEFVPVGLLSDIAESFQMETAQVGIMLTIYAWVVALMSLPFMLLTSQMERRRLLIGLFVLFIASHVLSFMAWNFTVLVISRIGIAFAHAVFWSITASLAIRLAPAGKRAQALSLIATGTALAMVLGLPIGRIVGQYFGWRTTFFAIGMGALVTLVCLIKLLPALPSEHAGSLKSLPLLMRRPALLGIYLLTVIVVTAHYTAYSYIEPFVQVVAGFSASFATVLLLILGGACIIGSVLFGKLGNRHASTLVSC

SEQ ID NO: 55412 - protein, 121 aa, Enterobacter cloacae
MSITKDQIIEAVAAMSVMDVVELVSAMEEKFGVSAAAAVAVAAGPAEAAEEKTEFDVILKAAGANKVAVIKAVRGATGLGLKEAKDLVESAPAALKEGVSKDDAEALKKSLEEAGAEVEVK

SEQ ID NO: 55413 - protein, 32 aa, Enterobacter cloacae
VKIVKFRRRKHYRKQQGHRQWFTDVKITGISA

SEQ ID NO: 55414 - protein, 85 aa, Enterobacter cloacae
MAHKKAGGSTRNGRDSEAKRLGVKRFGGESVLAGSIIVRQRGTKFHAGNNVGCGRDHTLFAKADGKVKFEVKGPNNRKYISIVAE

SEQ ID NO: 55415 - protein, 374 aa, Enterobacter cloacae
MDMPSYGGVVANSYLPSNWLSALGLYAWAQADESRDVKSLIKPTKQFTYQPPADGIDDTDVVFVIGETTRWDHMGILGYNRDTTPKLAQEKNLVAYRGYSCDTATKLFLRCMFVREGGASDNPQRTLKEQNVFAVLKQLGFSSDLFAMQSEMWFYTNTLADNIAYREQIGAEPRNRGKNVDDMLLLEEMSQSLKNHPQGKHLVILHTKGSHYSYYQRYTRDFAKWQPECVGINKDCSKQELINAYDNSVLYVDTFLSRVIDQLRDKKAIVIYAADHGESINEKEHLHGTPRKLAPPEQFRVPMIMWMSDKYLENPEKAKMFAQLKKEAEMKVPRRHVELYDTIMGCLGYTSPNGGINENNNWCKLPDNSVKAAQ

SEQ ID NO: 55416 - protein, 238 aa, Enterobacter cloacae
VKFPALFRNTLLLSGLFVLGLASAAAADWPRQVTDSRGVHTLESKPTRIVSTSVTLTGSLLAIDAPVVASGATTPNNRVADAQGFLRQWGDIAKQRKVARLYIGEPSAEAVAAQMPDLILISATGGDSALALYDQLSAIAPTLIINYDDKSWQALLTLLGTITGQEKQAVERIAAFDKQLAQVKEQMKVPPQPVNAIVYTAAGTSANLWTAESPQGKLLHQLGFTLAELPAGLHTSKS

SEQ ID NO: 55417 - protein, 136 aa, Enterobacter cloacae
MVKIDLNADLGEGGSADAQLMMLVSSVNIACGFHAGDAQTMLESVRNAIKNGVAIGAHPSFPDRENFGRTAMDLPPETVYAQVLYQIGALEAMVRAQNGVMRHVKPHGMLYNQAAKDADLADAIARAVRDCNPGVH

SEQ ID NO: 55418 - protein, 358 aa, Enterobacter cloacae
VIEHAAPPAFDPASKPDVRISAISAASVDPLRGLGVWEAVLAMRAHPYSRLETWEWENAHVAFDAAELKLPRLGYMVENNVLQQALWQALEAHPKVTAVPASIKALHPQESEVFVTLDSGDELAVKLVVGADGANSQVRQMAGIGVHAWQYEQSCMLITVECENAPGESTWQHFTPNGPHAFLPLFDNWASLVWYDKPARIRQLQGLSMEQLQREIRLHFPSRLGNVTPVAAGAFPLTRRHALQYAREGLALVGDAAHTIHPLAGQGVNLGYRDVVPLLDVLSSARGHAENWASHQILKRYQTRRMADNFIMQSGMDLFYAGFSNDLAPVRILRNIGLMAAERAGGLKRQALKYALGL

SEQ ID NO: 55419 - protein, 357 aa, Enterobacter cloacae
  MISC_FEATURE (20)..(20): X=any amino acid
  MISC_FEATURE (37)..(37): X=any amino acid
  MISC_FEATURE (345)..(345): X=any amino acid
PPFRPFLTVFHISSIFPLCXLTKLVSFPEVFQDENVXTMKGSNKSRWAIAAGIIVVVLAAAWYWHSQSANSAAPAGANSQAQRPAGGGRHGMRGGALAPVQAATAVNKAVPRYLTGLGTITAANTVTVRSRVDGQLMAIHFQEGQQVKAGDLLAEIDPSQFKVALAQAQGQLAKDKATLANARRDLARYQQLVKTNLVSRQELDTQQSLVSETQGTIKADEAAVASAQLQLDWSRITAPIDGRVGLKQVDIGNQISSGDTTGIVVITQTHPIDLVFTLPESDIATVVQAQKSGKGLVVEAWDRSNKQKLSEGSLLSLDNQIDTTTGTIKLKARFNNQDDASLWVXFGNARMLVATEE

SEQ ID NO: 55420 - protein, 277 aa, Enterobacter cloacae
GYYIVSGGGKRIRPMIAILAARAVGYQGNAHITIAALIEFIHTATLLHDDVVDESDMRRGKATANAAFGNAASVLVGDFIYTRAFQMMTSLGSLKVLEVMSEAVNVIAEGEVLQLMNVNDPDITEENYMRVIYSKTARLFEAAAQCSGILADCTEAQEKGLQDYGRYLGTAFQLIDDLLDYSADGETLGKNVGDDLNEGKPTLPLLHAMRNGTADQAKMIREAIEQGNGRHLLEPVLETMAICGSLEWTRHRAEEEADKAIEALQVIPDSPWRDALI

SEQ ID NO: 55421 - protein, 762 aa, Enterobacter cloacae
  MISC_FEATURE (752)..(752): X=any amino acid
DAVMPSAPVSPPESVIQQPQVDWQTAPGVHTPEPVIAPEPESYIPVQQEQWQQPYQPPQPAYEPQDYPHYEQPVAQPYQEYVPEPVEPVQPYVEPQPEAEIVEEVKPSRPPMYYFEEVEERRAREREQMAAWYQPVPEPVQEPVTKAPSVSVPPIDPTPAVAPVAESVEQATAAAAVVRPVFSLATGGTPRPQVKEGIGPQLPRPNRVRVPTRRELASYGIKLPSQRMAEEKAREPEYEDDADEMQQDELARQFAAQQNQRYGEEYQHDEPVLEDEEDAAEAELARQFAATQQQRYSGEQPAGANPFSLSDFEFSPMKDLVDDGPSEPLFTPSVMPEAEPVRQQPAPQAYAQPHQPVQQPQQPQQPPQPPQFQQPAPQPQESLIHPLLMRNGDSRPLQRPSTPLPSLDLLTPPPSEVEPVDTFALEQMARLVEARLADFRIKADVVNYSPGPVITRFELNLAPGVKAARISNLSRDLARSLSTVAVRVVEVIPGKPYVGLELPNKKRQTVYLREVLDNTKFRDNPSPLTVVLGKDIAGDPVVADLAKMPHLLVAGTTGSGKSVGVNAMILSMLYKAQPEDVRFIMIDPKMLELSVYEGIPHLLTEVVTDMKDAANALRWSVNEMERRYKLMSALGVRNLAGYNEKIAQAVRMGRPIPDPYWKPGDSMDAQHPVLEKLPYIVVLVDEFADLMMTVGKKVEELIARLAQKARAAGIHLVLATQRPSVDVITGLIKANIPTRIAFTVSSKIEHRXILDQGGAESL

SEQ ID NO: 55422 - protein, 214 aa, Enterobacter cloacae
MTAFSTLNVLPAAQLDNLIELGYLTMTPVQAAALPAILEGRDVRVQAKTGSGKTAAFGLGLLQHIDAALFQTQSLVLCPTRELADQVAGELRRLARFLPNTKILTLCGGQPFGAQRDSLQHAPHIIVATPGRLLDHLQKGTVSLDALQTLVMDEADRMLDMGFSDAIDEVIRFAPTDRQTLLFSATWPEAFAAINGRVQPNPVHIEIDSVNALP

SEQ ID NO: 55423 - protein, 295 aa, Enterobacter cloacae
TDVAAQCFLNALLRETKDWRYLHATAADALPNIHIPLSQTQALRVPVRYFSPTQHHQYRFPATLIQSNSDDGDAVTFDQLVDLILEKPSVKGSLDADTLARFKQRVLESHAHTWQAIDLRHSWANLRDKPLTFADAEQALLVGHAFHPAPKSHEPFNETEARRYLPDFASRFPLRWFAVESTLVAGDSLNVSLRERLLRFAAQSAPELLGHFTDTRWLLPMHPWQADYLLEQDWCQRLAENGSLQDLGETGAQWLPTSSSRSLYSETNSDMIKFSLSVRLDNSVRTLSVKEVKPG

SEQ ID NO: 55424 - protein, 158 aa, Enterobacter cloacae
MFVIWSHEKGFIMSHQLTFADSEFSSKRRQTRKEIFLSRMEQILPWQNMVEVIEPFYPKAGNGRRPYPLETMLRIHCMQHWYNLSDGAMEDALYEIASMRLFARLFLDSALRDQNTIMDLRHLEDEDELARQLFKAISRWVAEADVMKTQGTLGDATI

SEQ ID NO: 55425 - protein, 259 aa, Enterobacter cloacae
PCRRHGDINKTDGSITMKKLVLAALLATFAAGASAADKINFGVSATYPPFESLDASNQIVGFDIDLAKALCKQMQADCTFTNHAFDSLIPSLKFKKYDAVISGMDITPERSKQVAFTDPYYANSAVVIAKKGAYTSFDQLKGKRIGMENGTTHQKYLQDKHPEVKTVAYDSYQNAIIDLKNGRIDGVFADTAVVNEWLKTNPQLGTATEKVTDPQYFGTGLGIAVRPDNKALLEKLNAATKATKADGTYQKISEQWFPQ

SEQ ID NO: 55426 - protein, 319 aa, Enterobacter cloacae
MKLSRVSAVNWNKIQDDKDLEVWNRLTSNFWLPEKVPLSNDIPAWQTLSHAEQQLTIRVFTGLTLLDTIQNTVGAPALMSDALTPHEEAVMSNISFMEAVHARSYSSIFSTLCQTKDVDAAYAWSEESESLQRKAELVLEYYRADEPLKKKIASVFLESFLFYSGFWLPMYWSSRGKLTNTADLIRLIIRDEAVHGYYIGYKYQKGLEKVSEAKREELKGFALDLLMDLYDNELSYTEELYAGTGWEDDVKAFLCYNANKALMNLGYDALFPPEMAEVNPAILAALSPNADENHDFFSGSGSSYVMGKAVETEDEDWDF

SEQ ID NO: 55427 - protein, 475 aa, Enterobacter cloacae
MGATYLAVAAGHPLAQKAAENNPELALFIDECRNTKVAEADMATMEKKGVDTGFKAIHPLTGEAIPVWAANFVLMEYGTGAVMAVPGHDQRDYEFATKYGLTIKPVILTADGSEPDLSEHALTEKGTLFNSGEFSGLSFEEGFNAIADKLASLGVGERKVNFRLRDWGVSRQRYWGAPIPMVTLEDGTVMPTPEDQLPVILPEDVVMDGITSPIKADPEWAKTTVNGQPALRETDTFDTFMESSWYYARYTCPQYQDGMLDSDAANYWLPVDIYIGGIEHAIMHLLYFRFFHKLMRDAGMVNSDEPAKQLLCQGMVLADAFYYVGANGERNWVSPVDAIVERDEKGRIVKAKDAEGHELVYTGMSKMSKSKNNGIDPQVMVERYGADTVRLFMMFASPADMTLEWQESGVEGANRFLKRVWKLVYEHTAPGDAPALNAAALTEDQQALRRDVHKTIAKVTDDIGRRQTFNTAIAA

SEQ ID NO: 55428 - protein, 108 aa, Enterobacter cloacae
AAGGLANAAIRAAEIEATAFALFTKNQRQWRAAPLTADVIDDFKAACEKYHYGPGQILPHDSYLINLGHPVEEALEKSREAFLDEVQRCEQLGLTLLNFHPGSHLMQI

SEQ ID NO: 55429 - protein, 574 aa, Enterobacter cloacae
MQNQVWISAALKIPLCLAQYVVHGQRTVFPISLGLASSFNLDAVKTVGRVSAYEAADDGLNMTWAPMVDVSRDPRWGRGSEGFGEDTYLTSTMGKTMVEAMQGKSPADRYSVMTSVKHFAAYGAVEGGKEYNTVDMSPQRLFNDYMPPYKAGLDAGSGAVMVALNSLNGTPATSDSWLLKDVLRDQWGFKGITVSDHGAIKELIKHGTASDPEDAVRVALKSGINMSMSDEYYSKYLPGLVKSGKVTMAELDDAARHVLNVKYDMGLFNDPYSHLGPKDSDPADTNAESRLHRKEARDVARESLVLLKNRLDTLPLKKSGTIAVVGPLADSKRDVMGSWSAAGVADQSVTVLTGIKSAVGDNAKVVYAKGANVTNDKDIVTFLNQYEEAVKVDPRTPKEMIDEAVNTAKQSDVVVAVVGEAQGMAHDASSRTDITIPQSQRDLIAALKATGKPLVLVLMNGRPLALVKEDQQADAILETWFAGTEGGNAIADVLFGDYNPSGKLPMSFPRSVGQIPVYYSHLNTGRPYNADKPNKYTSRYFDEANGPLYPFGYGLSYTTFKVSDVKMSAPTLKR

SEQ ID NO: 55430 - protein, 147 aa, Enterobacter cloacae
ALENVMFGPRRVRGASKAAAERLAKDLLAKVGLAERAHHYPSELSGGQQQRVAIARALAVKPKMMLFDEPTSALDPELRHEVLKVMQDLAEEGMTMVIVTHEIGFAEKVASRLIFIDKGRIAEDGNPQELIANPPSQRLQEFLQHVS

SEQ ID NO: 55431 - protein, 247 aa, Enterobacter cloacae
ANAWNSIEKQRAYLSMMAQKRVDGLLVMCSEYPESVLSMLEEYRHIPMVVMDWGEARADFTDSVIDNAFEGGYMAGRYLIERGHREIGVIPGPLERNTGAGRLAGFMKAMEEALINVPENWIVQGDFEPESGYRAMQQIVSQPHRPTAVFCGGDIMAMGALCAADELGLRVPQDISVIGYDNVRNARFFTPALTTIHQPKDSLGETAFNMLMDRIVNKREESQSIEVHPRLIERRSVADGPFRDYRR

SEQ ID NO: 55432 - protein, 439 aa, Enterobacter cloacae
MQENCAFIADAIDTRCRTLTDIADAIWDRPETRFEEFWSAERLASELEAEGFTLTREAGGIPNAFIASFGSGKPVIALLGEYDALAGLSQQAHCAMAQSATPGANGHGCGHNLLGTAALAGAVAVKSWLEQHGGSGTVRFYGCPGEEGGSGKTFMVREGLFDDVDAAVTWHPEAFAGMFNVSTLANIQAAWRFHGVAAHAANSPHLGRSALDAVTLMTTGTNFLNEHIIEKARVHYAITDTGGISPNVVQAQAEVLYLIRAPEMADAQQIYERIDKIAQGAAMMTETTVECRFDKACSSYLPNRTLEAAMYRALQHYGTPLWTEEERAFAREIRTTLTPNDLQNSLKNIAATGGDAGKAFARRHQETLLVDEVAPYAITDNVLAGSTDVGDVSWKMPVAQCFSPCFTVGTPLHTWQLVAQGRTSIAHKGMLLAGKVMGG

SEQ ID NO: 55433 - protein, 277 aa, Enterobacter cloacae
MDSAVDRHVFYISDGTAITAEVLGHAVMSQFPVSINSITLPFVENESRAKAVKDQIDAIYQQTGVRPLVFYSIVIPEIRSIILQSEGFCQDIVQALVAPLQSELKLDPTPIAHRTHGLNPGNLTKYDARIAAIDYTLAHDDGISLRNLDQAQVILLGVSRCGKTPTSLYLAMQFGIRAANYPFIADDMDNLVLPAALKPLQHKLFGLTINPERLAAIREERRENSRYTSMRQCRMEVSEVEALYRKNQIPWLNSTNSSVSDIATKILDIMGLNPRLY

SEQ ID NO: 55434 - protein, 524 aa, Enterobacter cloacae
MLAGGIGNIRADHVQKGEIVVGAELIVLGGPAMNIGLGGGAASSMASGQSDADLDFASVQRDNPEMERRCQEVIDRCWQLGDANPILFIHDVGAGGLSNAMPELVSDGGRGGRFNLRDILSDEPGMSPLEIWCNESQERYVLAVDADQLPLFDELCRRERAPYAVIGEATEEQHLSLSDTHFDNQPIDLPLDVLLGKTPKMTRDVTTRKAAGKALDRQGITVAEAVNRVLHLPAVAEKTFLVTIGDRTVTGMVSRDQMVGPWQIPVANCAVTTASLDSYYGEAMALGERTPVALLDFAASARLAVGEALTNIAATQIGDIKRIKLSANWMAAAGHPGEDAGLYEAVKAVGEELCPALGLTIPVGKDSMSMKTRWQEGSEQREMTSPLSLVITAFARVEDVRHTVTPQLATEDNALLLIDLGKGHNALGATALAQVYRQLGDKPADVRDVAQLKGFYDAIQALVAQRKLLAYHDRSDGGLLVTLAEMAFTGHCGVEANIATLGEDRLAALFNEELGAVIQVRAAD

SEQ ID NO: 55435 - protein, 353 aa, Enterobacter cloacae
MSLRHLCSPRLSLSLLSATLLLAGTFQVHAAEEVLRKAVGKGAYEMAVSQQENALWVATSQSRKTDKGGVIYRLDPVTLDVTQAIHSDLKPFGATLDGATQTLWFGNTLNGAVTAIDAKTGDVKGRLVLDNRQRSETVKPLQPRQLVADDASNTIYITGVGKESVIWVVDGATLKLKETIANTGTYSTGLALDTQAKRLYTTNADGELVTIDTATNKILSRKKVQDDGKEHFYLNISLDTAGQRAFMTDSKQPEVMVVSLKDGSVMEKIAAPESLAVLFNPTRNEVYVTHREAGKVSVINAKSYKVTKTFDTPVYPNSLALSADGKTLYVTVKQKSTRQQEATQPDDVIRIAL

SEQ ID NO: 55436 - protein, 219 aa, Enterobacter cloacae
MQFDWSAIWPAIPILLEGAKMTLWISVLGLVGGLIIGLVAGFARTYGGWIANHIALVFIEVIRGTPIVVQVMFIYFALPMAFTDLRIDPFSAAVVTIMINSGAYIAEITRGAVLSIHKGFSEAGLALGLSRRETIRHVILPLALRRMLPPLGNQWIISIKDTSLFIVIGVAELTRQGQEIIAGNFRALEIWSAVAVVYLIITLVLSFVLRRLERRMKIL

SEQ ID NO: 55437 - protein, 281 aa, Enterobacter cloacae
GIEYGDMQLIAEAYSLLKGGLNLSNEELAETFTEWNKGELNSYLIDITKDIFTKKDEEGKYLVDVILDEAANKGTGKWTSQSSLDLGEPLSLITESVFARYISSLKEQRVAACKVLSGPQAKPAGDKAEFVEKVRRALYLGKIVSYAQGFSQLRAASDENNWDLNYGEIAKIFRAGCIIRAQFLQKITDAYAENAGIANLLLAPYFKKIADEYQQALRDVVAYAVQNGIPVPTFSAAVAYYDSYRAAVLPANLIQAQRDYFGAHTYKRTDKEGVFHTEWME

SEQ ID NO: 55438 - protein, 240 aa, Enterobacter cloacae
MSVVPVADVLQGRVAVDQEVTVRGWVRTRRDSKAGISFLAVYDGSCFDPVQAVINNSLPNYNDDVLRLTTGCSVIVTGVVVASPGQGQSFEIQATAIEVTGWVEDPDTYPMAAKRHSIEYLREVAHLRPRTNLIGAVARVRHTLAQALHRFFDEQGYFWVSTPLITASDTEGAGEMFRVSTLDMENLPRTPEGKVDYDKDFFGKEAFLTVSGQLNGETYACALSKIYTFGPTFRAENSNT

SEQ ID NO: 55439 - protein, 301 aa, Enterobacter cloacae
MLNDNGKLDIRLEGPWREVIMWEVPLLAVISELAHRYRSPEKGVEQAVAALENKLAAFSTLTEGLDMSRFRLMDFGTRRRFSRDVQEAIVKRLQQEPWFVGTSNYDLARRLSLTPMGTQAHEWFQAHQQISPDLANSQRAALAAWLEEYPNQLGIALTDCITMDAFLRDFGPEFAERYQGLRHDSGDPVEWGEKAIAHYEKLGIDPMSKVLVFSDNLDLAKAVDLYRHFNSRVNLSFGIGTRLTCDIPQVKPLNIVIKLVECNGKPVAKLSDSPGKTICHDKAFVRALRKAFDLPLIKKAS

SEQ ID NO: 55440 - protein, 382 aa, Enterobacter cloacae
IVLCFFSLFDPGNSLKFMMGATFKSLAIIGIAAFVSGLLSRWISKTITLSPQVQRNYPELQKRVNGWMSVSLKVARILTVCVAIMLLLNAWSLFDFWNWLHNGAGEKTVDILIRIALILFFSAVGWTLLASLIENRLVSDIHGRPLPSARARTLLTLFRNALAVIISTITIMIVLSEIGVNIAPLLAGAGALGLAISFGSQTLVKDIITGIFIQFENGMNTGDLVTIGPLTGTVERMSIRSVGVRQDTGAYHIIPWSSITTFANFVRGIGSVVANYDVDRHEDADKAKQALRDAVEELMEMEDIRGLVIGEPSFAGIVGLSNTAFTLRVSFTTQPLKQWTVRFALDSMVKKHFDLANVRMPVQTYQVLPPPASPLPPQEPTL

SEQ ID NO: 55441 - protein, 482 aa, Enterobacter cloacae
MVAVRSAHLNKAGEFDPQKWIASLGISSQQSCERLTETWAYCLRTTQGHPDADLLLWRGVEMVEILSMLNMDIETLQAALLFPLADADVVSEDVLRDSVGKSVVALIHGVRDMAAIRQLKAAHTDSVSSEQVDNVRRMLLAMVDDFRCVVIKLAERIAHLREVKDAPEDERVLAAKECTNIYAPLANRLGIGQLKWELEDYCFRYLHPAEYKRIAKLLHERRIDREHYIEEFVGGLRQAMKEENVRAEVYGRPKHIYSIWRKMQKKHLAFDELFDVRAVRIVAERLQDCYAALGIVHTHFRHLPDEFDDYVANPKPNGYQSIHTVVLGPGGKTVEIQIRTKQMHEDAELGVAAHWKYKEGTSGGARSGHEDRIAWLRKLIAWQEEMADSGEMLDEVRSQVFDDRVYVFTPKGDVVDLPAGSTPLDFAYHIHSDVGHRCIGAKIGGRIVPFTYQLQMGDQIEIITQKQANPSRDWLNPNLGYV

SEQ ID NO: 55442 - protein, 280 aa, Enterobacter cloacae
MNMKKLATLVSAVALSATVSANAMAKDTIALVVSTLNNPFFVSLKDGAQKEADKLGYNLVVLDSQNNPAKELANVQDLTVRGTKILLINPTDSDAVNAVKMANQAKIPVITLDRQASKGEVVSHIASDNVLGGKIAGDYIAKKAGEGAKVIELQGIAGTSAARERGEGFQQAVAAHKFNVLASQPADFDRTKGLNVMQNLLTAHPDVQAVFAQNDEMALGALRALQTAVKSDVMVVGFDGTPDGEKAVNDGKLAATIAQLPEQIGATGVETADKVLKGQK

SEQ ID NO: 55443 - protein, 192 aa, Enterobacter cloacae
TLRMSLLLPGGTMVYTNGSPVNTGFTDNADLFGWFGIGRPLGVPTPVWIMAIVFLAAWYMLHHTRLGRYIYALGGNEAATRLSGISVNKVKIIVYSLCGLLASLAGIIEVARLSSAQPTAGTGYELDAIAAVVLGGTSLGGGKGRIVGTLIGALILGFLNNGLNLLGVSSYYQMIVKAVVILLAVLVDNKKQ

SEQ ID NO: 55444 - protein, 232 aa, Enterobacter cloacae
MCCIADDQTNYGTMNHREYYTLIRVLRPMAQLYFYYSAMNAGKSTALLQSSYNYQERGMRTVVYTAEIDDRFGAGKVSSRIGLSSPARLFNPKTDLFEDIRTEHALQPIHCVLVDESQFLTREQVHALSEVVDELDIPVLCYGLRTDFRGELFAGSQYLLAWSDKLVELKTICFCGRKASMVLRLDQAGKPYADGEQVVIGGNERYVSVCRKHYKEALSVGSLTAIQHDNRK

SEQ ID NO: 55445 - protein, 78 aa, Enterobacter cloacae
MTFFHRSEGLPLQDLIFGASVYFPPLFKAVLVGFMLWLIAHRLLRDWMYSGEIWHPMLMDLSLFALSVCLGLAVLTVW

SEQ ID NO: 55446 - protein, 257 aa, Enterobacter cloacae
MQSPWTRDGKVRAEQVSITPQVSGSITALLVKDNQFVKKGDILFRIDDTPYHIAILNAQAQLAKAQSDLAKANNEANRRRHLSQNYISAEDLDTANITVKAMQASVNVAEATLKQAQWELTQTVITAPVDGWVTNLSARVGNYATTGQPVFALVDSHSFYVVGYFEETKLRHIREGSPAAITLYSGSQKLQGHVSSIGRAIYDQSVETDSGLVPDIKPNVPWVRLAQRVPVRVEFDRLPQDITLVSGTTCTVSIGNR

SEQ ID NO: 55447 - protein, 560 aa, Enterobacter cloacae
NPGNMLKPCLRRGDINCVGATTLDEYRQYIEKDAALERRFQKVFVAEPSVEDTIAILRGLKERYELHHHVQITDPAIVAAATLSHRYIADRQLPDKAIDLIDEAASSIRMQIDSKPEELDRLDRRIIQLKLEQQALKKESDEASKKRLDMLNEELDDKERQYSELEEEWKAEKASLSGTQTIKAELEQAKIAIEQARRVGDLARMSELQYGKIPELEKQLEIATQSEGKTMRLLRNKVTDAEIAEVLARWTGIPVARMLEGEREKLLRMEQDLHNRVIGQNEAVEAVSNAIRRSRAGLSDPNRPIGSFLFLGPTGVGKTELCKALANFMFDSDDAMVRIDMSEFMEKHSVSRLVGAPPGYVGYEEGGYLTEAVRRRPYSVILLDEVEKAHPDVFNILLQVLDDGRLTDGQGRTVDFRNTVVIMTSNLGSDLIQERFGELDYSHMKDLVLGVVSHNFRPEFINRIDEVVVFHPLGEKHIASIAQIQLQRLYKRLEERGYEIHISDEALKLLSENGYDPVYGARPLKRAIQQQIENPLAQQILSGELIPGKVIRLEANDDRI

SEQ ID NO: 55448 - protein, 238 aa, Enterobacter cloacae
VPRPHPCRHEGGGVMTNLNARPEAITFAPQQSALIVVDMQNAYASQGGYLDLAGFDVSATRPVIENIKTAVAAARAAGMLIIWFQNGWDDQYVEAGGPGSPNFHKSNALKTMRKRPELQGKLLAKGGWDYQLVDELVPQAGDIVLPKPRYSGFFNTPLDSLLRSQGIRHLIFTGIATNVCVESTLRDGFFLEYFGVVLEDATHQAGPEFAQKAALFNIETFFGWVSGVQRFCDAVNPT

SEQ ID NO: 55449 - protein, 168 aa, Enterobacter cloacae
TSGPPIATPLGPLWVIADEQFCLRAVEWEEHSDRMEELLHVHYRSQGYERIRATNPGGLSDKLAAYFEGDLSIIDTLPTATAGTPFQREVWQALRSIPCGQVMHYGQLAEQLGRAGAARAVGAANGSNPVSIVVPCHRVIGRNGTMTGYAGGVQRKEWLLRHEGYLLL

SEQ ID NO: 55450 - protein, 513 aa, Enterobacter cloacae
MDNNRQFGFFRLDPRLITMLSSANGEQRLFVARNGFPDLLVDTLLATEDRHFYEHDGISLYSIGRAVLANLTAGRTVQGASTLTQQLVKNLFLSSERSYWRKANEAYMAVLMDARYSKDRILELYMNEVYLGQSGDNEIRGFPLASLYYFGRPVEELSLDQQALLVGMVKGASIYNPWRNPKLALERRNLVLRLLQQQQVIDQELYDMLSARPLGVQPRGGVISPQPAFMQLVRQELQSKLGDKVKDLSGVKIFTTFDSVAQDAAEKAAVEGIPALKKQRKLSDLETAMVVVDRNSGEVRAMVGGAEPQFAGYNRAMQARRSIGSLAKPATYLTALSQPNQYRLNTWIADAPISLRQPNGQVWSPQNDDKQFSGQVMLVDALTRSMNVPTVNLGMSLGLPAIVDTWQKLGVSKDQLHPVPAMILGALNLTPIEVAQAFQTIASGGNRAPLSALRSVIAEDGSVLYQSFPQAERAVPAQAAYMTLWTMQQVVQRGTGRQLGAKYPGLHLAGKTG

SEQ ID NO: 55451 - protein, 256 aa, Enterobacter cloacae
MQPDLLNLRVLHHFRTRSPLTHCMTNDVVQTFTANVLLALGASPAMVIEAEEAEQFAGIADALLINVGTLTSPRAQAMRRAIESAVAAGKPWTLDPVAAGALTFRTRFCHQILALKPAAIRGNASEILALAGMSAGGRGVDTTDTAASAVPAAQALARQTNAVVVVTGEVDYITDGQRTRTITGGDPLMTRVVGTGCALSAVVAASCSLPGDRMDNVAASCGWMKRAGTVAVAQSRGPGSFASAFLDALYTLEEQA

SEQ ID NO: 55452 - protein, 375 aa, Enterobacter cloacae
KPGILTPGNSQASDLVPATGVDEKTLAGAAQLSWLADETPEVRSIVILAKQRFNAAQRYVQSLHATFVPFTAQTRMSGINIQDRMIRKGSVDAIRRHIEANNGHFPPEVDSLVESVARQGATPLVVAEGAHVLGVIALKDIVKGGIKERFAQLRKMGIKTVMITGDNRLTAAAIAAEAGVDDFLSEATPEAKLALIRQYQAEGRLVAMTGDGTNDAPALAQADVAVAMNSGTQAAKEAGNMVDLDSNPTKLIEVVHIGKQMLMTRGSLTTFSIANDVAKYFAIIPAAFAATYPQLNALNVMHLHSPASAILSAVIFNALIIVFLIPLALKGVSYKPLTAAAMLRRNLWIYGLGGLVVPFIGIKVIDLLLTLFGLV

SEQ ID NO: 55453 - protein, 191 aa, Enterobacter cloacae
MTMLRPAILLFILLSLITGGLYPLVTTALGQWWFKDRANGSLIMQNGENRGSRLIGQNFTDARYFQGRPSATAESPYNPMASGGSNLAGSNPELDKAVAERVAALRAANPQASREVPVELVTASASGLDYSLTPAAAAWQIPRVAAARQLTVEQVSQLVAEHTQKPLVSFIGMPVVNIVELNLALDALRKN

SEQ ID NO: 55454 - protein, 190 aa, Enterobacter cloacae
MTDEPMRPDPDRLLEQTAEAHRGKLKIFFGACAGVGKTFAMLTEAQRLRAQGLDILIGVVETHGRKETASLLKGLATQPPRRISHRGRLVTEFDLDAALARRPALILMDELAHSNAPGSRHPKRWQDVEELLEAGVDVFTTVNVQHLESLNDVVSGVTGIQVRETVPDPFFDSPYEVVLVGLPPDEFTPR

SEQ ID NO: 55455 - protein, 222 aa, Enterobacter cloacae
MLDLDHLEKAQRVSLTMQVEHSLKGALITGSLKPGARLITKEIADKLGTSITPVREALLRLVSSGALHATPAQAFLVPEVTLERYNEINAIRKQLEPMAVAAACQNMSDSKLEALRKLSDAFHEAMRNGNVQQALHANRVFRFTLYQYAEMPTLNALIEQLWVRIGPCMNYLHQELNDIKASTYHYDELLSALERRDVVACQKAIDKVIDEANLLLQRQYFN

SEQ ID NO: 55456 - protein, 286 aa, Enterobacter cloacae
SAELLKQFDIPLVHDLPGVGENLQDHLEMYLQYECKEPVSLYPALQWWNQPKIGAEWLFGGTGVGASNHFEAGGFIRSREEFEWPNIQYHFLPVAINYNGSNAVKEHGFQCHVGSMRSPSRGHVRIKSRDPHQHPAILFNYMSHEQDWQEFRDAIRITREIMHQPALDKYRGREISPGIECQTDEQLDEFVRNHAETAFHPCGTCKMGYDEMAVVDGEGRVHGLEGLRVVDASIMPQIITGNLNATTIMIGEKIADAIRGREPLAKSTAAYYVANGAPVRQARQKV

SEQ ID NO: 55457 - protein, 439 aa, Enterobacter cloacae
  MISC_FEATURE (379)..(379): X=any amino acid
  MISC_FEATURE (435)..(435): X=any amino acid
MTIPFTRWPEEFARRYREKGYWQDLPLTHILTDRADSDAVAIIDGERHITYRAFHQAVNNLASALKAQGLHRGETALVQLGNVAEFYITFFALLQIGVAPVNALFSHQRSELNAYAEQIKPAALIADRDHALFAGDDFLNTFVNAHRSVRVVLLRGDKDEHALEAAIARPADNFIPNPTPADEVAFFQLSGGSTGTPKLIPRTHNDYDYSIRRSNEICGITADTRYLNALPAAHNYAMSSPGSLGVFTAGGCVVLANDPSATLCFPLIERHQINVTSLVPPAVSLWLQAIADGAGSAQLKSLRLLQVGGARLSATLAARIPAEIGCQLQQVFGMAEGLVNYTALDDAPERIINTQGRPMCPDDEVWVADENGKPAAARXGWRLMTRGPYTFGGYFSSPEHNASVFDADGFTAPGDLIALTRRAYITLQGAKRSDXRGGG

SEQ ID NO: 55458 - protein, 283 aa, Enterobacter cloacae
MKQKVVSIGDIKVANDLPFVLFGGMNVLESRDLAMRICEHYVTVTQKLGIPYVFKASFDKANRSSINSYRGPGLEEGMKIFQELKQTFGVKVITDVHEASQAQPVADVVDVIQLPAFLARQTDLVAAMAKTGAVINVKKPQFVSPGQMGNIVDKFIEGGNDKVILCDRGANFGYDNLVVDMLGFSVMKNVSGQSPVIFDVTHALQCRDPFGAASGGRRAQVTELARAGMATGLAGLFIEAHPDPDNAKCDGPSALPLDKLEPFLKQIKAIDDLVKSFDELDTS

SEQ ID NO: 55459 - protein, 199 aa, Enterobacter cloacae
MSRNTEHDTREHLLATGERLCMHRGFTGMGLSELLKTAEVPKGSFYHYFRSKEAFGVAMLERHYAGYHQRLATHFASGEGNYRDRVLNYYQETLNQFCQQGIISGCLTVKLSAEVCDLSEDMRTAMDKGARGVIALLAQALEKGRDEKTLAFSGEPLTQAQVLYALWLGANLQAKISRSAVPLESALAHVKNSITAPGI

SEQ ID NO: 55460 - protein, 535 aa, Enterobacter cloacae
MSISLKKSGMLKLGLSLVAMTVAASVQAKTLVYCSEGSPEGLNPQLFTSGTTYDASSVPIYNRLVEFKTGTTEVIPGLAEKWDVSEDGKTYTFHLRQGVKWQDSKDFKPTRDFNADDVVFSFDRQKNAQNPYHKVSGGSYEYFEGMGLPDLIAEVKKVDDKTVQFVLTRPEAPFLADLAMDFASILSKEYADNMLKAGTPEKVDLNPIGTGPFQLLQYQKDSRILYKAFEGYWGTKPQIDRLVFSITPDASVRYAKLQKNECQVMPYPNPADIARMKQDKNINLLEQAGLNVGYLSFNTEKKPFDDVKVRQALTYAVNKEAIIKAVYQGAGVAAKNLIPPTMWGYNDDVKDYTYDPEKAKALLKEAGQDKGFTVELWAMPVQRPYNPNARRMAYMIQADWAKVGVQAKIVTYEWGEYLKRAKAGEHQAVMMGWTGDNGDPDNFFATLFSCAAAKDGSNYSRWCYKPFEDLIQPARATDDHNKRIELYKQAQVVMHDQAPALIVAHSTVYEPVRKEVKGYVVDPLGKHHFENVSVE

SEQ ID NO: 55461 - protein, 277 aa, Enterobacter cloacae
MFVPFLIMLREGLEAALIVSLIASYLKRTQRGRWIGVMWVGVFLAAALCLGLGILINETTGEFPQKEQELFEGIVAVIAVLILTWMVFWMRKVSRNVKVQLEQAVDNALQKGNNHGWALIMMVFFAVAREGLESVFFLLAAFQQDVGIWPPLGAMLGLATAVVLGFLLYWGGIRLNLGAFFKWTSLFILLVAAGLAAGAIRAFHEAGLWNHFQDVAFDLSNCVSTHSLTGTLLEGIFGYQETPSVSEVAMYFIYLVPALVLFAMPPRTGTQASRVAP

SEQ ID NO: 55462 - protein, 137 aa, Enterobacter cloacae
MSDFPPIASLRSFEAVARLGSVTLAAKELHVTHSAISQQIKLLEEMVGVKLFIRQGRGVQINEEGRLYALQVREALNHIADATRLVQVKPRKQELTLAMVPSFGCHWLLPRLERFRAKYPLITLRIQASLTVTSLQQ

SEQ ID NO: 55463 - protein, 233 aa, Enterobacter cloacae
MTLPAFGLGTFRLKDDVVIASVKTALELGYRAVDTAQIYENEAAVGQALEESGVPRNELYITTKIWIENLSKDKLIPSLKESLKKLRTDYVDLTLIHWPSPNDAVSVEEFMQALLEAKKQGLTREIGISNFTIPLMEKAIAAVGAENIATNQIELSPYLQNLKVVDWAKQHGIHITSYMTLAYGKALKDEVIRRIAEKHNATAAQVILAWARGEGYAVSPAATKRENLAGKPR

SEQ ID NO: 55464 - protein, 495 aa, Enterobacter cloacae
MLRKMEHYVQDKPPVVQLKQQLLSQTPRAEGVVKATEKGFGFLEVDAQKSYFIPPPQMKKVMHGDRVMAVIHTEKDRESAEPEELIEPFLTRFVGKVQRKDDRLAIVPDHPLLKDAIPCRAARGVEHDFKEGDWAVAEMRRHPLKGDRGFYAELTQFITFGADHFVPWWVTLARHNLEKEAPNGVATEMQDEGLTRRDLTALEFVTIDSASTEDMDDALYAEEGADGKLHLTVAIADPTAWIAEGSKLDDAAKIRAFTNYLPGFNIPMLPRELSDDLCSLRPNEVRPVLACRMTIAADGAIEDDIEFFAATIESKAKLAYDNVSDWLENTGSWKPESDAIAAQIRLLHRICLNRGEWRKTHALVFKDRPDYRFVLGEKGEVLDIVAEPRRIANRIVEEAMISANICAARVLRDKLGFGIYNVHTGFDPANTEALAALLKTHDVHVDPEEVLTLPGFCKLRRELDAQPSGFLDSRIRRFQSFAEISTEPGPHFGGD

SEQ ID NO: 55465 - protein, 292 aa, Enterobacter cloacae
IPPVSTIFTADGQLDKTGTAALIDDLIKAGVDGLFFLGSGGEFSQLGAEERKAIARFAIDHVDRRVPVLIGTGGTNARETIELSQHAQQAGADGIVVINPYYWKVSEANLIRYFEQVADSVTLPVMLYNFPALTGQDLTPALVKTLADSRNNIIGIKDTIDSVAHLRSMIHTVKAAHPHFTVLCGYDDHLFNTLLLGGDGAISASGNFAPQVSVNLLKAWRDGDVAKAAEYHQTLLQIPQMYQLDTPFVNVIKEAIVLCGRPVSTHVLPPASPLDEPRKAQLKTLLQQLKLC

SEQ ID NO: 55466 - protein, 784 aa, Enterobacter cloacae
PGANPKVIAETVATPLEEAINGVENMMYMKSVAGSDGVLVTTVTFRPGTDPDQAQVQVQNRVAQAEARLPEDVRRLGITTQKQSPDVTLVVHLFSPNGKYDSLYMRNYATLKVKDELARLPGVGQIQIFGSGEYAMRVWLDPNKVAARGLTASDVVTAMQEQNVQVSAGQLGAEPLPKESDFLISINAQGRLHTEEEFGNIVLKTTQDGTVVRLRDVARIEMGSGSYALRSQLNNKDAVGIGIFQSPGANAIDLSNAVRAKMDELSTRFPADMKWAAPYDPTVFVRDSIRAVVQTLLEAVVLVVLVVILFLQTWRASIIPLIAVPVSVVGTFSIIYLLGFSLNTLSLFGLVLAIGIVVDDAIVVVENVERNIEEGLAPLAAAHQAMREVSGPIIAIALVLCAVFVPMAFLSGVTGQFYKQFAVTIAISTVISAINSLTLSPALAALLLKPHGAPKDFPTRLIDRLFGWIFRPFNRFFHRSSNGYQGLVGKTLGRRGSVFVVYLLLLCAAGVMFKAVPGGFIPTQDKLYLIGGVKMPEGSSLARTDAVIRKMSEIGMNTEGVDYAVAFPGLNALQFTNTPNTGTVFFGLKPFDQRKHTAAEINAEINAKIAQIQEGFGFSILPPPILGLGQGSGYSLYIQDRGGLGYGALQNAVNTMSGAIMQTPGMHFPISTYQANVPQLDVQVDRDKAKAQGVLLTDLFGTLQTYLGSSYVNDFNQFGRTWRVMAQADGQFRDSVEDIANLRTRNSHGCMVPDGNKVNISTAYGSDPGNRYNGYSEVCLIGNA

SEQ ID NO: 55467 - protein, 872 aa, Enterobacter cloacae
DVTVDLASVAISIDAIATDDVINAAEKGADLVLSGATSNVEENQTVTITFGGKSYTATVDAEGKWTATVPAADLAGLKDGDASVQVSVTNVNGNSASAGREYSVDATAPSVTINTLATDDILNAAEAKSDLTVSGTTTAEAGQTVTVSLNGKDYTTTVSADGSWTLNVPAADLAGLTDGSVTVTASVSDKAGNPASVDHNLAVDITAPAVTINTVAGDDVINIAEHGQAQIISGTATGAAAGDKVTVTIGGQTYTTVLDAAGNWSVGVPASVISGLSDGTVTVTASVTDAAGNTGTGTHNVTVDTGLPSVAFNAISDDNVLNAVEKGQDLSVSGTSANLAEGTVVTVTLNGKNYAATTAADGTWSLTVPAADLAGLGDHYTLSATATNGVGNSVSNTANLLVDTALPTVTINTVAGDNVINAAEVAAGQTISGKVANAEAGNTVTVTIGGNSYTATVQSDLTWSVNVPESVLTALGNGDLTVSATVTNGHGNTGAGEREIVIDASLPGLRIDTVAGDDVINSIEHGQNLIVTGSSDGLAAGTTLTVTVNGKTYAASVLADGTWSAAIPAADVGALAAGTVTVTAAGQSAAGNPVTISHDVTVDLSAVAISIDAIATDDVINAAEKGADLVLSGSTSNVEENQTVTITSGGKTYTAKVDADGNWTATVPSADLAGLKDGDASVQVSVTNAHGNSASAGREYSVDATAPTVTIDTVAGDNVINASEAAAGVAISGTTTAEVGQTVTVTLDGKSYTAQVQQGGIWSVNVPGTDLSALADNGYSVQVSVSDAAGNPGSAGKAITLDTTPPTVSFNDVAGDNVINSVEHGQAQIVSGTATGASVGDKLVITIGSNQYTTTVDARGNWSVGVPASVIS

SEQ ID NO: 55468 - protein, 457 aa, Enterobacter cloacae
MNALTLTPGSLTLKQLRNVLAQPVTLSLDASAHAAINDSVACVEAIVAEGATAYGINTGFGLLAQTRIATHDLENLQRSLVLSHAAGVGQPLDDEIVRLMMVLKINSLARGFSGIRLSVIQALMALVNAEVYPWIPAKGSVGASGDLSPLAHMSLLLLGEGKARWQGEWLPAKEALKKAGLNPITLAGKEGWALLNGTQASTAFAARPFEAEDLFASAVVCGALTTEAVLGSASPVDARIHEVRGQRGQIDVAAMYRHVLTDTSEIGDSHHNCEKVQDPYSLRCQPQVMGACLTQLRQAAEVLLVEANAVSDNPLVFAQENEVVSGGNFHAEPVAMAADNIALAIAEVGALSERRIALMMDKHMSQLPPFLVRNGGVNSGFMIAQVTAAALASENKALSHPHSVDSLPTSANQEDHVSMAPAAGRRLWEMASNTRGVLAVEWLAACQGVDLREGLKS

SEQ ID NO: 55469 - protein, 328 aa, Enterobacter cloacae
KSPSKGKAVSIALCGNAADILPETGRPSVRQDLVTDQTSAHDPLHGYLAKGWTWEEYQQKAETDPEGTVLAAKRSMAEHVSAMLAFSQMGIPTFDYGNNIRQMAKEMGVNNAFDFPGFVPAYIRPLFCRGIGPFRWVALSGDPEDIYKTDAKVKEIVADDEHLHHWLDMARERINFQGLPARICWVGLEWRQKLGLAFNEMVRSGEVSAPIVIGRDHLDSGSVASPNRETEAMRDGSDAVSDWPLLNALLNTASGATWVSLHHGGGVGMGFSQHSGMVIVCDGTDEAAARIARVLHNDPATGVMRHADAGYEIAIDCAKEQGLNLPMI

SEQ ID NO: 55470 - protein, 330 aa, Enterobacter cloacae
MFKCLKRPIISSEPVADQFYSESRSVTVKRPVSGSLAWAFFSIIALSVLTSTVALLTLASSQRDAEAINIAGSLRMQSYRLGYEMQRNSPSLAAHRDSWQQTLNAPALQKLNRWYVPDDVKARYQQLHVAWLEMDARIARGDSAWYQIHIEDFVGRIDAFVLALQHYTEHKIQTVTLLSLAGALGILLLTLFTLRRIRRQVVLPLNNLVAASERVERGEFATPAPDTALPNELGQLSRSFNHMSAELATLYRSLEASVAEKTRHLHEAHQQLDMLFKCSQALNTGQIDSHCFRHILQIVHDYTQMNYLELRTSDDWRLSEATESHGHSSA

SEQ ID NO: 55471 - protein, 418 aa, Enterobacter cloacae
MRLKTIVHQQRFDWVGYDESRPLPVSVPSMPLSLTVVLTGDRESLADFQEMEPELAEQAVYSEYEDNTQIADADDMAQWCQWVMAVAERFALPTPAADAWPGLIREAVRYTGDQETLPLCPLWIGKQLREVGVISGNGAFTGEQLTQMLAQREWREGYLADRMQDEILLEQILVETEGERVGQINALSVIEFPGHPRAFGEPSRISCVVHIGDGEFTDIERKAELGGNIHAKGMMIMQAFLMSELQLEQQIPFSASLTFEQSYSEVDGDSASMAELCALISALAEVPINQNIAITGSVDQFGRAQPVGGLNEKIEGFFSICQQRGLNGKQGVIIPAPNARHLSLSQDILDAVEQEQFAIWAIEGIEDALPLLTNLVWDGEGQTTLMQTIQERIAQATQQDARHRYPWPLRWLGWFSSN

SEQ ID NO: 55472 - protein, 394 aa, Enterobacter cloacae
MSVRLVLAKGREKSLLRRHPWVFSGAVARMEGKASLGETIDIVDHQGKWLARGAYSPASQIRARVWTFDKDETIDIDFFVRRLQQAQQWRDWLAKRDGLDSYRLIAGESDGLPGVTIDRFGNFLVLQLLSAGAEYQRAALIGALQTLFPQCAIYDRSDVAVRKKEGMELTQGPVTGELPPALLPIEEHGMKLLVDIQGGHKTGYYLDQRDSRLATRQYVADKRVLNCFSYTGGFAVSALMGGCAQVVSVDTSQEALDVAKQNVELNKLDLSKAEFVRDDVFKLLRKYRDQGEKFDVIVMDPPKFVENKSQLMGACRGYKDINMLAIQLLNPGGVLLTFSCSGLMTTDLFQKIIADAAIDAGRDVQFIEQFRQAADHPVICYLPEGLYLKGFACR

SEQ ID NO: 55473 - protein, 73 aa, Enterobacter cloacae
MFHCPKCHFAAHARTSRYFTDTTKERYHQCTNINCSATFVTTETVERFIVSPGEVVPAPPHPATSGQQQIQWM

SEQ ID NO: 55474 - protein, 598 aa, Enterobacter cloacae
IAINTPAVDDVINATEKARIAVSGTSNQPDGTTITVTLNGISYTATTDASGSWSITVPVSNVSALGEASYVVTASVTDAAGNSASTGHSVLVDSACPQVTINPVATDDVINAAEVAAGQTLSGKVSGAASGDTVTISIGGNTWTATVQDDLSWSVNVPSTVLTAIGNGDLTVSASVTNGHGNTGTGEREIVIDANLPGLRVDTVAGDDVINSIEHAQNLIITGSSEGLATGAALTVTVNGKTYAATVLADGTWTAAIPAADVSALNAGTVTVTVEGQSAAGNPVSISHDVKVDLAAVAISIDPIASDDVINAAEKGADLVLSGSTSNVEENQTVTITFGGKSYTVTVDASGNWTATVPSADLGSLKDGDASVQVSVTNVNGNSASAGREYSVDATAPTVSIEIVSDNNIINAAEAQQDLVIDGVTNAEAGQTVTVTLNGVDYTTTVLANGSWSVTVPSADLSGITDGNYTISAAVSDKAGNPASADRDVLVDTTVPQLTIHTVSDDDVINSAEHAQALIVTGSVTGAAAGDVVTVTLNGKSYTATLDASGNWSVGVPAADVTALAAGDYTITAALTDKAGNSNSATHGVEVNLTAPVL

SEQ ID NO: 55475 - protein, 91 aa, Enterobacter cloacae
MASVSISCPSCSATEGVVRNGKSTAGHQRYLCSHCRKTWQLQFTYTASQPGTHQKIIDMAMNGVGCRASARIMGVGLNTILRHLKNSDRSR

SEQ ID NO: 55476 - protein, 166 aa, Enterobacter cloacae
MDVGPVMLDVEGFELDAEEREILAHPLVGGLILFTRNYHDPAQLRELVRQIRAASRNHLVVAVDQEGGRVQRFRDGFTRLPAAQSFAALLGTEEGGKLAQDAGWLMASEMIAMDIDISFAPVLDVGHISAAIGERSYHEDPRIALAMATRFIDGMHDAGMKTTGKH

SEQ ID NO: 55477 - protein, 71 aa, Enterobacter cloacae
MFTYYPANTAAAQPELVNAIAQGLHAEHGAVTEDDILMELTKWVESTDNDILSDIYQQTINYVVSGQNAPL

SEQ ID NO: 55478 - protein, 127 aa, Enterobacter cloacae
VAGIIVEEWERQGGAGLDFPEDLSRKRQKLFRWLDGDTEYARKNISQLSPAIIAVLPLEFRGRLVPQDCFMARYAAMEKEIGEAKRAVILKAPQHQLVKEVREGIEHLLALLPGEAVVQVLSGLAVM

SEQ ID NO: 55479 - protein, 294 aa, Enterobacter cloacae
QLFALAPVATFKERLVMDLYPANATDIQDPLLALLEDYNKGDLQRQVPPAQSGPQPGKAGRDRPIVIMLDPGHGGEDSGAVGKYRTREKDVVLQIARRLKALIDKEGNMRAYMTRNEDIFIPLKVRVAKAQKQRADLFVSIHADAFTSRQPSGSSVFALSTKGATSTAARYLADTQNASDLIGGVTKSGDRYVDHTMFDMVQSLTINDSLKFGKAVLGKLGNINKLHKNSVEQAGFAVLKAPDIPSILVETAFISNVEEERKLKTAKFQQEVAESILAGIRAYFSDGATLARRG

SEQ ID NO: 55480 - protein, 206 aa, Enterobacter cloacae
MSAIAPGMILLAYLCGSISSAILVCRIAGLPDPRENGSGNPGATNVLRIGGKGAAVAVLIFDVLKGMLPVWGAYALGVTPFWLGLIAIAACVGHIWPVFFGFKGGKGVATAFGAIAPIGWDLTGVMAGTWLLTILLSGYSSLGAIVSALIAPFYVWWFKPQFTFPVSMLSCLILLRHHDNIQRLWRRQETKIWTKLKRKKKDAPKG

SEQ ID NO: 55481 - protein, 213 aa, Enterobacter cloacae
MRSKYIVIEGLEGAGKTTARNVVVDTLKALGVADMVFTREPGGTQLAENVRSLVLDIKSVGDEVITDKAEVLMFYAARVQLVETVIKPALAEGKWVIGDRHDLSTQAYQGGGRGIDQTMLATLRNAVLGDFRPDLTLYLDVTPEVGLKRARARGELDRIEQESFDFFNRTRARYLELAAQDSSICTIDATQSLDDVTRDIQHTITQWVQEQQA

SEQ ID NO: 55482 - protein, 269 aa, Enterobacter cloacae
  MISC_FEATURE (122)..(122): X=any amino acid
MFLINGLEQDTLPASDRAIQFGDGCFTTARILNGDVCLLEAHIRRLQHGCEKLMIPFTHWDTLRQEMCELGTGKDSGVLKVIISRGSGGRGYSAASCLNPTRILSVSAYPAHYSRWREEGVXVTLSPVRLGRNPMLAGLKHLNRLEQVLIRTHLEQTDADEALVLDSEGFITECCAANLLWRQGEEVFTPSLEYAGVNGLMRQFCLQQLARSGFRVVEVSAGEAALQTADEVIICNALMPVVPVRAYGQQRWSSRELFQFLAPICEQTR

SEQ ID NO: 55483 - protein, 237 aa, Enterobacter cloacae
FKPWRLRFKKEQRLPLLFYGLSLGAMNYLFYLSIQTIPLGIAVALEFTGPLAMALFSSRRPVDFIWVVLAVLGLWFLLPLGQSVAEIDLTGAALALGAGACWAVYILTGQRAGEEHGPATVALGSLIAAIVFVPIGMAQATESIWQWSVMPIGLAVAILSTALPYSLEMIALTRLPTRIFGTLMSMEPALTAISGMVFLGETLTLTQTLALCSIIAASMGSTLTMRPEPKVEKVDIS

SEQ ID NO: 55484 - protein, 167 aa, Enterobacter cloacae
MSTAKLVKTKASNLLYTRNDVSDSDKKATIELLNRQVIQFIDLSLITKQAHWNMRGANFIAVHEMLDGFRTALVTHLDTMAERAVQLGGVALGTTQVINSKTPLKSYPLDIHTVQDHLKELADRYAIVANDVRKAIGEAKDEDTADIFTAASRDLDQFLWFIESNIE

SEQ ID NO: 55485 - protein, 244 aa, Enterobacter cloacae
MLYIVRLILTVIYCILVCIFGSIYCLFSPRNPKHVATFGHMFGRLAPLFGLKVEKRLPEGAENFGNAIYIANHQNNYDMVTAANIVLPPTVTVGKKSLLWIPFFGQLYWLTGNLLIDRNNRAKAHSTIAEVVNHFKKRKISIWMFPEGTRTRGRGLLPFKTGAFHAAIAAGVPIIPVCVSNTSNKINLNRLNNGLVIVEMLPPVDTSKYGKDQVREPAAHCRELMAQHIAQLDKEVAEREAAGK

SEQ ID NO: 55486 - protein, 236 aa, Enterobacter cloacae
MSIAVNVNDPTNSGVNNTKSTTGSNSLTGSNAADLQGSFLTLLVAQLKNQDPTNPMQNNELTTQLAQISTVSGIEKLNTTLGSVSGQINSAQSLQAASLIGHGVMIPGTTILAGTSTTEGNTTTTTTPFGVELQQAAEKVTATITDSNGTVVRTIDIGELKAGVHTFTWDGSLTDGTKAPNGSYKVAISASNGTTQLVAQPLQFALVQGVIKGSDGNKLDLGTSGSTTLDEVRQII

SEQ ID NO: 55487 - protein, 45 aa, Enterobacter cloacae
VLVIKANLKDAFGIKERLVPFLDGQVIKKVDLTTQTIEVDWDPGF

SEQ ID NO: 55488 - protein, 255 aa, Enterobacter cloacae
MWIGIISLFPEMFRAITDYGVTGRAVKNGLLSIQSWSPRDFTHDRHRTVDDRPYGGGPGMLMMVQPLRDAIHTAKAAAGEGAKVIYLSPQGRKLDQAGVSELATNQKLILVCGRYEGIDERVIQTEIDEEWSIGDYVLSGGELPAMTLIDSVARFIPGVLGHEASATEDSFADGLLDCPHYTRPEVLEGMEVPAVLLSGNHAEIRRWRLKQSLGRTWLRRPELLENLALTEEQAKLLAEFKTEHAHQQHEHDGNA

SEQ ID NO: 55489 - protein, 115 aa, Enterobacter cloacae
MSNIIKQLEQEQMKQDVPSFRPGDTVEVKVWVVEGSKKRLQAFEGVVIAIRNRGLHSAFTVRKISNGEGVERVFQTHSPVVDSIAVKRRGAVRKAKLYYLRERTGKSARIKERLN

SEQ ID NO: 55490 - protein, 302 aa, Enterobacter cloacae
MAALNSKVRKAVIPVAGLGTRMLPATKAIPKEMLPLVDKPLIQYVVNECIAAGITEIVLVTHSSKNSIENHFDTSFELEAMLEKRVKRQLLEEVQSICPPHVTIMQVRQGLAKGLGHAVMCAHPVVRDEPVAVTLPDVILDEYESDLSQDNLAEMIKRFDETGGSQIMLQPVEDVAAYGVVDCKGVNLEPGESVPMVGVVEKPKADVAPSNLAVVGRYVLSAEIWPLLAKTPPGAGDEIQLTDAIDMLIEKETVEAYHMKGKSHDCGNKLGYMQAFVEYGIRHNTLGEEFKTWLKESVGIKK

SEQ ID NO: 55491 - protein, 125 aa, Enterobacter cloacae
VLITVHLISVALTISFFIVRYWWRYSNNPLTDARWVRIAPHCIDTLLLLSGAGLMWKTGYLPFTDKGAWLTEKLFGVIIYIVLGFIALGRRRPRSQQVGFIAFLLGLVVLYIIIKLATTRIPLLG

SEQ ID NO: 55492 - protein, 275 aa, Enterobacter cloacae
MDFQRWLREAAGELSESESPKRDAEILLEHVTGKARTYLLAFGETELTAEQEAQLAALLARRKTGEPVAHLVGEREFWSLPLYVSAATLIPRPDTECLVEQALARLPAAACSILDLGTGTGAIALALATERRDCAVTAVDVMPDAVALAQRNVERHGLRNVTVLQSSWFAALENRSFAMVVSNPPYIDEHDPHLAQGDVRFEPLTALVAGNAGLADLDHIVTTSRKHLLPGGWLLVEHGWTQGEAVRALFTQAAYAAVETCRDYGGNERLTLGQW

SEQ ID NO: 55493 - protein, 248 aa, Enterobacter cloacae
MEVRAGTGGDEAALFGGDLFRMYSRYAESRRWRVEIMSANEGEHGGHKEVIAKISGDGVYGRLKFESAGHRVQRVPATESQGRIHTSACTVAVMPELPEAELPDINPADLRIDTFRSSGAGGQHVNTTDSAIRITHLPTGIVVECQDERSQHKNKAKALSVLGARIHAAEMAKRQQAEASTRRNLLGSGDRSDRNRTYNFPQGRVTDHRINLTLYRLDEVMEGKLDMLIEPIVQEYQADQLAALSEQE

SEQ ID NO: 55494 - protein, 72 aa, Enterobacter cloacae
MAKEDNIEMQGTVLDTLPNTMFRVELENGHVVTAHISGKMRKNYIRILTGDKVTVELTPYDLSKGRIVFRSR

SEQ ID NO: 55495 - protein, 198 aa, Enterobacter cloacae
KKESELPFHVVAYDFGAKRNILRMLVDPRCRLTVVQAQIIAEDVLKMNPDGIFLSNGPGDPAPCDYAIAAIKSFLETDIPVFGICLGHQLLALASGANTVKMKFGHHGGNHPVKDIDNNTVMITAQNHGFAVDEASMPANLRVTHKSLFDGTLQGIHRTDKPAFSFQGHPEASPGPHDAAPLFDHFIELIEQYRKTAK

SEQ ID NO: 55496 - protein, 155 aa, Enterobacter cloacae
VKLQLVAVGTKMPDWVQTGFTEYLRRFPKDMPFELVEIPAGKRGKNADIKRILDKEGELMLAAAGKNRIVTLDIPGKPWNTPQLAQELERWKQDGRDVSLLIGGPEGLSPACKAAAEQSWSLSALTLPHPLVRVLVAESLYRAWSITTNHPYHRE

SEQ ID NO: 55497 - protein, 75 aa, Enterobacter cloacae
MNKTAAIISACAFTFALSACSGNNYVMHTNDGRSIVSEGKPTTDNDTGMISYKDANGNKQQINRTDVKEMKEIEH

SEQ ID NO: 55498 - protein, 318 aa, Enterobacter cloacae
  MISC_FEATURE (249)..(249): X=any amino acid
ITFNSTLFSCLKLTMIVRPKQHWLQLIFVWHGSVLPKIYTRLLLNFLLSIAVILMLPWYTSLGIKFTVAPFSILGVAIAIFLGFRNNACYSRYVEARLLWGQLMIAARSLFREVKNTLPDDKHLGEFVRLQIAFANCLRMTLRRELNAEQLSRYLAPDDLRQVMSANSPANRILLIMGEWLAVRRRNGQLSDILFHSLNNRLNDMSIVLSGCERIATTPVPFAYTLILHRTVYLFCIMLPFALVVDLHXMTPFVSALISYTFISLDTLAEELEDPFGTEDNDLPLDAIWNMMERDLLQMNDEENIPERLMPDKHYQLT

SEQ ID NO: 55499 - protein, 283 aa, Enterobacter cloacae
SLIYSWVCYSKQTDFMYQPVALFIGYRYMRGRAADRFGRFVSWLSTIGITLGVMALVTVLSVMNGFERELQNNILGLMPQAVLSSSNGSVNPQQLPESAAKLQGVTRVAPLTTGDVVLQSARSVAVGVMLGIDPAQNDPLTPYLVNVKQSDLEAGKYNVILGEQLAGQLGVNRGDHVRVMVPSASQFTPMGRLPSQRLFNVIGTFAANSEVDGYQMLVNIQDASRLMRYPAGNITRWRLWLDAPLKVDTLSQQKLPDGTKWQDWRERKGELFQAVRMEKNMMG

SEQ ID NO: 55500 - protein, 357 aa, Enterobacter cloacae
MKQKALWINQIKGLCICLVVIYHSVITFYPHLIGLQHPLSGLLAKCWVYFNLYLAPFRMPVFFFISGYLIRRYIDEVDWRTSLDKRIWSIVWVLALWGVLQWQALTHLNAWLAPERELATSSNAAYADSFSGFVLGMITASTSLWYLYALVVYFTLCKLLSRWKLPVLGLLALASIAINFLPLPWWGMNSVVRNMIYYSLGAWYGAELMAWMKSVNLRRIWLATGAFAAVSVVLWFANVPLLLSLLSIVLIMKLFYSLEQRYAVHPNNLLNVIGSNTIAIYTTHRILIEAFSLFLIGEMNAASWPVWAELTLVLVYPFASLFICTLAGLGVRKISTALFGDVFFSPPSTLTLSPSTR

SEQ ID NO: 55501 - protein, 922 aa, Enterobacter cloacae
PLILVDGSSYLYRAYHAFPPLTNSAGEPTGAMYGVLNMLRHLILQYQPTHAAVVFDAKGKTFRDELFEHYKSHRPPMPDDLRAQIEPLHTMVKAMGLPLLAVSGVEADDVIGTLAREAEKMGRPVLISTGDKDMAQLVTPGITLINTMTNTILGPEEVVTKYGVPPELIIDFLALMGDSSDNIPGVPGVGEKTAQALLQGLGGLDTLYAEPDKIAGLSFRGAKTMAGKLEENKEVAYLSYKLATIKTDVELELGCEQLEVQQPSADDLLSLFKKYEFKRWTADVEAGKWLQAKGAKPAAKPKRQSSLTQEEQAEEEAVALSFDNYETILEESRLIAWIDKLKKAPVFAFDTETDSLDNISANMVGLSFATEPGIAAYVPVAHDYLDAPEQISRERVLELLKPILEDEKALKVGQNLKYDRGILQNYGIELRGIAFDTMLESYILDSVAGRHDMDSLSDRWLKHKTITFEEIAGKGKNQLTFNQIALEEAGLRAEDADVTLQLHLKMWPKLQKHEGPLNVFQHIEMPLVPVLSRIERNGVKIDPTVLHNHSGELAQRLTELEQKAHELAGEPFNLSSPKQLQTILFEKQGIKPLKKTPGGAPSTSEEVLEELALDYPLPKVILQYRGLAKLKSTYTDKLPLMINPKTGRVHTSYHQAVAATGRLSSTDPNLQNIPVRNEEGRRIRQAFIAPEDYLIVSADYSQIELRIMAHLSRDKGLLTAFAEGKDIHRATAAEVFGLPLDSVTNEQRRSAKAINFGLIYGMSAFGLSRQLNIPRKESQKYMDLYFERYPGVLEYMERTRAQAKEKGYVETLDGRRLYLPDIKSSNAGVALAAERAAINAPMQGTAADIIKRAMIAVDAWLEKEKPRVKMIMQVHDELVFEVHKDDLDAVSKKIHELMESSMTLSVPLLVEVGSGENWDQAH

SEQ ID NO: 55502 - protein, 431 aa, Enterobacter cloacae
MSANHAAFNLIFRFVENYVSPIAGRISSQRHVMAIRDGFISAMPFMIVGSFLLVFAYPPFSPDTTWGFARAWLDMAKQFEGQILTPFDMTMGIMSIYICAAIAYNLGKHYVKSHQLDPFMCAMLSLMAFLLVAAPKTKGTLPVDSLGGTGIFTAILVAIYCVEMMRFLKAHNIGIRLPDQVPPMIKNSFDLLIPVLVVVLTLYPLSLLIQSQFGMLIPQAIMSVFKPLVSAADSLPAILLAVLIGHLLWFAGIHGAAIVSGMLQMFWLTNLGANQTALAASQPLPHIFMEAFWTFFIVIGGSGATMGLVICYLRSRSAHLRSIGRLSVVPSFFNINEPVIFGTPIVMNPVFFIPFLLAPMVNAVLAWAAMTFDLIGRVISVVPWTAPAPIGARRALGWDFRAAILVVVLACVSAIIYFPFFKVYDKQLLDQ

SEQ ID NO: 55503 - protein, 499 aa, Enterobacter cloacae
ATLALSAPLALAAVPKDMLAIGKAADPQTLDPAITIDNNDWTVTYPSYQRLVKYKPGSTEVEGDLSTGWKASEDQKEWTFTLADNAKFSDGTPVTAEAVKLSFERLLKLGQGPSEAFPKDLKIDAVDDHTVKFTLSQPFAPFLYTLANDGASIINPAVLKANAADDARGFLAQNTAGSGPFMLKSWQKGQQLILIPNPHWQGEKPHFKRVSVKIIGESASRRLQLSRGDLDIADSLPVDQLAALKQEGKVAVAEYPSLRVTYLYLNNGKAPLNQVDLRRAISWATDYQGMVKGILSGNGKQMRGPIPEGMWGFDATAMQYSFDEAKAKVALEKVKDKPASLTFLYSDNDPNWEPIALSTQASLGKIGINVKLEKLANATMRDRVGKGDYDIAIGNWSPDFADPYMFMNYWFESDKKGLPGNRSFYENKEVDSLLQAALKTTDQAERTKDYQQAQKVVIDEAAYVYLFQKNYQLAMNKEVKGFTINLDLEQVFNIGTMSK

SEQ ID NO: 55504 - protein, 191 aa, Enterobacter cloacae
MPEESELIDVAKTFPTLHIDLKYATADNITGRPIYQEALCLLHTDAATALAKAISIASLAGLKLVVYDAYRPQQAQAQLWDACPNPEYVVDVAIGSNHSRGTAIDVTLMDEHNAVLDMGAGFDEMHDRSHPYHPSVPPHAQRNRLLLNAIMFGGGFVGISSEWWHFELPNAASYPLLDDRFACFPLTHTSL

SEQ ID NO: 55505 - protein, 393 aa, Enterobacter cloacae
DTRFESCIKCTLCTTVCPVSGVNPRYPGPKQAGPDGERLRLKDGKLYDEALKYCINCKRCEVACPSDVKIGDIIQRARARYSTQKPTLRDAILSHTDLMGSVSTPFAPLVNAATALKPVRPLLDATLKIDHHRSLPKYSHGTFRRWYKSVAADRAQYAEQVAFFHGCYVNYNHPQLGKDLLKVLNAMGTGVQLLSKEKCCGVPLIANGFTDKARRQAQSNVTSLREAIVDKGIPVLATSSTCTFTLRDEYPHLLDVDNTGLREHIELATRFLWRKLDSGQTLPLGKLPLKVVYHTPCHMEKMGWSLYTLELLRLIPGLELTVLDSRCCGIAGTYGFKRENYETSQAIGAPLFRQIEESGADIVVTDCETCKWQIEMSTSKRCEHPISLLAKAL

SEQ ID NO: 55506 - protein, 478 aa, Enterobacter cloacae
MSVLKKNSARQRDQERARLIWLLTTDKAVTSTLLGKLTLAEQYDVGTLADDIAEVGALVAHLPPPDLADTLEALPSEERHALWRLVQDHERGQVLLEASENVWDDLIDEMSDRDILDAVQTLDIDEQIYLVQHLPRNLTGRLLASLPAEERARVRQVMHYEKNSVGAIMEFGVITVRPDVTLGTVQRYLRRLGKMPDNTDKLFVTSRDKTLLGELELKTILLNSTQRKVSEVMENEPMVFSPEDDAEKAARTFERDDLVSAAVVDSVGKLMGRLTIDEIVDVVYEETDNDLRALGGISAEDDVHASVGKAVKTRWAWLAINLCTAFIASRVIDGFEHTISQLVALASLMPIVAGIGGNTGNQTITMIVRALALENIQPGNFSWLIFREMGVALINGLVWGGIMGGITWWLYDDMALGGVMMLAMVLNLLVASIMGVIIPLTMTKLGRDPAVGSSVMITAITDTGGFFIFLGLATIFLL

SEQ ID NO: 55507 - protein, 261 aa, Enterobacter cloacae
MELTPREKDKLLLFTAALVAERRLARGVKLNYPESVALISAFIMEGARDGETVASLMEAGRHVLTRDQVMEGVPEMIPDIQVEATFPDGSKLVTVHNPIVKERVMIPGEYQIQPGNIAFNVGRETQSVVVENHGDRPIQVGSHYHFYEVNPALKFDREATKGFRLNIPAGTAVRFEPGQKREVTLVQVTGAQRIFGFRGEVMGEVKHGDISRRAYADMFGPTTGDKVRLADSELWIEVEDDLTVYGEEVKFGDGKVIRAGV

SEQ ID NO: 55508 - protein, 275 aa, Enterobacter cloacae
MALQQEIIQALGAKATVDAHEEIRRSVDFLKSYLKKNAFLKSLVLGISGGQDSTLTGKLCQMAISELREETGDEKLQFIAVRLPYGVQADEQDCQDAIAFIQPDRVLTVNIKGSVLASEQALREAGIELSDFVRGNEKARERMKAQYSIAGMTKGVVVGTDHAAEAITGFFTKYGDGGTDINPIFRLNKRQGKQLLAALGCPEHLYKKAPTADLEDDRPSLPDEAALGVTYDNIDDYLEGKKLDEGTAKIIEGWYLKTEHKRHTPITVFDDFWKK

SEQ ID NO: 55509 - protein, 384 aa, Enterobacter cloacae
MTNTTNLDPIETASLDELQALQTERLKWTLHHAYNNVPMYKRKFDAAGVHPDDFKELADIRKFPCTTKQDLRDNYPFDTFAVPMEQVVRIHASSGTTGKPTVVGYTQGDIDNWANLVARSLRAAGGSAKDKIHVAYGYGLFTGGLGAHYGAERLGATVIPMSGGQTEKQAHVIRDFQPDMIMVTPSYCLNLIEELERQMGGDASGCSLRVGVFGAKPWTQAMRREIEKRLGITALDIYGLSEVMGPGVAMECIETVDGPTIWEDHFYPEIVNPNDGTPLDDGQQGELLFTTLTKEALPVIRYRTRDLTRLLPATARSMRRMDRISGRSDDMLIIRGVNVFPSQLEEEIVKFEHLSPHYQLEVNRRGHLDSLSVKVELKESSLTL

SEQ ID NO: 55510 - protein, 519 aa, Enterobacter cloacae
DKTYKITILHTNDHHGHFWRTNYGEYGLSAQKTLVDGIRKEVAAQGGSVLLLSGGDINTGVPESDLQDAEPDFRGMNLIGYDAMAVGNHEFDNPLTVLRQQEKWAKFPFLSANIYQKSTGERLFKPWALFKRQDLKIAVIGLTTDDTAKIGNPEFFTDIEFRKPADEAKLVIQELQQNEKPDVIIATTHMGHYDNGEHGSNAPGDVEMARSLPAGSLAMIVGGHSQDPVCMASENKKQVDYVPGTPCAPDRQNGIWIVQAHEWGKYVGRADFEFRNGEMKLVHYQLIPVNLKKKVTYPDGKSERVLYTPEIAENQQMLSLLTPFQNKGKAQLDVKIGTLNGRLEGDRSKVRFVQTNMGHLVLAAQMARTGADFGVMSGGGIRDSIEGGNITYKDVLKVQPFGNVVVYADMSGKEVIDYLTAVAQMKPDSGAYPQFANVSFVAKDGKLNDLKIKGEPVDPAKTYRLATLSFNATGGDGYPHIDNKPGYVNTGFIDAEVLKQFIEQNSPIDVNAYEPKGEV

SEQ ID NO: 55511 - protein, 135 aa, Enterobacter cloacae
QRLGLPGDYGIDYQLLNAAKGANLPVIELEGTDSQIALLRQLPDDGLMLLDDTLTHWHTNARLLQTMIGWWLDAPPADGKLALPSTFSESLYDVLMNARNKAWRQTLHALPAGHYVVAVGALHLYGEGNLPSLLK

SEQ ID NO: 55512 - protein, 225 aa, Enterobacter cloacae
FYNGHSPNQQRTNGQMTTDVTSCAKKSRGRPKVFDRDAALDKAMTLFWQHGYEATSLSDLVEATGAKAPTLYAEFTNKEGLFRAVLDRYISRFAAKHEAQLFCEEKSVEQALRDYFTAVATCFTSKETPAGCFMINTSATLAASSKEIANTVKSRHAMQEETLSAFLAQRQQRGELPAQCNPQLLAQYLSCILQGMSISAREGATLEKLQNISETTLRLWPELLK

SEQ ID NO: 55513 - protein, 426 aa, Enterobacter cloacae
MIVGGGAGGLELATQLGKKLGRGKKAKITLVDRNHSHLWKPLLHEVATGSLDEGVDALSYLAHARNHHFQFQLGSVVDINRESKTITLAELRDDKGDLLVPERKLAYDTLVMALGSTSNDFNTPGVKEHCIFLDNPHQARRFHQEMLNLFLKYTSNMGANGKVNIAIVGGGATGVELSAELHNAVKQLHSYGYKGLTNEALNVTLVEAGERILPALPPRISGAAHNELTKLGVRVLTQTMVTSADEGGLHTKDGEYIKADLMVWAAGIKAPDFMKEIGGLETNRINQLVTEPTLQTTRDPEIFAIGDCASCARPEGGFVPPRAQAAHQMASLVLHNILAQYKGKPMKAYVYKDHGSLVSLSNFSTVGSLMGNLMRGSMMVEGRIARFVYISLYRMHQIALHGYFKTGLMMLVGRINRVIRPRLKLH

SEQ ID NO: 55514 - protein, 81 aa, Enterobacter cloacae
MRIEVTIAKTTVLPAGALDALAGELSRRINNTFPDNAGAVTVRYAAANNLSVIGAAKEDKDRISEILQETWESADDWFITD

SEQ ID NO: 55515 - protein, 374 aa, Enterobacter cloacae
MHMRYDLIIIGSGSVGSAAGYYATQAGLKVLMIDAHLPPHSEGSHHGDTRLIRHAYGEGERYVPLVLRAQTLWDELAKQTEDRIFERTGVINLGPAQSEFLAGVERSAKAFNLDVEKLDATGITARWPEITVPDDYIGLFEAHSGVLHCETAIKTWIDLAAKAGCAQLFNCPVEAITHDADGVTVTTIDGGYSASRLLVSAGTWVTRLLPELPIQPVRKVFSWFQSDGRYSAQNKFPAFTGELPNGDQFYGFPSEKDALKIGKHNGGQAISTPEERNLFGAFPQDGSEAFTFLRTILPGVGGLLYGAACTYDNTPDEDFIIDTLPGHDNVLLITGLSGHGFKFASVLGEIAAQFAQGIAPQFDLTPFSLSRFNG

SEQ ID NO: 55516 - protein, 157 aa, Enterobacter cloacae
PRAEPVVEPEPVVEKPQRKEAVIIMNVAAHHGSHLNGDVLLNSIQQAGFKFGDMNIFHRHLSPDGSGPALFSLANMVNPGTFDPEMTGDFVTPGVTIFMQVPSYGDELQNFKLMLQSAQHIADEFGGVVLDDQRRMMTPQKLREYQDRIREVKEANA

SEQ ID NO: 55517 - protein, 669 aa, Enterobacter cloacae
MDSIEKQLTELRTTLRHHEYLYHVMDAPEVPDAEYDRLMRELRELEAAHPELITPDSPTQRVGAEPLGAFSQVRHEVPMLSLDNVFDEESFLAFNKRVQDRLKSSDSLTWCCELKLDGLAVSLLYENGVLVRAATRGDGTTGEDITTNVRTIRAIPLKLQGDNIPARLEVRGEVFLPQAGFEKINEAARRTGGKVFANPRNAAAGSLCHLIPRITAKSRLTFFCYGVGILEGGELPDTHLGLLLQFKAWGSAGENRVQLCDSPKAVLAFYHKVERGPPDLGFDIDGVVIKVNSLALQEKLGFVARAPRWAVAFKFPAQEQMTFVRDVEFQVGRTGAITPVARLEPVQVAGVLVSNATLHNADEIERLGLRIGDKVVIRRAGDVIPQVVNVVESERPADTREIVFPTHCPVCGSDVERVEGEAVARCTGGLICGAQRKESLKHFVSRRAMDVDGMGDKIIDQLVEKEYVHTPADLFRLTAGKLTGLDRMGPKSAQNVVNALEAAKETTFARFLYALGIREVGEATAAGLAAYFGTLEALEKASIDELQKVPDVGIVVATHVFNFFAEESNREVIGKLLEEGIKWPAPVVVNAEEIDSPFAGKTVVLTGSLSQLSRDDAKARLVALGAKVAGSVSKKTDLVIAGEAAGSKLAKAQELGIEVIDEAEMMRLL

SEQ ID NO: 55518 - protein, 169 aa, Enterobacter cloacae
MSRRKYTFEQRLEVVMHYLATDEGYRLTSARFNVPRTQVRIWVAAYDVYGEEGLKPRDKGVSIDPEIRIEAVKAVLSGQISQTQAATKFNVAGASSVAKWLKVYKEQGEEGLRSLKVGTKRVSYMAEHPELIEAAEERSKEQRILELERKVKRLELRILYLQKLKALVR

SEQ ID NO: 55519 - protein, 327 aa, Enterobacter cloacae
MRVLIVKTSSMGDVLHTLPSLTDAMRAVPGIRFDWVVEEGFAQIPTWHEAVDRVIPVAIRRWRKAWFSAPIKAERKAFREAVQVQHYDAIIDAQGLVKSAALVTRLAHGVKHGMDWHTAREPLASLFYNRRHHIAKQQHAVERTRELFAKSLGYAKPETQGDYAIAQHFLRNTDPCAQPYLVFLHATTRDDKHWPESHWRSLIELTQPTGIHIKLPWGAEHERQRAERLADGFSHVEVLPKLTLAQVAAQLAGANAVVSVDTGLSHLTAALDRPNITIFGPTDPGLIGGYGKNQHQMVSPTQQTKDISADAIFSFLQGSRWLSNRDI

SEQ ID NO: 55520 - protein, 162 aa, Enterobacter cloacae
PYSFFNCFNYRPPIMVFSSNGWKDSVRNINETKEFVWNLATRDLAEAMNQTSAMLPHDRDEFSFAGLTPAASQLVNAPRVAESPVNFECRLSQCIQLTGADGTPVDTWLVLGEVVGIHIAETLLEEGIYQTAKSQPILRAGGPTAYYGISDENRFDMVRPGA

SEQ ID NO: 55521 - protein, 123 aa, Enterobacter cloacae
MTTTNAPQGELVLRTLAMPADTNANGDIFGGWLMSQMDMGGAILAKEIAHGRVVTVRVDGMTFLRPVAVGDVVWLYARCVKRGNTSISINIEVWVKKVSSEPIGQRYKATEALFIYVAVDRGI

SEQ ID NO: 55522 - protein, 179 aa, Enterobacter cloacae
MKQFLDFLPLVVFFAFYKLYDIYAATTALIVATAVVLIYSWVRYRKVEKMALITFVLVAVFGGLTLFFHNDEFIKWKVTVIYALFAGALLISQWVMKKPLIQRMLGKELTLPQEVWSRLNIAWAVFFILCGLANIYIAFWLPQNIWVNFKVFGLTALTLIFTLLSGVYIYRHMPQDDKH

SEQ ID NO: 55523 - protein, 210 aa, Enterobacter cloacae
MKKLAVAALVLSSLSGGAYAHEAGEFFIRAGSATVRPTEGSDNVLGMGGFNVSNNTQLGLTFTYMATENVGVELLAATPFRHRVGLGATGDIATVHHLPPTLMSQWYFGDASSKVRPYIGAGVNYTTFFDEKFNDTGKEAGLTDLSLKDSWGMAGQVGLDYLINRDWLINASVWYMDIDTDVRFKAGGQQQSINTRLDPWVFMFSAGYRF

SEQ ID NO: 55524 - protein, 238 aa, Enterobacter cloacae
MRFYRPLGQISALTFDLDDTLYDNREVILRTEQESLAFVQNYHPALKAMQNKDFQKLRQSLRETEPDIYHDVTEWRRRAVEQAMLNAGLSAQDAAIGAEAAMENFAKWRSRIDVPQETHDTLAKLAEKWPLVAITNGNAQPELFGLSDYFEFVLRAGPHGRAKPFNDMYHLAADKLNLPLGNMLHVGDDLTTDVAGAIRCVMQACWIKPENADLMTATDSRLLPHVEISRLASLTTLI

SEQ ID NO: 55525 - protein, 390 aa, Enterobacter cloacae
MTVPMDVSYLLDSLNDKQRDAVAASRTNLLVLAGAGSGKTRVLVHRIAWLQSVENCSPYSIMAVTFTNKAAAEMRHRIAQLMGTSQGGMWVGTFHGLAHRLLRAHHMDANLPQDFQILDSEDQLRLLKRLIKAMNLDEKQWPPRQAMWYINGQKDEGLRPHHIQSFGNPVEQTWQNVYKAYQEACDRAGLVDFAELLLRAHELWLNKPHILQHYRERFTNILVDEFQDTNNIQYAWIRLLAGDTGKVMIVGDDDQSIYGWRGAQVENIQRFLNDFPGAQTIRLEQNYRSTSNILSAANALIENNNGRLGKKLWTDGVDGEPISIYCAFNELDEARFVVNRIKTWQDNGGALEQCAILYRSNAQSRVLEEALLQVSMPYRIYGGMRFFERQ

SEQ ID NO: 55526 - protein, 214 aa, Enterobacter cloacae
MFTGIVQGTAKVVSIDEKPNFRTHVVELPEYMLEGIETGASIAHNGCCLTVTEINGNQISFDLMKETLRITNLGELAVGDTVNVERAAKFSDEIGGHLMSGHIMTTAEVAKIVTSENNRQIWFKMQDPSLMKYILYKGFIGIDGISLTVGEVTPTRFCVHLIPETLQRTTLGAKKLGHRVNIEIDPQTQAVVDTVERVLAAKEAAIIKTAAEEE

SEQ ID NO: 55527 - protein, 284 aa, Enterobacter cloacae
VNIQALLSEKVSQALIAAGAPADCEPQVRQSAKVQFGDYQANGVMAVAKKLGMPPRQLAEQVLTHLDLSGIASKTEIAGPGFINIFLEPAFLASHVDAALKSDRLGVSQPEAQTVVIDYSAPNVAKEMHVGHLRSTIIGDAAVRTLEFLGHKVIRANHVGDWGTQFGMLIAYLEKQQQENAGEMALADLEGFYREAKKHYDEDEAFAERARSYVVKLQGGDQYFLEMWRKLVDITMSQNQLTYNRLNVTLTRDDVMGESLYNPMLPGIVADLKAKNLAVESEGA

SEQ ID NO: 55528 - protein, 337 aa, Enterobacter cloacae
MKPSLRRSTAALLASSLLLTIGRGATLPFMTIYLTRVYSMSVENIGYALTIALTIGVVFSLGFGILADKFDKKRYMLIAIVAFIAGFVAIPLADNVTLVVLFFALINCAYSVFSTVLKAWFSDVLTTSQKARVFSLNYSFLNIGWTIGPPIGTLLVMYSLQLPFWLAAFCAALPLGFIHFFVQKSVALDTAEEKMPWQPSVLLKDRALFWYTLSGLLASYVGGSFASCISQYVLAAHADSDFAQKVVAVVLLVNAAVVVTLQYALGRKNSARNIRPLMMLANLFFIVGLGRFMVSATNLVYWGIDAAIFTPGEIIYAPAEYLLIDIHAPPGIEASYF

SEQ ID NO: 55529 - protein, 221 aa, Enterobacter cloacae
MLDLIKAISLGLVVLLPLANPLTTVALFLGLAGNMNSAERNHQSMMASVYVFAIMMVAYYAGQVVMNTFGISIPGLRIAGGLIVAFIGFRMLFPAQKAHESPEAASKSEELETEPSANIAFVPIAMPSTAGPGTIAMIIKSASTVRDSATFPDWVLTVAPPLIFAIIGVIVWAVVRSSGAIMRWVGKGGIEAISRLMGFLLVCMGVQFIINGVLEIIKTYH

SEQ ID NO: 55530 - protein, 298 aa, Enterobacter cloacae
TGYAQWEYNIQANNTEGSDNQSWTRLAFAGVKVGDYGSFDYGRNYGVLYDVEGWTDMLPEFGGDSYTKADNFMTGRANGVATYRNTDFYGLVQGLNFALQYQGKNEDASNNQEGTNNGRDTRHENGDGFGISTTYDFGMGITAGAAYTSSDRTNEQVMNTTAGGDKADAWTAGLKYDANNIYLAAMYSETRNMTPYGDNTDAVANKTQNFEVTAQYQFDFGLRPSVSYLQSKGKDLGNGQGDQDLVKYADVGVTYYFNKNMSTYVDYKINLLDEDDSFYKDNGISTDDVVALGLVYQF

SEQ ID NO: 55531 - protein, 377 aa, Enterobacter cloacae
MSQLLRARRILTEQGWLDDHQLRIESGAVAAIEPIPAGVTARDAELLCPAYIDTHVHGGAGVDVMDDVPDVLDTLAMHKAREGVGAFLPTTVTAPMEAIHSALMRIARRSQSGGPGAQILGSYLEGPYFTPQNKGAHPPELFRELDIAELDRLIDVSQGTLRVVALAPEKPGALQAIHHLKQRGIRVMLGHSAATYRQTLVAFDAGADGLVHCYNGMTGLHHREPGMVGAGLTDKRAWLELIADGHHVHPGAMRLCCCCAQDRVVLITDAMQAAGMPDGRYTLCGEEVTMQNGVVRTGSGGLAGSTLSLDAAVRNMVEYAGVTAEEAIHMASLHPARLLGVDDQLGSLAPGKRANIIALDGGLHLQRIWIQGQALPL

SEQ ID NO: 55532 - protein, 248 aa, Enterobacter cloacae
SFNSSKLVTVWAGWSTRWYSELFHDDAMMSAVGLSLTIAALAATMASVLGTIAALVMVRFGRFRGSNGFAFMITAPLVMPDVITGLALLLLFVALAHAIGWPADRGMLTIWLAHVTFCTAYVAVVISSRLRELDRSIEEAAMDLGATPLKVFFIITLPMIMPAVISGWLLAFTLSLDDLVIASFVSGPGATTLPMLVFSSVRMGVNPEINALASIILGVVGIVGFIAWYLMARAEKQRVRDIQRARRG

SEQ ID NO: 55533 - protein, 760 aa, Enterobacter cloacae
VRRALALAHHLAETTIWIKHDELIIGNQASEVRAAPIFPEYTVSWIEKEIDDLADRPGAGFAVSEENKRVLHDICPWWRGQTVQDRCYGMFTDEQKGLLETGIIKAEGNMTSGDAHLAVNFPLVLEKGLDGLRAKVAERRSRINLTVLEDLHGDQFLKAIDIVLEAVSLHIKRFADLAREMASTETAKARDELLAMAENCDVIAHEPPKTFWQALQLCYFIQLILQIESNGHSVSFARMDQYLYPYYRRDVELNQSLDREHAIELLHSCWLKLLEVNKIRSGSHSKASAGSPLYQNVTIGGQKLVNGEPMDAVNPLSYAILESCGRLRSTQPNLSVRYHAGMSNDFLDACVQVIRCGFGMPRVQQREIVIPEFIKLGVERNDAYDYAAIGCIETAVGGKWGYRCTGMSFINFARVMLAALEGGRDATSGKVFLPQEKALSAGNFDNFDEVMAAWDSQIRYYTRKSIEIEYVVDTMLEENVHDILCSALVDDCIERAKSIKQGGAKYDWVSGLQVGIANLGNSLAAVKKLVFEQGTIGQQQLAAALADDFDGLTHEQLRQRLINGAPKYGNDDDSVDMLLTRAYQTYIEELKQYHNPRHGRGPIGGNYYAGTSSISANVPFGAATMTTPDGRKAHTPVAEGASPASGTDHLGPTAVIGSVGKLPTEAILGGVLLNQKLNPSTLENDSDRQKLMVLLRTFFEVHKGWHIQYNIVSRETLLEAKKHPDQYRDLVVRVAGYSAFFTALSPDAQDDIIARTEHTL

SEQ ID NO: 55534 - protein, 270 aa, Enterobacter cloacae
MTVKVIVTDMDGTFLDDAKQYDRDRFQAQFEQLKARDIEFVVASGNQYYQLISFFLELTDRISFVAENGALVFDRGEQIFHGELTRHESQIVIGELLKDKGLNFVACGLESAYVSDKAPDAFVALMSKHYHRLKRISDYREIDDVLFKFSLNLPDSDIPNLVDKLHVSLDGIMKPVTSGFGFVDLIIPGLHKANGISRLLKRWKISPQECVAIGDSGNDAEMLKLVKYSFAMGNAAESIKEISRYGTDDNNHQGALNVIQAVLDNHSPFD

SEQ ID NO: 55535 - protein, 302 aa, Enterobacter cloacae
MACASEQEQYQQWLAQINQVCGRFNAQPTGGKFFGELETSYARSLKLSTVTAGGVNLFRSRQEIAQSNDAWFYTVFQLEGSAEIEQDDRRALLRTGDITLIDASRPCSINWREKSRQISLLVPRQIIEQQCRFQEISCATALSRTLPTVQLSHRLLMESMSNADLSDRESEAALEAMICLLRPAFQQREIIQPRKERQFQHVVALIDDHIQSESLRPEWIAAESGMSVRSLYRMFAEKGLVVAQYIKNRRLDLCAQALQSTGDDEKLAGIGYSWGFTDHSHFSTAFKQRFGVSPGEYRRRYR

SEQ ID NO: 55536 - protein, 336 aa, Enterobacter cloacae
MVKVGINGFGRIGRNFLRAALGNPDLQIVAINDLTDSKTLAHLLKHDSLLGKLRAPVEAADGALQVDGQRIVVFSERDPANIPWRDVGVDVVIEATGFFTEREKAAVHITHGGAKRVIISAPGKNDDLTIVMGVNHEQYDPARHAVVSNGSCTTNGVAPAAQVLHQQFGIEHGLMNTTHAYTNSQALHDQPEKDLRGARAAALSIVPYSSGAAKALGKVIPSLDGKLTGYSLRVPVPVVSIVDLTVTLSRNVTAEEVNEAFRNAAASGPLKGILGYSDEPLVSSDYQGDPRSSIIDGLSTLVIGGNMVKILAWYDNEWGFSNRLVDLAVWMDKKGL

SEQ ID NO: 55537 - protein, 118 aa, Enterobacter cloacae
  MISC_FEATURE (25)..(25): X=any amino acid
  MISC_FEATURE (107)..(107): X=any amino acid
GILTCFPSTTPFGLALGVDSPCPDXRWTGTLGLPASGLFTRFIVTYVSIRTSDTSSMPHSTPSTATERSPTQQRIRVAAAASVHGLAPLHLPRRPTRPVSYYAFFKXWLLLSQHPVLC

SEQ ID NO: 55538 - protein, 373 aa, Enterobacter cloacae
MIKLENLTKQFSQKHGQTFKAVDNVNLTVPEGEMCVLLGPSGCGKTTTLKMINRLITPSSGTILINGEDTSGMDTVTLRRNIGYVIQQIGLFPNMTIEENITVVPRMLGWDKARCKTRAEELMDMVAMDPHKFLNRYPREMSGGQQQRIGVIRALAADPPVLLMDEPFGAVDPINREVIQNQFLEMQRQLKKTVMLVSHDIDEALKLGDRIAVFRQGKIVQCASPDELLAKPANEFVGSFVGQDRTLKRLLLVSAGDVTDQQPTITVRGSTPLPEAFATMDDNDIRAVTVVDEHGKPLGFVKRREARNASGTCAGILHPFRMTGKAEDNLRVVLSRLYESNTSWMPIVDEDGRYNGEISQDYIAEYLSSGRTR

SEQ ID NO: 55539 - protein, 224 aa, Enterobacter cloacae
MEHARQRLRLMQLSSSSLPVGSFTWSQGLEWAVEAGWVTDADAFKRWQIQQMEQSFFCVDLPLFIRLFRACEQQDLTMAKRWTAYLLACRETRELREEERNRGAAFTRLIKSWEPDCPPEWLPLFMQSQLCGMAWLGVRWGISARELALSLGYSWMESAVMAGVKLVPFGQQAAQQLIIELGDHYAAGLEQAFLRSDDALGAATPLSAIASARHETQYSRLFRS

SEQ ID NO: 55540 - protein, 203 aa, Enterobacter cloacae
MADYKHPLRVGVGGPVGSGKTALLEALCKAMRDTYHLAVVTNDIYTKEDQRILTEAGALEPERIVGVETGGCPHTAIREDASMNLAAVEALSEKFGNLDLIFVESGGDNLSATFSPELADLTIYVIDVAEGEKISRKGGPEITKADFLVINKTDARPYVWRSLEVLERDTNACAGERPWTFTNLKAGDGLATIIAFLIEKGML

SEQ ID NO: 55541 - protein, 607 aa, Enterobacter cloacae
  MISC_FEATURE (146)..(146): X=any amino acid
  MISC_FEATURE (154)..(154): X=any amino acid
  MISC_FEATURE (165)..(165): X=any amino acid
  MISC_FEATURE (225)..(225): X=any amino acid
LKLLVQRGKEQGYLTYAEVNDHLPEDIVDSDQIEDIIQMINDMGIQVMEEAPDADDLLLAETSNNTDEDAEEAAAQVLSSVESEIGRTTDPVRMYMREMGTVELLTREGEIDIAKRIEDGINQVQCSVAEYPEADHLSAGAVRSRXSGRSAPVXPDHRFCRPERXRRYGTYRHSRSVLNCLRKRWMMTKTKMRKRATTTPRTMTTALTRSWRVRSLPSCVPSTKXRATPSKAKGRSHAAAQEEILKLSEVFKQFRLVPKQFDYLVNSMRVMMDRVRTQERIIMKLCVEQCKMPKKNFITLFTGNETSETWFNAAIAMNKPWSEKLHDVKDDVHRGLQKLHQIEEETGLTIEQVKDINRRMSIGEAKARRAKKEMVEANLRLVISIAKKYTNRGLQFLDLIQEGNIGLMKAVDKFEYRRGYKFSTYATWWIRQAITRSIADQARTIRIPVHMIETINKLNRISRQMLQEMGREPTPEELAERMLMPEDKIRKVLKIAKEPISMETPIGDDEDSHLGDFIEDTTLELPLDSATTESLRAATHDVLAGLTAREAKVLRMRFGIDMNTDHTLEEVGKQFDVTRERIRQIEAKALRKLRHPSRSEVLRTSWT

SEQ ID NO: 55542 - protein, 53 aa, Enterobacter cloacae
HVISKRYTQRIERHNLNLRQHLARLGRKSLSFSKSVELHDKVIGHYLNIKHYQ

SEQ ID NO: 55543 - protein, 307 aa, Enterobacter cloacae
MKKLRVGVVGLGGIAQKAWLPVLGAATDWTLQGAWSPTREKAERICETWRIPYAASLQDLARECDAVFVHTSTATHYQVVSELLNLGVHVCVDKPLAENVQDAERLIELAARKKLTLMVGFNRRFAPLYQQLKAQSDTLASLRMDKHRTDSIGPNDLRFTLLDDYLHVVDTALWLSNGEALLKSGTLVTNDQGQMVYAEHHFGVEHLQITTSMHRRAGSQRESVQAVTEGALYDITDMREWREEKGNGVVTLPAPGWQSTLEQRGFAGCARHFITCVQNQTVPETSGEQAILAQRIVERLWRDAMSE

SEQ ID NO: 55544 - protein, 511 aa, Enterobacter cloacae
MNLLKSLAAVSSMTMFSRVLGFARDAIVARVFGAGMATDAFFVAFKLPNLLRRIFAEGAFSQAFVPILAEYKSKQGEDATRVFVSYVSGLLTLALAVVTVLGMLAAPWVIMVTAPGFADTADKFALTSQLLRITFPYILLISLASLVGAILNTWNRFSVPAFAPTFLNVSMIGFALFAAPHFNPPVLALAWAVTVGGVLQLAYQLPHLKKIGMLVLPRINLKDAGAMRVIRQMGPAILGVSVSQISLIINTIFASFLVSGSVSWMYYADRLMEFPSGVLGVALGTILLPSLSKSFASGNHDEYCRLMDWGLRLCFLLALPSAVALGILAKPLTVSLFQYGKFTAFDAAMTQRALIAYSVGLMGLIVVKVLAPGFYSRQDIKTPVKIAIVTLIMTQLMNLAFIGPLKHAGLSLSIGLAACLNAGLLYWQLRKQDIFTPQPGWGSFLVRLIVAVLVMSAALLGMMYVMPEWSLGTMPYRLMRLMAVVGVGVVAYFATLAVLGFKVKEFARRTA

SEQ ID NO: 55545 - protein, 109 aa, Enterobacter cloacae
MSHQLTFADSEFSSKRRQTRKEIFLSRMEQILPWQNMVEVIEPFYPKVGNGRRPYPLETMLRIHCMQHWYNLSDVAMEDALYEIASSRLFPRLPLITALPDRTTIMNFR

SEQ ID NO: 55546 - protein, 1333 aa, Enterobacter cloacae
EGNHTLTVNVSDKAGNGSSVTADFTVDTAAPVVTIHTVAGDDILNISEQGQAHIISGQASGAAAGDVVTVILGGQTFTGVVLADGSWSVGVPASVLGALGEGNHTLSVSVTDAAGNTGSATHGITLSVHPPEFTIDAISQDNVLNAQEAMQPLSLTGTSNLPDGTAVTVTLNNVSYQATVENGIWAVQVPVSDVLNLANTLYTVSVSGTDSVGNSGSAEANLLVDTVLPQVIINTFAGDNLVNNAEAGVDQTLSGRVTGAAAGDTVSITAGGKSYTATVGSDLTWSVKIPSADLQAFGDGDLTFTASVTNAHGNTGTGERDININAELPGLRVNTISGDDVINAIEQQQDLSVTGSSTHLAAGTQIIVTINSVEYVTAVNASGSWQIGVPAADLQAWTAGGMTVSVSAVDAWGNPVAAEHPIELDLNAVAVTIDTVSGDDLLNAAEKGGDLTLSGQTQGVEAGQTVVVKFADQTFTAQVQQDGSWSLTVPASAMESLIDGRAQVSVSVTNVSGNSADAARVVTVDTQPPAITLDNLTADNIINAAEAQQDLALSGTSTAEAGQTVTVTLNGKTYSTTVQADGTWQLSVPAADVGALTDGIVTVTATVSDVAGNASSADRVGLVDATVPQVTINDFVTDTNTVNQLAHSQAQILIGSVTGAAAGDLVTITINSVDYTTVVDAAGNWSLGLPASVVQGLTDATWTIDVSVTDRSGNSGSSSLDVVVNTVTPVIGINTLAADDVINATEKGEDLLLSGTSNQPEGTTITVTLNGIHYTATADASGNWSVTVPASAVSALGEAHYTVTASVTDSVGNSASTSHDVLVDSSLPVVTIDTLAGDNIVNAAEVAAGQTLTGKVTNAAAGDTVTIILGGQTYTATVQDDLTWSLPLSESQLTALGNGDLTVSASVTNAHGNTGSSSHDFTIDAQLPGLRIDTVAGDDVINVIEHAQNLIVSGTSTDLAAGSTVTVTINGKTYSATVLADGTWQAAVPAADVSQWADGSLDIKAGAQDASGNPVTIGTVVDVDLAPVAITISSVTDDNVLNAAEKGQDLLLSGTTSNVEAGQTVTITFAGKTYTTTVDASGDWTWTVPAADLSGLKDGDASVQVTVTNVNGNAASSAQEFSVDTTAPTVTINTISHDNMLNAAEAAQDLTLSGTSTAEAGQTVTVTFNGNQYTAQVQADGSWTLDVPAADMAGIADGSAAVTATVSDKAGNPASAGSSVLVDTTVPQISFNIVAGDDVVNIAEHGQALIVSGKVTGAQAGDVITVTLNGKDYTAMLDASGSWSVGVPAADVGALVNGEQTISATLTDKAGNSTSTTHEFDVSLTAPVIAINT

SEQ ID NO: 55547 - protein, 419 aa, Enterobacter cloacae
MDKFRVQGPTRLQGEVTISGAKNAALPILFAALLAEEPVEIQNVPKLKDIDTTMKLLTQLGTKVERNGSVWIDASKVNNFSAPYDLVKTMRASIWALGPLVARFGQGQVSLPGGCAIGARPVDLHIFGLEKLGAEIKLEEGYVKASVNGRLKGAHIVMDKVSVGATVTIMSAATLAAGTTIIENAAREPEIVDTANFLVALGAKISGQGTDRITIEGVERLGGGVYRVLPDRIETGTFLVAAAISGGKIVCRNAQPDTLDAVLAKLRDAGADIEIGEDWISLDMHGQRPKAVNVRTAPHPAFPTDMQAQFTLLNLVAEGTGFITETIFENRFMHVPELIRMGAHAEIESNTVICHGVEKLSGAQVMATDLRASASLVLAGCIAEGTTIVDRIYHIDRGYERIEDKLRALGANIERVKGE

SEQ ID NO: 55548 - protein, 315 aa, Enterobacter cloacae
MRLGKYNKSLGWLSLFAGTVLLSGCDSALLDPKGQIGLEQRSLILTAFGLMLIVVIPAILMAVGFAWKYRASNKDAKYSPNWSHSNKVEAVVWTVPILIILFLAVLTWKTTHALEPSKPLVHDEKPITIEVVSMDWKWFFIYPEQGIATVNEIAFPANTPVQFKVTSNSVMNSFFIPRLGSQIYAMAGMQTNLHLIANEAGTYDGISASYSGPGFSGMKFKAIATPDRAAFDQWVEKAKQSPNTMSDMAAFEKVAAPSEYNKVEYFSNVKPDLFKDVIGKFMDHGKSMDMTQPEGEHSAHEGMEGMDMSHAETAH

SEQ ID NO: 55549 - protein, 195 aa, Enterobacter cloacae
MSHQLTFADSEFSTKRRQTRKEIFLSRMEQILPWQNMVEVIEPFYPKAGNGRRPYPLETMLRIHCMQHWYNLSDGAMEDALYEIASMRLFARLSLDSALPDRTTIMNFRHLLEQHQLARQLFKTINRWLAEAGVMMTQGTLVDATIIEAPSSTKNKEQQRDPEMHQTKKGNQWHFGMKAHIGVDAKSGTVANSRW

SEQ ID NO: 55550 - protein, 190 aa, Enterobacter cloacae
MTAQPQVLKIRRPDDWHIHLRDGDMLKTVVPYTSEIYGRAIVMPNLVPPVTTVDAAIAYRQRILDAVPAGHDFTPLMTCYLTDSLDPNEVERGFNEGVFTAAKLYPANATTNSSHGVTSIDAIMPVLERMQKLGMPLLVHGEVTHAEIDIFDREARFIETVMEPLRQRLPALKVVFEHITTKDAAEYVRD

SEQ ID NO: 55551 - protein, 186 aa, Enterobacter cloacae
MKKIVFAAALVVSGLLVGCNQLTQYTVSEQEINQALEKHNNFSKDIGVPGLADAHIVLTNLTSQIGREEPNKVTLAGDADLDMSSLFGNQKANIKLKLKALPVFNKEKGAIFLQEMEVVDAQVSPDKMAPVLQTLMPYLNQSLRNYFNQQPAYVLSEDKSKGEALAKKYAKGIEVKPGEIIIPFTD

SEQ ID NO: 55552 - protein, 1078 aa, Enterobacter cloacae
DIKEQEVYMGEIPLMTDNGTFVINGTERVIVSQLHRSPGVFFDSDKGKTHSSGKVLYNARIIPYRGSWLDFEFDPKDNLFVRIDRRRKLPATIILRALNYTTEQILDLFFEKVIFEIRDNKLQMELVPERLRGETASFDIEADGKVYVEKGRRITARHIRQLEKDDIKHIEVPVEYIAGKVAAKDYVDESTGELICPANMELSLDLLAKLSQSGHKRIETLFTNDLDHGAYISETIRVDPTTDRLSALVEIYRMMRPGEPPTREAAESLFENLFFSEDRYDLSAVGRMKFNRSLLRDEIEGSGILSKDDIIEVMKKLIDIRNGKGEVDDIDHLGNRRIRSVGEMAENQFRVGLVRVERAVKERLSLGDLDTLMPQDMINAKPISAAVKEFFGSSQLSQFMDQNNPLSEITHKRRISALGPGGLTRERAGFEVRDVHPTHYGRVCPIETPEGPNIGLINSLSVYAQTNEYGFLETPYRKVTDGVVTDEIHYLSAIEEGNYVIAQANSNLDDEGHFVEDLVTCRSKGESSLFSRDQVDYMDVSTQQVVSVGASLIPFLEHDDANRALMGANMQRQAVPTLRADKPLVGTGMERAVAVDSGVTAVAKRGGTVQYVDASRIVIKVNEDEMYPGEAGIDIYNLTKYTRSNQNTCINQMPCVSLGEPVERGDVLADGPSTDLGELALGQNMRVAFMPWNGYNFEDSILVSERVVQEDRFTTIHIQELACVSRDTKLGPEEITADIPNVGEAALSKLDESGIVYIGAEVTGGDILVGKVTPKGETQLTPEEKLLRAIFGEKASDVKDSSLRVPNGVSGTVIDVQVFTRDGVEKDKRALEIEEMQLKQAKKDLSEELQILEAGLFSRIYAVLVAGGVEAEKLDKLPRDRWLELGLTDEEKQNQLEQLAEQYDELKHEFEKKLEAKRRKITQGDDLAPGVLKIVKVYLAVKRQIQPGDKMAGRHGNKGVISKINPIEDMPHDANGTPVDIVLNPLGVPSRMNIGQILETHLGMAAKGIGDKINAMLKQQEEVAKLREFIQRAYDLGTDVRQKVDLNTFSDEEVLRLAENLKKGMPIATPVFDGAKEG

SEQ ID NO: 55553 - protein, 496 aa, Enterobacter cloacae
MNKEILAVVEAVSNEKSLPREKIFEALESALATATKKKYEQEIDVRVEIDRKSGDFDTFRRWVIVEEVTQPTKEITLEAARFEDESLNVGDYVEDQIESVTFDRITTQTAKQVIVQKVREAERALVVDQFRDQEGEIITGVVKKVNRDNISLEIKSEGLPGNAEAVILREDMLPRENFRPGDRIRGVLYAVRPEARGAQLFVTRSKPEMLVELFRIEVPEIGEEVIEIKAAARDPGSRAKIAVKTNDKRIDPVGACVGNRGARVQAVSTELGGERIDIVLWDDNPAQFVINAMAPADVASIVVDEDKHTMDIAVEAGNLAQAIGRNGQNVRLASQLSGWELNVMTVDDLQAKHQAEAHAAIDTFTKYLDIDEDFATVLVEEGFSTLEELAYVPMKELLEIDGLDEPTVEALRERAKNALTTLALAQEESLGDKKPADDLLNLEGLDRAIAFKLAARGVCTLEDLAEQGVDDLADIEGLTDEKASELIMAARNICWF

SEQ ID NO: 55554 - protein, 722 aa, Enterobacter cloacae
MSAYAHAAETPKKEETITVTAAPAAQESAWGPAATIAARQSATGTKTDTPIQKVPQSISVVTAEEMALHQPRSVKEALSYTPGVAVGTRGASNTYDYLIIRGFAADGQTQNNYLDGMKMQGNFYNDAVIDPYMLERAEIMRGPVSVLYGKSSPGGLLNMVSKRPTTEPLKEIQFKVGTDSLFQTGFDFSDAIDDDGVYSYRLTGVARSNNAQQERAEEQRYAIAPSFSWRPDDKTTFTFLSYFQNEPETGYYGWLPKEGTVEPLPNGDRLPTNFNEGAKNNTYSRNQKMVGYSFDHEFNDTFTVRQNLRFAENKTSQNSVYGYGVCTDPANSGNKQCAALAPSDKGHYLARKYVVDNEKLQNFTVDTQLQSKFSTGEVDHVLLTGVDFMRMRNDINSWFGYDDSVPLLDLYNPVNSDFDFGSKDPATSGPYQILNRQKQTGLYVQDQAQWDKVLVTLGGRYDWADQESYNRVTNTTSKRDDTQFTWRGGVNYLFDNGVTPYFSYSESFEPASQTDAQGKLFSPSKGKQYEAGVKYVPNDRPIVVTGALYQLTKTNNLMADPAGSFFSVQGGEIRARGVELEAKAALSASVNLVGSYTYTDAEYTTDTTYKGNTPAQVPKHMASLWGDYTLFDGALSGLTLGTGVRYTGSSYGDPANSFKVGSYTVVDALVRYDLARVGMAGSNVALHVNNLFDREYVASCFNTYGCFWGAERQVVATATFRF

SEQ ID NO: 55555 - protein, 610 aa, Enterobacter cloacae
DKTRLASLAARMGELRNRLAEMPENSLTLTADEVSAAIEQQSRSRTLRQRLTWLHARYQPLQKRLRQSGESVLKAQAEQNKLNETLTLRRQQYKEKHQHYLDLKALCETEATIKKLEHYRSQLEAGKPCPLCGSSEHPAVAQYQSLELTDNQRRRDDLEKEVAALKEEGLLVLGQVNALTQQIQRETDEAQMLSQEEQALTKEWMEACTSLNIALNIQEDISPWMNEQEQYERQLYQLSQRLTLQNQLNEQEVQERQHQQQLTAARQALENALLSLSLNVPEDGNEAAWLHAREAEFAQWQEKQTQHGALLERINALKPLLDTLPETNGEEAEPAIPDGWRDVHDECVSLQSQLTAHQQQEKLEQERLLQSQAQFTAALSASCFADRDAFLAALLDDDAIRRLEQLKQLLESQIQQAAALSGQANQQLHSHLALRPEGLNADAPTLQTQLTQLAQRLRENTTHQGEIRQQLKQDSDNRQHQLALMQQIEEAAREADDWGYLNALIGSSTGDKFRKFAQGLTLDNLVWLANQQLNRLHGRYLLQRKASDALELEVVDTWQADAVRDTRTLSGGESFLVSLALALALSDLVSHKTRIDSLFLDEGFGTLDSE

SEQ ID NO: 55556 - protein, 378 aa, Enterobacter cloacae
MKILVDENMPYARELFSRLGNVKAVPGRPIPVNELDDADALMVRSVTKVNEALLAGKAIKFVGTATAGTDHVDDKWLKQAGIGFSAAPGCNAIAVVEYVFSSLLMLAERDGFALKDRTVGIVGVGNVGGRLQKRLEALGIRTLLCDPPRKDNGDDGDFRSLDELVEQCDVLTFHTPLFKEGPYKSLHLADEALIRRLKAGTILINACRGPVVDNAALLTCLNEGQHLSVVLDVWEPEPDLNVELLNKVDVGTAHIAGYTLEGKARGTTQVFEAYSAFIGHPQQVALDTLLPAPEFGRITLHGPLDQATLKRLVHLVYDVRRDDALLRKVAGIPGEFDKLRKNYVERREWSSLYVMCDDASAATLLHKLGFNAVHHPAH

SEQ ID NO: 55557 - protein, 337 aa, Enterobacter cloacae
MSEGWNIAILGATGAVGEALLETLAERQFPVGDIYALARTDSAGEHLRFNGKSVMVQDAATFDWTQAQCAFFAAGAEATAAYVEEATNAGCLVIDLSGLFSMEADVPLVVPDVNPFVLADYRNRNVIAVPNSLTSQLLTALKPLIDDGGLSRITVTSLLSASANGKKAVDALAGQSAKLLNGIPIDEDDFFGRQLAFNMLPLLPDREGSVREERRIVDEVRKILQDDGLMISANVVQSPVFYGHAQMVGFEALRPLAAEEARDAFGRGEDIVLSEESEFPTQVGDATGSAHLSVGCVRNDYGMPEQVQFWSVADNVRFGGALMAVKIAEKLVQEYLY

SEQ ID NO: 55558 - protein, 252 aa, Enterobacter cloacae
MSWIERIKSNITPTRKASIPEGVWTKCDSCGQVLYRAELERNLEVCPKCDHHMRMSARNRLHSLLDEGSLVELGSELEPKDVLKFRDSKKYKDRLASAQKETGEKDALVVMKGTLHGMPAVAAAFEFSFMGGSMGSVVGARFVRAVEQALEDNCPLICFSASGGARMQEALMSLMQMAKTSAALAKMQERGLPYISVLTDPTMGGVSASFAMLGDLNIAEAKALIGFAGPRVIEQTVREKLPPGFQRSEFLI

SEQ ID NO: 55559 - protein, 447 aa, Enterobacter cloacae
VGNLSLDFSDNAFQPLAARMRPENLAQYIGQQNLLAAGKPLPRAIEAGHLHSMILWGPPGTGKTTLAEVIARYANADVERISAVTSGVKEIREAIERARQNRNAGRRTILFVDEVTRFNKSQQDAFLPHIEDGTIFFIGATTENPSFELNSALLSRARVYLLKSLTTDDIEKVLTQAMDDKARGYGGQDIVLPDDTRRAIAELVNGDARRALNTLEMMADMAEIDDAGKRVLKPELLTEIAGERSARFDNKGDRFYDLISALHKSVRGSAPDAALYWYARIITAGGDPLYVARRCLAIASEDVGNADPRAMQVALSAWDCFTRVGPAEGERAIAQAIVYLACAPKSNAVYTAFKAAMSDARERPDYDVPVHLRNAPTKLMKEMGYGQEYRYAHDEPNAYAAGEEYFPQEMAQTRYYHPTNRGLEGKIGEKLTWLAGQDQNSPIKRYR

SEQ ID NO: 55560 - protein, 430 aa, Enterobacter cloacae
MLDPNLLRNEPDAVAEKLARRGFKLDVDKLRALEERRKVLQVQTENLQAERNSRSKSIGQAKARGEDIEPLRLEVNKLGEELDQAKAELDVLQAEIRDIALAIPNIPDDSVPVGKDENDNVEVKRWGTPREFDFEVRDHVTLGEMHAGLDFAAAVKLTGSRFVVMKGQIAHLHRALAQFMLDLHTEQHGYSETYVPYLVNHDTLYGTGQLPKFAGDLFHTRPLDEEADSSNYALIPTAEVPLTNLVRDEIIDEDDLPIKLTAHSPCFRSEAGSYGRDTRGLIRMHQFDKVEMVQIVRPEESMDALEEMTGHAEKVLELLGLPYRRMALCTGDMGFGACKTFDLEVWVPAQNTYREISSCSNVWDFQARRMQARCRSKSDKKTRLVHTLNGSGLAVGRTLVAVLENYQQADGRIEIPEVLRPYMKGQQYIG

SEQ ID NO: 55561 - protein, 278 aa, Enterobacter cloacae
MSRLFTLARRRLYHFLFDPETVSGRRFEGLCGLFALLSVVVIFIESGAGTQYHLTFDEWHIFVWLELAITLVFTAEYLLRVIAWPNPARYVFSFWGFIDLATILPLYVMWLWPEISLSYVFAWRAMRVIRVLRILKLLRFMPSLRVFWSAIVSARHQLILFYSFIAIVMIVFGALMYLIEGPKYGFTTLNASVYWAIVTVTTVGYGDITPHTPLGRIVASVLILIGYSVIAIPTGLITTHMSSAFQSRKQQRKCPHCQQGEHEHDARFCHRCGSELPE

SEQ ID NO: 55562 - protein, 333 aa, Enterobacter cloacae
ELFNKPFLELMFEAQQVHRQHFDPRHVQVSTLLSIKTGACPEDCKYCPQSARYKTGLESERLMEVEQVLDSARKAKNAGSTRFCMGAAWKNPHDRDMPYLEQMVKGVKEMGLEACMTLGTLNEEQAQRLSAAGLDYYNHNLDTSPEFYGNIITTRTYQERLDTLDKVRDAGIKVCSGGIVGLGETVKDRAGLLLQLANLPTPPESVPINMLVKVKGTPLADNDDVDAFDFIRTIAVARIMMPTSFVRLSAGREQMNEQTQAMCFMAGANSIFYGCKLLTTPNPEEDKDVQLFRKLGLNPHQTEVLTGDNEQQQQLEQQIFNADTDQFYNAAAV

SEQ ID NO: 55563 - protein, 118 aa, Enterobacter cloacae
MSDTLRLATIKAIRYSKEINAMTRRYLKILLVGSLFTLSACAQQTEVRQMKQSVNTLNTAMDKLNKETVKITQQNALNAKSKSGVYLLPGANTPARLNSQIGTLKMSLVNVAANADGT

SEQ ID NO: 55564 - protein, 367 aa, Enterobacter cloacae
  MISC_FEATURE (173)..(173): X=any amino acid
MQDEIYMARAMNLAQRGRFTTHPNPNVGCVIVKDGEIVGEGFHYRAGEPHAEVHALRMAGEKARGATAYVTLEPCSHHGRTPPCCEALIAAGVSRVVAAMQDPNPQVAGRGLYRLQQEGIDVSHGLMMQDAEAINKGFLKRMRTGFPYIQLKLGASLDGRTAMANGETKWITXPRERRNVQGLAPKSHAILTTSETVLADDPAMTVRWDELNADTQALYPQENLRQPLRIIIDSQNRVTPEHRIVQQPGETWIARTREDTREWPEGVRSIMVPEHNGHLDLVVLMMLLGKQQVNSIWVEAGPTLAGALLQAGLVDELIVYVAPKLLGHDARGLFVLPGLEKLADAPQLKFSEIRPVGPDVCLHLMTA

SEQ ID NO: 55565 - protein, 156 aa, Enterobacter cloacae
MNIIEAAVATPDARVAITIARFNNFINDSLLEGAIDALKRIGQVKDDNITVVWVPGAYELPLAAGALAKTGKYDAVIALGTVIRGGTAHFEYVAGGASNGLAHVAQDAEIPVAFGVLTTESIEQAIERAGTKAGNKGAEAALTALEMINVLKAIKA

SEQ ID NO: 55566 - protein, 139 aa, Enterobacter cloacae
MKPAARRRARECAVQALYSWQLSQNDISDVEYQFLSEQDVKDVDVLYFRELLSGVATNSAYLDGLMKPYLSRLLEELGQVEKAVLRIALFELSKRDDVPYKVAINEAIELAKTFGAEDSHKFVNGVLDKAAPAIRPHKK

SEQ ID NO: 55567 - protein, 323 aa, Enterobacter cloacae
MACGEFSLIARYFDRVRTSRLDVETGIGDDCALLNIPEKQTLAISTDTLVCGRHFLPDIDPADLAYKALAVNVSDLAAMGADPAWLTLALTLPEVDEAWLEAFSDALFEQLSYYDMQLIGGDTTAGPLSMTLAIHGYVPLGRALKRSGAKPGDWIYVTGTPGDSAAGLAILQNRLTVEDADDAAYLVKRHLRPTPRILHGQALRERASSAIDLSDGLISDLGHILKASGVGARVDLDLFPLSEQLLRHVEPEQALRWALSGGEDYELCFTVPELNRGTLDVALAHLGAKFTCIGQIMPESEGLKFVQDGAAVTLDWKGYDHFA

SEQ ID NO: 55568 - protein, 268 aa, Enterobacter cloacae
MVETLLEVRNLSKTFRYRTGLFHRQTVDAVKPLSFTLREKQTLAIIGENGSGKSTLAKMLAGMVEPTAGEVLIDDHPLTFGDYSFRSQRIRMIFQDPSTSLNPRQRISQILDFPLRLNTDLEPEARRKRVFETLRMVGLLPDHESYYPHMLAPGQKQRLGLARALILRPKVIIADEALASLDMSMRSQLINLMLELQEKQGISYIYVTQHLGMMKHISDQVMVMHQGEVVERGSTADVMASPLHELTKRLIAGHFGEALTADAWRKDR

SEQ ID NO: 55569 - protein, 662 aa, Enterobacter cloacae
MDDLEQNLLFRYMGTHSPWWRLSADSNALHLSTSENADVTQVVALDDEQADLIRHLTVITSSISMSLSLYGEDVPVHLVGRKITRNEWAGTASAWNDTPSVARDLAQGLSFAEQVVSEANSVIVILDQHGNIQRFNRLSEEYTGLKEQEVIGQNVFKLFMSRSEAAASKRNITGFFRNGSSYEVERWIKTRKGQRLFLFRNKFVHSGSGKNEIFLICSGTDITEERRAQERLRVLANTDTITGLPNRNAIHDLISDAIDNRGDTQVGVVYLDLDNFKKVNDAYGHMFGDQLLQAVALAILSCLDEEQVLARLGGDEFIVMATNTSQGSLEAMASRILTRLRQPFRIGLIEIYTGCSLGIALAPQHGNDRESVIRNADTAMYTAKENGRGKFCVFSPEMNQRVFEYLWLDTNLRKALDNDQLLIHYQPKITWRGEVRSLEALVRWQSPERGLIPPLEFISYAEESGLIVPLGRWVMLDVVRQVAKWRDKGINLRVAVNVSARQLADQTIFSDLKQALKDLNFEYCPVDVELTESCLIENEELALSVIQQFSRLGAQIHLDDFGTGYSSLSQLARFPIDAIKLDQSFVRDIHKQPISQSLVRAIVAVAQALNLQVIAEGVENAKEDAFLTKNGVNERQGFLFAKPMLAAAFERWLKRYQARNQR

SEQ ID NO: 55570 - protein, 273 aa, Enterobacter cloacae
LAREVIVRSIFQEIACQWHASKLYQWSEGYASDIMEAFNKDMFLYIGKKPIANIKPLESLNVLRRMEIRGATENAKKVRQRCGEVFRYAIITGRAEYNPVPDLTSAMQGHEYNHYPFQNISEIPSFFESLSQYSGSILVVLASRLLILTDVRTGELRGATWKEIGTESAVWIIPAERMKMRRPHIVPLSIPIIERIREMTGRYPLMFPGRNDPRKTMGEASINQVLSWICYTGRVTGHGFRHTISTILHEQGYNTAWIETQLAHVDKNSIRGT

SEQ ID NO: 55571 - protein, 57 aa, Enterobacter cloacae
MEQILPWQNMVEVIEPFYPKAGNGRRPYPLETMLRIHCMQHWYNLSDGAMEDALYEI

SEQ ID NO: 55572 - protein, 655 aa, Enterobacter cloacae
MGIFSIASQHIRFAVKLACAIVLALFVGFHFQLETPRWAVLTAAIVAAGPAFAAGGEPYSGAIRYRGMLRIIGTFIGCFAALTIIILMIRTPLLMLMVCCIWAGFCTWISSLVKVENSYAWGLAGYTALIIIITIQSEPLLAPQFAVERCSEIVIGIVSAIVADLLFSPRSIKQEVDRELDALIVAQYQLMQLCIKHGDSEEVDKAWSGLVRRTQALEGMRSNLNMESSRWARANRRLKALNTVSLTLITQACETYLIQNTRPEAVTDTFRELFAEPVETVQDVHKQLKRMRRVIAWTGERDTPVTIYTWVGAATRYLLLKRGVIGNTKISAAEEEVLQGEVVIKAESAERHHAMVNFWRTTLACMLGTLFWLWTGWTSGSGAMVMIAVVTALAMRLPNPRMVAIDFLYGTIAALPIGALYFLVIIPSTQQSMLLLCISLAVMAFFIGIEVQKRRLGSLGALASTINIIVLDNPMTFHFSQFLDSALGQLVGCFLAMMVILLVRDNSQARTGRVLLNQFVSAAVSSLTTNTARRKENHLPALYQQLFLLLNKFPGDIAKFRLALTMIIAHQRLRNAPVPINDDLSAYHRQLRRTADHVLSASSDDKRRRYFTQLLEELDIYQEKLKHWEAPPQVTEPVGRLVFMLHRYQNALTDN

SEQ ID NO: 55573 - protein, 325 aa, Enterobacter cloacae
LQDHILFQTGYLVNGIWKTLDTTFDVLNPATGEVIAKVAKAGKAQTEDAIAAATQAFPAWRAKTAKERSAILYRWYELIIENKSWLGRLMTTEQGKPLKEAEGEVEYAASFIQWFAEEAKRANGEIIPPIKPGSRILATREPIGVVAAITPWNFPMAMLTRKLGPALAAGCTGVIKPANNTPLSAFALLTLAKQAGVPDGVLNAVAGNTHEISDAIMASRDVRKISFTGSTSVGKTLVRNAAETMKKVSMELGGNAPYIVFEDADIDAAVKGAIANKFRNAGQVCVTVNRFYIQETVYDKFVNKLADAVNALNVGNGLEEGFLSG

SEQ ID NO: 55574 - protein, 452 aa, Enterobacter cloacae
MYSLVMGCAVLIVMSTQISWQLTLLALLPMPIMALAINRYGEQLHERFKLAQAAFSSLNDRTQESMTSIRMIKAFGLEDRQSALFAADAADTGAKNMRVARIDARFDPTIYIAIGMANMLAIGGGSWMVVQGTLTLGQLTSFAMYLGLMIWPMLALAWMFNIVERGSAAYSRIRAMLAEAPVVIDGSEAVPEGRGVMTVDVRKFVYPHTEHSVLENVSFTLQPGQMLGICGPTGSGKSTVLSLLQRHFDVTEGDIRFHDIPLTRLLLDEWRGRLAVVSQTPFLFSDTVANNIALGRPGATQDEIEHVARLASVHDDILRLPQGYETEVGERGVMLSGGQKQRISIARALLLNAEILILDDALSAVDGRTEHQILHNLRQWGDGRTVIISAHRLSALTEASEIVVLQHGHIAQRGQHETLAEQPGWYRDMYRYQQLEAALDDAPQQDEEAANA

SEQ ID NO: 55575 - protein, 192 aa, Enterobacter cloacae
MGAVAVGATIYFGSEQSRRQIEEISAAFERAHELGMVTVLWAYLRNNAFKKDGVDYHVSADLTGQANHLAATIGADIVKQKMAENNGGYKAVNFGYTDDRVYSKLTSDNPIDLVRYQLANCYMGRAGLINSGGAAGGDTDLSDAVRTAVINKRAGGMGLILGRKAFKKSMADGVKLINAVQDVYLDSKVTIA

SEQ ID NO: 55576 - protein, 299 aa, Enterobacter cloacae
MATYPDSLLILNGKSAGNDLLRQAIIGLRDDGARIHVRVTWEKGDAARYINEALGLGVSTIISGGGDGTINEIASALIDLPPANRPVMGILPLGTANDFATSAGIPEELEKALQLAILGKATAVDIAQVNDKTCFINMATGGFGTRITSETPEKLKAALGGVSYLIHGLMRMDTLKPDRCEIRGEDFQWQGDALVIGIGNGRQAGGGQQLCPEALINDGQLQLRIFTGDGLLPALFTTLTQPEESPNIIAGKSAWFEVNAPHGMTFNLDGEPLSGTQFRIEVLPGALQCRLPPDCVLLR

SEQ ID NO: 55577 - protein, 239 aa, Enterobacter cloacae
MHKHEPIPVTNVEPTLGIGAPTDSVFMIEEAKRPGEYMTAFEDEHGTYIMNSKDLRAIAHVERLTQMGVHSLKIEGRTKSYYYCARTAQVYRKAIDDAAAGKPFDTSLLETLEGLAHRGYTEGFLRRHTHDDYQNYEHGYSVSERQQFVGDFTGERKGALAAVAVKNKFTKGDSLELMTPQGNMNFTLEHLENGKGEAIDVAPGDGHTVWLPVPEEVELKFALLMRNFNGESTRNPHGK

SEQ ID NO: 55578 - protein, 80 aa, Enterobacter cloacae
GLLSAYEVVVWMTDGWPLYESRLKGELHVISKRYTQRIERHNLNLRQHLARLGRKSLSFSKSVELHDKVIGHYLNIKHYQ

SEQ ID NO: 55579 - protein, 406 aa, Enterobacter cloacae
MTNSRVEGSSGRAARKLRFALMGPAFIAAIGYIDPGNFATNIQAGASFGYKLLWVVVWANLMAMLIQMLSAKLGIATGKNLAEQIRDHYPRPAVWLYWVQAEIIAMATDLAEFIGAAIGFKLILGVSLLQGAVLTGIATFLILMLQRRGQKPLEKVIGGLLLFVAAAYIVELIFSQPNLVQLGKGMAIPSLPTSEAVFLAAGVLGATIMPHVIYLHSSLTQHLHGGTRKERYSATKWDVAIAMTIAGFVNLAMMATAAAAFHFNGHTGIADLDQAYLTLEPLLSHAAATIFGLSLVAAGLSSTVVRTLAGQVVVQGFVRFHIPLWVRRSVTMLPSFIVILMGLDPTRILVMSQVLLSFGIALALVPLLIFTSNKNLMGELVNSTLVKRTGWAIVVVVVALNLWLLV

SEQ ID NO: 55580 - protein, 175 aa, Enterobacter cloacae
MITATIGINIVANFVSPAFDFSNCSPQKISFRTGGMIAAVGSILLTPWNLFNSPELIHYTLDVLGAFIGPLFGILIADFYLIKRGKVSVDDLFDDTPKGKYWYRNGFNPKAIGALIPSVAVGLVISFIPALHEVANFSWFIGVFLGGVTYRWLAREDRETAGATSFSSRVATQKE

SEQ ID NO: 55581 - protein, 427 aa, Enterobacter cloacae
AIRGAFFDIAQVCDSADAIAQHARYLEDGLLFIQSGKILAHMPWQEGEQYLDPHKGYTDLRGRLLLPGFVDTHVHYPQTEMIGAFGEQLLEWLTTYTFPVESQFSDEAYAKEIAEFFIQQLVSNGTTTALVFCTLHPESVEALFTQALRLNMRLIAGKVMMDRHTPDYLSEDAKQSYRQTRALIQRWHHRGRLGYAITPRFAPTSSPELLAAVSLLREEFPDTWMQTHLSENPNEVAWVSDLWPEHERYLDVYHHYGLTGERSVFAHAIHLHHSEWQCLHDTGSAVAFCPTSNLFLGSGLFRLPACWQHRVRMGIGTDVGAGTTFSMLRTLGEAYKVGQLQSYRLRASEAFYHATLGGAHALRLEDKIGNFAPGKEADFVVIDPDVTPLQRLRNRRCQDIYEQLFVLMTLGDERNISETWVNGERVW

SEQ ID NO: 55582 - protein, 465 aa, Enterobacter cloacae
MRLHEMSISAIQHALGAGELSAREIARQTLEAIARVNPQIGAWTAVTEARMLAEAESIDTLRREKRPLPPLAGVPYAVKNLFDVAGHTTLAGAELFSQRPAAAADSFAVRQLRSAGGLLTGMVNMDAYAYGFTTENSHYGTTRNPHDLARIAGGSSGGSAAAVAAGLVHFSLGTDTNGSIRVPASLCGIYGLKPTFGRLSRSGSHPFVASLDHIGPFARRVCDLASVYDALQGRDSSDAFQAESSREQTRPMLDRGLDGLRCAVLGGYFTTWCDADARDAVARVAKALDVQDELQFPDAELARSAAFIISASEGGNQYLPALRREPERFEPHSRERLLAGAMIPSAWYIQAQRFRAHARQAFKTLFAQVDVLIAPATPRSATLAGEQTMEINGQPLPIRASMGMLTQPISFLGLPVTTVPLRTAQGAPIGLQLIAAPFNEQACLHVARVLEESGIADARPAEVAA

SEQ ID NO: 55583 - protein, 216 aa, Enterobacter cloacae
MNNMNVIIADDHPIVLFGIRKSLEQIEWVNVVGEFEDSTALINNLPKLDAHVLITDLSMPGDKYGDGITLIKYIKRHFPDISIIVLTMNNNPAILSAVLDLDIEGIVLKQGAPTDLPKALAALQKGKKFTPESVSRLLEKISAGGYGDKRLSPKESEVLRLFAEGFLVTEIAKKLNRSIKTISSQKKSAMMKLGVDNDIALLNYLSSVTLSASDKD

SEQ ID NO: 55584 - protein, 418 aa, Enterobacter cloacae
MTLLALGINHKTAPVSLRERVTFSPDTLDLALDSLLAQPMVQGGVVLSTCNRTELYLSVEEQDNLHEALIRWLCDYHNLNEDELRNSLYWHQDNDAVSHLMRVASGLDSLVLGEPQILGQVKKAFADSQKGHLKASELERMFQKSFSVAKRVRTETDIGASAVSVAFAACTLARQIFESLSTVTVMLVGAGETIELVARHLREHKVKKMIIANRTRERAQVLADEVGAEVVALSDIDERLKDADIIISSTASPLPIIGKGMVERALKSRRNQPMLLVDIAVPRDVEPEVGKLPNAYLYSVDDLQSIISHNLAQRKAAAVQAETIVEQETSEFMAWLRAQSASETIREYRGQAEQVRDDLTAKALAALEQGGDANAIMQDLAWKLTNRLIHAPTKSLQQAARDGDDERLTILRNSLGLE

SEQ ID NO: 55585 - protein, 315 aa, Enterobacter cloacae
MPDMKLFAGNATPELAQRIANRLYTSLGDAAVGRFSDGEVSVQINENVRGGDIFIIQSTCAPTNDNLMELVVMVDALRRASAGRITAVIPYFGYARQDRRVRSARVPITAKVVADFLSSVGVDRVLTVDLHAEQIQGFFDVPVDNVFGSPILLEDMLQLNLDNPIVVSPDIGGVVRARAIAKLLNDTDMAIIDKRRPRANVSQVMHIIGDVAGRDCVLVDDMIDTGGTLCKAAEALKERGAKRVFAYATHPIFSGNAVNNLRNSVIDEVVVCDTIPLSDEIKALPNVRTLTLSGMLAEAIRRISNEESISAMFEH

SEQ ID NO: 55586 - protein, 333 aa, Enterobacter cloacae
MKNVASSHVLPFRALIDACWKEKYTSSRFVRDLIAGITVGIIAIPLAMALAIGSGVAPQYGLYTSAVAGIVIALTGGSRFSVSGPTAAFVVILYPVSQQFGLAGLLVATLMSGVFLILFGLARFGRLIEYIPLSVTLGFTSGIGITIGTMQIKDFLGLQMPHVPEHYLQKVGALFMALPTANLGDAAIGIVTLGTLIVWPRLGIRLPGHLPALLLGWAVMAIVNMLGGHVATIGSQFHYVLADGSQGSGIPQLLPQLVLPWDMPGSSFTLSWDSLRALLPAAFSMAMLGAIESLLCAVVLDGMTGTKHKANSELVGQGLGNLVAPFFGGITGD

SEQ ID NO: 55587 - protein, 276 aa, Enterobacter cloacae
MTDFVSLLQQGNAWLFVPSAILLGALHGLEPGHSKTMMAAFIVAIRGTLKQAVLLGLAATLSHTAVVWLVAMAGLWFGRGWDAHTSEPWFQLFSGVLIVAIALWMAWRTWKESQPHDHHHHDHDHHHHDHDHDHHHDHHHHHEHSLVEEEWQDAHQRAHAQDINRRFSGQNVTTGQIVMFGLTGGLIPCPASITVLLICLQLKHFALGATLVFSFSIGLALTLVASGAIAALSLKHATKRWPGFSEFSRKAPWISAALITVVGIYMSLHGLSGILA

SEQ ID NO: 55588 - protein, 328 aa, Enterobacter cloacae
MNDQAFTFQTLHPDTIMDALFEQGIRVDSGLTPLNSYENRVYQFQDEDRQRFVVKFYRPERWSAEQIQEEHQFAHDLLDDDVPVAAPLKFNNQTLLTHEGFYYAVFPSLGGRQFEADNIDQMEWVARYLGRIHQTGRKKAFIARPTIGIQEYLLEPREIFETSAMIPAALKDDFLNATDKLIAAVKTCWRDDISVLRLHGDCHAGNILWRDGPLFVDLDDARMGPAVQDLWMLLNGDKAEQRMQLETIIEAYEEFSPFNSDEIALIEPLRAMRFVYYLAWLIRRWDDPAFPRNFPWLTGEDYWRSQISTFTEQVKVLQEPPLQLTPMY

SEQ ID NO: 55589 - protein, 639 aa, Enterobacter cloacae
MQALVRRPVFSMLNYLISLPRPIKRIITLSIDVVLLLCAFWFAFWVRIDSMTPVYSTEHWLFIFSIILVTLAIFVKLGLYRAVIRYITAKILLVVTMGMVISSILLIIAAFYTNLYLPRTIPFIYFSFGLLLIAGSRLAMRMLVNRGLNLGTRVVIYGAGASGRQLLPALSQMDEYYPVAFVDDNRALQGQVIHGVSVFAPEKLPWLVEKYEAKKILLAMPSASRARKNEVIKTLEGLPCEVLSIPGMVDLVEGKASIDSLRKVVITDLLGRDPVSPIPELISRNINGKTVMVTGAGGSIGSELCRQIIKNKPNQLILFELSEFSLYSIDSELRNLNLSQDFKVKIYPILGNVQDKEHLERLIRAFNVDTIYHAAAYKHVPLVEFNVLDGVRNNIFGTLSCAQAAASCGVENFVLISTDKAVRPTNTMGATKRMAELVLQALAKESSKTCFSMVRFGNVLGSSGSVVPLFEKQIAAGGPVTLTHEDITRYFMTIPEAAQLVIQAGAMGTGGDVFVLDMGEPVKIIDLAHRMITLQGLTVRDDKNPYGDIAIKTTGLRPGEKLYEELLIGDNVSVTQHPRIRTANEVMLPWSEMSIILRDLDSACSQFDYERVREILLQAPAAFNPTDGICDLLWNEKVN

SEQ ID NO: 55590 - protein, 336 aa, Enterobacter cloacae
MKAAVVTQDHQVNVTEKTLRPLKHGEALLKMECCGVCHTDLHVKNGDFGDKTGVILGHEGIGIVKEVGPGVKSLKVGDRASVAWFFEGCGHCEYCNTGNETLCRDVKNAGYSVDGGMAEECIVTADYAVKVPDGLESAAASSITCAGVTTYKAVKVSGIKPGQWIAIYGLGGLGNLALQYAKNVFNAKVIALDVNDEQLKLAASMGADLTINSRSEDAAKIVQEKTGGAHAAVVTAVAKAAFNSAVDAVRAGGRVVAVGLPPEAMSLDIPRLVLDGIQVVGSLVGTRQDLQEAFQFAAEGKVVPKVTMRPIEDINAIFKEMEQGQIRGRMVIDLRS

SEQ ID NO: 55591 - protein, 309 aa, Enterobacter cloacae
ANIVHSGYGFRCTATDRALPLTLGLDGSAVLERLNGLPDGWLVEALDQLFVAAPALTGITLPWATWQDAPQAQALFSLAHGDYLARETFWQLPLWLKGERPQASGGMQFDESRQLYFPLRPTRPQGEIYRRYDPQIKRTLSFRVVDVALDGERFTQWMNNPRVNAFWEMAGPQAEQESYLRRQLDSTYCYPVIGCFDDQPFGYFELYWAAEDRIGRHYRWQPFDRGLHMLVGEENWRGAQYIRSWLRGLSHYLYLNEPRTARIVAEPRFDNQRLFRHLASAGFETVKEFDFPHKRSRLIMSQRHRFFSE

SEQ ID NO: 55592 - protein, 321 aa, Enterobacter cloacae
MSKPIVMERGVKYRDADKMALIPVKNVATEREALLRKPEWMKIKLPADSSRIQGIKAAMRKNGLHSVCEEASCPNLAECFNHGTATFMILGAICTRRCPFCDVAHGRPVAPDANEPQKLAQTIADMALRYVVITSVDRDDLRDGGAQHFADCITAIREKSPNIKIETLVPDFRGRMDRALDILTATPPDVFNHNLENVPRLYRQVRPGADYNWSLKLLERFKEAHPHIPTKSGLMVGLGETNDEIIEVMRDLRRHGVTMLTLGQYLQPSRHHLPVQRYVSPDEFDEMKAEAMAMGFTHAACGPFVRSSYHADMQAKGEEVK

SEQ ID NO: 55593 - protein, 317 aa, Enterobacter cloacae
MEYNNLPAKRLNEPGGEDKPQIFRTLRNIDLNLLTIFEAVYVHKGIVNAAKILNLTPSAISQSIQKLRAIFPDPLFIRKGQGVTPTAYATHLHEYISQGLESILGALDLTGSYDKQRTITIGCSPSVGVLVMPAIFQAVKEHAPQLLLRNVPLNEPDIQLAQFQTDLIIESGSFSARALGQNVLYADNLVLVCRQQHPALSEPLTIENLRNYDHSSFMTEGQSNHALRQRIDEIFPERQISFSSYNMFTTASLIGSSDMLCVMPSRLYSLLQKCWPLESIPLSQLNAESIEISLHYNKLSLRDPVLENVIRIIRQAF

SEQ ID NO: 55594 - protein, 439 aa, Enterobacter cloacae
MSPSDAPINWKRNLAVAWLGCFLTGAAFSLVMPFLPLYVEQLGVTGYSALNMWSGLVFSITFLFSAMASPFWGGLADRKGRKIMLLRSALGMAIIMALMGEAQNVWQFLILRALLGLLGGFIPNANALIATQIPRHKSGWALGTLSTGGVSGALLGPLAGGLLADNYGLRPVFFITASVLFLCFIVTLLCIRENFTPVAKKEMLHAREVLTSLKNPRLVLSLFVTTMIIQVATGSIAPILTLYVRDLTGNVSNIAFISGLIASVPGVAALLSAPRLGKLGDRVGPEKILISALVISVLLLIPMSMVQAPWQLGLLRFLLGAADGALLPAVQTLLVYNSTNQIAGRIFSYNQSFRDIGNVTGPLLGAGISASFGFRAVFIVTAGVVLFNAIYSWFSLSRRAAARNGIRRTPDSLFSHSYLQNLIFSYSFPETFWKTGRHQ

SEQ ID NO: 55595 - protein, 349 aa, Enterobacter cloacae
MPVLHNRVSNEMLKARMLAETEPRTTISFYKYFTIDDPQATRDALYQAFTALNVFGRVYLAREGINAQISVPESKVSAFRDVLYQFDPALDGLRLNIALDDDGKSFWVLRMKVRERIVADGIDDPEFNPADVGEYLKAAEVNAMLDDPDAVFIDMRNHYEYEVGHFENAMEIPADTFREQLPKAVEMMQEHKDKKIVMYCTGGIRCEKASAWMKHNGFNKVWHIEGGIIEYARRAREQGLPVRFIGKNFVFDERMGERISEDVIAQCHQCGAPCDTHTNCKNDGCHLLFIQCPACAEKFNGCCSELCSEESILPEEEQRRRRAGRENGNKIFNKSRGRLNTKLGIPDPE

SEQ ID NO: 55596 - protein, 191 aa, Enterobacter cloacae
  MISC_FEATURE (14)..(14): X=any amino acid
KNPLLGIAPGVPWXFTAGNTVAADYKIDKEGQHAFVNFRIQHLGYSWLYGTFKDFDGTFTFDEKNPAADKVNVTINTNSVDTNHAERDKHLRSGEFLNVAKFPQATFTSTEVKKEGDKLNITGNLTLNGVTKPVTLDAKLLGQGDDPWGGKRAGFEAAGKIHLKDFNITTDLGPASQDVELIISVEGVQQK

SEQ ID NO: 55597 - protein, 756 aa, Enterobacter cloacae
MWSACTVNCGSRCPLRMHVVDGEIKYVETDNTGDDNYEGLHQVRACLRGRSMRRRVYNPDRLKYPMKRVGKRGEGKFERISWDEAYDIIATNMQRLIKEYGNESIYLNYGTGTLGGTLTRSWPPGKTLVARLMNCCGGYLNHYGDYSSAQIAAGLNYTYGGWADGNSPSDIENSKLVVLFGNNPGETRMSGGGVTYYLEQARAKSNARMIIIDPRYTDTGAGREDEWIPIRPGTDAALVSALAWVMITENLVDQPFLDKYCVGYDEKTLPASAPANGHYKAYILGQGSDGVAKTPEWASTITGIPAERIVQLAREIGSAKPAYISQGWGPQRHANGEIATRAISMLSILTGNVGIHGGNTGAREGSYEVPFERMPTLDNPVQTSISMFMWTDAIERGPEMTALRDGVRGKDKLDVPIKMIWNYAGNCLINQHSEINRTHEILQDDKKCEMIVVIDCHMTSSAKYADILLPDCTASEQMDFALDASCGNMSYVIFTDQAIKPRFECKTIYEMTSELAKRLGVEQQFTEGRTQEGWMRHLHELSRKAVPDLPDFDTFRKQGMYKQRDPEGHHVAYKAFREDPQANPLTTPSGKIEIYSEELAKIASTWELPEGDVIDPLPIYTPGFENYNDPLTAKFPLQLTGFHYKARVHSTYGNVDVLKAACRQEMWINPMDAKARGISNGDRVRIFNGRGEVHIEAKVTPRMMPGVVALGEGAWYSPDANRIDQAGSINVLTTQRPSPLAKGNPSHTNLVQFEKV

SEQ ID NO: 55598 - protein, 253 aa, Enterobacter cloacae
MHYQPQKNLLHNRIILVTGASDGICREAALTYAEYGANVILIGRSEEKLQNVAQEVEAKCGTPAPWYTLDLLICTPAVCQELAQRISAHYPRLDGVLHNAGLLGEVRPMDEQDPDIWQQVMQVNVNGTFFLTQALLPLLLKSESGSLVFTSSSVGREGRANWGAYAVSKFATEGMMQVLAEEYQSRHLRVNCINPGGTRTKMRASAFPSEDPQKLKTPADIMPLYLWLMGDDSRRKTGMTFDAQPGRKPGISQ

SEQ ID NO: 55599 - protein, 534 aa, Enterobacter cloacae
MGKALVIVESPAKAKTINKYLGNDYVVKSSVGHIRDLPTSGSASKKSADSTSTKGAKKPKKDERSALVNRMGVNPWHNWDAQYEVLPGKEKVVNELKQLAEKADHIYLATDLDREGEAIAWHLREVIGGDDKRYSRVVFNEITKNAIRQAFEKPGELNIDRVNAQQARRFMDRVVGYMVSPLLWKKIARGLSAGRVQSVAVRLVVEREREIKAFVPEEFWEVDANVTTPGGDALPLQVSHHNDKPFRPENRDQTMAAVALLEKARYQVLEREDKPTSSKPGAPFITSTLQQAASTRLGYGVKKTMMMAQRLYEAGYITYMRTDSTNLSQDAVNMVRGYISDNFGKKYLPESANQFASKENSQEAHEAIRPSDVSVLAESLKDMEADAQKLYQLIWRQFVACQMTPAQYDSTTLTVGAGDFRLKARGRILRFDGWTKVMPALRKGDEDRTLPAVNKGDELSLVDLVPAQHFTKPPARFSEASLVKELEKRGIGRPSTYASIISTIQDRGYVRVENRRFYAEKMGEIVTDRLEANF

SEQ ID NO: 55600 - protein, 299 aa, Enterobacter cloacae
MLDNSRLRIAIQKSGRLSDDSRELLARCGIKINLHTQRLIALAENMPIDILRVRDDDIPGLVMDGVVDLGIIGENVLEEELLTRRAQGEDPRYFTLRRLDFGGCRLSLATPVDETWDGPAALNGKRIATSYPHLLKRYLDQKGVQFKSCLLNGSVEVAPRAGLADAICDLVSTGATLEANGLREVEVIYRSKACLIQRDGEMANAKQQLIDKLLTRIQGVIQARESKYIMMHAPTERLDEVIALLPGAERPTILPLAGDQQRVAMHMVSSETLFWETMEKLKALGASSILVLPIEKMME

SEQ ID NO: 55601 - protein, 274 aa, Enterobacter cloacae
MKKVAIVGLGWLGMPLAMSLAAKGWQVTGSKTTADGVEAARMCGIDGVELRLEPELVCDADDLDTLMNVDALVITLPARRSGPGESFYLQAMQEIVDSALAHHVPRIIFTSSTSVYGEVEGVVKESSERRPVTASGQVLKELEDWLHNLPGTQVDIVRLAGLVGPGRHPGRFFAGKSAPDGQHVVNLVHLDDVVGAIELLLQAPKGGHIYNICAPSHPARSTFYPLMARQLGLAAPVFGEAKDDSKGKIVDGNRICHELGFEYQYPDPLVMPME

SEQ ID NO: 55602 - protein, 265 aa, Enterobacter cloacae
MIKWPWKTNEAGRDMALPWDDALTIPVLANLKPDEQAKLVQLADRFLQQKRLVPLQGFELDPLKNARIALLFCLPVLELGIEWLDGFHEVLIYPAPFVVDDEWQDDIGLVHNQRVVQSGQSWQQGPIILNWLDIQDSFDASGFNLVIHEVAHKLDTRNGDRASGVPLIPLREVAGWEHDLHAAMDNIQDEIDLVGESAASIDAYAATDPAECFAVLSEYFFSAPELFAPRFPALWQRFCQFYQQDPLQRLRQNEESGGHSSRQIH

SEQ ID NO: 55603 - protein, 389 aa, Enterobacter cloacae
TLLNPYFGEFGGMYVPQILMPALRQLEEAFVSAQKDPAFQAEFTDLLKNYAGRPTALTKCRNLTEGTKTTLYLKREDLLHGGAHKTNQVLGQALLAKRMGKTEIIAETGAGQHGVASALASALLGLKCRIYMGAKDVERQSPNVFRMRLMGAEVIPVHSGSATLKDACNEAVRDWSGSYETAHYMLGTAAGPHPFPTIVREFQRMIGEETKAQILEKEGRLPDAVIACVGGGSNAIGMFADFIDDTSVGLIGVEPAGHGIESGEHGAPLKHGRVGIYFGMKSPMMQTDEGQIEESYSISAGLDFPSVGPQHAYLNSTGRADYVSITDDEALEAFKTLCRSEGIIPALESSHALAHALKMMKENPEKEQLLVVNLSGRGDKDIFTVHDIL

SEQ ID NO: 55604 - protein, 452 aa, Enterobacter cloacae
MQTVLAKIVADKAIWVEARKQQQPLASFQNDVVPSSRRFYDALRGTRTAFILECKKASPSKGVIRDDFDPARIAGIYKHHASAISVLTDEKYFQGSFDFLPIVSGIAPQPILCKDFIIDPYQIWLARFYQADACLLMLSVLDDEQYRQLSAVAHSLNMGVLTEVSNEEELERAIALEAKVVGINNRDLRDLSIDLNRTRQLAPRLGSGVTVISESGINSYAQVRELSHFANGFLIGSAMMEHDDLNAAVRRVLLGENKVCGLTREQDAQAAYEAGAIYGGLIFVDSSPRAVSVEQARKVIAAAPLSYVGVFRNADIADVAAKADALSLSAVQLHGDEDQIYIDALRAALAPQVQIWKAQSVGDTLPSRNLNHVDKYVLDNGQGGTGQRFDWSLLNGAKLDNVLLAGGLRPDNCVEAAKTGCAGLDFNSGVESQPGIKDASKLASVFKTLRAY

SEQ ID NO: 55605 - protein, 201 aa, Enterobacter cloacae
MNAERSREALDDLGVCFLFAPKYHTGFRHAMPVRQQLKTRTLFNVLGPLINPAHPPLALIGVYSPELVLPIAETLRVLGYQRAAVVHSGGMDEVSLHAPTLVAELRDGEILSYQLEAADFGLAPYHQEALAGGTPEENRDILTRLLQGKGEVAHEAAVAANVAMLMRLHGEEDLKANVQKVLDVLRSGAAYDRVTALAARG

SEQ ID NO: 55606 - protein, 525 aa, Enterobacter cloacae
MTENIHKHRILILDFGSQYTQLVARRVRELGVYCELWAWDVTEAQIREFNPSGVILSGGPESTTEENSPRAPQYVFEAGVPVFGVCYGMQTMAMQLGGHVEGSNEREFGYAQVEVVTDSALVRGIEDSLTADGKPLLDVWMSHGDKVTAIPSDFVTVASTESCPFAIMANEEKRFYGVQFHPEVTHTRQGMRMLERFVRDICQCEALWTPAKIIDDAVERIRQQVGDDKVILGLSGGVDSSVTAMLLHRAIGKNLTCVFVDNGLLRLNEAQQVMDMFGDHFGLNIVHVEGEQRFLDALKGENDPEAKRKIIGRVFVEVFDEEALKLEDVKWLAQGTIYPDVIESAASATGKAHVIKSHHNVGGLPKEMKMGLVEPLRELFKDEVRKIGLELGLPYDMLYRHPFPGPGLGVRVLGEVKKEYCDLLRRADAIFIEELHKADLYNKVSQAFTVFLPVRSVGVMGDGRKYDWVVSLRAVETIDFMTAHWAHLPYDFLGRVSNRIINEVNGISRVVYDISGKPPATIEWE

SEQ ID NO: 55607 - protein, 860 aa, Enterobacter cloacae
SVTAQEKQTLLTHLNREHGSTPDKLTLQRKTRRAVNIPGTGGKSKSVQIEVRKTRTFVKRDPQEAERLAAEEQAQREAEEQAQREAEAAAKREAELKAEREAAEKAKRDASDKVKRDAAEKDKVSNQQTDEMTKTAQAEKARRENEAAELKRKAEEEARRKLEEEARRVAEEARRMAEENEKNGVNTVEPTEDTSDYHVTTSQHARQAEDDNDREVEGGRGRGRNAKAARPAKKGNKHAESKADREEARAAVRGGKGGKRKGSALQQGFQKPAQAVNRDVVIGETITVGELANKMAVKGSQVIKAMMKLGAMATINQVIDQETAQLVAEEMGHKVILRRENELEEAVMSDRDTGAAAEPRAPVVTIMGHVDHGKTSLLDYIRSTKVASGEAGGITQHIGAYHVETDNGMITFLDTPGHAAFTSMRARGAQATDIVVLVVAADDGVMPQTIEAIQHAKAAGVPVVVAVNKIDKPEADPDRVKNELSQYGILPEEWGGESQLVHVSAKAGTGIDELLDAILLQSEVLELKAIRNGMASGAVIEFFLDKGRGPVATVLVREGTLHKGDIVLCGFEYGRVRAMRNELGQEVLEAGPSIPVEILGLSGVPAAGDEVTVVRDEKKAREVALYRQGKFREVKLARQQKSKLENMFANMTDGEVHEVNILLKADVQGSVEAISDSLLKLSTDEVKVKIIGSGVGGITETDATLAAASNAILVGFNVRADASARKVIEAESLDLRYYSVIYNLIDEVKAAMSGMLSPELKQQIIGLAEVRDVFKSPKFGAIAGCMVTEGNIKRHNPIRVLRDNVVIYEGELESLRRFKDDVNEVRNGMECGIGVKNYNDVRVGDMIEVFEIIEIQRTIA

SEQ ID NO: 55608 - protein, 313 aa, Enterobacter cloacae
MSRPRRRGRDVHGVLLLDKPQGASSNDVLQKVKRIYNANRAGHTGALDPLATGMLPVCLGEATKFSQYLLDSDKRYRVIAKLGQRTDTSDADGQVVEERPVTFSAEQLDAALESFRGDTMQVPSMYSALKYQGKKLYEYARQGIDVPREARPITVYELLFIRHEGDELELEVHCSKGTYIRTIIDDLGEKLGCGAHVIYLRRLAVSKYPVERMVTLEHLRELVEQAEAQGIAPADLLDPLLMPMDSPAADFPVVNLPLTSSVYFKNGNPVRTAEAPLEGLVRVTEGDEGKFIGMGEMDGEGRVAPRRLVVEYP

SEQ ID NO: 55609 - protein, 82 aa, Enterobacter cloacae
MAQEIELKFIVEKDSVDALRQHLHTLSGEHHAPVQLLNIYYETPDSWLRRHDMGLRIRGASGRYEMTMKISGRRVGGLHQRP

SEQ ID NO: 55610 - protein, 402 aa, Enterobacter cloacae
YLVGGAVRDALLGLPVKDKDWVVVGATPEEMLDAGYQQVGRDFPVFLHPKSREEYALARTERKSGSGYTGFTCYAAPDVTLEQDLLRRDLTINALAQDEDGQIVDAYGGQDDLRNRLLRHVSPAFSEDPLRVLRVARVAARYAHLSFRIADETMALMTAMTEAGELEHLTPERVWKETENALTTRNPQVFFQVLRDCGALKVLFPEIDALFGVPAPAKWHPEIDTGVHTLMTLSMAAMLSSDVDVRFSTLCHDLGKGLTPKEFWPRHHGHGPAGVKLVEGLCQRLRVPNEIRDLAKLVAEFHDLIHTFPILKPATIVKLFDNIDAWRKPQRVEQIALTSEADVRGRTGFEACDYPQGRLLRKAWDVAKAVPTKDVVEAGFKGPEIREELTKRRIQAVSDWKE

SEQ ID NO: 55611 - protein, 61 aa, Enterobacter cloacae
MMRTFIKKVYAAIEAGDKAAAQNAFNEMQPIVDRQAAKGLIHKNKAARHKANLTAQVNKLA

SEQ ID NO: 55612 - protein, 973 aa, Enterobacter cloacae
LFIYRPVATILISLAITLCGVLGFRLLPVAPLPQVDFPVIMVSASLPGASPETMASSVATPLERSLGRIAGVNEMTSSSSLGSTRIILEFSFDRDINGAARDVQAAINAAQSLLPSGMPSRPTYRKANPSDAPIMILTLTSDTYSQGQLYDFASTQLAQTISQINGVGDVSVGGSSLPAVRVGLNPQALFNQGVSLDDVRSAISTANVRKPQGAIEDGSHAGQIHTNDDLKTAAEYQPLIIHYNNGAAVRLSDVASVTDSVQDVRNAGMTNAKPAILLMIRKLPEANIIETVNSIRARLPDLQETIPAAIDLQIAQDRSPTIRASLEEVEQTLIISVALVILVVFLFLRSGRATLIPAVAVPVSLIGTFAAMYLCGFSLNNLSLMALTIATGFVVDDAIVVLENISRHLEAGVKPLQAALQGTREVGFTVLSMSLSLVAVFLPLLLMGGLPGRLLREFAVTLSVAIGISLAISLTLTPMMCGWMLKRSKPHSQPRRKGFGRFLMAMQEGYGKSLKWVLNHTRLVGLVLIGTIVLNVWMYITIPKTFFPEQDTGVLMGGIQADQSISFQAMRGKLQDFMKIIREDKAVDNVTGFTGGSRVNSGMMFITLKPRGERNETAQQVIDRLRVKLAKEPGANLFLMAVQDIRVGGRQANASYQYTLLSDDLAALREWEPKIRKALAALPQLADVNSDQQDNGAEMALTYDRETMSRLGINVEAANSLLNNAFGQREISTIYQPMNQYKVVMEVDPRYTQDISALDKMFVINNDGKAIPLSYFASWQPANAPLSVNHQGLSAASTISFNLPAGSSLSEASDAINRAMTQLGVPSTVRGSFAGTAQVFQETMNSQVILILAAIATVYIVLGVLYESYVHPLTILSTLPSAGVGALLALELFGAPFSLIALIGIMLLIGIVKKNAIMMVDFALDAQRNGNLSPEEASGQACLLRFRPSRMTTLAALFGACPRVISGGDGSEL

SEQ ID NO: 55613 - protein, 495 aa, Enterobacter cloacae
MFRQWLALVIIVLVYIPVAIDATVLHVAAPTLSMTLGASGNELLWIIDIYSLVMAGMVLPMGALGDRIGFKRLLMIGSTLFGLSSLAAAFAPSAGWLIAARASLAIGAAMIIPATLAGIRTLFIDARDRNIALGVWAAVGSGGAAFGPLIGGMLLEHFYWGSVFLINVPIVLVVVSLAARLVPPQKGRPEQPLNISHAIMLIVAILLLVYSAKTALKGVLSPWVVASALVTGSVLLFIFVRIQLRARVPMIDMRLFCHRIILSGVVMAMTAMIALVGFELLMAQELQFVHGFTPFEAGMFMLPLMVASGFSGPIAGVLVGRLGLRIVAAGGMGLSAVSFIGLSMLDFSTQQLLASALMVLLGFSAASALLASTSAIMAAAPKEKAAAAGAIETMSYELGAGLGIAIFGLLLTRSFSASIDLPQGLNASLADKASSSIGEAMKVAQDLTPTLAESVIEAAKSAFITSHSVALGSAGGMLLLLAVGIWFSLAKAKPQ

SEQ ID NO: 55614 - protein, 251 aa, Enterobacter cloacae
MVMFAYGGIEIIGITAGEAKDPEKSIPRAINSVPMRILVFYVGTLFVIMSIYPWNQVGTNGSPFVLTFQHMGIAFAASILNFVVLTASLSAINSDVFGVGRMLHGMAEQGSAPKVFAKTSRRGTPWVTVVVMTVALLFSVYLNYIMPENVFLVIASLATFATVWVWIMILLSQIAFRRRLSPDEAKALKFKVPGGVATTVVGLIFLVFIIALIGYHPDTRISLYVGCAWIVLLLVGWVFKCRRDRQLAEAQ

SEQ ID NO: 55615 - protein, 478 aa, Enterobacter cloacae
DLSSGQPRRRYSFKLLWNNRQLWFTPQGFSRFPPARLEQFAVDYPDNGPQWVNDQVFYQIFPDRFARSEKRTADQDKIYHHHAAGYDIILKAWDEPLTAQAGGSTFYGGDLDGISEKLPYLKKLGVTALYLNPVFKAPSVHKYDTEDYRHVDAQFGGDEALLRLRKNTQNEGMRLILDGVFNHSGDSHAWFDRHNQSMGGACHNPESPQRDWYSFNEEGRALDWLGYASLPKLDFQSPTLVNEIYGGEDSIVRHWLKAPWNMDGWRLDVVHMLGEAGRARNNLQHVAGITRSAKAAQPEAFVFGEHFGDARQWLQNDAEDAAMNYRGFTFPLWGFLANTDISYDPNHIDAETCMAWMENYRAGLSHQQQLRMFNQLDSHDTARFKSLLGKDVARLPLAVTWLFTWPGVPCIYYGDEVGLDGNNDPFCRKTFPWEPEKQDKVLFSLYQRLAKLRKQSLALRYGGCQVVYAHDNVVVFAR

SEQ ID NO: 55616 - protein, 350 aa, Enterobacter cloacae
MLVSIYALGVAVGAPVLTALTGRFPRKQLLVALMVLFTAGNVLAWQAPDYTTLVIARLLTGLAHGVFFSIGSTIATSLVPKEKAASAIAIMFGGLTVALVTGVPLGTFIGQHFGWRETFLAVSLLGVIALVASLLLVPSNIPGRASASLRDQLKVLTHPRLLIIYAVTALGYGGVFTAFTFLAPMMQDLAGFSPNAVSWILLGYGISVAIGNIWGGKLADKHGAVPALKFIFAALVVLLMIFQFTASLHYAALVTVLVMGIFAFGNVPGLQVYVVQKAELYTPNAVDVASGLNIAAFNIGIALGSIIGGQTVAHVGLTQTPWIGAVIVLVAFLLIGLSGRLDKPARVALG

SEQ ID NO: 55617 - protein, 554 aa, Enterobacter cloacae
MCSIFGVLDIKTDAGELRKKALELSRLMRHRGPDWSGVYASDKAILAHERLSIVDVNAGAQPLYNEKKTHALAVNGEIYNHQALRAEYGDRYAFQTGSDCEVILALYQEKGPEFLDDLQGMFAFALYDSEKDAYLIGRDHIGIIPLYMGHYEHGNFYVASEMKALVPVCRTIKEFPAGSYLWSKDGEIRSYYQRDWFDYDPVKDNVTDKAELRQALEDSVKSHLMSDVPYGVLLSGGLNSSVISAITKKFAARRVEDQERSEAWWPQLHSFAVGLEGAPDLKAAQEVANHLGTVHHEIHFTVQEGLDAIRDVIYHIETYDVTTIRASTPMYLMSRKIKAMGIKMVLSGEGSDEVFGGYLYFHKAPNAKELHEETVRKLQALHMFDCARANKAMSAWGVEARVPFLDKKFLDVAMRINPQDKMCGNGKMEKHILRECFESYLPASVAWRQKEQFSDGVGYSWIDTLKEVAAKQVSDQQLETASFRFPYNTPGSKEAYLYREIFEELFPVPSAAECVPGGPSVACSSAKAIEWDESFKSMNDPSGRAVGVHQSAYK

SEQ ID NO: 55618 - protein, 406 aa, Enterobacter cloacae
MTPGGQAQIGNVDLVKQLNSAAVYRLIDQHGPISRIQIAEQSQLAPASVTKITRQLIERGLIKEVDQQASTGGRRAISIITETRNFQAIGVRLGRHDTTLTLYDLSSKAIAEEHYPLPERTQETLEHALLNTIAQFIESCQRKIRELIAISVILPGLVDPESGVIRYMPHIQVENWGLVDALEKRFKVTCFVGHDIRSLALAEHYFGASQDCEDSILVRVHRGTGAGIISNGRIFIGRNGNVGEIGHIQVEPLGERCHCGNFGCLETIAANTAIEQRVRHLLEQGYQSRVTLDDCKIGNICKAANKGDALACEVIEQVGRHLGKTIAIAINLFNPQKVVIAGEIVEAEKVLLPAIEGCINTQALKAFRQNLPVVRSKLDHRSAIGAFALVKRAMLNGILLQHLLES

SEQ ID NO: 55619 - protein, 266 aa, Enterobacter cloacae
MRLIPLATAEQVGKWAARHIVNRINAFKPTADRPFVLGLPTGGTRMTAYKALVEMHKAGQVSFKHVVTFNMDEYVGLPKDHPESYHSFMHRNFFDHVDIPSENINLLNGNAPDIDAECRQYEEKIRSYGKIHLFMGGVGNDGHIAFNEPASSLASRTRIKTLTHDTRVANSRFFDGDVNQVPKYALTVGVGTLLDAEEVMILVLGGVKAQRIQAAVEGNVNHMWTISCLQLHPKSVIVCDEPSTMELKVKTLKYFNELEAENIKGL

SEQ ID NO: 55620 - protein, 561 aa, Enterobacter cloacae
MKTLLIIDSGLGQARAYMAKTLLGAAANKAHLEIIDNPGDAELVIVLGDKIPADSALNGKKVWLGDINRAVAHPELFLSEAKGHASVYSAPVATAPAAATGPKRVVAVTACPTGVAHTFMAAEAIETEAKKRGWWVKVETRGSVGAGNAITPEEVAEADLVIVAADIEVDLAKFAGKPMYRTSTGLALKKTAQEFDKALVEAKPYQTTGARQTATEGKKESAGAYRHLLTGVSYMLPMVVAGGLCIALSFAFGITAFKEQGTLAAALMQIGGGSAFALMVPVLAGFIAFSIADRPGLTPGLIGGMLAVSTGSGFIGGIIAGFLAGYVAKLISSKLKLPQSMEALKPILIIPLISSLVVGLAMIYLIGKPVAGILAGLTHWLQTMGTANAVLLGAILGGMMCTDMGGPVNKAAYAFGVGLLSTQTYAPMAAIMAAGMVPPLALGLATIIARRKFDKAQQEGGKAALVLGLCFITEGAIPFAARDPMRVLPCCIAGGAVTGAISMAIGAKLMAPHGGLFVLLIPGAITPVLGYLLAIVAGTLVAGLSYAVLKRPEAEVVAKAA

SEQ ID NO: 55621 - protein, 376 aa, Enterobacter cloacae
MFQLSVQDIHPGAQAGDKEEAIRQVAAALVQAGNVADGYVNGMLAREQQTSTFLGNGIAIPHGTTDTRDQVLKTGVQVYQFPQGVLWGDGQVAYVAIGIAASSDEHLGLLRHLTHVLSDDDVAEQLKSATTAEELRALLMGEKQSEALKLDNETLTLDVIASDLVTLQALNAGRLKEAGAADATFVTRAINDKPLNLGQGIWLNDSAEGNLRSAIAVSRAANAFDVEGERAAMLVTVAMNDDQPVSVLKRLGDLLLNNKAEKLLNADASTVLALLTSDDAPTEDVQTAEFVVRNEHGLHARPGTMLVNTIKQFESEITVANLDGTGKPANGRSLMKVVALGVKKGHRLRFTAQGADAEQALKAIGDAIAAGLGEGA

SEQ ID NO: 55622 - protein, 177 aa, Enterobacter cloacae
  MISC_FEATURE (132)..(132): X=any amino acid
MHNTPAAVSPKPFDLTSAAFLIVAFFTGIAGALQTPTLSLFLTNEVHVRPAMVGFFFTGSAIIGILVSQFLAGRSDRKGDRKSLIVFCCLLGVMACVLFAWNRNYFILLFVGVFLSSFGSTANPQLYALARXHADHTGREAVMFSSVLRAQVSLAWVIGPPLAYALAMGFCFTVMYL

SEQ ID NO: 55623 - protein, 1031 aa, Enterobacter cloacae
MPHFFIERPVFAWVVALFIVLAGLLSIPRLPVAQYPAVAPPGIIISVSYPGASPDIMNTSVVSLIEREISGVDNLLYFESSSDTTGSASITVTFKPGTDIKLAQMDLQNQIKIVEPRLPQAVRQNGINVEAANSGFLMMVGLKSATGQFEEADLSDYFARNVSDELRRVPGVGKFQLFGGEKALRIWLDPMKLHGYGLSVSDVLTAVGQQNALVSPGKTGDEPAAAGQGVTYPITVKGQLSSVEAFRNITLKSDASGARLRLSDIARIESGLQSYAFGIRENGVPATAAAIQLSPGANAMSTASGVRARIDELSRVLPEGMAFTIPFDTAPFVKLSIMKVVQTFVEAMVLVFLVMLLFLHKIRCTLIPAIVAPVALLGTFTVMLLSGYSINILTMFGMVLAIGIIVDDAIVVVENVERLMEEKSLSPRDATRQAMQEITPAIIGITLVLTAVFIPMGFAEGSVGIIYRQFCISMAVSILLSAFLALTLTPALCATLLKPHKAGKSGGGRFAVGFNARFRSLTACYEAGLGAILKRTGRMLLLYAALCAALFLGLSSLPSSFLPDEDQGYFMSSIQLPSDATMQRTLNVVKKFEEEIAARPDIESNIMILGFGFSGSGPNSAMAFTTLKDWKDRQGSTAQGEADRIQASMANVSDAVTMSLLPPAISDMGTSSGFTWYVQDREGLGYEALKRAADALVLQANQRPELSDVYIDGLPEGTSLALQVDREKAEAMGVSFDEINQTLSVTLGSNYVNDYTNNGRVQQVIIQADAPYRMQPEQILTLSVKNRMGQMVQVSTFATLSWHVAPQQFTRYQGYSAIRITGNEAPGESSGTAMKVMESLSRDLPQGMAGEWAGSSLQERKSESQLPGLIVLSILVVFMVLAALYESWSSPFAVMLVVPLAFIGAVIAVSVADMTNDVFFKVGLITLIRLSAKNAILIVEFARQLHRQGQPLLAATIHAAGQRLRPILMTSLAFTLGVVPLMLANGASDSTQHAIGTGVFGGMISGTLLAIFFVPVFFIVIARFIDNLRKA

SEQ ID NO: 55624 - protein, 262 aa, Enterobacter cloacae
MGFLSGKRILVTGVASKLSIAYGIAQAMHREGAELAFTYQNDKLKGRVEEFAAQLGSSIVLECDVAQDESIDGMFAELAKAWPKFDGFVHSIGFAPGDQLDGDYVNAVTRDGFKIAHDISSYSFVAMAKSCRAMLNPGAALLTLSYLGAERAIPNYNVMGLAKASLEANVRYMANAMGPEGVRVNAISAGPIRTLAASGIKDFRKMLAHCEAVTPIRRTVTIEDVGNSAAFLCSDLSAGISGEVVHVDGGFNIAAMNELEIK

SEQ ID NO: 55625 - protein, 345 aa, Enterobacter cloacae
  MISC_FEATURE (14)..(14): X=any amino acid
  MISC_FEATURE (66)..(66): X=any amino acid
  MISC_FEATURE (67)..(67): X=any amino acid
PLSALRQDIDRHFXDQGTHMEQRRFSGKGHWYHETQSNHAQTDVVPLVPEAANVDDRFLLDLALAXXIVAACLAGLTPARALCHQLLPLSMPVNRLHTLSAYDRLSTALTVAQACGVQRLCNHYAALLAPLPGPDSSRESNRRLAQITQYARQLASSPDVIDDKAQNQLDEVGLSIYDIVVINQIIGFIGFQARVVAVFQALLGHPVRWLPGHHIQPHTLPASHAAWVPLLPVVELRYASAHQLESLSRWQAEPALEALTPVLCHEPSLLDLTGEILLNTREAIPLTSPALSAAVELLTRSPDRFSAAQFTPLTDQGLHGEHAIMLLTRSAFDGWLNRLKVAFGK

SEQ ID NO: 55626 - protein, 578 aa, Enterobacter cloacae
MIQATPDYHALNAMLNLYDREGRIQFEKDREAVDAFFAAHVRPNSVTFASQNERLDYLVNEGYYDARTLTRYDRAFVVKLFERAHASGFRFQTFLGAWKYYTSYTLKTFDGKRYLESFEDRVAMVALTLAQGDEALAEQLADEILSGRFQPATPTFLNCGKAQRGELVSCFLLRIEDNMESIGRAVNSALQLSKRGGGVAFLLSNLREAGAPIKRIENQSSGVIPVMKMLEDAFSYANQLGARQGAGAVYLHAHHPDILRFLDTKRENADEKIRIKTLSLGVVIPDITFKLAKENAEMALFSPYDVERIYGKAFGDVAISELYDELLVDDRIRKKTINARDFFQTLAEIQFESGYPYIMFEDTVNRANPIAGRINMSNLCSEILQVNSASTYDENLDYADIGKDISCNLGSLNIAHTMDSPDFGRTIETAVRGLTAVSDMSHIRSVPSIEAGNAASHAIGLGQMNLHGYLAREGIAYGSPEGLDFTNLYFYTITWHALHTSMMLARERNQRFAGFEQSRYASGEYFSQYLEGDWQPKTEKVRELFARAGITLPTREMWQQLRDERSWYTWLLKAIMGI

SEQ ID NO: 55627 - protein, 214 aa, Enterobacter cloacae
MSIIIYTRNDCVQCHATKRAMESRGVAFEMVNVDQVPEAADTLRKQGFRQLPVVVAGETSWSGFRPDMINRLSAQATRCMSGLVYFSSSSENTLRFIERVGLPAVRIPLNERERIRVDEPYILVVPSYGGGGTAGAVPRQVIRFLNDPHNRGLIRGVIAAGNRNFGDAFGRAGDVISQKCGVPYLYRFELMGTQQDVENVRKGVNEFWQRQPQN

SEQ ID NO: 55628 - protein, 176 aa, Enterobacter cloacae
MDSSFTPIEQMLKFRASRHEDFPYQEILLTRLCMHMQGKLLENRNKMLKAQGINETLFMALITLESQENHSIQPSELSCALGSSRTNATRIADELEKRGWIERRESDNDRRCLHLQLTDKGHQFLREVLPPQHNCLHKLWSALSTAERDQLEHITRKLLTRLDQMDEDGAVLEALR

SEQ ID NO: 55629 - protein, 61 aa, Enterobacter cloacae; identical to SEQ ID NO: 42597

SEQ ID NO: 55630 - protein, 861 aa, Enterobacter cloacae
EIRQAFLDFFHSKGHQVVASSSLVPNNDPTLLFTNAGMNQFKDVFLGLDKRNYSRATTSQRCVRAGGKHNDLENVGYTARHHTFFEMLGNFSFGDYFKHDAIQYAWELLTGENWFNLPKERLWVTVYETDDEAYEIWEKEVGIPRERIIRIGDNKGAPYASDNFWQMGDTGPCGPCTEIFYDHGDHIWGGPPGSPEEDGDRYIEIWNIVFMQFNRQADGTMEPLPKPSVDTGMGLERIAAVLQHVNSNYEIDLFSTLIKAVAEVTGATDLNNKSLRVIADHIRSCAFLIADGVIPSNENRGYVLRRIIRRAIRHGNMLGAKDTFFYKLVGPLIGVMGAAGDELKRQQAQVEQVLKTEEEQFARTLERGLALLDEELAKLKGDTLDGETAFRLYDTYGFPVDLTADVCRERNIKVDEAGFEAAMEEQRRRARESSGFGADYNAMIRVDSASEFKGYDALELTGKVTALFVDGKAVDSISAGQEAVVILDKTPFYAESGGQVGDKGELKGNGFSFSVSDTQKYGQAIGHQGKLVSGSLKVGEGVQANVDEARRARIRLNHSATHLMHAALRDVLGTHVAQKGSLVNDKVLRFDFSHFEAMKPSEIRAVEDLVNAQIRRNLPIETHIMELEDAKKKGAMALFGEKYDDRVRVLSMGDFSTELCGGTHASRTGDIGLFRIVSESGTAAGVRRIEAVTGEGAIASLHAQSDQLHDIAQLLKGDSQNLGEKVRVALDRTRQLEKELQQLKEQAAAQESANLSSKAVDIKGVKLLVSDLAGVEPKMLRTMVDDLKNQLGSTVIVLATVAEGKVSLIAGVSKDVTDRVKAGELIGMVAQQVGGKGGGRPDMAQAGGTDAAALPQALASV

SEQ ID NO: 55631 - protein, 166 aa, Enterobacter cloacae
MSEPTTRRPAYARLLDRAVRILAVRDHSEQELRRKLSAPVMSKNGPEEIDATAEDYDRVIAWCYEHHYLDDERFALRFLASRGRKGYGPARIRQELNQKGVARESIEKAMRECDTDWCELAREQAIRKYGEPLPREFSEKVKIQRFLLYRGFLMEDIQDIWRNFAD

SEQ ID NO: 55632 - protein, 352 aa, Enterobacter cloacae
MAIDEHNQKALAAALGQIEKQFGKGAIMRLGEDRSMDVETISTGSRSLDMALGAGGLPMGRIVEIYGPESSGKTTLTLQVIAAAQREGKTCAFIDAEHALDPVYARKLGVDIDNLLCSQPDTGEQALEICDALARSGAVDVIVVDSVAALTPKAEIEGEIGDSHMGLAARMMSQAMRKLAGNLKQSNTLLIFINQIRMKIGVMFGNPETTTGGNALKFYASVRLDIRRIGAVKEGENVVGSETRVKVVKNKIAAPFKQAEFQILYGEGINFLGELVDLGVKEKLIEKAGAWYSYNGDKIGQGKANAISWLKENPAAAKEIEKKVRELLLNNQDSKPDFVVDAADAEETNEDF

SEQ ID NO: 55633 - protein, 427 aa, Enterobacter cloacae
MNPERSERIEIPVLPLRDVVVYPHMVIPLFVGREKSIRCLEAAMDHDKKIMLVAQKEASTDEPGVNDLFTVGTVASILQMLKLPDGTVKVLVEGLQRARITTLSDDGEHFSAKAEYLESPELDEREQEVLVRTAISQFEGYIKLNKKIPPEVLTSLNSIDDPARLADTIAAHMPLKLADKQSVLEMSDVNERLEYLMAMMESEIDLLQVEKRIRNRVKKQMEKSQREYYLNEQMKAIQKELGEMDDAPDENEALKRKIDAAKMPKEAKEKAEAELQKLKMMSPMSAEATVVRGYIEWMVQVPWNARSKVKKDLRQAQEILDTDHYGLERVKDRILEYLAVQSRVNKIKGPILCLVGPPGVGKTSLGQSIAKATGRKYIRMALGGVRDEAEIRGHRRTYIGSMPGKLIQKMAKVGGKNPLFLLDEIDK

SEQ ID NO: 55634 - protein, 417 aa, Enterobacter cloacae
  MISC_FEATURE (60)..(60): X=any amino acid
MTDKRKDGSGKLLYCSFCGKSQHEVRKLIAGPSVYICDECVDLCNDIIREEIKESRTAPXAQRLPTPHEIRHHLDDYVIGQEQAKKVLAVAVYNHYKRLRNGDTSNGVELGKSNILLIGPTGSGKTLLAETLARLLDVPFTMADATTLTEAGYVGEDVENIIQKLLQKCDYDVQKAQRGIVYIDEIDKISRKSDNPSITRDVSGEGVQQALLKLIEGTVAAVPPQGGRKHPQQEFLQVDTSKILFICGGAFAGLDKVISHRVETGSGIGFGATVKSTSEKPNEGELLSQVEPEDLIKFGLIPEFIGRLPVVATLNELSEDALIQILKEPKNALTKQYQALFNLEGVDLEFRDEALDAIAKKAMVRKTGARGLRSIVEAALLDTMYDLPSMEDVEKVVIDESVISGQTKPLLIYGKPE

SEQ ID NO: 55635 - protein, 467 aa, Enterobacter cloacae
RPTFLFHDYETFGTHPALDRPAQFAAIRTDDEFNIIGEPEVFYCKPADDYLPQPGAVMVTGITPQEAREKGVNEAEFARRIHDLFTVPNTCVVGYNNIRFDDEVTRNVFYRNFYDPYAWSWQNRNSRWDLLDIMRACYALRPEGINWPENEEGLTSFRLEHLTRANGIEHSNAHDAMADVYATIAMAKLVKNAQPRLFEYLLSHRSKQKLMTLIDVPQMKPLVHISGMFGAWRGNTSWVAPLAWHPDNRNAVIMVDLAGDISPLLELDSDSLRERLYTPKNELGDLPAVPVKLVHINKCPVLAQANTLAPEDADRLGINRQHCLDNLKVLRENPQVREKVVAIFAEAEPFVLSENVDAQLYNGFFSDADRAAMNIVLQTEPRNLPALDITFADKRIEKLMFNYRARNFPGTLDEAEQDRWLQHRRNVFTQEFLNSYAQELEMLYGQYEGNAEKQALLKALFQYAQEI

SEQ ID NO: 55636 - protein, 357 aa, Enterobacter cloacae
MLHYAAHPNQQWPGNAVKFGKACNHHLEERSYRHVVSQTLRYLYRLHIGSTILSQSKFQRAFLHPRYWFTWFGLGVLWLLVQLPYPVLRLLGSKLGSASRVFLKRRESIARKNIELCFPQYNAEEREKLIAENFKSIGMALLETGMAWFWPDERVRKWFDVEGLDNLKRAQMQKRGVMVVGVHFMSLELGGRVMGLCQPMMATYRPHNSALMEWVQTRGRMRSNKAMISRNNLRGMVGALKKGEAVWFAPDQDYGRKGSSFAPFFAVKDVATTNGTFVISRLSGASMLTVTMVRKADKSGYRLHISPEMANYPENECEAAAFINKVIETEIMRAPEQYLWMHRRFKTRPLGEASLYI

SEQ ID NO: 55637 - protein, 298 aa, Enterobacter cloacae
MLATLDHGDTVLVPNPSYPIHIYGAVIAGAQVRSVPLVEGIDFFNELERAIRESYPKPKMMILGFPSNPTAQCVELDFFEKVVALAKRYDVLVVHDLAYADIVYDGWKAPSIMQVPGARDVAVEFFTLSKSYNMAGWRIGFMVGNKTLVSALARIKSYHDYGTFTPLQVAAIAALEGDQQCVHEIAAQYKRRRDVLVKGLHEAGWMVEMPKASMYVWAKIPEPYAAMGSLEFAKKLLQDAKVCVSPGIGFGDYGDTHVRFALIENSDRIRQAVRGIKSMFRADGLLTSKSVAEHPASS

SEQ ID NO: 55638 - protein, 167 aa, Enterobacter cloacae
MTGMSNVTKLAGEPSGQEFLVFTLGDEEYGIDILKVQEIRGYDQVTRIANTPAFIKGVTNLRGVIVPIVDLRVKFSQGDVDYDDNTVVIVLNLGQRVVGIVVDGVSDVLSLTSDQIRPAPEFAVTLSTEYLTGLGALGERMLILVNIEKLLNSDEMALLDIAASHVA

SEQ ID NO: 55639 - protein, 485 aa, Enterobacter cloacae
YLQKVGRALMVPVATLPAAAILMGVGYWIDPNGWGNTSALAAFFIKSGSAIIDNMSVLFAIGVAYGMSKDKDGAAALTGFVGFLVLTTLCSPAAVAMIQKIPADQVPAAFGKISNQFVGILVGIISAELYNRFSSVELPKALSFFSGRRLVPILTSFVMIVVAFIMMYVWPMIFDGLVNFGEHIQKLGSVGAGVYAFFNRLLIPVGLHHALNSVFWFDVAGINDIPNFLGGAQSIEAGKAVVGITGRYQAGFFPIMMFGLPGAALGIYHCARPEYKAKVLGIMMAGAFAAFFTGITEPLEFSFMFVAPDLYVIHAVLTGISVFIAASMHWIAGFGFSAGLVDMVLSSRNPLATHWWMLIPQGLVFFAIYYMVFRFTITKFNLMTPGRELAVAGSERNGQDVNVSGAQDQDVSGLARQYIAAVGGSDNLTGIDACITRLRLNVKDSSLVNEALAKRLGASGVIRLNKTSVQIIVGFVAEKIANAMK

SEQ ID NO: 55640 - protein, 555 aa, Enterobacter cloacae
MSEAEARPSNFIRQIIDEDLASGKHTTVHTRFPPEPNGYLHIGHAKSICLNFGIAQDYQGQCNLRFDDTNPVKEDIEYVESIKNDVQWLGFNWSGDICYSSDYFDQLYAYAVELINKGLAYVDELSADEIREYRGTLTAPGKNSPFRDRSVEENLALFEKMRAGGFEEGKACLRAKIDMASPFIVMRDPVLYRIKFAEHHQTGNKWCIYPMYDFTHCISDALEGITHSLCTLEFQDNRRLYDWVLDNITIPVHPRQYEFSRLNLEYTVMSKRKLNLLVTDKHVEGWDDPRMPTISGLRRRGYTAASIREFCKRIGVTKQDNTIEMASLESCIREDLNENAPRAMAVIDPVKLVIENYPQGESELVSMPNHPNKPEMGSRDVPFSGEIWIDRADFREEANKQYKRLVLGKEVRLRNAYVIKAERVEKDAEGNITTIFCSYDAETLSKDPADGRKVKGVIHWVSASHALPVEIRLYDRLFSVPNPGAAEDFLATINPESLVIKQGYAEPSLKAAEAGKAFQFEREGYFCLDSRYSTAEKPVFNRTVGLRDTWTKIGE

SEQ ID NO: 55641 - protein, 321 aa, Enterobacter cloacae
MMTFSRFTRWMTLFALAATVAVALPARANTWPLPPPGSNVVGENRFHVVENNGGSLEAIAKKYNVGFLALLQANPGVDPYVPRAGSVLTIPLQTILPDAPREGIVINLAELRLYYYPPGKNEVTVYPIGIGQLGGDTLTPTMVTTVSDKRANPTWTPTANIRARYKAQGIDLPAVVPAGPDNPMGHHAIRLAAYGGVYLLHGTNADFGIGMRVSSGCIRLRDDDIKTLFNVVTPGTKVNIINTPIKVSEEPGGVRLVEIHQPLSKNIGDDPQTLPINLNAAMVSFKTNANTNSVVMERAMEARSGMPTDVTRHHDVVQQSM

SEQ ID NO: 55642 - protein, 1022 aa, Enterobacter cloacae
  MISC_FEATURE (12)..(12): X=any amino acid
VQPGRLGDAAVXQLLSASGDHLLAPVDALSAADHAARRAIVPVNTLMQRVCPHSYLHGHALVMKKGQRVSRDALRAQLDGAGYRHVDQVMEHGEYATRGALLDLYPMGSDQPYRLDFFDDEIDSLRVFDADTQRTLEEVESINLLPAHEFPTDKTAIELFRSQWRDKFEVKRDAEHIYQQVSKGMLPAGIEYWQPLFFNEPLPALFSYFPANTLIVNTGDIDASASRFESETRARFENRGVDPMRPLLPPEALWLRTDELNAELKRWPRMQLKTDSLADKAANTNLAFRTLPDLAVQAQQKSPLDNLRKFLESFTGPVVFSVESEGRREALGELLGRIKVAPKRILRLSEATGNGRYLMIGAAEHGFIDTLNNLALICESDLLGERVARRRQDSRRTINPDTLIRNLAELHPGQPIVHLEHGVGRYQGMTTLEAGGIKGEYLMLTYANDAKLYVPVSSLHLISRYAAAPKRMRRCHKLGGDAWARARRKAAEKVRDVAAELLDIYAQRAAKQGFAFKHDKEQYQLFCDSFPFETTPDQAQAINAVLSDMCQPLAMDRLVCGDVGFGKTEVAMRAAFLAVENNKQVAVLVPTTLLAQQHFDNFRDRFANWPVRIEMLSRFRSTKEQTQILEQASEGKIDILIGTHKLLQSDVKWKDLGLLIVDEEHRFGVRHKERIKAMRADVDILTLTATPIPRTLNMAMSGMRDLSIIATPPARRLAVKTFVREYDNLVVREAILREVLRGGQVYYLYNDVENIQKAADRLAELVPEARIAIGHGQMRERELERVMNDFHHQRFNVLVCTTIIETGIDIPTANTIIIERADHFGLAQLHQLRGRVGRSHHQAYAWLLTPHPKAMTTDAQKRLEAIASLEDLGAGFALATHDLEIRGAGELLGEDQSGSMETIGFSLYMELLENAVDALKAGREPSLEDLTSQQTEVELRMPSLLPDDFIPDVNTRLSFYKRIASAKKENELEEIKVELIDRFGLLPDPARNLLDIARLRQQAQKLGIRKLEGNEKGGVIEF

SEQ ID NO: 55643 - protein, 412 aa, Enterobacter cloacae
MKAHIVTPEDERFTAVWQPSDACESYQDEEGRLLHRPLAEHVVNRITGQPAIVTSYNDKRESEPAPLPFSLSALQIEAAKRFGLSAQNVLDICQKLYETHKLITYPRSDSRYLPEEHFAGRHSVMNAIGVHAPHLLPQPAVNPDTHNRCWDDKKVDAHHAIIPTARASNVNLTENEAKVYNLIARQYLMQFCPDAVFRKCVIELEIAKGKFVAKARFLAEAGWRTLLGNKERDEENDGTPLPVVAKDDELLCEKGEVVERQTQPPRHFTDATLLSAMTGIARFVQDKDLKKILRATDGLGTEATRAGIIELLFKRGFLEKKGRYIHSTEPGRALIHSLPELAARPDMTAHWESVLTQISEKQCRYQDFMQPLVGTLYQLIDQARSTPVKTFRGMVAPGSGAKKPFKKKKSAA

SEQ ID NO: 55644 - protein, 442 aa, Enterobacter cloacae
SLESFLAHVQQRDPHQSEFAQAVREVMTTLWPFLEQNPRYRQMSLLERLIEPERVIQFRVTWVDDRNQVQVNRAWRVQFNSAIGPFKGGMRFHPSVNLSILKFLGFEQTFKNALTTLPMGGGKGGSDFDPKGKSEGEVMRFCQALMTELYRHLGPDTDVPAGDIGVGGREVGFMAGMMKKLSNNSACVFTGKGLSFGGSLIRPEATGYGLVYFTEAMLKRHGLGFEGMRVAVSGSGNVAQYAIEKAMQLGARVVTASDSSGTVVDEAGFTAEKLARLCEIKASRDGRVADYARELGLTYLEGKQPWGVPVDIALPCATQNELDVDAARPLISNGVKAVAEGANMPTTIDATDLFLEAGVLFAPGKAANAGGVATSGLEMAQNAARLGWKAEKVDARLHHIMLDIHHACVEYGGEASQTNYVRGANIAGFVKVADAMIGQGVI

SEQ ID NO: 55645 - protein, 540 aa, Enterobacter cloacae
LQSGILLLFAVLFCWVSAGFWTALMGFLQLLMGRDKYSISASTVGDEPLNPEHRTALIMPICNEDVDRVFAGLRATWESVKATGNAEHFDVYILSDSTTPDICVAEQKAWMELIAEVQGERQIFYRRRRRRVKRKSGSIDDFCRRWGNQYSYMVVLDADSVMSGDCLSGLVRLMEANPNAGIIQSSPKASGMDTLYARCQQFATRVYGPLFTAGLHFWQLGESHYWGHNAIIRVKPFIEHCALAPLPGEGSFAGSILSHDFVEAALMRRAGWGVWIAYDLPGSYEELPPNLLDELKRDRRWCHGNLMNFRLFLVKGMHPVHRAVFLTGVMSYLSAPLWFMFLALSTALQVVHALTEPQYFLQPRQLFPVWPQWRPELAITLFASTMVLLFLPKLLSIILIWCKGSKEYGGFFRVTLSLLLEVLFSVLLAPVRMLFHTVFVVSAFLGWEVVWNSPQRDDDSTPWGEAFMRHGSQLLLGLVWAAGMAWLDLRFLFWLAPIVFSLILSPFVSVISSRSTVGLRTKRWKLFLIPEEYSPPQVLV

SEQ ID NO: 55646 - protein, 99 aa, Enterobacter cloacae
IREERLLKVLRAPHVSEKASTAMEKTNTIVLKVAKDATKAEIKAAVQKLFEVEVEVVNTLVVKGKVKRHGQRIGRRSDWKKAYVTFKEGQNLGFRLGGA

SEQ ID NO: 55647 - protein, 201 aa, Enterobacter cloacae
MELVLKHAQSPWTVSETTFGRDFNEALVHQVVVAYAAGARQGTRAQKTRAEVTGSGKKPWRQKGTGRARSGSIKSPIWRSGGVTFAARPQDHSQKVNKKMYRGALKSILSELVRQDRLIVVEKFSVEAPKTKLLAQKLKDMALEDVLIITGELDENLFLAARNLHKVDVRDATGIDPVSLIAFDKVVMTADAVKQVEEMLA

SEQ ID NO: 55648 - protein, 209 aa, Enterobacter cloacae
MIGLVGKKVGMTRIFTEDGVSIPVTVIEVEANRVTQVKDLANDGYRAIQVTTGAKKANRVTKPEAGHFAKAGVEAGRGLWEFRLAEGEEFTVGQDISVELFADVKKVDVTGTSKGKGFAGTVKRWNFRTQDATHGNSLSHRVPGSIGQNQTPGKVFKGKKMAGQLGNERVTVQSLDVVRVDAERNLLLVKGAVPGATGSDLIVKPAVKA

SEQ ID NO: 55649 - protein, 103 aa, Enterobacter cloacae
MQNQRIRIRLKAFDHRLIDQSTAEIVETAKRTGAQVRGPIPLPTRKERFTVLISPHVNKDARDQYEIRTHKRLVDIVEPTEKTVDALMRLDLAAGVDVQISLG

SEQ ID NO: 55650 - protein, 134 aa, Enterobacter cloacae
MFRKLLDEGRAGENVGVLLRGIKREEIERGQVLAKPGSIKPHTKFESEVYILSKDEGGRHTPFFKGYRPQFYFRTTDVTGTIELPEGVEMVMPGDNIKMVVTLIHPIAMDDGLRFAIREGGRTVGAGVVAKVLG

SEQ ID NO: 55651 - protein, 177 aa, Enterobacter cloacae
MEKTLSDGLPLPQRYGAIATIIIGISMAVLDGAIANVALPTIASDLHASPASSIWIVNAYQIAIVVSLLSFSFLGDMFGYRRVYQCGLVVFTFTSLLCALSDSLHTLTLARIAQGFGGAALMSVNTALIRLIYPQRHLGRGMGINSFIVAVSSAAGPTIAAAILSVASWQWLFAINV

SEQ ID NO: 55652 - protein, 490 aa, Enterobacter cloacae
MSRMAEQQLYINGGYTSATSGRTFETINPANGEVLASVQAAGREDVDRAVESAKRGQKIWAAMTAMERSRVLRRAVDILRERNDELANVETLDTGKAYSETSTVDIVTGADVLEYYAGLIPALEGSQIPLRETSFVYTRREPLGVVAGIGAWNYPIQIALWKSAPALAAGNAMIFKPSEVTPLTALKLAEIYTEAGVPDGVFNVLPGVGAETGQYLTEHPGIAKVSFTGGVASGKKVMANSAASSLKEVTMELGGKSPLIIFDDADLDLAADIAMMANFFSSGQVCTNGTRVFVPAKFKAAFEQKIVERVGRIRAGDLFDERTNFGPMVSFPHRDSVLRYIAKGKEEGARVLCGGDVLKGESFDNGAWVAPTVFTDCTDEMTIVREEIFGPVMSILTYESEEEAIRRANDTDYGLAAGIVTADLNRAHRAIHQLEAGICWINTWGESAAEMPVGGYKHSGIGRENGVMTLQSYTQVKSIQVEMGKFQSIF

SEQ ID NO: 55653 - protein, 139 aa, Enterobacter cloacae
MARKHSSFASNAYFAATSICCCYTVYKYSIARCTMAVETKFVVVRKGEEKMTFASKKEADAHDKLLDMADAFTDWLLQSGMQMDETQAENLGLYLAEQKETVQHILRTSKLPDLNAPAAADKTESDAADTKKIRAVKAA

SEQ ID NO: 55654 - protein, 570 aa, Enterobacter cloacae
MISGILASPGIAFGKALLLKEDEIVIDRKKISADKVDQEVERFLSGRAKASAQLEAIKTKAGETFGEEKEAIFEGHIMLLEDEELEQEIIALIKDKGMTADAAAHEVIEGQATALEELDDEYLKERAADVRDIGKRLLRNILGLAIIDLSAIQDEVILVAADLTPSETAQLNLKKVLGFITDAGGRTSHTSIMARSLELPAIVGTGSVTSQVKNGDYLILDAVNNLVYVNPTNEEIDKLRAVQEQVATEKAELAKLKDLPAITLDGHQVEVCANIGTVRDVDGAERNGAEGVGLYRTEFLFMDRDALPTEEEQFAAYKAVAEACGSQAVIVRTMDIGGDKELPYMNFPKEENPFLGWRAIRIAMDRKEILLDQVRAILRASAFGKLRIMFPMIISVEEVRALKKEIEIYKQELREEGKAFDESIEIGVMVETPAAATIARHLAKEVDFFSIGTNDLTQYTLAVDRGNDMISHLYQPMSPSVLNLIKQVIDASHAEGKWTGMCGELAGDERATLLLLGMGLDEFSMSAISIPRIKKIIRNTNFEDAKVLAEQALAQPTTDELMTLVNKFIE

SEQ ID NO: 55655 - protein, 323 aa, Enterobacter cloacae
MSKIYEDNSLTIGHTPLVRLNRIGNGRILAKVESRNPSFSVKCRIGANMIWDAEKRGVLKPGVELVEPTSGNTGIALAYVAAARGYKLTLTMPETMSIERRKLLKALGANLVLTEGAKGMKGAIQKAEEIVASDPAKYLLLQQFSNPANPEIHEKTTGPEIWEDTDGQVDVFISGVGTGGTLTGVSRYIKGTKGKKDLITVAVEPTDSPVITQALAGEELKPGPHKIQGIGAGFIPGNLDLKLIDKVVTITNEEAISTARRLMDEEGILAGISSGAAVAAALKLQEDEAFTNKNIVVILPSSGERYLSTALFADLFTEKELQQ

SEQ ID NO: 55656 - protein, 370 aa, Enterobacter cloacae
MPLPDFKSSEPFTLGIELELQVVNPPGYDLSQDSSALIAAVKGDIKGGEVKHDITESMLEIATGVCQNIDQAAAQFSVMQQSILRAAAEQHIQICGGGTHPFQKWQRQEVCDDERYNVTLERFGYLILQATVFGQHVHVGCRTGDDAIYLLHGLSRFVPHFIALAAASPYMQGTDTKFSLSRLNILSGFPDNGQMPWVNSWQEFEGLFRRLSSTSMIDSIKDLHWDIRPSPHFGTVEVRVMDTPLTLGHAINIAGLIQATSHWLLTARPYKHQERDFLLYRFNRFQACRYGLEGILTDVHTGEHKTVAEDIAWLLEQVAPSAEKLGATSAVNEIALLLKQGKSEAQRMREFIADGGSLISLVQKHCELWA

SEQ ID NO: 55657 - protein, 155 aa, Enterobacter cloacae
MSKPKYPFEKRLEVVNHYFTTDDGYRIISARFGVPRTQVRTWVALYEKHGEKGLIPKPKGVSADPELRIKVVKAVTEQQMSLNQAAAHFMLAGSGSVAKWLKVYEEHGEAGLRALKIGTKRNITMSVDPEKAALALELSKDRRIYSTFFITISLQ

SEQ ID NO: 55658 - protein, 427 aa, Enterobacter cloacae
MADTKATLTLNGDTAIELDVLKGTLGQDVIDIRTLGSKGVFTFDPGFTSTASCESKITYIDGDEGILLHRGFPIDQLATESNYLEVCYILLNGEKPTQAQYDEFKTTVTRHTMIHEQITRLFHAFRRDSHPMAVMCGITGALAAFYHDSLDVNNPRHRDIAAFRLLSKMPTMAAMCYKYSIGQPFVYPRNDLSYAGNFLRMMFSTPCEEYEVNPVLERAMDRILILHADHEQNASTSTVRTAGSSGANPFACIAAGIASLWGPAHGGANEAALKMLEEISTVEHIPEFVRRAKDKNDSFRLMGFGHRVYKNYDPRATVMRETCHEVLKELGTKDDLLEVAMELEHIALNDPYFIEKKLYPNVDFYSGIILKAMGIPSSMFTVIFAMARTVGWIAHWNEMHSEGMKIARPRQLYTGYEQRDFKSDLKR

SEQ ID NO: 55659 - protein, 358 aa, Enterobacter cloacae
MKLPVREFDAVVIGAGGAGMRAALQISQSGQTCALLSKVFPTRSHTVSAQGGITVALGNSHEDNWEWHMYDTVKGSDYIGDQDAIEYMCKTGPEAILELDHMGLPFSRLENGTIYQRPFGGQSKNFGGEQAARTAAAADRTGHALLHTLYQQNLKNHTTIFSEWYALDLVKNADGAIVGCTALCIETGEVVYFKARATVLATGGAGRIYQSTTNAHINTGDGVGMAIRAGVPVQDMEMWQFHPTGIAGAGVLVTEGCRGEGGYLLNKHGERFMERYAPNAKDLAGRDVVARSIMIEIREGRGCDGPWGPHAELKLDHLGKEVLESRLPGSLELSRTFAHVEPGKAAIPVYPTCHYMMG

SEQ ID NO: 55660 - protein, 178 aa, Enterobacter cloacae
MKKVILGLFIAAALGCSASSFAASTGEGQINFTGEIIDSACQVVNGLSSPLNVALGKVSKTTFTGAGSTSTLTKFDIQLKDCPETVTSAAINFGGTPDADNNTTLALTPGATTATGVAIQLVDSSEQPVSLYTPSKQYPLTPGTTVTNLEFGARYIQTQAAITAGQANSASTFTVIYN

SEQ ID NO: 55661 - protein, 260 aa, Enterobacter cloacae
MLVFDSGVGGLSVYDEIRHLLPDLHYIYAFDNVAFPYGEKSEDFIVERVVEIVTAVQKRYPLALAVIACNTASTVSLPALREKFQFPVVGVVPAIKPAARLTANGIVGLLATRGTVKRPYTRELIDRFANECQIAMLGSAELVEMAEAKLHGKAVSLDELRRILRPWLRMPEPPDTVVLGCTHFPLLQEELLEVLPEGTRLVDSGAAIARRTAWLLEHEAPDAKSTDANIAFCMAITKETEQLLPVLRRYGFETLEKLAL

SEQ ID NO: 55662 - protein, 131 aa, Enterobacter cloacae
MNSGENMRDIQMVLERWGGWAASDSSGVDYSSIAAGFRGLLPPTSKSRLSCTDDDALIIEGCLARLQKRKPYEHSLLVAYYLFGISKRKIAKARKKDEKLIRIEIQMAEGFIEGCLSMLDVSLEMDVEVKS

SEQ ID NO: 55663 - protein, 1050 aa, Enterobacter cloacae
  MISC_FEATURE (565)..(565): X=any amino acid
LVAAQPGIWMAEQLSSLPNAWSVAHYTELKGDIDAPLLAKAIAEGMMQADTLRMRFAEDNGEVWQWVDDTLILPEPSIVRVADHAAAVALMEADLNQNLRVDSGQPLAFHQLIQVGESHWYWYQRYHHLVVDGFSFPAITRQIAAIYAAWKKDEPTPDSPFTPFAEVVEEYQRYRGSEAYQRDGAFWAEQRRQLPSPVSLSSAPLPGRAATTDILRLKIAADGRAFSQLAQAAGQAQRTDLALALVALWLGRLTGRLDYAAGFIFMRRMGSAALTATGPVLNVLPLAVDIDPQESLPSLALRLANQLKKMRRHQRYDAEQIVRDSGKAAGDEALFGPVLNVKVFDYQLDIDGVEAITHTLATGPVNDLELALFPDEQGGLSMEILANKQRYDEATLTRHVARLNAMLMQFAANPDLRCGEVETVSEQEYQMLARINYTGAALPATTLADLVAEQASKTPDAPALADAHIELSYREMREQVVALANLLRERGVKPGDSVAVALPRSVFLTLALHGIVEAGAAWLPLDTGYPDDRLRMMLEDAKPSLLITTDEQLPRFSDLPISAFXLQHPFTGCGCKTVRLAKPEQTAYIIFTSGSTGRPKGVMVGHTAIVNRLKWMQDHYPLDATDVVAQKTPCSFDVSVWEFWWPFIAGAKLVMAEPDAHRDPQAMQSFFTRHGVTTTHFVPSMLAAFVASLTPENVACCKTLKQVFCSGEALPTELCREWEQLTHAPLHNLYGPTEAAVDVSWYPAYGPELAAVEGNSVPIGFPVWNTGLRILDAMMRPVPFGVAGDLYLTGIQLAQGYLGRPDLTASRFIADPFAPGERMYRTGDVARWLDNGAVEYLGRSDDQLKIRGQRIELGEIDRAMLSLPDVAQAVAHACVFNQAAGHRRGCPPAGGIRRLRIRLTAGPRRLLASLKAQLPPHMVPVVLLQISALPLSANGKLDRKVLPLPELTSKTSGRVPESESEIAVAQAFSALLGCEVNDIETDFFALGGHSLLAMRLAAQLSRAFERKVTPGQIMVASSVSKLSALLDSQMSDEQAQRLGYETLLPL

SEQ ID NO: 55664 - protein, 460 aa, Enterobacter cloacae
MMAFLLILLPLLILAWQAWQSLNALSAQAALTNRTTLIDARRSEAMTNAALEMERSYRQYCVLDDRTLEKVYQSQRKRYSEMLDAHAGVLPDDKLYQALRQDLNDLAQLQCSNSGPDAAAAARLEAFASANTEMVQSTRAVIFSRGQQLQQEIAERGQFFGWQALVLFLVSLGLVLLFTRMIIGPVKGIQRMINRLGEGKSLGDTVAFKGPRELRSVGQRIIWLSERLAWLESQRHQFLRHISHELKTPLASMREGTELLADEVAGPLTPEQKEIVEILDNSSRNLQKLIEQLLDYNRKLADGAVVLENVEIEPLVDMVISAHSLPARAKMMHTGVELNAPACLAEPMLLMSVLDNLYSNAVHYGTESGNIYIRSNTNGSRVFIDVANTGTPIPDDEKTMIFEPFFQGSHQRKGAVKGSGLGLSIARDCIRRMQGELNIAADERSDVCFRIELPVSRKNQ

SEQ ID NO: 55665 - protein, 427 aa, Enterobacter cloacae
MNKHSENDVVEPSRRRLLKGVGALGGALALAGGCPVAHAAKPQSAPGTLSPNARMETQPFYGEHQSGILTPQQASMMLVAFDSLASDKADLERLFRLLTTRIAFLTAGGPAPDTPNPRLPPMDSGILGPFIAPDNLTITVSLGESLFDARYGLAKQKPKALQKMTRFPNDSLDAALCHGDLLLQICANTQDTVIHALRDIIKHTPDLLSVRWKREGFISDHAARSKGKETPVNLLGFKDGTANPDSSDAALMKDVVWVTADQGEPAWAVGGSYQAVRIIQFHVEFWDRTPLKEQQTIFGRDKQSGAPLGMKNEHDVPDYASDPNGDTIALDSHIRLANPRTKETQSSLMMRRGYSYSLGVTNAGQLDMGLLFVCYQHDLEKGFLTVQKRLNGEALEEYIKPIGGGYFFALPGVRDRNAYLAQGLIET

SEQ ID NO: 55666 - protein, 501 aa, Enterobacter cloacae
MNELVGAINGVIWSPALIFLCLGVGLYFWLRSRFLQLRHIKHMITLMFQGRPTDAGVSSFQALTMTLAGRVGTGNIAGVATAITFGGPGALFWMWIVAFLGASSAFVESTLGQVYKEKINGEYRGGPAFYIEKGLGVKWYAWLFAIVTIFSCGLLLPGVQANSIGASLDIAFGLSPNVTAALLAVLLSFIIFGGVKRIASFSSMVVPFMALGYIIVACVIIAININQLPSVILLIWKSAFGLEAGFGAILGQAIMWGVKRGVYSNEAAQGTGPHASSAAAVSHPVKQGLVQAFSVYIDTLFVCSATGFMLLITGLYNVQGVDGAALYTGIAGVAAGPGYVQTAMESMMPGFGNYFVAIALFFFAFTTIIAYYYIAETNIAFINRKIHRPWLTFLLKLCLMASTVYGTVRTADLAWGLGDIGVGLMAWLNIIAIVLLHKKAFASLKDYEIQNAQGLDPQFDPVRLGIKNADYWLDGRKDEDGVQPEQVSSLERKQPAAKLNS

SEQ ID NO: 55667 - protein, 273 aa, Enterobacter cloacae
MVGLIRSVSEGLGPVGGAAMIYTLSGLLCLVTVGFPDIRRFSPRYLIAGSVLFVSYEICLALSLGYAATRSQAIEVGMVNYLWPSLTIVFAILFNGQKSTLLVIPGLAVSLLGVCWVLGGEQGLHLDEITRNIVSSPLSYALAFAGAFIWAAYCTVTSKFAKGQNGITLFVLLTALSLWVKYFLSDQPEMVFTLQVIVKLVMCGIALGFGYAAWNIGILHGNVTVLAAVSYFTPVLSAALAAAVLSSPLSFSFWQGALMVCAGSLLCWYATRQ

SEQ ID NO: 55668 - protein, 318 aa, Enterobacter cloacae
MKELMVVAIGGNSIIKDNASQSIEHQAQAVKAVAESVLEMLASDYDIVLTHGNGPQVGLDLRRAEIAHEREGLPLTPLANCVADTQGGIGYLIQQALNNRLAARGEQKAVTVVTQVEVDKNDPGFTHPTKPIGAFFTEAQRDELQRAHPDWHFVEDSGRGYRRVVASPQPLRIVEADAIKALTQKGFVVIGAGGGGIPVIRSEQGDYQSVDAVIDKDLSTALLAREIGADVLVITTGVEKVCINFGKPNQQALDTVSVAQMTRYREEGHFPAGSMLPKIVASLEFLHHGGRRVIITSPDCLPAALRGETGTHIVNEGR

SEQ ID NO: 55669 - protein, 205 aa, Enterobacter cloacae
MAGIDTLYLVDKNMPNLVLASTSPYRRTLLEKLGIPFECAAPEVDETPQPGESPRHLVMRLAKEKAQSLTARYPAHLIIGSDQVCVLDGEITGKPHTEENACQQLLRARGTIVTFYTGLALYNSATGHLQTECEPFDVHFRHLSEQEIVDYVRRERPLNCAGSFKSEGLGIALFDKLDGRDPNTLVGLPLIALCQMLRREECNPL

SEQ ID NO: 55670 - protein, 365 aa, Enterobacter cloacae
VAMLLCASLSGVTTMSYAETTNPNAPVSMVSTWDKTFAESDKVDHRKVSFQNRYGITLVGDLYLPKNRGDRKLAAIAVSGPFGAVKEQSSGLYAQTLAENGFVTLAFDPSYTGESGGQPRNVASPDINTEDFSAAVDFLGLQKEVDRNRIGILGICGWGGMALNAASMDTRVKAVATSVMYDMSRAMGHGWGDGKDRYSTSDRRAVLQYLNAQRWKDAENGTFAHSGHDIYVDENGKVTAAERILPETLPDNPNPVLKEFFDYYRMPRGFHARSVNSTGAWTATTPLSFMNMPLLSYAGEITIPTLIVTGEKAHSRYFAEDAFKAVGSKQKELVIVPGANHVDLYDNAAGKIPFGQFEQFFKTNL

SEQ ID NO: 55671 - protein, 334 aa, Enterobacter cloacae
MSTQQATTQQPLLQAIDLKKYYPVKKGLFAPERLVKALDGVSFNLERGKTLAVVGESGCGKSTLGRLLTMIEVPTGGELYYQGQDLLKHDPQAQKLRRQKIQIVFQNPYGSLNPRKKVGQILEEPLLINSNLSKEQRREKALAMMAKVGLKTEHYDRYPHMFSGGQRQRIAIARGLMLDPDVVIADEPVSALDVSVRAQVLNLMMDLQQELGLSYVFISHDLSVVEHIADEVMVMYLGRCVEKGTKDQIFNNPRHPYTQALLSATPRLNPDDRRERIKLTGELPSPLNPPPGCAFNARCSRRFGPCTQLQPQLKDYGGQLVACFAVDQDENGEK

SEQ ID NO: 55672 - protein, 314 aa, Enterobacter cloacae
MLQFILRRLGLVIPTFIGITLLTFAFVHMIPGDPVMIMAGERGISPERHAQLLAELGLDKPMWQQYLHYIWGVLHGDLGISLKSRLPVWDEFVPRFKATLELGICAMIFATAVGIPVGVLAAVKRGSIFDHTAVGLALTGYSMPIFWWGMMLIMLVSVQLNLTPVSGRVSDMVFLDDSNPLTGFMLIDTAIWGEEGNFIDAVAHMILPAMVLGTIPLAVIVRMTRSSMLEVLGEDYIRTARAKGLTRMRVIIVHALRNAMLPVVTVIGLQVGTLLAGAILTETIFSWPGLGRWLIDALQRRDYPVVQGGVCWSR

SEQ ID NO: 55673 - protein, 264 aa, Enterobacter cloacae
MNQPVSQNRRWVLASRPQGAPVAENFRLETQPVPAPAEGQLLLRTVWLSLDPYMRGRMSDAPSYSPPVELGAVMVGGTVSRVEQSNHPDFKAGEWVLGYSGWQEYELSDGSGLVKLGENPSHPSWALGILGMPGFTAYMGLLDIGQPKAGETLVVAAATGPVGATVGQIGKIKGCRVVGVAGGAEKCRHAVEVLGFDLCLDHHAADFAEQLKRACPNGIDIYYENVGGKVFDAVLPLLNTSARVPVCGLVSGYNATGLPEGQPG

SEQ ID NO: 55674 - protein, 424 aa, Enterobacter cloacae
MASSNLIKQLQERGLVAQVTDEEALAERLAQGPIALYCGFDPTADSLHLGHLVPLLCLKRFQMAGHKPVALVGGATGLIGDPSFKAAERKLNTEDTVQEWVDKIRKQVAPFLDFNCGDNSAIAANNYDWFGSMNVLTFLRDIGKHFSVNQMINKEAVKQRLNRDDQGISFTEFSYNLLQGYDFACLNKLHGVSLQIGGSDQWGNITSGIDLTRRLHQNQVFGLTVPLITKADGTKFGKTEGGAVWLDPKKTSPYKFYQFWINTADADVYRFLKFFTFMDIAEINALEEEDKNSGKAPRAQYVLADEVTKLVHGEEGLAAAKRITASLFNGTLSDLSEADFEQLAQDGVPMVEMEKGADLMQALVDSELQPSRGQARKTIASNAITINGEKQADPEYTFVDGDRLYGRYTLLRRGKKNYCLVCWK

SEQ ID NO: 55675 - protein, 163 aa, Enterobacter cloacae
MFEPMELTNDAVIKVIGVGGGGGNAVEHMVRERIEGVEFFAVNTDAQALRKTAVGQTIQIGGGITKGLGAGANPEVGRNAAEEDRATLRAALEGADMVFIAAGMGGGTGTGAAPVVAEVAKDLGILTVAVVTKPFNFEGKKRMAFAEQGITELSKHVDSRGIH

SEQ ID NO: 55676 - protein, 418 aa, Enterobacter cloacae
MIKATDRKLVVGLEIGTAKVAALVGEVLPDGMVNIIGVGSCPSRGMDKGGVNDLESVVKCVQRAIDQAELMADCQISSVYLALSGKHISCQNEIGMVPISEEEVTQEDVENVVHTAKSVRVRDEHRVLHVIPQEYAIDYQEGIKNPVGLSGVRMQAKVHLITCHNDMAKNIVKAVERCGLKVDQLIFAGLAASYSVLTEDERELGVCVVDIGGGTMDIAVYTGGALRHTKVIPYAGNVVTSDIGYAFGTPPSDAEAIKVRHGCALGSIVGKDESVEVPSVGGRPPRSLQRQTLAEVIEPRYTELLNLVNEEILQLQEQLRQQGVKHHLAAGIVLTGGAAQIEGLAACAQRVFHTQVRIGAPLNITGLTDYAQEPYYSTAVGLLHYGKESHLSGEAEVEKRVSVGSWVKRLNNWLRKEF

SEQ ID NO: 55677 - protein, 280 aa, Enterobacter cloacae
MSQAALNTRNRDDEDEYASSRRSNGTRLAGIIFLLGVLCTVFISGWMVLGWMEDAQRLPLSKLVVTGERHYTRNDDIRQSILALGSPGTFMTQDVNIIQSQIERLPWIKQASVRKQWPDELKIHLVEYVPIARWNDQHMVDADGNSFSVPADRVNKQNLPMLYGPEGSENEVLQGFREMGQVLAKDRFTLKDAAMTARRSWQLTLTNGIKLNLGRGDRMKRLARFVELYPVLQQQAQTDGKRISYVDLRYDSGAAVGWVPAPVEEPNQQQNQAQVQAEQQ

SEQ ID NO: 55678 - protein, 491 aa, Enterobacter cloacae
MNTQQLAKLRSIVPEMRRVRHIHFVGIGGAGMGGIAEVLANEGYQISGSDLAPNPVTQQLASLGATIYFNHRPENVRDASVVVVSSAISSDNPEIVAAHEARIPVIRRAEMLAELMRFRHGIAIAGTHGKTTTTAMVSSIYAEAGLDPTFVNGGLVKAAGVHARLGHSRYLIAEADESDASFLHLQPMVAIVTNIEADHMDTYQGDFENLKQTFINFLHNLPFYGRAVMCVDDPVIRELLPRVGRQITTYGFSEDADVRVEEYKQIGAQGHFTLARQDKELLHVTLNAPGRHNALNAAAAVAVATEEGIDDDAILRALESFQGTGRRFDFLGEFPLDAVNGKAGTAMLVDDYGHHPTEVDATIKAARAGWPDKNLVMIFQPHRFTRTRDLYDDFASVLSQVDTLLMLDVYAAGEASIPGADSRSLCRTIRGRGKVDPILVSDPAQVAEILAPVLTGNDLILIQGAGNIGKIARTLAEIKLKPQTQEDEHHG

SEQ ID NO: 55679 - protein, 364 aa, Enterobacter cloacae
MGFKCGIVGLPNVGKSTLFNALTKAGIEAANFPFCTIEPNTGVVPMPDPRLDQLAEIVKPQRILPTTMEFVDIAGLVKGASKGEGLGNQFLTNIRETEAIGHVVRCFENDNIIHVNNKVDPADDIDVINTELALSDLDTCERAIHRVQKKAKGGDKDAISELAALEKCLPQLENAGMLRALKNLTEEDKAAIKYLSFLTLKPTMYIANVNEDGFENNPYLDKVREIAAAEGSVVVAVCAAVESDIAELDDADREEFMAELGLEEPGLNRVIRAGYELLNLQTYFTAGVKEVRAWTIPVGATAPQAAGKIHTDFEKGFIRAQTIAFEDFITYKGEQGAKEAGKMRAEGKDYIVKDGDVMNFLFNV

SEQ ID NO: 55680 - protein, 104 aa, Enterobacter cloacae
QVGELAKRAGITVRTLHHYEQTGLLLPSARSAAGYRLYNLADVQRLHMIQALAKAGLELAEIRDFLEQESLSLTELLDAQITLLDKQLRSIHTLRDRLVELRTG

SEQ ID NO: 55681 - protein, 109 aa, Enterobacter cloacae
MAAVMFQSILVVCTGNICRSPIGERLLRQQLPGKQVTSAGIFGLEGRPADAAAQAVAWRHGVSLEGHVARKVTRSLLQQSDLILVMEPTNLRFIAAMTPENRGKSLLFG

SEQ ID NO: 55682 - protein, 677 aa, Enterobacter cloacae
MTQVAKKILVTCALPYANGSIHLGHMLEHIQADVWVRYQRMRGHEVNFICADDAHGTPIMLKAQQLGISPEQMIAEMSQEHQTDFAGFDISYDNYHSTHSDENRELSELIYTRLKENGFIKNRTISQLYDPEKGMFLPDRFVKGTCPKCKSPDQYGDNCEVCGATYSPTELIEPKSVVSGATPVMRDSEHFFFDLPSFSEMLQAWTRSGALQEQVANKMQEWFESGLQQWDISRDAPYFGFEIPNAPGKYFYVWLDAPIGYMGSFKNLCDKRGDTVSFDEYWKKDSTAELYHFIGKDIVYFHSLFWPAMLEGSNFRKPTNLFVHGYVTVNGAKMSKSRGTFIKASTWLNHFDADSLRYYYTAKLSSRIDDIDLNLEDFVQRVNADIVNKVVNLASRNAGFIAKRFDGVMAAELADPDLYKTFTDAAATIGDAWETREFGKAVREIMALADLANRYVDEQAPWVVAKQEGRDADLQAICSMGINLFRVLMTYLKPVLPQLAARAEAFLNTELAWDAMAQPLLGHKVNTFKALYNRIEMKQVEALVEASKEEVKAASAPVTGPLADDPIQETITFDDFAKVDLRVALIENAEFVEGSDKLLRLTLDLGGEKRNVFSGIRSAYPDPQVLIGRQTVMVANLAPRKMRFGISEGMVMAAGPGGKDIFLLSPDEGAKPGQQVK

SEQ ID NO: 55683 - protein, 110 aa, Enterobacter cloacae
MAKRKLLLLGVLLSLAGSAFAAPQTAAASSGIKAYEEQEFIADFTKFKIGDTAPAQYQTPEYTIKQYQLRNLPAPDAGTHWTYMGENYVLIGDADGKIYKAYNGDIFYHR

SEQ ID NO: 55684 - protein, 358 aa, Enterobacter cloacae
MFKRRYAALLPALILLSACSSKPKTEAVQQTAGAPSGGFLLEPQHNMMQMGGDFANNPAAEQFIDKMVSKHGFDRQQLHEILSQARRLDYVLRLMDRQAPTAQVPSGPNGAWLRYRKQFITPDNVQNGVVFWNQYEDALNRAWQVYGVPPEIIVGIIGVETRWGRVMGKTRILDALATLSFNYPRRAEYFSSELETFLLMARSEQDDPLDLKGSFAGAMGYGQFMPSSYKQYAVDFNGDGHINLWDPVDAIGSVANYFKAHGWVPGGQVAVQANGQAPGLENGFKTNYSISQLAAAGLTPTQPLGNAQQASLLRLDVGTGYQYWYGLPNFYVITRYNHSTHYAMAVWQLGLAVSQARV

SEQ ID NO: 55685 - protein, 510 aa, Enterobacter cloacae
MATIDSLNKDNTRLSDGPDWTFELLDVYLAEIDRVAKLYRLDTYPHQIEVITSEQMMDAYSSVGMPINYPHWSFGKKFIETERLYKHGQQGLAYEIVINSNPCIAYLMEENTITMQALVMAHACYGHNSFFKNNYLFRSWTDASSIVDYLIFARKYITDCEERYGVDEVEKLLDSCHALMNYGVDRYKRPQKISLQEEKARQKSREEYLQSQVNMLWRTLPKREEEKTIAEARRYPSEPQENLLYFMEKNAPLLEPWQREILRIVRKVSQYFYPQKQTQVMNEGWATFWHYTILNHLYDEGKVTERFMMEFLHSHTNVVFQPPYNSPWYSGINPYALGFAMFQDIKRICQSPTEEDKYWFPDIAGSDWLETLHFAMRDFKDESFISQFMSPKIMRDFRFFTVLDDDRNNYLEISAIHNEEGYREIRSRLSSQYNLSNLEPNIQVWNVDLRGDRSLTLRYIPHNRAPLDKGRKEVLKHVHRLWGFDVQLEQQNEDGSVELLERCPARLNTL

SEQ ID NO: 55686 - protein, 292 aa, Enterobacter cloacae
MDLTQLEMFNAVALTGSITQAAQKVHRVPSNLTTRIRQLEADLGVELFIRENQRLRLSPAGHNFLRYSRQILALVDEARMVVAGDEPQGLFALGALESTAAVRIPETLAQFNQRYPRIQFALSTGPSGTMIDGVLEGTLSAAFVDGPLSHPELEGMPVYREEMMLVTPAGQTEISRAAQVSGSDVYAFRANCSYRRHLESWFHADRAAPGRIHEMESYHGMLACVIAGAGIALMPRSMLESMPGHHQVEAWPLAENWRWLTTWLVWRRGAMTRQLEAFIALLNERLQPAPSP

SEQ ID NO: 55687 - protein, 220 aa, Enterobacter cloacae
MAFRDQPLGELALSIPRASALFRKYDMDYCCGGKQTLARAASRKELDVEVIESELALLAQQPVDKDWRTAPLAEIIDHIIVRYHDRHREQLPELILQATKVERVHADKPSVPRGLAKYLTLLHEELSSHMMKEEQILFPMIKQGMGSQAMGPISVMESEHDDAGELLEVIKHTTRNVTPPPEACTTWKAMYNGINELIDDLMEHISLENNVLFPRALAGE

SEQ ID NO: 55688 - protein, 338 aa, Enterobacter cloacae
MNHYTRWLELKEANPGKYARDVAGLMNISEAELTFARVGHDAWRLRGEIREILGALEAVGETKCICRNEYAVHEQVGRFTNQHLNSHAGLVLNPRALDLRLFLNQWASAFHISEATARGERQSIQFFDHQGDALLKVYATDNTDVSAWGDVLTRFIFAENPPLALKMADAPTHAENANAALVDNEWRAMTDVHQFFSLLKRHNLSRQQAFRLVGDDLACRVENTALAQLLETARRDGNEIMVFVGNRGCVQIFTGAVEKLVPMKGWLNVFNPTFTLHLLEGSIAETWVTRKPTADGHVTSLELFAADGTQIAQLYGQRTEGEPEQSQWRSQIDALTGE

SEQ ID NO: 55689 - protein, 241 aa, Enterobacter cloacae
MKVIIVEDEFLAQQELTWLIKTHSQMEIVGTFDDGLDVLKFLQHNRVDAIFLDINIPSLDGVLLAQNINQFAHKPFIVFVTAWKEHAVEAFELEAFDYILKPYQESRIVSMLQKLEAAWQQQTAPASPTVRENDTINLVKDERIIVTPVNDIYYAEAHEKMTFVYTRRESYVMAMNITEFCSKLPAAHFFRCHRSFCVNLNKIREIEPWFNNTYILRLKDLDFQVPVSRSKVKEFRQLMHL

SEQ ID NO: 55690 - protein, 562 aa, Enterobacter cloacae
MLLAVFDRAALMLICLFFLIRIRLFRELLHKSAHSPKELLAVTAIFSLFALFSTWSGVPVEGSLVNVRIIAVMSGGILFGPWVGVITGLIAGTHRYLIDIGGVTAVPCFITSIIAGVLSGWISRKIPKKQRWRAGIVAGMVCETLTMILVVVWAPTTELGLDIVSKIGIPMILGSVCIGFIVLLVQSVEGEKEASAARQAKLALDIANKTLPLFRHVNAESLRQVCEIIRHDIHADAVAITNIDHVLAYVGVGEHNYRDNDDTISPTTRQAINYGKIIIKNNDEAHRTPEIHSMLVIPLWEKGVVTGTLKIYYCHAHQITSTLQEMAIGLSQIISTQLEVSRAEQLREMANKAELRALQSKINPHFLFNALNAISSSIRLNPDTARQLIFNLSRYLRYNIELKDDEQIDIKKELYQIKDYIAIEQARFGDKLTVIYDIDEEVNCVIPSLLIQPLVENAIVHGIQPCKGKGVVTISVTESGNRVRIAVRDTGHGIDPKVIERVESNEMPGNKIGLLNVHHRVKLLYGDGLHIQRLEPGTEIAFYVPNERSRAHTTTSLLPQVE

SEQ ID NO: 55691 - protein, 289 aa, Enterobacter cloacae
ALFPRVTGVVLVALFSPVMLGGLFFSAKSLQPKFPKLNPLPGIAKMFSEQTGAELLKAVLKSVLMGSSAGFYLWYHWPEMMRLISESPLTAMSNALNLVGLCALLVVLSIIPMVGFDVIFQLYTHFKKLRMSRQDIRDEYKQMEGDPHVKGRIRQMQRAAARRRMMDDVPKADVIVTNPTHYSVALRYDENKMSAPKVVAKGAGLIALRIREIGTEHRVPILEAPPLARALYRHADIGQQIPGQLYAAVAEVLAWVWQLKRWRLAGGQRPVKPENLPVPAALDFMNEKD

SEQ ID NO: 55692 - protein, 701 aa, Enterobacter cloacae
PGMSLRGDIGAGVLYVSVPQAYLEYVAENWDPPSRWDEGVPGVLLDYNVNGQINHAYGSDDGGDSRTLSGNGTAGANLGAWRFRADWQGQQQSGDGSDSVRSFDWNRYYMYRAIPSLRAKLTMGEDYLTSDMFDSFRFTGASLISSDNMLPPNLRGYAPEVTGVAKTNAKVTVSQQGRVISETTVAAGPFRIQDLNNAVSGTLDVKVKEQDGTEQTYQINTSNVPYLTRPGMVRYKIATGKPSDYDHHSNGPVFGTGEFSWGINNGWSLYGGLLGAGDYNALSLGIGRDLLALGAISFDVTESSARLPDQGNQQGGSYRVSYSKRFDETNSQVTFAGYRFSEREFMTMTEYLDARYKSYEDAGNNKEMYTISFNQQLTSLNTSLYVNYSRQTYWDNDASTTWNTSISRYFDLGRFKNLSVNLSAFRTENADYKDDGVYASVSIPWGETASFGYDSQYGHGGSSHNVSYDDRIDNNNTYHLSAGTDQNGRGGGSGYFTHEGDIAEMTATAAYQSSDYSSAGIALRGGMTATQSGAALHRISVPGGTRMMLDTDGVGGVPVYGNAAITHTNMFGKAVLADVSSYYRNSMNIDMNSLSDDVDATRSVVQGTLTEGAIGYRKFGVIAGKKALVVVRLSDGSVPPFGATVSNKDKEQTGLVSDDGSVWLTGMKSGEVMAVSWDGAEQCQIRLPSPLPLNMDTQHML

SEQ ID NO: 55693 - protein, 235 aa, Enterobacter cloacae
ALTITALLMTSQAAHAALALDRTRAILDGGEKSLSMSVTNQNRELPFLAQAWVEDGQGKKLTDPLVALPPVQRIEPGSKTQVKVQASASMNTLPQDRESLFYFNLREIPPKSSKPNTLQLALQTRIKLFYRPAPLAVNPNDKPWQEKVTLTREGGKFVANNPTPYFVSIIDAAATEKGNAQKGFKPVMIAPKSSAPLSVDAGALGNSPVLTYINDYGGRPKLIFACAGNTCSVKE

SEQ ID NO: 55694 - protein, 343 aa, Enterobacter cloacae
KKMLAAAALVLGIGAAHADDSKTLYFYNWTEYVPPGLLEQFTKETGIKVIYSTYESNETMYAKLKTYKDGAYDLVVPSTYFVDKMRKEGMIQKIDKTKLTNFANLDPEMLNKPFDPNNDYSIPYIWGATAIGVNSEAVDPKTVTSWADLWKPEYKGSLLLTDDAREVFQVALRKLGYSGNTTDPKEIEAAYNELKKLMPNVAAFNSDNPANPYMEGEVNLGMVWNGSAYVARQAGTPLEVVWPKEGGIFWMDSLAIPANAKNAEGAHKLINFLLRPDVAKQVAETIGYPTPNLAARKLLKPEVANDKSLYPDAETISKGEWQNDVGDASLLYEEYYQKLKAGR

SEQ ID NO: 55695 - protein, 187 aa, Enterobacter cloacae
MSLINTKIKPFKNQAFKNGEFIEVTEKDTEGRWSVFFFYPADFTFVCPTELGDVADHYDELQKLGVDVYSVSTDTHFTHKAWHSSSETIAKIKYAMIGDPTGALTRNFDNMREDEGLADRATFVVDPQGIIQAIEVTAEGIGRDASDLLRKVKAAQYVASHPGEVCPAKWKEGEATLAPSLDLVGKI

SEQ ID NO: 55696 - protein, 351 aa, Enterobacter cloacae
ALMIIACLWIVQPVILGFAWAATVVVATWPLLLRLQKLLFGRRGLAVLVMTLLLFLLFIIPIALLVNSLVDSSGPVIRAISSGDLTLPDLAWLNSIPVVGSKLYSGWHSLLEMGGSALMAKVRPYIGTTTTWFVGQAAHIGRFMMHCTLMLLFSALLYWRGEQVALGVRHFATRLAGKRGDAAVLLAAQAVRAVALGVVVTALVQAVLGGIGLAISGVPYATVFTVVMLMTCLAQLGPLLVLVPSIIWLYWTGDTTWGTVLLVWSCVVGTMDNVIRPILIRMGADLPLILILSGVIGGLIAFGMIGLFIGPVLLAVTWRLFSAWVHEIPPPGTDPDVILSELEELEEKNTH

SEQ ID NO: 55697 - protein, 57 aa, Enterobacter cloacae
  MISC_FEATURE (11)..(11): X=any amino acid
MTSSHHGPYEXGYTRATMAHTKRSDLARASGPHKVRRSPDWSLQLDSMKSESLVIVD

SEQ ID NO: 55698 - protein, 213 aa, Enterobacter cloacae
SPEFGEGMAYGFGADATSEQSVMALARGVDEIFGRTDLLVYSAGIAKAAFISDFELGDFDRSLQVNLVGYFLCAREFSRLMIRDGIQGRIIQINSKSGKVGSKHNSGYSAAKFGGVGLTQSLALDLAEYGITVHSLMLGNLLKSPMFQSLLPQYATKLGIKAEEVEQYYIDKVPLKRGCDYQDVLNMLLFYASPKASYCTGQSINVTGGQVMF

SEQ ID NO: 55699 - protein, 119 aa, Enterobacter cloacae
MVTALITVAALAWICQMAFGGWQIHQFNRAFDALCQKGRVGVGRSGGRFKPRVVVAVALDENNHVCDSLIMRGMTVFARPAKIQAINGISLQELRPDVIFPHDPLCQNALSLALNLKHG

SEQ ID NO: 55700 - protein, 439 aa, Enterobacter cloacae
MTHHLKSRDIIALGFMTFALFVGAGNIIFPPMVGLQAGEHVWTAAFGFLITAVGLPVLTVVALAKVGGGVDSLSTPIGKVAGVLLATVCYLAVGPLFATPRTATVSFEVGIAPLTGDGAMPLFIYSLIYFAIVILVSLYPGKLLDTVGNFLAPLKIVALIVLAVAAIVWPAGPISDAMDAYKNAAFSNGFVNGYLTMDTLGAMVFGIVIVNAARSRGVTEARLLTRYTIWAGLMAGVGLTLLYLALFRLGSDSAMLVEQNANGAAILHAYVQHTFGGAGSMLLAALIFLACLVTAVGLTCACAEFFAQYLPLSYRTLVFILGIFSMAVSNLGLSHLIQVSIPVLTAIYPPCIVLVVLSFTRPWWNNSSRIIAPAMFISLIFGILDGIKASAFAHILPAWTQRLPLSEQGLAWLMPTVVALVLAIIWDRAAGRQVASNAH

SEQ ID NO: 55701 - protein, 435 aa, Enterobacter cloacae
  MISC_FEATURE (432)..(432): X=any amino acid
VLERLSWKRLVFELILCCIPAFLLGAFLGHLPWFLLASVTGLLIWHFWNLLRLSWWLWVDRSMTPPPESGSWEPLLYGLHQMQMRNKKRRRELGALIKRFRSGAESLPDAVILTTEEGTIFWCNGLAQQLLGLRWPDDNGQNILNLLRYPEFTLYLKKRDFTRPHNLKLNNGRHLEIRVMPYSDKQWLMVARDVTQMHQLEGARRNFFANVSHELRTPLTVLQGYLEMMQEQTLEGAPREKALHTMREQTHRMEGLVKQLLTLSKIEAAPSLALNDTIDVPMMLRVVEREAQTLSHKKHHLTFEVDNTLKVLGSEDELRSAISNLVYNAVNHTPEGTNIVVRWHHVPTGAEFSVEDNGPGIAPEHIPRLTERFYRVDKARSRQTGGSGLGLAIVKHAVNHHESRLDIQSTLGKGTCFSFVIPERLIAKKIAXRQA

SEQ ID NO: 55702 - protein, 406 aa, Enterobacter cloacae
LFCHGSAMRILHTSDWHLGQNFYSKSRAAEHEAFLNWLLETARTHEVDAIIVAGDIFDTGSPPSYARELYNRFVVNLQQTGCHLVIVAGNHDSVATLNESRDILAFLNTTVVASAGHAPQILKKRDGTPGAVLCPIPFLRPRDIMQSQAGLSGAEKQQHLLQAITDYYHQQHADACALAGDQPIPVIATGHLTTVGASKSDAVRDIYIGTLDAFPAQNFPPADYIALGHIHRAQIVGGSEHIRYCSSPISLSFDETGKAKSVHLVSFSKGKLHAVETLEVPVTQPLAVLKGDLDAITAQLEQWGGTALNPPVWLDIEITTDDYLHDMQRKIQALTEDLPVEVLLVRRSREQREKILLSAQRETLSELRVEEVFERRLSQEEIDDAKRARLSELFSHTLHALNDEEE

SEQ ID NO: 55703 - protein, 423 aa, Enterobacter cloacae
MKGTVFAVALNHQSQHEAWREAFEKAPYNTPPKTAVWFIKPHNTVIRAGEPIPFPHGETVLSGATVALVVGKTASKVRAEDAAEYIAGYALANEVSLPEESFYRPAIKAKCRDGFCPLGELVAVNNVDNLTIITEINGREDHWCTADLQRNAAELLSALSEFATLNPGDAILLGTPQSRVEIRPGDRVRVLAEGFPPLENPVVDERSVTIAHSTPPQATLFALGSNYADHASELDFKPPTEPLVFIKAPNTFNGDGQTSVRPNNIEYMHYEAELVVVIGKTARKVSEAEAMDYVAGYTVCNDYAIRDYLENYYRPNLRVKSRDGLTPISPHIVPKAAIPDPHNLALRTFVNGELRQEGTTADLIFSIPYLIAILSDFMTLQPGDMIATGTPKGLSDVVPCDEVVLKWDGLDRLVTVLVSEETS

SEQ ID NO: 55704 - protein, 283 aa, Enterobacter cloacae
MGKLALAPKITHVPSMYLSELPGKNHGCRQSAIDGHKEISKRCRELGVDTIIVFDTHWLVNSAYHINCADHFAGVYTSNELPHFIRDMTYDYDGNPELGQLIADEAVKLGVRAKAHNIPSLKLEYGTLVPMRYMNADKHFKVVSISAFCTVHDFADSRRLGEAIVSAIEKYDGTVAVLASGSLSHRFIDDQRAEEGMNSYTREFDRQMDERVVKLWREGQFKEFCSMLPEYADYCYGEGNMHDTVMLLGMLGWDQYDGKVEFLTELFASSGTGQVNAVFPLPA

SEQ ID NO: 55705 - protein, 126 aa, Enterobacter cloacae
MPHFIAECTDNIREQADLPGLFAKVNEALAATGIFPIGGIRSRAHWLDTWQIADGRHDYAFVHMTLKIGAGRSLESREAVGEMLFALIKAHFAELMADRYLALSFELDELHPTLNYKQNNVHALFK

SEQ ID NO: 55706 - protein, 710 aa, Enterobacter cloacae
MIIVGAGLNHWYHLDMNYRGLINMLIFCGCVGQSGGGWAHYVGQEKLRPQTGWQPLAFALDWQRPARHMNSTSYFYNHSSQWRYETVTAQELLSPMADKSRYSGHLIDFNVRAERMGWLPSAPQLGTNPLRIAEAAKQAGMSPVDYTVKSLKDGSIRFAAEQPENGKNHPRNLFIWRSNLLGSSGKGHEYMLKYLLGTENGIQGKDLGKQGGVKPEEVEWKDNGLDGKLDLVVTLDFRLSSTCLYSDIVLPTATWYEKDDMNTSDMHPFIHPLSAAVDPAWESKSDWDIYKDIAKKFSEVCVGHLGKETDVVTLPIQHDSAAELAQPLEVKDWKKGECDLIPGVTAPHIIPVERDYPATYERFTSIGPLMEKIGNGGKGIAWNTQSEMDLLRKLNYTKADGPAKGQPMLNTAIDAAEMILTLAPETNGHVAVKAWAALSEFTGRDHTHLAKNKEEEKIRFRDIQAQPRKIISSPTWSGLEDEHVSYNAGYTNVHELIPWRTLSGRQSLYQDHQWMRDFGESLLVYRPPIDTRSVTAVMGAKSNGNPEKALNFLTPHQKWGIHSTYSDNLLMLTLSRGGPIVWMSETDAKDLGIEDNDWIEVFNSNGALTARAVVSQRVPAGMTMMYHAQERIVNLPGSEITEQRGGIHNSVTRITPKPTHMIGGYAQLAYGFNYYGTVGSNRDEFVVVRKMKNINWLDGEGNDQVQESVK

SEQ ID NO: 55707 - protein, 621 aa, Enterobacter cloacae
MFYQDPFDVIIIGGGHAGTEAAMAAARMGQQTLLLTHNIDTLGQMSCNPAIGGIGKGHLVKEVDALGGLMAKAIDHAGIQFRLLNASKGPAVRATRAQADRVLYRQAVRTALENQPNLMIFQQAVEDLIVENDRVVGAVTQMGLKFRAKAVVLTVGTFLDGKIHIGLDNYSGGRAGDPPSIPLSRRLRELPLRVSRLKTGTPPRIDARTIDFSVLAQQHGDNPMPVFSFMGNAAQHPQQVPCYITHTIEKTHDVIRNNLDRSPMYAGVIEGIGPRYCPSIEDKVMRFADRNQHQIFLEPEGLTSNEIYPNGISTSLPFDVQMQIVRSMQGMENAKIVRPGYAIEYDFFDPRDLKPTLESKFIHGLFFAGQINGTTGYEEAAAQGLLAGLNAARFSAEKEGWAPGRSQAYLGVLVDDLCTLGTKEPYRMFTSRAEYRLMLREDNADLRLTEMGRELGLVDDERWARFNEKLERIEQERQRLKTTWVNPQAETAAEVNAHLTAPLSREASGEDLLRRPEVTYENLVKLTAFAPGLEDAEAAEQVEIQVKYEGYIARQQDEIEKQQRNENTLLPEMLDYRQVTGLSNEVIAKLNDHKPVSIGQASRISGVTPAAISILLVWLKK

SEQ ID NO: 55708 - protein, 321 aa, Enterobacter cloacae
MKRPGINRSRKISTLSSLIPRHYRNGCRTCLYKMMENYKHKTVLLDEAVNGLNIRPDGIYIDGTFGRGGHSRLILSQLGEEGRLLAIDRDPQAIAVAQTINDPRFSIVHGPFSALAEYVAERGLTGKIDGILLDLGVSSPQLDDAERGFSFMRDGPLDMRMDPTRGQSAAEWLQTADEADIAWVIKTFGEERFGKRIARAIVERNRIEPMTRTKELAEVIAAATPVKDKHKHPATRTFQAVRIWVNSELEEIELALKSSLDVLAPGGRLSIISFHSLEDRIVKRYMREQSRVPQVPAGLPMTEEQLRKLGGRQLRALGKLM

SEQ ID NO: 55709 - protein, 120 aa, Enterobacter cloacae
MFRGATLVNLDSKGRLSVPTRYRDQLIENAAGQMVCTIDINSPCLLLYPLPEWEIIEQKLSRLSSMNPQERRVQRLLLGHASECQMDNAGRLLIAPVLRQHAGLTKEVMLVGQFNKFELW

SEQ ID NO: 55710 - protein, 163 aa, Enterobacter cloacae
MRRILSVLLENESGALSRVIGLFAQRGYNIESLTVAPTEDPTLSRMTIQTVGDAKVLEQIEKQLHKLVDVLRVSELGQGAYVEREVMLVKIQASGYGRDEVKRNADIFRGQIIDVTPSLYTVQLVGTSDKLDAFLASVRDVAKIVEVARSGVVGLSRGEKIMR

SEQ ID NO: 55711 - protein, 157 aa, Enterobacter cloacae
MKLVPMLSGVAIAVALSACAGKSAQVPVPAADPNGINTLSQQSIQQPNVSGTIWIKQKVALPPDAVLTVTLSDASLADAPSKVVAQRAVRTEGKQAPFSFVLPYNPSDVQPNARILLSAAVTINGKLVFITDTVQEAINNGGTKIDLNLVPVQQGDP

SEQ ID NO: 55712 - protein, 402 aa, Enterobacter cloacae
MSLRSLRALCLTSFFIADVRDGLGPFLGIFLTERHWTPDDIGILMTAGGLAGLLATLPAGFITDTSRSKRTVLALVCLLITLSTLLLWFSQQSGIVAVSQIVTGICAAFVGPLIAGITLGLTGQSGFSAQMGKNEAFNHGGNFVTALIAGGIAWYWGVGGIFLLMTCTTLLTLCALLAIRNGDIDNDAARGLSSSASLPVPGFAVLITNRALFVTGLTLLLFHLANAALLPMLSMRVAAAPASINPGLYAAGTVIISQAVMIPVAIWVANRIDRYGYWRLIMLALLVMPVRAALAASTDAPLMMIPVQILDGLAAGILGVAVPSFIVVLLRGSGHVNAGQSVVMLMQGVGASMSPALTGTIAGHYSFATAFSVLSAIALVAVLLWWCFAHRTWETDSTPGGA

SEQ ID NO: 55713 - protein, 144 aa, Enterobacter cloacae
MYNSILVPIDISEDSLTHMVIPFVQAHTALNTAKVHFLTVIPSLPYYSSLGLAYSVEMPKLKDFQHAALAKLDEIVKQFKIPPDKVQTHAVTGSPKDQILKLADTIDADLIIIASHKPDISTYLLGSNAAAVVRHAKCPVLVVR

SEQ ID NO: 55714 - protein, 245 aa, Enterobacter cloacae
MKVLRDPLLWLVALFVALLFLMPHSAALFNTLFPGLPRPVYQQESFINLALAHLWLVALSSAIAVVLGVGAGIAVTRPAGKEFRPLVETIAAIGQTFPPVAVLAIAVPVMGFGQLPAIIALILYGVLPVLQGTLAGLAAVPASVLSVAEGMGMSRGQRLRKVELPLAAPVIIAGIRTSVIINIGTATIASTVGANTLGTPIIIGLSGFNTAYIVQGAVLVALAAIVVDRLFERLSLYLSRHRREQ

SEQ ID NO: 55715 - protein, 335 aa, Enterobacter cloacae
MAYNRTFALDISWKTLLKDAGLEPERILRRAGLPDDLFLQKTRGLDTDEYIRFWNALEAETNDPAFPVPLIESISADIFDPPLFAALCSSNMMQAVQRLARYKQLIAPMVLETTVDQNGNLTVSPRWLFATDLPVFLQVAELGFLLKLLRLGSRERVNPLRICVSALPSAVQNSHFSRFFGTDVQYGEQPAISFSAADALRPFLTVNEGMWQVFEPELQRRLGQLNDTASTAERVRSVLLELIPGNEATIEKAAERLGMSKRTLQRRLEQEGDNFRNLVNACREHLARHYLLNTRLSGYEIAFLLGFEDPNSFYRAFMAWTGQTPEAARMAMRLE

SEQ ID NO: 55716 - protein, 509 aa, Enterobacter cloacae
MRIGVPKERLANETRVAATPKTVEQLLKLGFTVAVESGAGKLASFDDEAFIQAGAEVVDGADVWQSPVILKVNAPEESEIALLNPGTTLVSFIWPAQNPELMEKLAARGVTVMAMDSVPRISRAQSLDALSSMANIAGYRAIVEAAHEFGRFFTGQITAAGKVPPAKVMVIGAGVAGLAAIGAANSLGAIVRAFDTRPEVKEQVQSMGAEFLELDFKEEAGSGDGYAKVMSEAFIKAEMELFAAQAKDVDIIVTTALIPGKPAPKLITREMVDSMKPGSVIVDLAAQNGGNCEYTVPNQVTTTANGVKVIGYTDLPGRLPTQSSQLYGTNLVNLLKLLCKEKDGNVTVDFDDVVVRGVTVVREGEITWPAPPIQVSAQPQAATKAAPEPKEPAKPASPWRKYAIMALVIILFGWLADVAPKEFLGHFTVFALSCVVGYYVVWNVSHALHTPLMSVTNAISGIIVVGALLQIGHGGWISFLSFIAVLIASINIFGGFTVTQRMLKMFRKG

SEQ ID NO: 55717 - protein, 416 aa, Enterobacter cloacae
  MISC_FEATURE (394)..(394): X=any amino acid
GSLTVLTLAVAVWGPYVYHPSSAPTIKTIELEKSEIRSLLPEASEPTDQAAQEDEAIPQDELDGKTENEAGIHEYVVSTGDTLSSVLNQYGIDMGNISQLAAADKDLRNLKIGQQLSWTLTADGDLQRLTWEMSRRETRTYDRTANGFKMTSEMQKGDWVNSVLKGTVGASFVSSARDAGLTSAEISSVIKAMQWQMDFRKLKKGDEFSVLMSREMLDGKREQSQLLGVRLRSEGKDYYAIRAEDGKFYDRTGTGLAKGFLRFPTAKQFRVSSNFNPRRLNPVTGASAPHRGVDFAMPQGTPVLAVGDGEVVVAKRSGAAGYYVAVRHGRTYTTRYMHLRKLLVKPGQKVKRGDRIAISGNTGRSTGPHLHYEVWINQQAVNPLTAKLPRTEAXQGKDRTDYLAQVKEVMPQLSLN

SEQ ID NO: 55718 - protein, 479 aa, Enterobacter cloacae
MSRRLRRTKIVTTLGPATDRDNNLEKIIAAGANVVRMNFSHGTPEDHKLRADKVREIAAKLGRHVAILGDLQGPKIRVSTFKEGKVFLNIGDKFLLDANLGKGEGDKEKVGIDYKGLPADVVPGDILLLDDGRVQLKVLEVQGMKVFTEVTVGGPLSNNKGINKLGGGLSAEALTDKDKADIVTAALIGVDYLAVSFPRCGEDLNYARRLARDAGCDAKIVAKVERAEAVCDQDAMDDVILASDVVMVARGDLGVEIGDPELVGIQKALIRRARQLNRAVITATQMMESMITNPMPTRAEVMDVANAVLDGTDAVMLSAETAAGQYPAETVAAMARVCLGAEKIPSINVSKHRLDVQFDNVEEAIAMSAMYAANHLKGVTAIITMTESGRTALMTSRISSGLPIFAMSRHERTLNLTALYRGVTPVHFDSTNDGVAAAHDAVNLLRDKGYLVSGDIVIVTQGDVMSTIGSTNTTRVMTV

SEQ ID NO: 55719 - protein, 491 aa, Enterobacter cloacae
MAVTQTAQACDLVIFGAKGDLARRKLLPSLYQLEKAGQIHPDTRILGVGRADWDKDAYTKVVREALETFMKEKIDESLWDTLSGRLDFCNLDVNDVSAFTRLGAMLDQKKRVTINYFAMPPSTFGAICKGLGEAKLNAKPARVVMEKPLGTSLATSREINDQVGEFFEECQVYRIDHYLGKETVLNLLALRFANSLFVNNWDNRTIDHVEITVAEEVGIEGRWGYFDQAGQMRDMIQNHLLQILCMIAMSPPSDLTADSIREAKVKVLKSLRRIDRSNVREKTVRGQYTAGFAQGKKVPGYLEEEGANKSSNTETFVAIRVDIDDWRWAGVPFYLRTGKRLPAKCSEVVVYFKNPELNLFKESWQELPQNKLTIRLQPDEGVDIQILNKVPGLDHKHNLQTTKLDLSYSETFNQTHLADAYERLLLETMRGIQALFVRRDEVEEAWKWVDSITEAWAADQDAPKPYQAGTWGPVASVAMITRDGRSWNEFE

SEQ ID NO: 55720 - protein, 275 aa, Enterobacter cloacae
MELLEEHRCFEGRQQRWRHDSTVLNCAMTFSIFLPPTENPPVLFWLSGLTCNDENFTTKAGAQRIAAELGIALVMPDTSPRGDDVADDAGYDLGKGAGFYLNATEQPWAHHYRMYDYIRDELPALIQSGFAVSDRCAISGHSMGGHGALIMALKNPGKYVSVSAFSPIVNPTQVPWGQKAFTNYLGEDEAKWQEWDSCALMLASSSANAIPMLIDQGDADQFLAGQLQPAVLAEAARQKDWPLTLRIQPGYDHSYYFIASFIEDHLRFHAEHLFG

SEQ ID NO: 55721 - protein, 611 aa, Enterobacter cloacae
MPIQVLPPQLANQIAAGEVVERPASVVKELVENSLDAGATRIDIDIERGGAKLIRIRDNGCGIKKEELALALARHATSKIASLDDLEAIISLGFRGEALASISSVSRLTLTSRTAEQQEAWQAYAEGRDMDVTVKPAAHPVGTTLEVLDLFYNTPARRKFMRTEKTEFGHIDEIIRRIALARFDVTINLSHNGKVMRQYRAVAEGGQKERRLGAICGTPFLEQALAIEWQHGDLALRGWVADPNASSAAFSEIQYCYVNGRMMRDRLINHAIRQACEDKLGADQQPAFVLYLEIDPHQVDVNVHPAKHEVRFHQSRLVHDFIYQGVAAVLQQQAEPTLPLENDAPAPRPLPENRVAAGRNHFAEPAVAREPEAPRFSQAGSAPGPTGANYPNAQPGYQKQQGALYRKLLETPAVERKEHIPAAQPSLDGHSQSFGRVLTIIAPDMALLERDGKLMLLALPVAERWLKQVQLTPGENAACAQPLLIPVRLKISPDETRVLQRAEPQLAQMGIETVLEPQHVTIRAVPLPLRQQNLQNLIPELIGYLAQQTSFDAANTAQWIARHLASEHAPWSMAQAISVLAEVERLCPHLVKTPPGGLLQPVDLKTAMNAL

SEQ ID NO: 55722 - protein, 323 aa, Enterobacter cloacae
ARFSGVSKSTVSRVLSNQRDISPEAREKVLKAIDELNYQPNKLARALTSSGFDAIMVISTRSTKTTAGNPFFSDVLHAITAKAEEEGFDVILQTSKSSEDDLLKCVNKIKQKMIKGIIMLSSPANESFFTTLDAYGVPVVVIGKVEGEFQNIYSVDTDNFHDSATLTETFIKNGRRKIACLHAPLDYHVSIDRLAGYKASLEKYHIALNPDWIRDGGYTHESALTAALELLSSPTPPDAVFATDSMKLLSLYRAADELNLMIPEQVVIAGYSDPMLSLILTPAPGGFDIPTRKLGEESCDLLFRRIAGQPAPQKVLVDTHFLL

SEQ ID NO: 55723 - protein, 349 aa, Enterobacter cloacae
SASTPSPLRVAIIGAGQVADKVHASYYTTRSDVQMVAVMDSHPEQALAFAERHGISSVWQDARDMLEAVKPDVVSVCSPNRFHFEHVMAALEAGCHVMCEKPPAMTPQEADRMRMAARKAGKVLAYDFHHRFALDTQLLREAVMKGALGEIYYTTAQALRRCGVPGWGVFTNKTLQGGGPLIDIGIHMLDAAMYVLGFPAVKKVTAHSFQRLGNRKSSGQFGAWDPTQFTVEDALFGTIEFCNGGILRLDTSFALNIREQSIMNVAFCGEKAGAMLFPAHIYNDEAGTLVTLTQREEADDRRHMRSMDAFVRHVQGEPVMIADAEQGLVIQQLVAALYESAETGESVTL

SEQ ID NO: 55724 - protein, 335 aa, Enterobacter cloacae
MKVLVTGATSGLGRNAVEFLRNKGISVRATGRNEAMGKLLQKMGAEFVHADLTELVSSQAKVMLAGIDTLWHCSSFTSPWGTQEAFDLANVRATRRLGEWAVAWGVRNFIHISSPSLYFDYHHHRDVQEDFRPARFACEFARSKAASEEVIDLLAQSNPHTRFTVLRPQSLFGPHDKVFIPRLAQMMHHYGSVLLPRGGDALVDMTYYENAVHAMWLASQPDCDKLISGRAYNITNGEPWTLRSIVQRLIDELQIDCRIRSVPYPMLDMIARSMERFGSKSAKEPALTHYGVSKLNFDFTLDISRAENELGYKPIVTLDEGITRTAAWLRDHGKL

SEQ ID NO: 55725 - protein, 172 aa, Enterobacter cloacae
STENNENIHFIVSGEVEFRRESDELVCMFTLQNKCIFGLSSIYYNSTHMYGLVRASTVVRTLKKEDFFRLMSEKNLWEALSKVLSWYVCLLSKRDEVLVARSAYSIVREFLLEINELMVHHQRDINIYDYIQEYTSLARSTIIKILADLKKGNYIQVDKGRLMYLSALPEKY

SEQ ID NO: 55726 - protein, 457 aa, Enterobacter cloacae
MLSSQSPSIYTVSRLNQTVRLLLEEEMGQVWISGEISNFTQPSSGHWYFTLKDDTAQVRCAMFRNSNRRVTFRPQHGQQVLVRANITLYEPRGDYQIIVESMQPAGEGLLQQKYEQLKARLSAEGLFDQQFKKPLPSPAHCVGVITSKTGAALHDILHVLKRRDPSLPVIIYPTAVQGDDAPGQIVRAIELANVRQECDVLIVGRGGGSLEDLWSFNDERVARAIFASIIPVVSAVGHETDVTIADFVADLRAPTPSAAAEVVSRNQLELLRQIQNVQQRLEMAMDYFLANRTRRFTQLHHRLQQQHPQLRLARQQTVLDRLRQRMSVAVDAQLKRAVSRQQRVTQRLNQQNPQPKIYRAQTRIQQLEYRLAETIRARLSTTRERFGNAVTHLEAVSPLSTLARGYSVTTATDGKVLKQTKQVNTGDVLTTRLSDGWVESEVKSIKPVKKTRQRKTG

SEQ ID NO: 55727 - protein, 490 aa, Enterobacter cloacae
MVPVVALVGRPNVGKSTLFNRLTRTRDALVADFPGLTRDRKYGRAEVEGREFICIDTGGIDGTEDGVETRMAEQSLLAIEEADVVLFMVDARAGLMPADSAIAKHLRSREKPTFLVANKTDGIDADQAVADFWSLGLGEIYPIAASHGRGVTSLLETVLLPWVDEVNPPEEVDEDAEYWAQFEDGEEGEEEPEDDFNPQDLPIKLAIVGRPNVGKSTLTNRILGEERVVVYDMPGTTRDSIYIPMQRDEREYVLIDTAGVRKRGKITDVVEKFSVIKTLQAIEDANVVLLVIDAREGISDQDLSLLGFILNSGRSLVIVVNKWDGLSNEVREQVKETLDFRLGFIDFARVHFISALHGSGVGNLFESVREAYDSSTRRQSTAMLTRIMNMAAEDHQPPLVRGRRVKLKYAHAGGYNPPIVVIHGNQVKDLPDSYKRYLMNYFRKSLDVMGTPIRIHFNEGENPFANKRNTLTPNQMRKRKRLIKHIKKSK

SEQ ID NO: 55728 - protein, 209 aa, Enterobacter cloacae
MMHSSACDCEASLCETLRGFSAQHPDSVIYQTSLMSALLSGVYEGETTIADLLAHGDFGLGTFNELDGEMIAFSSQVYQLRADGSARAAKREQKTPFAVMTWFQPQYRKTFDAPVSRQQIHDVIDQQIPSDNLFCALRIDGNFRHAHTPHVPRQKPPYRAMTDVLDDQPVFRFNQREGVLVGFRTPQDMQGINVAGYHEHFITEDRQGG

SEQ ID NO: 55729 - protein, 327 aa, Enterobacter cloacae
  MISC_FEATURE (283)..(283): X=any amino acid
WRISILDKSPIAENETAADALARTLALAHRAENLGYHRFWIAEHHNTPHLASPSPELLIAWILGQTTRIRVGSGGVMLQHYSPYKVAENFNVLAALAPGRVDLGVGKAPGGLPLSTRALQQGLNQLEKGSFAEQLAQLDRWIRPEHQSNDEAVRATPLPPLPAEGFLLGASIDSALLAAGLGWHFVFAAHLNGDPELLREVVSTWRKNSTRDVIVAVQAIVAPTQAEAEALAQKVEVWGVELANGQRVTVASEEQAYAFARQAGSEPVRIARRAQSLLAGTAXSVLEQLNALHEKWGIDEFIIDTPVAEGGNAVASLRLLAEARLNK

SEQ ID NO: 55730 - protein, 346 aa, Enterobacter cloacae
MRYQKLGNTGLFVSELCLGTMTFGGEGGMWGKIGQLQQSEAEQLVGRALDAGINFIDTADVYSEGRSEEITGQALKNLKIPRENVVVATKVFGETGTAGVNSRGSSRYHIISSVKESLRRLQLDHIDLYQLHGFDPATPIEEMLYALDNLVQHGHVRYIGVSNWAAWQIAKALGISERLGLARFASLQAYYTIAGRDLERELVPMMQSEGVGLMVWSPLAGGLLSGKYGRDGQSEAGGRRLEFDFPPVNKDRAFDCVDVMRTIAESKGVSVAQIALAWLLHQKAVTSVIIGAKRVEQLDDNIAATGIRLSEDELKQLDAVSALPREYPGWMLERQGEYRRNQLAQQ

SEQ ID NO: 55731 - protein, 326 aa, Enterobacter cloacae
MTQNNNSQVSRSNDPEQIDLLDLMLQLWRGKWMIATFVVVFIALAIGYLSVAKEKWTSSAIIAQPDVAQIATYSNALNILYGSAAPSMLDVQTRAIGRFNSSFSALAQALENQEEPEKLTIEPAVKGEALPLSVSYTSTSAEAAQKQLAQYIQQVDEQTAKELAVDLKDNIKEQIKTLNDSLQNQEKVAQEQKDLRIKQIAEALKNAEAAKITTPQIQQTQDVTQETMFLLGSVGLKSMIENEASRPLVFSAAYYQTRQNLLDIQNLNVKPDTIHVYRYVMKPDLPVRRDSPKKAIVLILAVLLGGMIGSGVVLGRNALRNYKPKA

SEQ ID NO: 55732 - protein, 181 aa, Enterobacter cloacae
MAYFNELDSYAESLGLNTRQIIEGVCLDPRIGNHYNNPSFGYGGYCLPKDTKQLLANYQAVPNNLISAIVDANRTRKDFISDSILARQPKVVGVYRLIMKSGSDNFRASSIQGIMKRIKAKGVQVIIYEPAMQEDEFFHSRVIRDLDAFKQEADVIISNRMSEELADVADKVYTRDLFGSD

SEQ ID NO: 55733 - protein, 140 aa, Enterobacter cloacae
MTLAYIAIGSNLASPLEQVNAAVQALGEIPQSKIVAVSSFYRTPPLGPQDQPDYLNAAVVLETALNAETLLDNTQRIELQQGRVRKAERWGPRTLDLDIMLFGHETINTERVTVPHYDMKNRGFMLWPLFEVAPDLNFPD

SEQ ID NO: 55734 - protein, 576 aa, Enterobacter cloacae
  MISC_FEATURE (541)..(541): X=any amino acid
MLQCTPTNVNPLELLVSSLPVAVILPELLAALHHAPQVLLNAPTGAGKSTWLPLQILKDGNIRGKIILLEPRRLAARNVAQRLAELLNEKPGETVGYRMRTETCVGPTTRLEVVTEGILTRMLQNDPELTGVGLVILDEFHERSLQADLALALLLDVQQGVRDDLRLLIMSATLDNERLRQALPDAPVISSEGRAFPVERRYQPLPSHQRFDEAIAIATAELCRQEAGSLLLFLPGVGEIQRVQEQLSTRVGGDVLLCPLYGALSLQDQRKAILPAPAGQRKVVLATNIAETSLTIEGIRLVVDSAQERVASFDPRTGLTKLLTQRISQASMVQRAGRAGRLEPGICLHLTSAEQAERAAQQSTPEILQSDLSGLVMDLLQWGCPNPEQLTWLNPPPVVNLTAARTLLTQLGALEGERLTARGQKMAALGNDPRLAAMLVAAQGDDEIATAAKLAAILEEPPRGGSSDLGQAFSRSQGNWQQRAQQLCKRLNSRGGVPDSDKIAFLLAQAFPDRTARRRGLVVRTMLANGMGAMLDSDDWXTRHEWLIASCCCQGSHSPDARTLLAIAVETDAGLQ

SEQ ID NO: 55735 - protein, 151 aa, Enterobacter cloacae
MQEGQNRKTSSLSILAIAGVEPYQEKPGEEYMNEAQLSHFKRILEAWRNQLRDEVDRTVTHMQDEAANFPDPVDRAAQEEEFSLELRNRDRERKLIKKIEKTLKKVEDEDFGYCESCGVEIGIRRLEARPTADLCIDCKTLAEIREKQMAG

SEQ ID NO: 55736 - protein, 317 aa, Enterobacter cloacae
MIPALFTHSKGGSLSRLVIVDMSESHYIGRFAPSPSGELHFGSLIAALGSYLQARARQGKWLVRIEDIDPPREVPGAAETILRQLEHYGLHWDDEVLWQSKRHDAYRERLAWLRDRGLSYNCTCTRARIQSVGGVYDGHCRMLNLPPENAAVRIKQRSPVTRFTDLLSGEVHADERLAREDFIIHRRDGLFAYNLAVVVDDRFQGVTEIVRGADLVEPTVRQISLYHQFGWTAPDYIHLPLAVNAQGFKLSKQNHAPALPDGDPRPVLIDALRFLNQNVSNEWQDLRIDELLKMAIANWTLAAVPKIQHSQMRCAEL

SEQ ID NO: 55737 - protein, 454 aa, Enterobacter cloacae
MLSREESMANDAIAQPHMSVIPREQHTISRKDISENALKVLYRLNKAGYEAYLVGGGVRDLLLGKKPKDFDVTTSATPEQVRKLFRNCRLVGRRFRLAHVMFGPEIIEVATFRGHHEAGASDRTTSQRGQNGMLLRDNIFGSIEEDAQRRDFTINSLYYSVADFTVRDYVGGMQDLKEGLIRLIGTPETRYREDPVRMLRAVRFAAKLNMRISPETAEPIPRLATLINDVPPARLFEEALKLLQAGHGFETYNLLREYNLFQPLFPTITRYFTESGDSPMERMIAQVLKNTDTRIRNDMRVNPAFLFAAMFWYPLLETAQRITQESGLAYYDAFALAANDVLDEGCRTLAIPKRITTLVRDIWQLQLRMSRRQGKRAWKLMEHPKFRAAFDLLSLRAEIERNQELQRLAQWWAEFQVSAPPEQKDMLTGLDEEPEPRRRHRRPRKRAPRREGTA

SEQ ID NO: 55738 - protein, 183 aa, Enterobacter cloacae
MDALELLVNRRSASRLAEPAPAGEQLENILRAGMRAPDHGTLQPWHFFVIEGEGRDRFSQLLEQGAIAAGQDEKGIDKARNAPFRAPMIIAVVAKCQADHKVPIWEQEMSAGCAVMAMQMAAVAQGFNGIWRTGALTESPAVRDGFGCGEHDKIVGFLYLGTPQLKASSTISIPDTTPFVSHF

SEQ ID NO: 55739 - protein, 234 aa, Enterobacter cloacae
MVSVETLLHPGGYRTPWHSHRTGQLWRIATGLLVIETQQARSVVPAKHIGWIPPDRQHAAFSESAIEGCAIFLDPAGCAMLPDAPALFEPDDLTHALFSRLCDAESEYDPRKLTLLLDELALTPQARFSLPVPTDPRLKNVVSHLLQFVDDNQTVESHAVHAGMSVRTFNRRFSAQTGMNFVNWRQLARVMRAMEWLAAGKPVGWIALSCGYSSVSAFIEVFRAWTGKTPGQWV

SEQ ID NO: 55740 - protein, 220 aa, Enterobacter cloacae
MLRVIDTETCDLQGGIVEVASVDVVDGKIVNPMSHLVRPDRPISPQAMAIHRITESMVADKPWIEEIIPHYYGSPWYVAHNASFDRRVLPEMPGEWICTMKLARRLWPGIKYSNMALYKSRKLSVRTPEGLHHHRALYDCYITAALLIDIMNISGWTPDDMATITGRPALLTTFTFGKYRGKPVSEVADKDPGYLRWLYNNLDRMSPELRLTLKHYLGEA

SEQ ID NO: 55741 - protein, 471 aa, Enterobacter cloacae
LEKLDALYEQSVKRVRSAISEYIETGKLPDQKARTEGLFVYPSLSVTWDGSASSNPKTRAYARFTHSGCYSTTVTRPALFRPYLEEQLTLLYQDYGANIAVEPSQHEIPYPYVIDGSALTLDRSMSAGLTRHFPTTELSQIGDETADGIYHPAEFSPLSHFDARRVDFSLARLAHYTGTPVEHFQPFVLFTNYTRYVDEFVRWGCSQILDPESPYIALSCAGGIWITAETEAPEQAISDLAWKKHQMPAWHLITADGQGITLINIGVGPSNAKTICDHLAVLRPDVWLMIGHCGGLRESQLIGDYVLAHAYLRDDHVLDAVLPPDIPIPSIAEVQRALYDATKEVSGMPGEEVKQRLRTGTVVTTDDRNWELRYSASALRFNLSRAVAIDMESATIAAQGYRFRVPYGTLLCVSDKPLHGEIKLPGQANRFYEGAISEHLQIGIRAIVLLRAEGDKLHSRNLRTFNEPPFR

SEQ ID NO: 55742 - protein, 438 aa, Enterobacter cloacae
MDSTLISDRPNEETPSLNRARRAALGSFAGAVVDWYDFLLYGITAALVFNREFFPQVSPAMGTLAAFATFGVGFLFRPLGGVIFGHFGDRLGRKRMLMLTVWMMGIATALIGILPSFASIGWWAPVLLVTLRAIQGFAVGGEWGGAALLSVESAPKHRKAFYSSGVQVGYGVGLLLSTGLVSLISQLTTDEQFLSWGWRIPFIFSIVLVIAALWIRNGMEESAEFEQQQREKPLAKKRMPVMEALVQHPGAFLKIIALRLCELLTMYIVTAFALNYSTQNLGLPRELFLNIGLLVGGISCLTIPCFAWLADRFGRRRVYITGALIGTLSAWPFFMALEAQSIFWIVFFAIMLANIAHDMVVCVQQPMFTELFGASYRYSGAGVGYQVASVVGGGFTPFIAAALVTFSGGNWHSVAIYLFAGCLLSAATALLMKETSHR

SEQ ID NO: 55743 - protein, 287 aa, Enterobacter cloacae
MKLASFLYQGKRSYGIVQADGVIDLGRRLGDRYSDLKALLQGNGLAQATRYLNDAVDVPMSAITFLPVIEQPEKILCVGMNYADKRKEFDQHNPAPTLFVRFPDSQTGHNEPVLKPRHSSEFDYEGELAVIIGKGGENISRDDALRHVAGYSCYMDGSARDWQHTWFTAGKNWRKTGAFGPWMATADEIPDPHQLAIRTWLNGRMVQEDNTSSMIHKVAELIEYISTFTRLSPGDVIITGSPGGVGKKRNPPLFMKEGDRIEVEIEHIGHLSNVIVEAPAVGLAAAH

SEQ ID NO: 55744 - protein, 291 aa, Enterobacter cloacae
MSKLRRSMLFLPGANAAMLSTAFIYRPDSIMFDLEDAVALREKDTARMLVFHALQHPMYQDIETVVRINPLSTPFGLLDLEAAVRAGVDVIRLPKTDTPDDIYELEGHLERIEQECGREVGSTRVMAAIESAIGVINAVAIARSSVRLIGIALAAFDYVMDMQTERGDGTELFYARCAVLHAARAAGIDAFDVVWSDVNDEAGFLREVDLIRKMGFNGKSLINPRQIDLLHNAYAPTQEEVDHAKRVIEAAEEGERNGLGVVSLNGKMVDAPIINHAQVVLERAAASGVRR

SEQ ID NO: 55745 - protein, 533 aa, Enterobacter cloacae
MHRLLTTRRWCWSARRPPACVGKDKIMNQTELLHVNFPHLRDLKPFDTAHSATPWLADSDAKHSRKLCASIEEAVKRCGLQDGMTISFHHAFREGDRVINTVVALLARMGFKNLTLASSSLMTCNDALIEHIKSGVITRIYTSGMRGRLADAISHGLMDEPVQIHSHGGRVKLLQDGELNIDVAFLGVPCSDEFGNANGTHGKSCCGSLGYAMVDAHFARKVVLLTEELVPFPNMPASLVQDQVDYIVQVESVGDPAKISVGAARVTSNPRELMIARYAADVIEHSGYFKPGFSMQTGSGAAATACTRFMEEKMERSGVKARFALGGITGSLVDLHEKGLIEKLLDTQCFDGQAAASLARNPNHVEISTNVYANPGSKAASCDQLDVVILSALEIDVDFNVNVITGSDGVMRGASGGHCDVAAAANLTIVVAPLLRSRIPTVVKRVTTRLTPGESIDVLVTDHGIAVNPARPEIRERLLEAGLKVVDISALYERAISLTGVPKPIEFTDKIVGVIRYRDGSVIDTVRQVKEEV

SEQ ID NO: 55746 - protein, 419 aa, Enterobacter cloacae
MRMLKREMNIADYDAELWQAMEQEKVRQEEHIELIASENYTSPRVMQAQGSQLTNKYAEGYPGKRYYGGCEYVDIVEQLAIDRAKELFGADYANVQPHSGSQANFAVYTALLQPGDTVLGMNLAQGGHLTHGSPVNFSGKLYNIIPYGIDESGKIDYEDMAKQAKEHKPKMIIGGFSAYSGIVDWAKMREIADSIGAYLFVDMAHVAGLIAAGVYPNPVPHAHVVTTTTHKTLAGPRGGLILAKGGDEELYKKLNSAVFPSAQGGPLMHVIAAKAVALKEAMEPEFKVYQQQVAKNAKAMVEVFLNRGYKVVSGGTENHLFLLDLVDKNLTGKEADAALGRANITVNKNSVPNDPKSPFVTSGIRIGSPAVTRRGFKEAEVKELAGWMCDVLDNINDEAVIERVKGKVLDICARFPVYA

SEQ ID NO: 55747 - protein, 749 aa, Enterobacter cloacae
MSNKDKTHQSPIHGTEESQPGMDSLAPADGSHRPSPGPSAPGEQPTAPGSMKSPDTGNEKLKSLEPHRKGGEGFALTTNQGVRIADDQNSLRAGARGPTLLEDFILREKITHFDHERIPERIVHARGSAAHGYFQPYKSLKDITKADFLSDPDKITPVFVRFSTVQGGAGSADTVRDIRGFATKFYTEEGIFDLVGNNTPVFFIQDAHKFPDFVHAVKPEPHWAIPQGQSAHDTFWDYVSLQPETLHNVMWAMSDRGIPRSYRTMEGFGIHTFRLINAEGKATFVRFHWKPVAGKASLVWDEAQKLTGRDPDFHRRELWESIEAGDFPEYELGLQLIPEEDEFKFDFDLLDPTKLIPEELVPVQLVGKMVLNRNPDNFFAENEQVAFHPGHIVPGLDFTNDPLLQGRLFSYTDTQISRLGGPNFHEIPINRPTCPYHNFQRDGMHRQDIDTNPANYEPNSINDNWPRETPPGPKRGGFESYQERIDGNKIRERSPSFGEYYAHPRLFWNSQTPIEQQHIIGGFSFELSKVVRTYIRERVVDQLAHIDVQLAQSVADNLGITLTDEQRNLAPPKEVNGVKKDPSLSLYAVPGGSIKGRVVAILLNDKTRASDVLGIMQALKTQGVHAKLLYSRMGEVTADDGSVLPVAATFAGAPSLTVDAVIVPCGDIDSLLTNGDAVYYLLEAYKHLKPIALSGNARRFKAQLKVADQGEDGIVEGDNVDDAFMTKLFDLLAAHRVWSRSSKIDQIPA

SEQ ID NO: 55748 - protein, 428 aa, Enterobacter cloacae
VSKATEQNDKLKRAIIVSAVLHVILFAALIWSSFDEHIDASAGGGGGSSIDAVMVDPGAVVQNYNREQQQKASAKRAEEQREKQSQQQAEELREKQAAEQERLKQLEKERLQAQEAAKEQAEQQKQAEEAAKKAQEQQKQAEEAAAKAAADAKAQADAQAKLAAEAAKKAAADAQKKAEAEAAKKAAADAQKKAEAEAAKKAAADAQKKAEAEAAKKAAQEAEKKAAAEAAKKAAAAEKAAAEKAAAAEKAAADKKAAAEKAAADKKAAAEKAAADKKAAADKAAAKKAAAAEKAAAAAGVDDLLGDLSSGKNAPKTGGGAKGNNAAPTGSGNTKSNGATGAEINGYAAQIKSAIESRFYDASSYTGKTCTLRIKLAPDGMLLDIKSEGGDPALCTAALAAARQAKMPKPPSQAVYEVFKNAPLDFKP

SEQ ID NO: 55749 - protein, 233 aa, Enterobacter cloacae
LVDPRIIGAMEEEVTLLRDKIENRQTLSLGGCEIYTGQLNGVDVALLKSGIGKVAAALGATLLLERCKPDVIVNTGSAGGLAPTLKVGDIVVSDEARYHDADVTAFGYEYGQLPGCPAGFKADDKLIAAAETCIAELNLNAVRGLIVSGDAFINGSVGLAKIRHNFPQAVAVEMEATAIAHVCHNFSVPFVVVRAISDVADQQSHISFDEFLTVAAKQSTVMVERLVQNLARG

SEQ ID NO: 55750 - protein, 266 aa, Enterobacter cloacae
MAKHTVRALAALLLLAPLWLYALPRVITLSPANTELAFAAGITPVGVSSFSDYPPQAAGIEQVATWQGMNLERIVALKPDLVLAWRGGNAERQVNQLTSLGIKVMWIDAVSIEQVAQALRALAPYSPTPKKAEAAAKQMLSDYAALKSRYDTPVKKRIFLQFGSQPLFTTGKGSIQNQVLEVCGGENIFAASRVPWPQVSREQVLARQPQAIVVVGNASEIPKIEQFWQRQLKIPVIPLNSDWFERASPRIILAAKQLCAALAESH

SEQ ID NO: 55751 - protein, 273 aa, Enterobacter cloacae
MHDAQIRVAIAGAGGRMGRQLIQAALQMDGVALGAALEREGSSLLGTDAGELAGAGHTGVTVQSSLEAIKEDFDVFIDFTRPEGTLAHLAFCRQHGKGMVIGTTGFDDAGKQAIQDASKEIAIVFAANFSVGVNVMLKLLEKAAKVMGNYTDIEIVEAHHRYKVDAPSGTALAMGEAIAHALDKDLKDCAVYTREGYTGERVPGTIGFATVRAGDIVGEHTAMFADIGERVEITHKASSRMTFANGAVRSALWLKNKKNGLFDMRDVLDLNNL

SEQ ID NO: 55752 - protein, 921 aa, Enterobacter cloacae
DYKSTLNLPETGFPMRGDLAKREPGMLARWTDDDLYGIIRAAKKGKKTFILHDGPPYANGSIHIGHSVNKILKDIIVKSKGLTGYDSPYVPGWDCHGLPIELKVEQEFGKPGEKFTAAEFRAKCREYAATQVDGQRADFIRLGVLGDWSHPYLTMDFKTEANIIRALGKIIGNGHLHKGAKPVHWCVDCRSALAEAEVEYYDKTSPSIDVAFQAVDQDAVKAKFGVSSVNGPISLVIWTTTPWTLPANRAISLSGEFEYALVQVEGQAVILAKDLVESVLKRAHISDYTVLGTVKGDALELMRFKHPFLDFDVPAILGDHVTLEAGTGAVHTAGGHGPDDYNISLKYGLEIANPVGPDGSYLPGTYPALDGINVFKANDIIVDMLRTSGALLHVEKMQHSYPCCWRHKTPIIFRATPQWFVSMDQKGLREQSLKEIKGVQWIPDWGQARIESMVANRPDWCISRQRTWGVPMSLFVHKETQELHPNTLELMEEVAKRVEVDGIQAWWDLDARDILGRDADNYEKVPDTLDVWFDSGSTHSSVVDVRPEFAGHAADMYLEGSDQHRGWFMSSLMISTAMKGKAPYRQVLTHGFTVDGQGRKMSKSIGNTVSPQDVMNKLGADILRLWVASTDYTGEMAVSDEILKRAADSYRRIRNTARFLLANLNGFDPAKDMVKPEEMVVLDRWAVGCAKAAQEDILKAYESYDFHEVVQRLMRFCSIEMGSFYLDIIKDRQYTAKADSVARRSCQTALFHIAEALVRWMAPIMSFTADEIWGYLPGDREKYVFTGEWYEGLFDLSSTEAMNDAFWDELLKVRGEVNKVIEQARADKKVGGSLEAAVTLYAEPELAAKLTALGDELRFVLLTSGAKVADYAEASADAQQSELLKGLKVALSKADGEKCPRCWHYTTDVGQVAEHADICGR

SEQ ID NO: 55753 - protein, 601 aa, Enterobacter cloacae
MLMRFMLLMLALTSLSSQAQAIKENIAFAVIGEPKYAVNFTHFDYVNPAAPKGGKVTLSATGTFDNFNRFALRGVAAARTESLYDTLFVTSDDEPGSYYPLIAENVLYADNFAWAEISLNPRARFHDGTPVKASDVAFTFHKFMTEGVPQFRIVYKGASVRAIAPLTVRIELSEPNKENMLSLFSLPVMPESFWKNHKLSDPLSTPPLAGGPYRITDWRMGQYVVYSRVKDYWAANLPVNRGRWNFDTLRYDYYLDDNVAFEAFKAGAFDLRVESSAKNWATRYIGKNFAKGYIVKDEHKNESAQDTRWLAFNIQRPVFNDRRVREAISLAFDFEWMNKALFYGAYSRANSYFQNTEYAARDYPKADELVLLTPLKAELPPEVFTTVFQPPASNGDGYDRDNLLKASKLLDDAGWHLKNQKRVDAKTGKPLSFELLLSSGVNDQWVLPFKHNLERLGVTMNIRQVDNAQITSRMRSRDYDMMQRLWPAQPWPSSDLQISWASSYIDSSYNAPGVKSPAIDALIAKIEAAQGDKEKLLPLGRALDRVLTWNYYMLPMWYMGEDRLARWDKFSVPAVRPVYYMGFDTWWYDVNKAARLPAERR

SEQ ID NO: 55754 - protein, 527 aa, Enterobacter cloacae
MNVTLIDTVVTRSRALSPWTGFYFLQSLLINFALGYPFSLLYAVAFTCVLHVLWRTAPRVQKALIGICSLVAALYFPFGQAYGSPNFNTLLALHSTNMEESTEILTIFPWYSYVVGIFIFALGVIAIRRQSGEKKSWGKIEILCLVFSVAVAFVAPIQNIPWDGKLRLINIGYPVFRFVKDVVVNNKEVLDEQARMAELSNMKDTWNVLAVKPKYHTYVVVIGESARRDAMGRFGGHWDNTPFASSVKGTLFTDYVAASGSTQKSLGLTLNRVVDGKPQYQDNFVTLANRAGYQTWWFSNQGQIGEYDTAIASIAKRADEVQFLKNGDFEADKNTKDEALLKMTAQVFATPRTQPQLIVLHLMGSHPQACDRTGGKYAEFVQSKETSCCLYTMTQTDDLLSKLYDQVRNTGDSFSMVYFSDHGLAFKERGKEVQYLAHDDKFQQNFQVPFMVLSSDDKTHRVIKARRSANDFLQFFSQWTGITAEQIKTAYPFVSNKKAPPVYVTNFKLQKVDYNHLGTDIFDIKSK

SEQ ID NO: 55755 - protein, 212 aa, Enterobacter cloacae
MAVAANKRSVMTLFSGPTDIYSHQVRIVLAEKGVSFEIEHVEKDNPPQDLIDLNPSQSVPTLVDRELTLWESRIIMEYLDERFPHPPLMPVYPVARGESRLYMQRIEKDWYSLMNVITSGSASEADAARKQLREELLAIAPVFGQKPFFLSDEFSLVDCYLAPLLWRLPTLGVEFSGPGAKELKGYMTRVFERDSFLASLTEPEREMRLGRG

SEQ ID NO: 55756 - protein, 130 aa, Enterobacter cloacae
MAENQYYGTGRRKSSAARVFIKPGSGKIVINQRSLEQYFGRETARMVVRQPLELVDMVEKLDLYITVKGGGISGQAGAIRHGITRALMEYDESLRSELRKAGFVTRDARQVERKKVGLRKARRRPQFSKR

SEQ ID NO: 55757 - protein, 142 aa, Enterobacter cloacae
MKTFTAKPETVQRDWYVVDATGKTLGRLATELARRLRGKHKAEYTPHVDTGDYIIVLNADKVAVTGNKRTDKVYYHHTGHIGGIKEATFEEMIARRPERVIEIAVKGMLPKGPLGRAMFRKLKVYAGNEHNHAAQQPQVLDI

SEQ ID NO: 55758 - protein, 101 aa, Enterobacter cloacae
MFVIWSHEKGFIMSHQLTFADSEFSSKRRQTRKEIFLSRMEQILPWQNMVEVIEPFYPKAGNGRRPYPLESHLRIHCMQHWYNLSDGAMEDALYEIASMRG

SEQ ID NO: 55759 - protein, 398 aa, Enterobacter cloacae
MRGDFYKQLNSDLDTARAEGLFKEERIITSAQQADITVADGSHVINFCANNYLGLANHPELIAAAKNGMDTHGFGMASVRFICGTQDSHKQLEQKLASFLGMEDAILYSSCFDANGGLFETLLGAEDAIISDALNHASIIDGVRLCKAKRFRYANNDMVELEARLKEAREAGARHVLIATDGVFSMDGVIANLKGVCDLADKYDALVMVDDSHAVGFVGENGRGSHEYCDVMGRVDIITGTLGKALGGASGGYTAARKEVVEWLRQRSRPYLFSNSLAPAIVAASIKVLEMVESGAELRDRLWSNARLFREKMSAAGFTLAGADHAIIPVMLGDAVVAQKFARELQKEGIYVTGFFFPVVPKGQARIRTQMSAAHTPEQIERAVEAFTRIGKQLGVIA

SEQ ID NO: 55760 - protein, 342 aa, Enterobacter cloacae
MKALSKLKAEEGIWMTDVPEPEVGHNDLLIKIRKTAICGTDVHIYNWDQWSQKTIPVPMVVGHEYVGEVVGIGQEVKGFQIGDRVSGEGHITCGHCRNCRGGRTHLCRNTIGVGVNRPGCFAEYLVIPAFNAFKIPDNISDDLASIFDPFGNAVHTALSFDLVGEDVLVSGAGPIGIMAAAVAKHVGARNVVITDVNEYRLSLARKMGVTRAVDISKESLSDVMEELGMTEGFDVGLEMSGAPPAFRTMLDTMNHGGRIAMLGIPPSDMSIDWNKVIFKGLFIKGIYGREMFETWYKMAALIQSGLDLSPIITHRFSIDEFQQGFDAMRSGQSGKVILSWDK

SEQ ID NO: 55761 - protein, 170 aa, Enterobacter cloacae
MSQVSAEFIPTRIAILTVSDRRGEEDDTSGHWLREAAHDAGHHIVDKAIVKENRYAIRAQVSQWIASDEVQVVLITGGTGFTAGDQAPEALIPLFDREVEGFGEVFRMLSFEEIGTSTLQSRAVAGVANKTLIFAMPGSTKACRTAWENIIAPQLDARTRPCNFHPHLKK

SEQ ID NO: 55762 - protein, 329 aa, Enterobacter cloacae
MASQLTDAFARKFYYLRLSITDVCNFRCTYCLPDGYKPGSVTNNGFLSVDEVRRVTRAFSELGTEKVRLTGGEPSLRRDFPDIIAAVRENERIRQIAVTTNGYRMARDVANWRDAGLTAINVSVDSLDARQFHAITGQDKFQQVMDGIDAAFAAGFEKVKVNTVLMRDVNHHQLDTFLAWIQSRPIQLRFIELMETGEGSELFRRHHISGMVLRDELLKRGWIHQIRQRSDGPAQVFCHPDYEGEIGLIMPYEKDFCASCNRLRVSSVGKLHLCLFSDGGVDLRDLLEDDAQQAALEARISDALTHKKQTHFLHQGNTGITQNLSYIGG

SEQ ID NO: 55763 - protein, 302 aa, Enterobacter cloacae
MRNRTFADLDRVVALGGGHGLGRVMSSLSSLGSRLTGIVTTTDNGGSTGRIRRAEGGIAWGDMRNCLNQLITEPSVASAMFEYRFGGNGELSGHNLGNLMLKALDHLSVRPLEAINLIRNLLKVDAFLIPMSEQPVDLMAIDAEGHEVYGEVNIDQLILPPTELMTYPSVPATREAVEAIGEADLILIGPGSFYTSLMPILLVKELAQALRRTPAPMVYIGNLGRELSPAAASLSLADKLELMEQYVGKKIIDGVVVGPKVDVSGIGGRVVVQEPLEASDIKYRHDRHLLREALEKAIQALG

SEQ ID NO: 55764 - protein, 400 aa, Enterobacter cloacae
MQNVDVAIVGGGMVGLALACGLQGSGLRVAVLEQKQPQPVAPDAPPELRVSAINAASEKLLTHLGVWADIVAQRASCYHGMEVWDKDSFGHIAFDDESMGYSHLGHIIENAVIHHALWQKAQQCSDVTLIAPAQIQQVAWGENEAFITLQSGDMLTARLVVGADGANSWLRNKADIPLTFWDYRHDALVATIRTEEPHGGVARQIFHNDGILAFLPLADPHLCSIVWSLVPEKARQMHEAAPDAFNQALCMAFDNRLGLCALESERQVFPLTGRYARQFAAHRLALVGDAAHTIHPLAGQGVNLGFMDAAELVEELCRLHREGKDIGQHLYLRRYERSRKHSAAMMLAGMQGFRELFAGANPAKKLLRDIGLKLADTLPGVKPQLLRQAMGLNDLPDWLR

SEQ ID NO: 55765 - protein, 364 aa, Enterobacter cloacae
MAQQTPLYEQHVLCGARMVDFHGWMMPLHYGSQIDEHHAVRTDAGMFDVSHMTIVDLRGSRTREFLRYLLANDVAKLKTPGKALYTGMLNASGGVIDDLIVYYFTEDFFRLVVNSATREKDLSWITQHAEPYAIDITVRDDLSLIAVQGPNAQAKAASLFNDEQRKATEGMKPFFGVQAGDLFIATTGYTGEAGYEIAMPNEKAADFWRALVEAGVKPAGLGARDTLRLEAGMNLYGQEMDEGVSPLAANMGWTIAWEPADRDFIGREALEMQREKGTEQLVGLVMTEKGVLRGELPVRFTDADGNPREGVITSGTFSPTLGYSIALARVPAGIGETAVVQIRNREMPVNVTKPIFVRAGKPVA

SEQ ID NO: 55766 - protein, 601 aa, Enterobacter cloacae
FIERHIGPDAQQQQEMLKTVGADSLNALIGQIVPKDIQLATPPQVGQATTEFAALAELKAIAGLNKRYKSYIGMGYTNVQLPPVILRNMLENPGWYTAYTPYQPEVSQGRLEALLNFQQVTLDLTGMDIASASLLDEATAAAEAMAMAKRVSKLKNANRFFVAADVHPQTLDVVRTRAETFGFDVIVDDADKVLDHQDVFGVLLQQVGTTGEVHDYGALIVELKSRKVVVSVAADFMALVLLTAPGKQGADIVFGSAQRFGVPMGYGGPHAAFFGAKDEFKRSMPGRIIGVSKDAAGNTALRMAMQTREQHIRREKANSNICTSQVLLANIASLYAVFHGPAGLKRIASRIHRLADILACGLQQKGLKLRHAHYFDTLCVEVADKAAVLARANAAEINLRRTSTNAVGITLDESTTRDDILNLFSVLLGDAHGLDIDALDKEIALDSRSIQESMLRNDAILTHPVFNRYHSETEMMRYMHSLERKDLALNQAMIPLGSCTMKLNAAAEMIPITWPEFSELHPFCPQEQAEGYHMMINQLSDWLVKLTGYDALCMQPNSGAQGEYAGLLAIRHYHESRNEGHRDICLIPSSAHGYNPASAQM

SEQ ID NO: 55767 - protein, 240 aa, Enterobacter cloacae
MLSIKDLQVSVEDKAILRGLNFDVKPGEVHAIMGPNGSGKSTLSATLAGREDYEVTHGSVEFNGKDLLEMSPEDRAGEGIFMAFQYPVEIPGVTTSSFLQTALNAVRKYRGLEALDRFDFQDLMEEKIKLLKMPEDLLTRSVNVGFSGGEKKRNDILQMAVLEPELCILDETDSGLDIDALKIVADGVNSLRDGKRSFIIVTHYQRILDYIKPDYVHVLYQGRIVKSGDFTLVKQLEEQG

SEQ ID NO: 55768 - protein, 403 aa, Enterobacter cloacae
  MISC_FEATURE (76)..(76): X=any amino acid
MLTTIIYRSHICEDVPVKALEVMVAAANSKNQQSNITGILLFNGTHFFQLLEGPVEHVSAIYEQICNDPRHHNVVXLMRDHGPVRRFGNVGMELFDLRHFDRDEVLQEVLNRGTTRYQLTYNDRPLQFFRTFVEATEKANYFELPPADSWEFVREETRLSAQPEVVAKGADCSFAFQPIVDPFMQQVVSWEALLRTPDGGAPGSLLRQSAADDVYASDLQSKQVALSMASALGLQDQTLSLNLLPMTLVNIPNAVDFLLTAIEANGFVPEQIVVEFTESEAISRFDEFTDSVRQLKSAGISLTIDHFGAGFAGLQLLAQFQPDRIKINRDLVANVHKSGPRQAIIQAIIKCCASLEIQFCAVGVEKAEEWMWLESAGISQFQGHLFASPRHGGIPAIAWPEKK

SEQ ID NO: 55769 - protein, 932 aa, Enterobacter cloacae
MTLWINGDWVTGEGEERVKTNPVGKEVLWKGHDASAAQVEQACQAPRRAFPAWAKQPFAVRQEIVEKFAGLLEANKAELTRIIASETSKPRWEATTEVTAMINKIAISVKAYHTRTGEQHTEMPDGAATLRHRPHGVLAVFGPYNFPGHLPNGHIVPALLAGNTVIFKPSELTPFTGEAVVKLWEQAGLPPGVLNLVQGGRETGQALSALSDIDGLLFTGSAGTGYQLHRQLAGQPEKILALEMGGNNPLIVEDPDDIDAAVHLTIQSAFITAGQRCTCSRRLLVKRGAQGDAFLKRLVEVSARLVPAAWDADPQPFIGGLISEQAALNVLKAWQDHVARGAKTLLEPKQVQPGASLLTPGIVEMSGASNVPDEEVFGPLLCVWRYDDFDAAIAMANNTRYGLSSGLISPHREKFDRLLLEARAGIVNWNKPLTGAASTAPFGGVGASGNHRASAWYAADYCAWPMASLETPALTLPETLNPGLDFTGGIVMKAREVNFDGLVGLTHHYAGLSFGNEASTKHRFQVSNPKLAAKQGLLKMKALADAGFPQAVIPPQERPNVAVLRQLGFSGTDEQVVEKAGTQTPHLLSAASSASSMWVANAATVAPSADTLDGKVHLAVANLNNKFHRATEAETTERVLRAIFNHDAHFEVHQALPQVAMFGDEGAANHNRLGGDYGDPGLQLFIYGREEGGHAAPTRYPARQTLAASQAVARLNQVNPSQVVFAQQNPHVIDQGVFHNDVIAVSNRQVLFCHEQAFAHQEKLLATLHERVRGFTPIQVPTEAVSVQDAVETYLFNSQLLSRDDGSMMLVLPQESRDHKGVWRYLTELVKADNPIDELRVFDLRESMANGGGPACLRLRVVLTQDEMQAVNPAVMMNDTLFTRLNDWVDRYYRDRLTQADLVDPQLLREGREALDALSTILQLGSVYPFQR

SEQ ID NO: 55770 - protein, 321 aa, Enterobacter cloacae
MENLLALTLADETPEQKEGDGPSFRWRWLGRGVLELTPTVKSDLSLLLSTGIHGNETAPVEIVDLLLRALYRNEIELKCRLLVVLGNPPALAENKRYLVSDINRMFGGRWSQFPQSDETARAEWLENVVTAFFAVAGPGRWHLDLHTAIRASYHVRFGVLPQRSQPWDEAFLSWLGDAGLEALVFHQSPGGTFTHFTCERFAALACTLELGKALPFGQNDLTRFAPTDLALRALLGGTAPEHAHQPVERYRVVQQITRRSDAFQLHMAAHTLNFTPFRKGALLAEDGEERYEVQNTTEYVLFPNPTVAFGLRAGLMLEKIS

SEQ ID NO: 55771 - protein, 164 aa, Enterobacter cloacae
MRKFTALFVASTLALGATSMAFAADTATTTTAAPAEGKMMMHHKGPGMHNEMMMFKDLNLTDAQKQQIRDIRKGERDQMKRPPLEERRAMHDIIASDSFDKAKAEAQIDKMAEQHKARMLAHMETQNKIYNILTPEQKKQFNANFEKRLTERPAMEGKMPAPTE

SEQ ID NO: 55772 - protein, 90 aa, Enterobacter cloacae
MNKSQLIDKIAAGADISKAAAGRALDALIASVTESLQAGDDVALVGFGTFAVKERAARTGRNPQTGKEITIAAAKVPGFRAGKALKDAVN

SEQ ID NO: 55773 - protein, 132 aa, Enterobacter cloacae
MQTKIKVRGFHLDVYQHVNNARYLEFLEEARWDGLENSESFQWLTAHNIAFVVVNININYRRPAVLGDVLTVTSQVQQINGKSGVLSQVVTLDPEGQMVADALITFVCIDLKTQKALPLEGELREKLELMIA

SEQ ID NO: 55774 - protein, 320 aa, Enterobacter cloacae
MFKTLTRIGLAGLMALTSLAHAAEAAPESLRIGYQKGSVSMVLAKSHQLLEKRFPDTKFSWVEFPAGPQMLEALNVGSIDLGSTGDIPPIFAQAAGADLVYVGVEPPKPKAEVILVPENSDIKSVADLKGHKVAFQKGSSSHNLLLRALQEAGLKFTDIQPVYLTPADARAAFQQKDVDAWAIWDPYYSAALLQGGVRVLKDGTTLKQTGSFYLAARPYAEKNGAFIQGVLDTFTQADALTQTQRQESIALLAKTMGLPEPVIASYLNHRPPTTITPVDAHVAALQQQTADLFYQNRLVPKQVTIRERIWQPAGKEGAKS

SEQ ID NO: 55775 - protein, 595 aa, Enterobacter cloacae
MLARTDTATDKDYLDIERVIGHEYFHNWTGNRVTCRDWFQLSLKEGLTVFRDQEFSSDLGSRAVNRINNVRTMRGLQFAEDASPMAHPIRPDKVIEMNNFYTLTVYEKGAEIIRMIHTLLGEENFQKGMQLYFERHDGSAATCDDFVQAMEDASNVDLSHFRRWYSQAGTPVVTVKDDYNPETEQYTLTISQRTPPTAEQEEKYPLHIPFSIELYDNEGKVIPLQKGGHPVHHVLNVTQAEQTFIFDNVYFQPVPALLCEFSAPVKLEYKWSDQQLTFLMRHARNDFSRWDAAQSLLATYIKLNVNRHQQGQPLSLPVHVADAFRAILLDEKIDPALAAEILTLPSATEIAELFDIIDPIAIVAVREALTRTLAAELADEFLAIYNANKLDAYRVEHADIGKRSLRNTCLRYLAFGETELANTLVSKQYHEADNMTDALAALGASVAAELPCRDALMQEYDDKWHQDGLVMDKWFILQATSPAADALSNVRSLLKHRSFTLSNPNRVRSLIGAFASSNPAAFHAEDGSGYQFMVEMLTELNSRNPQVASRLIEPLIRLKRYDAKRQAKMRAALEQLKGLENLSGDLYEKIAKALA

SEQ ID NO: 55776 - protein, 861 aa, Enterobacter cloacae
MLNRITVQLPVEGLLFWKLTGREAMSESFALTLTVLGTDARIDRSKLLGQPVTVTIPTQSLLTSRYINGKITRVAVSAVELTGTRYAVYQLTVEPDLWPMKRDRNLRIFQGQTVPQIVKTLLGEHQVNVEDKLTGSYRVWDYCVQYQESSLDFISRLMELEGIAYHFRHEADKHTLVLTDAATQHQPFSGYEVIPYHQTPSGARTDEEGISQWALEDSVTPGIYSLDDYDFRKPNAWLFQAQQNPASPKPGSIDVYDWPGRFVDKGHGEFYARIRQERWQVEHQQIQATATAAGIAPGHTFTLTNAPFFSDNGEYLVTAAGYHFEENRYASGEGETIHRTDFTVIPSAVVYRPAQTTAWPRTYGPQTAKVVGPNGESIWTDKYGRVKVKFHWDRLAKGDDTSSCWVRVSSAWAGQGYGGVQIPRVGDEVVVDFINGDPDRPIITGRVYNDASMPPWALPAAATQMGFMSRTKDGSVDNANALRFEDKAGAEQVWIQAERNMDTSVKNDETHSVGGARSHYVKKNELHRVEANQTQAVKGGTEILTGKGKLDAAVEQYVIASGTKLRLVSGESAIELNANGKINLIGKEFNFFVEGDGYITTGGKLHLNTSGTKPGTTAPGSGHKGDIDAAVQAKFSPQESASRPAPAAAPAAGQSKPAPASASTTAPPLKGNYVYKNNPNSSDVMPFNDDVVKQINKSPTLQTQLKDLKDKGWAIQPGATGGGSYTDSDNKLIVMDPEHMEDTANTVQTLAHEAGHATYPVAADYSSKENFVNSQLMDEGGATLNNIKIQREILGNGGIDIDIAGSPENLKAYNAAYDKMVNGELSRVDAAKAIGKVYGKGEIASGTDLNYSDYYGGFYGK

SEQ ID NO: 55777 - protein, 477 aa, Enterobacter cloacae
MKNHSDLQELQDFLRAALCDPASPQQLAISGSDEALSWLQLSAAVTDWAQRYQRCQPVAGTPVVLYGHQQAEFAVAIYSCLLHNIPYIPVDCIYPQERLREICHLASAPYYYDVATGQFIATGEPGKVLEEQDLAYIMFTSGSTGKPKGVQIGRESVWHFMKWVSQDFSLPEKPVLMNHAVFSFDLSLIPLLANLAMGGHIVLNAKEDIQKENWLERLKSSAVSAWVSTPSFAYQQLLSPQFNSEYLPALSVFIFIGEVLNKALVKQLRRRFPQAKIINSYGPTEATIATTVVEITDAILNSDSAVLPVGVMMPESKMEISADGELIIWGKNVMRGYLGLPQENAAKLLRREDEAFRGYRTGDLGYEAGLIYCQGRNDSQVKLNGYRIEINEIENRLLAMSGINEAVVLPLMKSCGSVLRIAAFCVTDMAPDTIKTSLSKVVPHYMVPSQIIVQDALPLNPNGKIDRKLLDAYARTN

SEQ ID NO: 55778 - protein, 263 aa, Enterobacter cloacae
MTQIDRLLGIMKRLRDPENGCPWDKEQTFATIAPYTLEETYEVLDAISREDFDDLRGELGDLLFQVVFYAQMAQEEGRFNFDDICAAISDKLERRHPHIFGDATAGNSAEVLARWEQIKSAERAEKSQHSALDDIPLSLPALMRAHKIQKRCSAVGFDWTSLGPVLDKVHEEIDEVMHEAQQAVVDEAKLEEDMGDLLFATVNLSRHLGVKSETALQKANLKFERRFREVERISASRGLEMSGIDLEAMEEVWQEVKRQESDL

SEQ ID NO: 55779 - protein, 545 aa, Enterobacter cloacae
MTTNYIFVTGGVVSSLGKGIAAASLAAILEARGLNVTMMKLDPYINVDPGTMSPIQHGEVFVTEDGAETDLDLGHYERFIRTKMTRRNNFTTGRIYSDVLRKERRGDYLGATVQVIPHITNAIKERIVAGGEGHDVVLVEIGGTVGDIESLPFLEAIRQLAVDIGREHALFMHLTLVPYMAAAGEVKTKPTQHSVKELLSIGIQPDILVCRSDRAVPANERAKIALFCNVPEKAVISMKDVDSIYKIPGLLKSQGLDDYICKRFSLNCPEANLSEWEQVIYEEANPAGEVTIGMVGKYIELPDAYKSVIEALKHGGLKNRVSVNIKLIDSQDVETRGVEILKDLDAILIPGGFGYRGVEGKIATARYARENNIPYLGICLGMQVALIEFARNVAGMENANSTEFVPDCKYPVVALITEWRDEEGNVEVRTEKSDLGGTMRLGAQACQLSDDSVVRKLYGEPVITERHRHRYEVNNMLLKPIEAAGLRVAGRSGDDQLVEIIEVPNHPWFVACQFHPEFTSTPRDGHPLFAGFVKAASDYQKRQAK

SEQ ID NO: 55780 - protein, 432 aa, Enterobacter cloacae
MSKIVKVIGREIIDSRGNPTVEAEVHLEGGFVGMAAAPSGASTGSREALELRDGDKSRFLGKGVLKAVGAVNGPIAQAILGKDAKDQAGIDKIMIDLDGTENKSNFGANAILAVSLANAKAAAAAKGMPLFEHIAELNGTPGKYSMPVPMMNIINGGEHADNNVDIQEFMIQPVGAKSLKEAVRMGSEVFHNLAKVLKAKGMNTAVGDEGGYAPNLGSNAEALAVIAEAVKAAGYELGKDITLAMDCAASEFYKDGKYVLAGEGNKAFTSEEFTHFLEDLTKQYPIVSIEDGLDESDWAGFAYQTKVLGDKIQLVGDDLFVTNTKILKEGIEKGIVNSILIKFNQIGSLTETLAAIKMAKDAGYTAVISHRSGETEDATIADLAVGTAAGQIKTGSMSRSDRVAKYNQLIRIEEALGEKAPYNGRKEIKGQA

SEQ ID NO: 55781 - protein, 458 aa, Enterobacter cloacae
LEKAQRFGKSFMLPIAVLPAAGLLLGIGGALSNPNTLAAYPFLDVGWLQAIFTIMSSAGSIVFANLSVLFAVGVAVGLAKSDKGTAGLAALLAFLVMNATINALLILTGKLAHENPGAVGQGMTLGIQTLETGVFGGVVIGLVTCTLHHRFNKIALPQFLGFFGGSRFVPIISSLAAILVGALMTVIWPHFQKLIFGLGGLVDATGYLGTLLYGFILRMLGPFGLHHIFYLPFWTTALGGSEIVNGHLVEGTQRIFFAQLADPNTQHFYEGTSRFMSGRFITMMFGLLGACLAMYHTAKPENKKRIAGLLLSAALTSFLTGITEPIEFSFLFIAPVLYVIHALFDGLAFMLAHMLHITIGQTFSGGFIDFVLFGILQGEAKTNWMFVPLVGVPWFFLYYFTFRYLINRFDFATPGREKEAMANEVTLSRRKRAVAVIAGLSGKENLEEVDCCATRLRV

SEQ ID NO: 55782 - protein, 590 aa, Enterobacter cloacae
MRTEYCGQLRQSHVGQQVTLCGWVNRRRDLGSLIFIDMRDREGIVQVFFDPDRADALKLASELRNEFCIQVTGTVRARDEKNVNADMATGAIEVLASDLVIINRAEALPLDSNHVNTEEARLKYRYLDLRRPEMAQRLKTRAKITSLVRRFMDDHGFLDIETPMLTKATPEGARDYLVPSRVHKGKFYALPQSPQLFKQLLMMSGFDRYYQIVKCLRSVRLRADRQPEFTQIDVETSFMTAEQVREVMEALVRTLWNDVKGVELGDFPIMTFAEAERRYGSDKPDLRNPMELVDVADLVKGVEFAVFAGPANDPKGRVAALRVPGGAALSRKQIDDYGNFIKIYGAKGLAYIKVTERAKGLEGITSPVAKFLNADIVEAILERTGAQDGDMIFFGADNKKVVADAMGALRLKLGKDLSLTDENKWAPLWVIDFPMFEDDGEGGLTAMHHPFTSPKEMTAAELKAAPEEAVANAYDMVINGYEVGGGSVRIHSGEMQQTVFGILGINEQEQREKFGFLLDALKYGTPPHAGLAFGLDRLTMLLTGTDNIRDVIAFPKTTAAACLMTEAPSFANPAALAELGIDVVKKEEKN

SEQ ID NO: 55783 - protein, 188 aa, Enterobacter cloacae
MLTLDASKTALVVIDLQEGILPFAGGPHTADDVVNRAARLAQTCRASGASVVMVRVGWSADYAEALKQPVDAQAPARALPENWWAYPAALGKRDSDIEVTKRQWGAFYGTDLELQLRRRGIDTIILCGISTNIGVESTARNAWELGFNLVIAEDACSAASAEQHQGSMTHIFPRIGRVRSTDEIVSAL

SEQ ID NO: 55784 - protein, 568 aa, Enterobacter cloacae
KQTVAAYIAKTLEQAGVKRIWGVTGDSLNGLSDSLNKMKTIEWMPTRHEEVAAFAAGAEAQLTGELAVCAGSCGPGNLHLINGLFDCHRNHVPVLAIAAHIPSSEIGSGYFQETHPQELFRECSHYCELVSSPEQIPQVLAIAMRKAVLNRGVSVVVIPGDVALKAAPEGASTHWYHAPQPVVTPAEEELKKLAQLLRYSSNIALMCGSGCAGAHKELLEFAGKLKAPIVHALRGKEHVEYDNPFDVGMTGLIGFSSGFHTMMNADTLILLGTQFPYRAFYPTDAKIIQIDINPASIGAHSKVDMALVGDIKSTLAALLPLLEEKTDRKFLDKALSDYRDARKGLDDLAKPSDKAIHPQYLAQQISHFADDDAIFTCDVGTPTVWAARYLKMNGKRRLLGSFNHGSMANAMPQALGAKATAPERQVVAMCGDGGFSMLMGDFLSVVQMKLPLKIVVFNNSVLGFVAMEMKAGGYLTDGTELHDTNFARIAEACGITGIRVEKASEVDEALQRAFSIDGPVLVDVVVAKEELAIPPQIKLEQAKGFSLYICRAIISGRGDEVIELAKTN

SEQ ID NO: 55785 - protein, 322 aa, Enterobacter cloacae
MTMPTSQCPWRMQVHHIHQETPDVWTLSLLCHDYYPYRAGQYALVSVRNSSDTLRAYTISSTPGVSEYITLTVRRIDDGAGSQWLTRDVKRGDYIWLSDAHGDFTCDDKADDKFLLLAAGCGVTPIMSMRRWLAKNRPQADVQAIFSVRSPEDVIFAGEWRNYPVTLVADHNATHGFVPGRLSRELLQSVPDIANRTVMTCGPAPYMDIVEKEVKALGVTRFFKEQFFTPVAEAATGGVKFTKLQPAQTFFGRVGTTLLEALESNKVPVAAACRAGVCGCCKTKVVSGEYTVTSTMTLSDAEIAEGYVLACSCHPQGDLVLA

SEQ ID NO: 55786 - protein, 299 aa, Enterobacter cloacae
MFSGLLIILLPLIVGYLIPLHRESALRLINRFLSWIVYVILFFMGISLAFLDNLSANLLSILHYSVVTVVVILLCNIAALLWLERTIPWKNHHHQEKLPSRIAMALESLKLCGVVVIGFLLGLTGWAFLQHATEASEYTLIFLLFLIGIQLRNNGMTLKQIVLNRRGMMVAVIVVASSMVAGVINAFILDLPLKIGLAMASGFGWYSLSGILLTESFGPVIGSAAFFNDLARELIAIMLIPSLVRRSRSTALGLCGATSMDFTLPVLQRSGGLEMVPAAIVHGFILSLLVPVLMAFFSA

SEQ ID NO: 55787 - protein, 231 aa, Enterobacter cloacae
MFRKLAAECFGTFWLVFGGCGSAVLAAAFPELGIGFVGVALAFGLTVLTMAFAVGHISGGHFNPAVTLGLWAGGRFPAKDVIGYIVAQVVGGIIAAGVLYVIASGKAGFDAAASGFASNGFGEHSPGGYSMLSAIVIEIVLTAGFLLVIHGATDKHAPAGFAPIAIGLALTLIHLISIPVTNTSVNPARSTAVAIFQGGWALEQLWLFWVMPIIGGILGGVLYRTLLEKRD

SEQ ID NO: 55788 - protein, 513 aa, Enterobacter cloacae
MLLERVEIVGFRGINRLSLQLEQNNVLIGENAWGKSSLLDALTLLLSPEDDLYHFVRDDFWFPPGDVTGREKHLHIILTFRESEPGRHRVRRFRPLSPCWVPCDDGFHRIFYRLEGEMAENEGVLTLRDFLDEKANPIPLDNIDDLARHLTRLTPVLRLRDARFMRRIRNGTVPNTPEVEVTARELDFLARELVSRPQNLTDGQIRQGLSAMVQLLEHYFSEQGTSESRHRLMRRRSHDEQANWRYLDIINRMIDRPGGRTHRVILLGLFSTLLQAKGTVRLDRDARPLLLVEDPETRLHPIMLSVAWHLLNLLPLQRITTTNSGELLSLTPVEHVCRLVRESSRVSAFRLGPGGLNAEDGRRIAFHIRFNRASSLFARCWLLVEGETETWVINELARQCGHHFDAEGIKVIEFAQSGLKPLIKFARRMGIEWHVLVDGDEAGKKYASTVRSLLNNEREEERDHLTMLPAMDMEHFMYRQGFDDVFHRIAMVPVDVPMNMRRVIAKAIHRSSK

SEQ ID NO: 55789 - protein, 149 aa, Enterobacter cloacae
QRNVSLVEKKMKKGTVLNSEISSVISRLGHTDTLVVCDAGLPVPRSTTRIDMALTQGVPSFMQVLEVVTAEMQVEAAILAAEIKQHNPQLHETLLSYIEQLQQHQGNTIEIRYTTHEQFKQQTADSQAVIRSGECSPYANIILCAGVTF

SEQ ID NO: 55790 - protein, 622 aa, Enterobacter cloacae
MSTDNKQSLPAITLAAIGVVYGDIGTSPLYTLRECLSGQFGFGVERDAVFGFLSLIFWLLILVVSVKYLSFVMRADNAGEGGILTLMSLAGRNTSARMTSVLVIIGLIGGSFFYGEVVITPAISVLSAIEGLEIIAPQLDSWVVPLAIIVLTLLFMIQKHGTGLVGKLFAPIMLAWFLILAALGLRSIIANPEVLHALNPYWAVHFFLEYKVVSFVALGAVVLSITGVEALYADMGHFGKLPIRVAWFIVVLPSLVLNYFGQGALLLKNPEAIKNPFFLLAPDWALVPMLILATLATVIASQAVISGVFSLTRQAVRLGYLSPMRIIHTSEMESGQIYIPFVNWLLYFAVVIVIVSFEHSSNLAAAYGIAVTGTMVLTSLLSTTVAYRNWHWNKFLVAMILVGFLCIDVPLFSANLDKIVSGGWLPLTLGLVMFIVMTTWKSERFRLLRRMHEHGNSLEAMIASLEKSPPVRVPGTAVYMSRALNVIPFALMHNLKHNKVLHERVILLTLRTEDAPYVHNVRRVQIEQLSPTFWRVVASYGWRETPNVEEVFHRCGLEGLSCRMMETSFFMSHESLIIGKRPWYLRLRGKLYLILQRNALRAPDQFEIPPNRVIELGTQVEI

SEQ ID NO: 55791 - protein, 531 aa, Enterobacter cloacae
MLVTSNVTMQFGSKPLFENISVKFGGGNRYGLIGANGSGKSTFMKILGGDLEPTLGNVSLDPNERIGKLRQDQFAFEEFTVLDTVIMGHGELWEVKQERDRIYALAEMSEEDGYKVADLETQYGEMDGYSAEARAGELLLGVGIPVEQHYGPMSEVAPGWKLRVLLAQALFSNPDILLLDEPTNNLDIDTIRWLEQTLNDRDSTMIIISHDRHFLNMVCTHMADLDYGELRVYPGNYDEYMTAATQARERLLADNAKKKAQIADLQSFVSRFSANASKSRQATSRARQIDKIKLEEVKASSRQNPFIRFEQDKKLFRNALEVEALTKGFDEGPLFKNFNLLLEVGEKIAILGANGVGKSTMLKTLVGELQPDNGTVKWSENAQIGYYAQDHEYEFENDLTVFDWMSQWKQEGDDEQAVRSILGRLLFSQDDIKKPAKVLSGGEKGRMLFGKLMMEKPNILVMDEPTNHLDMESIESLNMALEMYQGTLIFVSHDREFVSSLATRVIEITPERVVDFTGNYEDYLRSKGIDG

SEQ ID NO: 55792 - protein, 308 aa, Enterobacter cloacae
MARARTRIMETKMSVQLGINPLTWTNDDLPSLGAETSLETCLSEGKEAGFAGFELGNKFPREARLLGPILQRHDLRLVSGWYSGRLLERSVEEEIAAVQSHLTLLRELGAKVLVFAEVSGCIHGEQQTPVHLRPRFPQARWKEYGEKLTEFARYTQQQGVQIAYHHHMGTVIESAEDVDNLMIHTGEAVGLLLDTGHLTFAGADPLAVAQRWASRINHVHCKDVRADVLADVKNRKTSFLDAVLSGVFTVPGDGCVDYPPIMRLLKAQDYHGWLVVEAEQDPAIAHPLTYARLGYNNLSRLARDAGLI

SEQ ID NO: 55793 - protein, 648 aa, Enterobacter cloacae
MLQFEQLISELERTGHRRLVVLSGEAQWTLTQALALRDALPGDWVRLDEHPSKAISGLLGREFRHAVFDASVGFDVAAFAALSGTLSAGSLLVLRVPPLDAWSGLPDSDSLRWSDGAEAIATPHFVHHFCRTIAADPDAIVWLQGRAFSLPPLPDAPDWQPASGAPQGEQGEILDVLQGMAEGIVAVSRRRGRGKSALAGMLLNRIAGSAVVTAPSKGATDIIARVRRERFHFMAPDALLASSRRADWLIVDEAAAIPGPLLEKLAVRFPRVLLTTTVQGYEGTGRGFLLKFCGRFTGLQRYSLSTPVRWAAGCPLERVVASALLFDDTLIDRRPEGEVRLTSLTPEAWERRPALAASVYELLCAAHYRTSPLDLRRMMDAPGQQFAVAETDPDIAGALWLVEEGGLSPELSRAVWAGYRRPRGNLVAQSLAAHGGSPLAATLRGRRVTRIAVHPHRQREGIGQALVRSASGEDYLSVSFGYTDELWRFWQQCGFVLVRMGSHREASSGCYTAMALRPQSEAGRQLCEQAKRRLKRDARVLSAWNGEKIPVEDGWEATLNNDDWLELAGFAFAHRAFSTSVAALTRLLLTVDMPLPALRGKMEGKVEDVGRKALLATLRSETAQAIESLDYPRCQQLKEDILQWQFFQ

SEQ ID NO: 55794 - protein, 441 aa, Enterobacter cloacae
MNMRFPTVITLPWRADAAEFWFARLSHLPFAMLLHSGHADHPYSRFDILVADPLKTLTTDDLSLTDDPLVQLQHAINALGLSAAPNTDLPFQGGALGLFGYDLGRRFETLPEHAQADISMPDMAVGLYDWALIVDHQKKTVSLLSHHDVQARLAWLEAQQPAPAQTFMLTSGWCSNMSAAEYAEKFARVQAYLQSGDCYQVNLAQRFQATYRGDEWQAFTRLNASNKAPFSAFVRLAQGAILSLSPERFIHLAEGTIQTRPIKGTLPRLADPDADRQQAEKLAASPKDRAENLMIVDLMRNDIGRVAEPGSVRVPELFVVEPFPAVHHLVSTITARLPASRTACDLLRAAFPGGSITGAPKVRAMEIIDELEPHRRNAWCGSIGYISLCGTMDTSITIRTLTACDGNLYCSAGGGIVADSQVDAEYQETFDKVNRILKQLE

SEQ ID NO: 55795 - protein, 192 aa, Enterobacter cloacae
MEKENLTLDDFLSRFQLLRPQVNREALNQRQAAVLIPVVRRAQPGLLLTQRSPHLRKHAGQVAFPGGAVDSSDASLIAAALREAQEEVAIPPEAVEVIGVLPPVDSVTGFQVTPVVGIIPPGLQYHASVDEVSAVFEMPLEEALRLSRYHPLDIHRRGHDHRVWLSWYQHYFVWGMTAGIIRELALQIGLKP

SEQ ID NO: 55796 - protein, 454 aa, Enterobacter cloacae
MISIFDMFKVGIGPSSSHTVGPMKAGKQFVDDLVEKGLLESVTRVAVDVYGSLSLTGKGHHTDIAIIMGLAGNMPDTVDIDAIPAFIRDVETRGRLLLANGQQEVDFPQDDGMRFRSDNLPLHENGMTIHAYSGEKEIYSKTYYSIGGGFIVDEEHFGKDSVGDVSVPYPFKSATEMLGYCKETGLSLSGMVMQNELALHSKKEIEDYFANVWQTMRACIDRGMNTEGVLPGPLRVPRRASALRRMLVTTDKFSNDPMNVVDWVNMFALAVNEENAAGGRVVTAPTNGACGIVPAVLAYYDHFIEPVTPDIYIRYFLAAGAIGALYKMNASISGAEVGCQGEVGVACSMAAAGLAELLGASPEQVCVAAEIGMEHNLGLTCDPVAGQVQVPCIERNAIASVKAINASRMAMRRTSEPRVSLDKVIETMYETGKDMNAKYRETSRGGLAIKVQCD

SEQ ID NO: 55797 - protein, 146 aa, Enterobacter cloacae
MGLFNFVKEAGEKLWDNLTDHKGQSDKITEHLKKLNIPGSDKVQVNVTDGKASVTGDGLTQEQKEKIQVAVGNIAGVSEVENNITATDAKDEATYYTVKSGDTLSAISKTVYGDANKYNKIFEANRPMLSSPDKIYPGQTLRIPKA

SEQ ID NO: 55798 - protein, 248 aa, Enterobacter cloacae
DKTYCGFIAIVGRPNVGKSTLLNNLLGQKISITSRKAQTTRHRIVGIHTEGAYQAIYVDTPGLHMEEKRAINRLMNKAASSSIGDVELVIFVVEGTRWTPDDEMVLNKLRDGKTPVILAVNKVDNVQEKADLLPHLQWLGSQMNFLDIVPLSAETGLNVDTIAGIVRKHLPEAIHHFPEEYITDRSQRFMASEIIREKLMRFLGAELPYSVTVEIERFQTNERGGYDINGLILVEREGQKKMVIGNKG

SEQ ID NO: 55799 - protein, 324 aa, Enterobacter cloacae
MANMFALILVIATLVTGLLWCLDKFIFAPKRRERQAAAQAATGDGIDAKTLKKVGPKPGWLETGASVFPVLAIVLVVRSFIYEPFQIPSGSMMPTLLIGDFILVEKFAYGIKDPIYQKTLIETGHPKRGDIVVFKYPEDPRLDYIKRAVGLPGDKVTYDPVAKEVTVQPGCSSGTACENALPITYSNVEPSDFVQTFARRNGGEATSGFFQVPKGETKEDGIRLVERKETLGDVTHRILTVPIAQDQLGMYYRQPGQQLASWIVPPGHYFMMGDNRDNSADSRYWGFVPEANLVGKATAIWMSFEKQEGEWPTGVRLNRIGGIH

SEQ ID NO: 55800 - protein, 144 aa, Enterobacter cloacae
MSNYVYSPKNNAFYAVSLKDAYEMAGSWPDDSSDISDEMFIEFTASAPEGKVRVAGDDGMPVWADIPPKTPEQLQVQAEKEQQHLLNTASVITEDWRTELALGIISNDDKAKLTAWMGYIKQVKSVKIEEAKEPGFSWPEQPAM

SEQ ID NO: 55801 - protein, 634 aa, Enterobacter cloacae
MIVFSSLQIRRGVRVLLDNATATINPGQKVGLVGKNGCGKSTLLALLKNEISADGGNFTFPGNWQLAWVNQETPALSEPALDYVIDGDREYRKLEAELHSANERNDGHAIATVHGKLDAIDAWTIRSRASSLLHGLGFSNEQLERPVSDFSGGWRMRLNLAQALICRSDLLLLDEPTNHLDLDAVIWLEKWLKSYQGTLILISHDRDFLDPVVDKIIHIEQQTMFEYTGNYSSFERQRATRLAQQQSMYESQQQRVAHLQSFVDRFKAKASKAKQAQSRIKMLERMEMIAPAHVDNPFHFSFREPESLPNPLLKMEKVSAGYADRIILDSIKLNLVPGSRIGLLGRNGAGKSTLIKLLAGELNPVSGEIGLAKGIKLGYFAQHQLEFLRADESPIQHLARLAPQEMEQKLRDYLGGFGFQGDKVTENTERFSGGEKARLVLALIVWQRPNLLLLDEPTNHLDLDMRQALTEALIEFEGALVVVSHDRHLIRSTTDDLYLVHGGKVEPFDGDLEDYQQWLTDVQKQENQPEESAKDNANSAQARKDQKRREAELRTQTQPLRKEITRLEKEMEKLNATLAIVEEKLGDSGLYDQSRKAELTDCLQTQAKTKSSLEECEMAWLDAQEQLEAMLQAD

SEQ ID NO: 55802 - protein, 222 aa, Enterobacter cloacae
MAENLFPHLKWDQLWAATLETLYMTALSGVATFVLGIVLGLALFLTARGGLFHNRTVYSVISIVVNVFRSIPFIILIVLLIPFTKTVVGTILGANAALPALIMGAAPFYARLVEIALREVDKGVIEATRSMGARLSTLVFRVLLPESSPALVSGITVTLIALVSYSAMAGVIGAGGLGNLAYLEGFQRNHGDVTLVATVTILIIVFIIQFCGDVITSLLDKR

SEQ ID NO: 55803 - protein, 258 aa, Enterobacter cloacae
MPALDWQGVLTGQPLQWILSGFLTTLWVTLAGMLLASLLALLFMLLRLSGGRPGNAVVSSWVSLFRNTPLLVQLLFWYFAAWNGLPQAFRDAVNADHSWSILPGNVWWFTPEFLCSAWGLGVFTSAFLIEEVESGLRSVPAGQREAALAQGFSAWRLFRYILLPQGLANAWQPVVGQYLNLMKLSSLASGIGFAELTYQVRQIESYNAHALEAFTLGTALYLLTGLVMGIVLVRIGPDAKRKRPGVATTGSEKHDCRT

SEQ ID NO: 55804 - protein, 270 aa, Enterobacter cloacae
MKKTLTLIAAATLSALSFASWADTLTVGASNTPHAEILEQAKPILAKQGIDLEIKPFQDYILPNTALAGHDIDANYFQHIPYLNSVLKDHAGDKDYDFVSAGAIHIEPIGIYSKKYKSLKDLPEGGKIIMRDAVSEEGRILSIFEKEGVIKLKPGIDKVTARISDIVENPKKLKFTPNVEASLLPQMYNNNEGDAVVINANYAIDAGLDPVHDPIAVESGENNPYANIITVHRGDEKKKDIVALVNVLHSKEIQDWIRTKYKGAVIPVNN

SEQ ID NO: 55805 - protein, 132 aa, Enterobacter cloacae
MTWEYALIGLVVGIVIGAVAMRFGNRKLRQQQSLQYELEKNKAELEEYREELVSHFARSAELLDNMATDYRQLYQHMAKSSSSLLPEMTAETNPFRNRLADSEAGNDQAPVQMPRDYSDGASGLLRGGVKRD

SEQ ID NO: 55806 - protein, 455 aa, Enterobacter cloacae
MKKKNQLLSAIALSVGLSLSASVPVFAAIPSQVPGQAAIPSLAPMLEKVLPAVVSVQVEGTAVQSQRVPEELKKYFGDESPDQQAHPFEGLGSGVIIDAAKGYILTNNHVISQADKISVQLNDGREFDAKLIGGDDQSDIALLQVQNPSNLTQIAIADSDKLRVGDFAVAVGNPFGLGQTATSGIVSALGRSGLNLEGLENFIQTDASINRGNSGGALLNLNGELIGINTAILAPGGGSIGIGFAIPSNMAKTLAQQLIQFGEIKRGLLGIKGMEMSADIAKAFNINVQRGAFVSEVLPNSGSAKAGVKSGDVIVSLNDKPLNSFAELRSRIATTEPGAKVKLGLIRDGKPLDVEVTLDKSTSSSASAELIAPALQGATLSDGQLKDGTKGISIDTVEKSSPAAQAGLHQDDVIIGVNRNRVQSIAELRKVLESKPAVIALQVMRGNESIYILLR

SEQ ID NO: 55807 - protein, 878 aa, Enterobacter cloacae
MSDLAREITPVNIEEELKSSYLDYAMSVIVGRALPDVRDGLKPVHRRVLYAMNVLGNDWNKAYKKSARVVGDVIGKYHPHGDTAVYDTIVRMAQPFSLRYMLVDGQGNFGSVDGDSAAAMRYTEIRMSKIAHELMADLEKETVDFVDNYDGTERIPDVMPTKIPNLLVNGSSGIAVGMATNIPPHNITEVINGCLAYIDDEDISIEGLMEHIPGPDFPTAAIINGRRGIEEAYRTGRGKIYIRARAEVEADAKTGRETIIVHEIPYQVNKARLIEKIAELVKEKRVEGISALRDESDKDGMRIVIEIKRDAVGEVVLNNLYSQTQLQVSFGINMVALHHGQPKIMNLKEILSAFVRHRREVVTRRTIFELRKARDRAHILEALAVALANIDPIIELIRRAPTPAEAKAALVSRPWDLGNVAAMLERAGDDAARPEWLEPEFGVRDGQYYLTEQQAQAILDLRLQKLTGLEHEKLLDEYKELLEQIAELLHILGSAERLMEVIREELELVRDQFGDARRTEITANSSDINIEDLINREDVVVTLSHQGYVKYQPLTDYEAQRRGGKGKSAARIKEEDFIDRLLVANTHDTILCFSSRGRLYWMKVYQLPEASRGARGRPIVNLLPLEANERITAILPVREYEEGVNVFMATASGTVKKTALTEFSRPRSAGIIAVNLNEGDELIGVDLTSGSDEVMLFSAAGKVVRFKENAVRAMGRTATGVRGIKLAGEDSVVSLIIPRGEGAILTVTQNGYGKRTAEGEYPTKSRGTQGVISIKVTERNGSVVGAVQVDDADQIMMITDAGTLVRTRVSEISVVGRNTQGVILIRTAEDENVVGLQRVAEPVDDEELDSIDGSVAEGDDDIAPEADTDDDVADDADE

SEQ ID NO: 55808 - protein, 376 aa, Enterobacter cloacae
MAYTTFSQTKNDQLKEPMFFGQPVNVARYDQQKYDIFEKLIEKQLSFFWRPEEVDVSRDRIDYQSLPDHEKHIFISNLKYQTLLDSIQGRSPNVALQPLISIPELETWVETWAFSETIHSRSYTHIIRNIVNDPAVVFDDIVTNEQIQKRAEGIAHYYDELIEMTSYWHLLGEGTHNVNGKTITVNLRALKKQLYLCLMSVNALEAIRFYVSFACSFAFAERKLMEGNAKIIRLIARDEALHLTGTQHMLNLLRSGTDDPEMAEIAEECKQECYDLFVLAAQQEKEWADYLFRDGSMIGLNKDILCQYVEYITNIRMQAVGLDLPFQTRSNPIPWINTWLVSDNVQVAPQEVEVSSYLVGQIDSEVNTDDLSNFQL

SEQ ID NO: 55809 - protein, 160 aa, Enterobacter cloacae
MTKKKAHKPGSATIALNKRARHEYFIEEEFEAGLALQGWEVKSLRAGKANIGDSYVILKDGEAFLFGANFTPLTVASSHYVCDPTRTRKLLLNKRELESLYGRINREGFTVVALSLYWKNAWCKVKVGVAKGKKQHDKRTDLKEREWQLDKARIMKNAGR

SEQ ID NO: 55810 - protein, 288 aa, Enterobacter cloacae
MQRLEQASRNVILLLFLIKTTVDAYMPVFALIALVAYSVSLALIVPGLLQKNSGWRRMAILSAVIALISHAFALESRIIPGDGSVQNLSVLNVGSLVSLMICTVMTIVASKNRGWLLLPIVYTFALINLALATFMPNEFITHLEATPGMLVHIGLSLFAYATLIIAALYAMQLAWIDYQLKNKKLAFNHEMPPLMVIERKMFHITQVGVVLLTLTLCTGLFYMKNLFSVENIDKAVLSIIAWFVYIVLLWGHYHEGWRGRRVVWFNVAGAGILTLAYFGSRFIQQFAG

SEQ ID NO: 55811 - protein, 268 aa, Enterobacter cloacae
MLYRWLCSKGYEVMVEQQIAQELQLKSVKTGTLAEIGQQADLAVVVGGDGNMLGAARTLARYDIKVIGINRGNLGFLTDLDPDNAQQQLADVLEGHYISEKRFLLEAQVCQQDCQKRISTAINEVVLHPGKVAHMIEFEVYIDEIFAFSQRSDGLIISTPTGSTAYSLSAGGPILTPSLDAITLVPMFPHTLSARPLVINGDSTIRLRFSHRRNDLEISCDSQIALPIQEGEDVLIRRCDYHLNLIHPKDYSYFNTLSSKLGWSKKLF

SEQ ID NO: 55812 - protein, 274 aa, Enterobacter cloacae
MQQLQNVIESAFERRAEITPANVDTVTREAVNQVISLLDSGALRVAEKIDGQWVTHQWLKKAVLLSFRINDNQVIDGAESRYFDKVPMKFADYDEARFQKEGFRVVPPAAVRQGAFIARNTVLMPSYVNIGAYVDEGTMVDTWATVGSCAQIGKNVHLSGGVGIGGVLEPLQANPTIIEDNCFIGARSEVVEGVIVEEGSVISMGVYIGQSTRIYDRETGEVHYGRVPAGSVVVSGNLPSKDGKYSLYCAVIVKKVDAKTRGKVGINELLRTID

SEQ ID NO: 55813 - protein, 385 aa, Enterobacter cloacae
MAGWHLDTKMAQDIVARTMRIIDTNINVMDARGRIIGSGDRERIGELHEGALLVLSQGRVVDIDDAVAKHLHGVRQGINLPLRLEGEIVGVIGLTGEPESLRKYGELVCMTAEMMLEQSRLMHLLAQDSRLREELVMNLIQAEEHTPALSEWAQRLGIDLNQPRVVAVIEVDSGQLGVDSAMAELQQLQNALATPERDNLVAIVSLTEMVVLKPALNQFGRWDADDHRRRVEQLISRMEENGQLRFRVALGNYFTGPGSIARSWRTARTTMMVGKQRMPESRSYFYQDLMLPVLLDSLRGGWQANELARPLARLKAMDNNGLLRRTLQAWFRHNVQPLATSKALFIHRNTLEYRLNRISELTGLDLGNFDDRLLLYVALQLDEQR

SEQ ID NO: 55814 - protein, 478 aa, Enterobacter cloacae
MKKTTLAMSALALSLGLALSPLTATAAETASSAATAQQMPSLAPMLEKVMPSVVSINVEGSTTVNTPRMPRNFQQFFGDNSPFCQDGSPFQSSPFCQGGGAGDDSQGGGQQQKFMALGSGVIIDAAKGYVVTNNHVVDNANSIKVQLSDGRKFDAKVVGKDPRSDIALIQIQDPKNLTAIKIADSDALRVGDYTVAIGNPFGLGETVTSGIVSALGRSGLNAENYENFIQTDAAINRGNSGGALVNLNGELIGINTAILAPDGGNIGIGFAIPSNMVKNLTSQMVQYGQVKRGELGILGTELNSELAKAMKVDAQRGAFVSQVMPNSSAAKAGIKAGDVITSLNGKPISSFAALRAEVGSMPIGSKVTLGLLRDGKPVNVSLELQQSSQNQVDSSTIFSGIEGAEMSNKGADKGVVVNNVKANSPAARIGLKKGDVIMGANQQPVKNIAELRKILESKPSVLALNIQRGDTSLYLLMQ

SEQ ID NO: 55815 - protein, 326 aa, Enterobacter cloacae
MLDYAHRQHRSDKRRLFLLVLLLIVAAGVSLCAGDRWIGPESWWGPDGQLFVWQIRLPRTVAVVLVGAALALCGTIMQALFDNPLAEPGLLGVSNGAGVGLIAAVMLGGGELSGWSISLSAILGALLITAILLRFARRHLSTSRLLLAGVALGIICSALMTWAVYFSTSFDLRQLMYWMMGGFGGVDWHQGWLMVLLVPVIVWATLQAQPLNMLALGETSARQLGMPIGFWRNVLVIAIGWLVGVSVALAGAIGFIGLVIPHMLRLCGLTDHRTLLPASAVAGAVTLLVADIIARLALTAAELPIGVVTATLGAPVFIWLLLKAGR

SEQ ID NO: 55816 - protein, 238 aa, Enterobacter cloacae
MIITLDNAYQSELLLLPARNSAGELKGLEVLVNFTGVGSDVRIPTELVIPRLSAAEELVLFNEKLQLLDTCKLFFIQHQLIAWINITPAIVEFLLSNGNAVSILERYPFLEFTVNENYPGLNNGKDDLQLARMAIHFPLVLANFGAGAASLKAVYDGLFKRVILDKGFIQQRAPELSFEPFMRAILWQITPHCQSVIVSGIDDHGLLQRVLSFNVGAMQGALWPAVSAEHVTSLVQQR

SEQ ID NO: 55817 - protein, 356 aa, Enterobacter cloacae
MQKLINSVQNYAWGSKTALTDLYGIANPNNLPMAELWMGAHPKSSSKIEDASGQVRSLRDVIDADKAALLGDKVAQRFGELPFLFKVLCADQPLSIQVHPNKKASEIGFAKENAAGIPLDAAERNYKDPNHKPELVFALTPFLAMNAFREFSEIVSLLQPVAGAHKAIAHFLENPNADALSQLFASLLNMQGEEKSHALAVLKAALGSQQGEPWETIRLISEFYPDDSGLFSPLLLNVVKLNPGEAMFLFAETPHAYLQGVALEVMANSDNVLRAGLTPKYIDIPELVANVKFVAKPAAELLTQPVKNGAELDFPIPVEDFAFSLHDLSQAETAIAQESAAILFCAEGEATVRKGE

SEQ ID NO: 55818 - protein, 231 aa, Enterobacter cloacae
MGRATLLAVLAALGVYLLVTLLSLGVVARPELAEMRNPSMAGLMVKMLGPWGDVVIAAGLIVSVCGAYLSWTIMAAEVPFLAATHKAFPRLFARQNQNSAPSASLWLTNISVQVCLVLIWLTGSDYNTLLTIASEMILVPYFLVGAYLLKIATRPAHYVVGVGACIYGLWLLYASGPMHLLLSVVLYAPGLLVFIYARRTHQLENALKRREMALIGLLLVAALPATWMLMG

SEQ ID NO: 55819 - protein, 171 aa, Enterobacter cloacae
  MISC_FEATURE (163)..(163): X=any amino acid
LATDVSRFLRYLGVERQLSPITLLNYQRQLDAIMQIADEIGLKSWQQCDAATVRGFVVRTRKKNLSPASLALRLSALRSFFDWLVNQGGLKANPAKGIATPKAPRHLPKNIDVDDVNRLLDIDLNDPLAVRDRAMLEVMYGAGLRLSELVNLDIKHLDLESGXVWVMGKGS

SEQ ID NO: 55820 - protein, 320 aa, Enterobacter cloacae
MIMTVTSMLDNVLRIATRQSPLALWQAHYVKQRLEACHSGLRVELVPMVTRGDVILDTPLAKVGGKGLFVKELELALLENRADIAVHSMKDVPVEFPEGLGLVTICEREDPRDAFVSNHYDSLDALPEGSVVGTSSLRRQCQLAERRPDLIIRSLRGNVGTRLGKLDNGDYDAIILAVAGLKRLGLESRIREALPPELSLPAVGQGAVGIECRLDDARTRELLAPLNHDETAIRVKAERAMNTRLEGGCQVPIGSYAELTEGELWLRALVGAPDGSQMVRGERRGKAQDAEQLGVSLAEELLDNGAREILADVYNGEPPA

SEQ ID NO: 55821 - protein, 261 aa, Enterobacter cloacae
MTFKESCSDNSPNPDSDYYHSPSTSFIKGFTMRILLQVLLCIPVIASTFCHAAGIQIGRTRIIYDAAKKEVALPLQNNDKELPWLIQSWTDTGDGKTHGPFIVTPPLFRLDPQKEQSLRITWNGTALAGDKESLFYMNVRTVPATATDEGDKNVLRLIYKTRLKLFWRPVGLSGTPSETCKNLRFARHGQQLTVINAGAFYSVFDSLALGSHKVEKADMAAPKSRVDIPLPDNAQGTSVTWRCITDYGNASEKYTSTLAQD

SEQ ID NO: 55822 - protein, 846 aa, Enterobacter cloacae
MMTGRIDLSYGRLFRLNPLLRCLGGVLLMASFSTLAREYRFSPSSLEGDMLAQQDIDLSLFSKSNAQLPGTYSSRVQVNERRLSTTNIAYVSSPEGSLIPQLTPDMLRAWGIAIDRYPALLALPANKALPKDISNYIPQASARLDFSTMTLALSIPQAALSGTGHDYIDPSRWDDGVPVLFSDYAFSGSKNKDSGVSSATSQYLNLRTGANLGGWRVRNYSTWSNSESENQWENINTFLQHDVDALKAQFTAGESSTRGEVFDSLQYRGVNLASDEEMLPYSQRGYAPVIRGIASSNAEISVRQNGYLIYQQNVAPGAFEINDLYSTTNSGDLDVTVKEADGTEHRFTQPYSSIAVMLRPGRMKYEMTAGRYRAESGSDQKEPDFFQGSMIYGLNNLLTWFGGLTLSKDYNAANTGAGLALGPLGSLSADVTLADTRLDDNSQHTGQSWRLLYTGKLDSTNTNFSLGSYRYSSRGYYSFTDANQKRDGHEDDLLFRYHKRNRIQASVSQTVAGVSLYLNGYQQDYWGTSKKECSLSVGLNTVVAGTSYHVAYTYSKTNDEESDRMVSLGFSIPLARWLPRAWSSYNISNTKNGYTRQNVGLSGTLLDDERLSYSLQQSHSNHDGEDISSVYCSYRSQYANLNAGYYASTDDSQQLNYGISGGIVAHPQGVTLAQPLGSQFAIVNANDASGVRFLNQRGIQTDWQGNAVIPSLTPYQENNIRIDTASLPENVDSSDTAITVIPSRNAAVLARFDAHTGYRMLITLKRPNGLPVPFGAIATSSDPVMSGIVDETGTVYLAGIGETAQITVKWGNGTGQQCRASITQQSANQTESPNGIRSVSELCQQE

SEQ ID NO: 55823 - protein, 214 aa, Enterobacter cloacae
MLQPAMKPVEEHSPSDIIVRIGSLTRMLRDSLRELGLDQAIAEAAEAIPDARDRLDYVVQMTAQAAERALNSVEASQPHQDAMEKGAKALSKRWDEWFENPIELADARELVTDTRQYLGDVPGHTSFTNAQLLDIMMAQDFQDLTGQVIKRMMDVIQEIERQLLMVLLENIPEPAARPKRENENLLNGPQLDASKAGVVASQDQVDDLLDSLGF

SEQ ID NO: 55824 - protein, 129 aa, Enterobacter cloacae
IADKELKFLVVDDFSATRRIVRNLLKELGFNNVEEAEDGVDALNKLQAGGFGFVISDWNMPNMDGLELLKTIRADAGMASMPVLMVTAEAKKENIIAAAQAGASGYVVKPFTAATLEEKLGKIFEKLGM

SEQ ID NO: 55825 - protein, 465 aa, Enterobacter cloacae
MAKTLYEKLFDAHVVYEAPNETPLLYIDRHLVHEVTSPQAFDGLRAHKRPVRQPGKTFATMDHNVSTQTKDINASGEMARIQMQELIKNCNEFGVELYDLNHPYQGIVHVMGPEQGITLPGMTIVCGDSHTATHGAFGALAFGIGTSEVEHVLATQTLKQGRAKTMKIEVKGKAAPGITAKDIVLAIIGKTGSAGGTGHVVEFCGEAIQALSMEGRMTLCNMAIEMGAKAGLVAPDETTFNYVKGRLHAPKGQNFDDAVAYWKTLKTDDGAAFDTVVTLQAEEIAPQVTWGTNPGQVISVNDNIPDPASFTDPVERASAEKALAYMGLKPGVPLTDVAIDKVFIGSCTNSRIEDLRAAAEIAKGRKVAPGVQALVVPGSGPVKAQAEAEGLDKIFIEAGFEWRLPGCSMCLAMNNDRLNPGEACASTSNRNFEGRQGRGGRTHLVSPAMAAAAAVTGHFADIRSL

SEQ ID NO: 55826 - protein, 271 aa, Enterobacter cloacae
MAFKLKTFAAVGALIGSLALVGCGQDEKDPNHIKVGVIVGAEQQVAEVAQKVAKEKYGLDVELVTFNDYVLPNEALSKGDIDANAFQHKPYLDQQIKDRGYKLVGVGNTFVYPIAGYSKKIKSLDELQPGSQVAVPNDPTNLGRSLLLLQKVGLIKLKDGVGLLPTVLDVTENPKNLKIVELEAPQLPRSLDDAQIALAVINTTYASQIGLTPAKDGIFVEDKDSPYVNLIVTREDNKDAENVKKFVQAYQSDEVYQEANKVFNGGAVKGW

SEQ ID NO: 55827 - protein, 217 aa, Enterobacter cloacae
MSEPMMWLLVRGVWETLAMTFVSGFFGFVIGLPVGVLLYVTRPGQIIENAKLYRTLSALVNIFRSIPFIILLVWMIPFTRVIVGTSIGLQAAIVPLTVGAAPFIARMVENALLEIPTGLIEASRAMGATPMQIVRKVLLPEALPGLVNAATITLITLVGYSAMGGAVGAGGLGQIGYQYGYIGYNATVMNTVLVLLVVLVYLIQFSGDRIVRAVTHK

SEQ ID NO: 55828 - protein, 571 aa, Enterobacter cloacae
MRTSQYLLSTLKETPADAEVISHQLMLRAGMIRKLASGLYTWLPTGVRVLKKVENIVREEMNNAGAIEVSMPVVQPADLWQESGRWEQYGPELLRFVDRGERPFVLGPTHEEVITDLIRNELSSYKQLPLNFFQIQTKFRDEVRPRFGVMRSREFLMKDAYSFHTSQESLQETYDAMYAAYSKIFSRMGLDFRAVQADTGSIGGSASHEFQVLAQSGEDDVIFSDSSDYAANIEFAEALAPKEPRGAATQEMTLVDTPNAKTIAELVEQFNLPVEKTVKTLLVKSTEGSAYPLVALLVRGDHELNEVKAEKLPQVASPLTFATEAEIRAVVNAGPGSLGPVNLPVPVVIDRTVAAMSDFSAGANIDGKHYFGINWDRDVATPEVADIRNVVAGDPSPDGQGTLMIKRGIEVGHIFQLGDKYSRALNAAVQGEDGRNQILTMGCYGIGVTRVVAAAIEQNYDERGIVWPDNIAPFQVAILPMNMHKSYRVQELAEKLYARLRETGIEVLMDDRKERPGVMFADMELIGIPHTVVIGDRNLDSDEIEYKYRRSGEKQMIKTGDILDYLVKAIK

SEQ ID NO: 55829 - protein, 235 aa, Enterobacter cloacae
MSAFQFEQIGVIHSPYKEKFAVPRQPGLVTSGSGELHLIAPYNQADAVRGLEAFSHLWVVFVFHQTMEGGWRPTVRPPRLGGNARMGVFATRSTFRPNPVGMSLVELKGIRCQKDQVILELGSLDLVDGTPVIDIKPYLPFAEALPDARASYAQDAPQGIMPVYFTPEITAQSGQLEKRYPRLRDFITEVLAQDPRPGYRKKKEEGKTYAVWLLDFNVRWRVTGAGFEVFALEPR

SEQ ID NO: 55830 - protein, 382 aa, Enterobacter cloacae
MVDSRPLTIALVAGETSGDILGAGLIRALKARVPNARFVGVAGPLMQAEGCEAWYEMEELAVMGIVEVLGRLRRLLHIRADLTRRFTELKPDVFVGIDAPDFNITLEGNLKKQGIKTIHYVSPSVWAWRQKRVFKIGRSTNLVLAFLPFEKAFYDRFNVPCRFIGHTMADAMPLDPDKNAARDALGIPHDVHCLALLPGSRGAEVEMLSADFLKTAQILRQTYPDLEVVVPLVNAKRRDQFERIKAEVAPDLHVRLLDGKGREAMYASDAALLASGTAALECMLAKCPMVVGYRMKPFTFWLAKRLVKTDYVSLPNLLAGRELVKELLQDECQPQRLARALLPLLANGKTSHQMHDTFRELHQLIRCNADEQAADAVLELAK

SEQ ID NO: 55831 - protein, 198 aa, Enterobacter cloacae
MMEFVYPHTRLVAGVDEVGRGPLVGAVVTAAVILDPDRPIIGLNDSKKLSEKRRLALFSEIQEKALAWSLGRAEPHEIDELNILHATMLAMQRAVAGLKISPEYVLIDGNRCPALPMPSMAVVKGDSRVAEISAASIIAKVTRDAEMAALDLTYPQYGFAQHKGYPTPFHLERLAEHGATEHHRRSFGPVKRALGRVS

SEQ ID NO: 55832 - protein, 1160 aa, Enterobacter cloacae
MAEPRFVHLRVHSDYSMIDGLAKTGPLVKKAASLGMPALAITDFTNLCGLVKFYGTAHGAGMKPIVGADFHVQSDLIGDEMTQISVLAMNNTGYQNLTLLISKAYQRGYGALGPWIDRDWLAELNEGLLLISGGRMGDVGKCLLRGNSALVDQCVSFYEEYFPNRYYLELIRTGRQDEESYLHAAVALAEERGLPVVATNDVRFLEAGDFDAHEIRVAIHDGFTLDDPKRPRNYSAQQYMRSEEEMCELFSDIPEALENSVEIAKRCNVTVRLGEYFLPQFPTGDMTTEDFLVAKSKEGLEERLEFLFPDEEERKKRRPEYDERLDIELQVINQMGFPGYFLIVMEFIQWSKDNGVPVGPGRGSGAGSLVAYALKITDLDPLEFDLLFERFLNPERVSMPDFDVDFCMEKRDQVIEHVADMYGRDAVSQIITFGTMAAKAVIRDVGRVLGHPYGFVDRISKLVPPDPGMTLAKAFEAEPQLPEIYEADEEVKALIDMARKLEGVTRNAGKHAGGVVIAPTKITDFAPLYCDEAGQHPVTQFDKNDVEYAGLVKFDFLGLRTLTIINWALEMINARREKNGEPPLDIAAIPLDDKKSFDMLQRSETTAVFQLESRGMKDLIKRLQPDCFEDMIALVALFRPGPLQSGMVDNFIDRKHGREEISYPDVQWQHESLKPVLEPTYGIILYQEQVMQIAQVLSGYTLGGADMLRRAMGKKKPEEMAKQRSIFEDGAKKNGVDGELAMKIFDLVEKFAGYGFNKSHSAAYALVSYQTLWLKAHYPAEFMAAVMTADMDNTEKVVGLVDECWRMGLKILPPDINSGLYHFHVNDDGEIVYGIGAIKGVGEGPIEAIIEARNNGGYFRELFDLCARTDTKKLNRRVLEKLIMSGAFDRLGPHRAALMNSLGDALKAADQHAKAEAIGQADMFGVLAEEPEQIEQSYSNCQPWPEQVVLDGERETLGLYLTGHPINQYIKEIERYVGGHRLKDMHPTERGKITTAAGLVIAARVMVTKRGNRIGICTLDDRSGRLEVMLFTDALDKYQQLLEKDRILIVSGQVSFDDFSGGLKMTAREVMDIDEAREKYARGLAISLTDRQIDDQLLNRLRQSLEPHRSGTIPVHLYYQRADARARLRFGATWRVSPSDRLLNDLRGLIGSEQVELEFD

SEQ ID NO: 55833 - protein, 319 aa, Enterobacter cloacae
MSLNFLDFEQPIAELEAKIDSLTAVSRQDEKLDINIDEEVHRLREKSVELTRKIFADLGAWQVAQLARHPQRPYTLDYVRLAFDEFDELAGDRAYADDKAIVGGIARLDGRPVMIIGHQKGRETKEKIRRNFGMPAPEGYRKALRLMEMAERFNMPIITFIDTPGAYPGVGAEERGQSEAIARNLREMSRLKVPVICTVIGEGGSGGALAIGVGDKVNMLQYSTYSVISPEGCASILWKSADKAPLAAEAMGIIAPRLKELKLIDSIIPEPLGGAHRKPEVMAASLKAQLLADLADLDVLSKDDLLNRRYQRLMTYGYA

SEQ ID NO: 55834 - protein, 256 aa, Enterobacter cloacae
MTLPAIAQAVSPYRQLLVGFSGGLDSTVLLHRLKLWRDREPDVQLRAMHIHHGLSPHAEAWVAHCEALCAAWAIPLIVERVTLAEEGLGIEAQARKARYAAFAGALRAGEALVTAQHLDDQCETFLLALKRGSGPAGLSAMPARSEFAGTTLLRPLLGETRASLEAWAREHQLNWIEDESNQDDGYDRNFLRLRVLPLLGERWPHFADAAARSAMLCDEQELLLDELLSDELAGLISATGVPIAPMKATSPVRRAA

SEQ ID NO: 55835 - protein, 84 aa, Enterobacter cloacae
MKRVIVAGTILLLAGCSINRQAEVSSRDAPNGIVRLDYGQAALQNAYSDEYVNNGTAAKACQSMGYATASAYGQPIKTCTLTSG

SEQ ID NO: 55836 - protein, 504 aa, Enterobacter cloacae
MRQSDPYLSFRGIGKTFPGVNALTDISFDCYAGQVHALMGENGAGKSTLLKILSGNYAPTTGTLAIRGEEVAFADTTAALNAGVAIIYQELHLIPEMTVAENIYLGQLPHKGGVVNRSLLNYEAGLQLKHLGLDVDPQTPLKYLSIGQWQMVEIAKALARNARIIAFDEPTSSLSAREIENLFRVIRELRQEGRTILYVSHRMEEIFALSDAITVFKDGRYVRTFTDMQQVNHDQLVQAMVGRELGDIYHWQPRQYGPERLRLDSVKAPGVRTPISLSVRSGEIVGLFGLVGAGRSELMKGLFGGTRITEGQVSIDGERVDIQKPAHAIRAGMMLCPEDRKAEGIIPVHSVRDNINISARRKFIRAGCLINDGWESSNADHHIRSLNIKTPGPEQLIMNLSGGNQQKAILGRWLSEDMKVILLDEPTRGIDVGAKHEIYNVIYELAKRGVAVLFASSDLPEVLGVADRIVVMREGEIAGELLHEQANEQQALNLAMPKVSQAVA

SEQ ID NO: 55837 - protein, 167 aa, Enterobacter cloacae
MATQTMMQKLNAQMNLEFYASNLHLHLSAWCAENSLTGSATFFRSQAQSNVTHMMRVFNFLKAAGANPVVKALDGINENYSCLEELFQKTLEEYEQRCSTLSKLADEAKAQQDITTLKFLRDMDKEQQQDGMLLKTLADEIHHAQQAGLCPEQTDRHLLDIVAVQHH

SEQ ID NO: 55838 - protein, 281 aa, Enterobacter cloacae
MNQPKRLMVMAGGTGGHVFPGLAVAHHLMDQGWQVRWLGTADRMEADLVPKHGIEIDFIRISGLRGKGLKAMLLAPVRIFNAWRQARTIMKRFKPDVVLGMGGYVSGPGGLAAWSLGIPVVLHEQNGIAGLTNKWLAKIATKVMQAFPGAFPKADVVGNPVRVDVLALPLPDARLTGREGPVRVLVVGGSQGARILNQTMPQVAAKLGDTVTIWHQSGKGAQQTVEQAYAGEGQPQHKVTEFIDDMAAAYAWADVVVCRSGALTVSEIAAAGLPALFVPSS

SEQ ID NO: 55839 - protein, 414 aa, Enterobacter cloacae
MRLSLPRLKMPRLPGFGILAWVFAALKGWVMGSRQKDNDSLVMYDRTLFWLTMGLAAVGFIMVTSASMPVGQRLANDPFLFAKRDGLYIILAFCLALVTLRLPMEFWQRHSTAMLIASIIMLLIVLVVGSSVNGASRWIAFGPLRIQPAEFTKLSLFCYLANYLVRKVDEVRNNLRGFLKPMGVILVLAVLLLAQPDLGTVVVLFVTTLAMLFLAGANVWQFIAIIGMGISAVVLLILAEPYRIRRVTSFWNPWEDPFGSGYQLTQSLMAFGRGEVWGQGLGNSVQKLEYLPEAHTDFIFSIIAEELGYIGVVLALLMVFFVAFRAMSIGRKALEIDHRFSGFLACSIGIWFSFQALVNVGAAAGMLPTKGLTLPLISYGGSSLLIMSTAIMFLLRIDYETRLEKAQAFTRGSR

SEQ ID NO: 55840 - protein, 438 aa, Enterobacter cloacae
MADYQGKKVVIIGLGLTGLSCVDFFLARGVTPRVMDTRVSPPGLDKLPEQVERHLGGLNDDWLLAADLIVASPGMALAHPSLSAAADAGVEIVGDIELFCREAQAPVIAITGSNGKSTVTTLVGEMAKAAGMNVGVGGNIGLPALMLLDKGCELYVLELSSFQLETTSSLHAAAATILNVTEDHMDRYPFGLQQYRAAKLRVYENAKVCVVNADDALTMPVRGADDRCISFGITMGDYHLNRQLGETWLRVKGEKVLNVKEMKLSGQHNYTNALAALALADAVGLPRSSSLKALTTFSGLAHRFQLALEHNGVRWINDSKATNVGSTEAALNGLHVDGTLHLLLGGDGKSADFSSLKPYLAGDNIRLYCFGRDGSELAELRPEVAEQTETMEQAMRLIAPRVKPGDMVLLSPACASLDQFKNFEQRGDVFTRLAKELG

SEQ ID NO: 55841 - protein, 360 aa, Enterobacter cloacae
MLVWLAEHLVKYYSGFNVFSYLTFRAIVSLLTALFISLWMGPRMIARLQKLSFGQVVRNDGPESHFSKRGTPTMGGIMILTAIVVSVLLWAYPSNPYVWCVLTVLVGYGIIGFVDDYRKVVRKDTKGLIARWKYFWMSVIALGVAFALYLAGKDTPATELVVPFFKDVMPQLGLFYILLAYFVIVGTGNAVNLTDGLDGLAIMPTVFVAAGFALVAWATGNMNFANYLHIPYLRHAGELVIVCTAIVGAGLGFLWFNTYPAQVFMGDVGSLALGGALGIIAVLLRQEFLLVIMGGVFVVETLSVILQVGSFKLRGQRIFRMAPIHHHYELKGWPEPRVIVRFWIISLMLVLIGLATLKVR

SEQ ID NO: 55842 - protein, 452 aa, Enterobacter cloacae
MISITLSQAAAILQGDLYGQDLTIDAVTTDTRKITAGCLFVALKGERFDAHDFAEQAKENGAGALLVSRRLDIDLPQIVVKDTRLAFGELAAWVRQQVPTRVVALTGSSGKTSVKEMTAAILSQCGNTLYTAGNLNNDIGVPMTLLRLTKEHEFAVIELGANHQGEIAWTVSLTRPEAALVNNLAAAHLEGFGSLEGVAKAKGEIYTGLPDDGIAILNADNNDWLNWQSIIGSRKTWRFSPNAANSDFTATNIHVTSHGTEFTLTTPTGGIDVLLPLPGRHNIANALAAAALSTAVGASHEAIKTGLANLKAVPGRLFPIQLSENKLLLDDSYNANVGSMTAAVQVLSEMPGYRIMVVGDMAELGDESEACHTQVGEAAKAAGLDCVLSAGKLSQAISHASGVGEHFADKSALIARLKALITEKQIVTVLVKGSRSAAMEEVVHALQENGTC

SEQ ID NO: 55843 - protein, 495 aa, Enterobacter cloacae
MADRNLRDLLAPWVPNAPERALREMVLDSRVAASGDLFVAVVGHQADGRRYIPQAIAQGVAAIIAEAKDEATDGEIREMHGVPVIYLSQLNERLSALAGRFYHEPSDQLRLVGVTGTNGKTTTTQLMAQWAQLLGETGAVMGTVGNGLLGKVSPTENTTGSAVDVQHVLAGLAGQGATLAAMEVSSHGLVQHRVAALKFAASVFTNLSRDHLDYHGDMEHYEAAKWLLFSTHHYGQAIINADDEVGRRWLAKLPDAVAVSMEDHINPNCHGRWLKAVEVNYHDSGATIRFASSWGEGEIESRLMGAFNVSNLLLALATLLALGYPMAELLKTSARLQPVCGRMEVFSAPGKPTVVVDYAHTPDALEKALEAARLHCTGKLWCVFGCGGDRDKGKRPLMGAIAEQFADIPVVTDDNPRTEEPRAIINDILAGMLDAGRARVVEGRAEAVTNTIMQAQENDVVLLAGKGHEDYQIVGNRRLDYSDRVTAARLLGVVA

SEQ ID NO: 55844 - protein, 568 aa, Enterobacter cloacae
  MISC_FEATURE (542)..(542): X=any amino acid
RRMKAAAKTLKPKRQEEQANFVSWRFALLCGCILLALGFLLGRVAWLQIIAPDMLVRQGDMRSLRVQEVSTSRGMITDRSGRPLAVSVPVKAIWADPKELHDAGGITLDNRWKALADALKMPLDQLASRVNTNPRGRFIYLARQVNPDMADYIKKLKLPGIHLREESRRYYPSGEVTAHLIGFTNVDSQGIEGVEKSFDKWLTGQPGERIVRKDRYGRVIEDISSTDSQAAHNLALSIDERLQALVYRELNNAVAFNKAESGSAVLVDVNTGEVLAMANSPSYNPNNLTGTQKDVMRNRTITDVFEPGSTVKPMVVMTALQRGIVNENTVLNTIPYRINGHEIKDVARYSELTLTGVLQKSSNVGVSKLALAMPSSALVETYSRFGLGKATNLGLVGERSGLYPQKQRWSDIERATFSFGYGLMVTPLQLARVYATIGSYGVYRPLSITKVDPPVPGERIFPESTVRTVVHMMESVALPGGGGVKAAIKGYRIAIKTGTAKKVGPDGRYINKYIAYTAGRAPASNPRFALVVVINDPQAGKXLRGAVSAPVFGAIMGGVLRTMNIEPD

SEQ ID NO: 55845 - protein, 515 aa, Enterobacter cloacae
  MISC_FEATURE (471)..(471): X=any amino acid
  MISC_FEATURE (490)..(490): X=any amino acid
  MISC_FEATURE (509)..(509): X=any amino acid
SYLLALDAGTGSVRAVIFDLQGNQIAVGQAEWKHLSVENVPGSMEFDLETNWLLACRCIHQALERARLSAADIKSVACCSMREGIVLYDRNGEAIWACANVDARASREVAELKEIHDDRFESEVYEVSGQTLALSAMPRLLWLAHHRPDIYRKAATITMISDWLAAKLSGELAVDPSNAGTTGMLDLFSRDWRPALLDMAGLRADILSPVKETGTVLGAITKEAAQQSGLREGTPVVMGGGDVQLGCLGLGVVRAGQTAVLGGTFWQQVVNLPQVRTDPDMNIRVNPHVIPGMAQAESISFFTGLTMRWFRDAFCAEEKLIAERMGMDTYSLLEEMASRVPAGSHGVMPIFSDAMHFKQWYHAAPSFINLSIDPEKCNKATLFRALEENAAIVSACNLAQISRFSGVTFESLVFAGGGAKGALWSQILSDVTGLPVRVPEVKEATALGCAIAAGAGAGLFADMASRASGWXSGAASSRRTRSTASCTTAXCRNGRQCTRTSSGWWTAGXRRRCGR

SEQ ID NO: 55846 - protein, 332 aa, Enterobacter cloacae
MIRFAVIGTNWITRQFVDAAHETGKLKLTAVYSRSLEQAQSFANDYLVEHLFTSLDDMAQSDAIDAVYIASPNSLHFPQTKLFLSHKKHVICEKPLASNIQEVEAAIALARENQVVLFEAFKTASLPNFLLLQQSLPKIGKVRKAFINYCQYSSRYQRYLDGENPNTFNPAFSNGSIMDIGFYCLASAVALWGEPHGVTATASLLESGVDAHGVAVLDYGDFSVTLQHSKVSDSALPSEIQGEAGSLVIEKISECQKVSFVPRGGKAQELTQPQHINTMLYEAEVFARLVEDNEVNHPGLAVSRTTAKLQTEIRRQTGVVFPADGVSAEAIA

SEQ ID NO: 55847 - protein, 322 aa, Enterobacter cloacae
MHSVGTPMLWGGFAVVVLIMLAIDLFLQGRRGAHGMTMKQAAAWSLVWVTLSLLFCAAFWWYLASTEGRAVADPQALAFLTGYLIEKALAVDNVFVWLMLFSYFAVPAALQRRVLVYGVLGAIILRTIMIFAGSWLITQFEWLLYVFGAFLLFTGVKMALAKEDGSAIGDRPLVKWIRGHLRMTDKIESEHFFVRKNGLLFATPLLLVLILVELSDVIFAVDSIPAIFAVTTDPFIVLTSNLFAILGLRAMYFLLAGAAERFSMLKYGLSVILVFIGIKMLIVDFYHIPIAISLGVVFGILIVTLIINTWVNRQHDKKQQVE

SEQ ID NO: 55848 - protein, 458 aa, Enterobacter cloacae
MCIGVPGQIHSIDGNQAKVEVCGILRDVDLTLVGSSDETGASRLGQWVLVHVGFAMSVINEAEARDTLDALQNMFDVEPDVGALLYGEGALAMRYVDEYRAPEQVLQLIGHLKTRAALLDYTAENPLRIMEVCGGHTHAIFKFGLDQLLPENIEFIHGPGCPVCVLPMGRIDSCIEIASQPDVIFCTFGDAMRVPGKNGSLLQAKARGADIRIVYSPMDALTLAEDNPARRVVFFGLGFETTMPATAITLQQAKARGVGNFFFFCQHITLIPTLRSLLEEPGNGIDAFLAPGHVSMVIGTDAYDFIAEQYNRPLVVAGFEPLDLLQGVTMLVEQKIAALSAVENQYRRVVPDEGNERAQQAIADVFSVEGDSEWRGLGLIAESGVRLTSAYRAFDAEAHFRPQPQQVCDDPRARCGDVLTGKCKPHQCPLFGNTCNPQTAFGALMVSSEGACAAWYQY

SEQ ID NO: 55849 - protein, 298 aa, Enterobacter cloacae
MSKIGINGFGRIGRLVLRRLLETQDSNTVVAINDLTSPKVLAYLLRHDSNYGGFPWSVDFTEDALIVDGKTIAVYAEKEAKHIPWKAAGVDIVVECTGFYTSEEKSRAHLDAGAKKVLISAPAGEMKTIVYSVNDDTIDASDTIISVASCTTNCLAPLAKALNDAFEIKVGTMTTIHAYTGTQALVDGPRGKDLRASRAAAENIIPHTTGAAKAIGLVIPALSGKLKGHAQRVPVKTGSVTELVAILGKKVTVEEINAALKKATQGNKSFGYTDEEIVSSDVIGSHYGSVFDATQTEV

SEQ ID NO: 55850 - protein, 606 aa, Enterobacter cloacae
MTMQALLLDAVEQRLLRHLDVQFAMMVAGEEPAVMLAAAILSKDAGEGHVCLPLSRLAVDEKMPPALQACFALLGDAVDWQGILLGSPAVSGADTGTPMILVGERLYLNRLWRNELTVARFFSETNAPLPCDEVKLRQTLDTLFTADDATDWQKVAAAVALTRRISVISGGPGTGKTTTVAKLLAALIQLSGEQKCRIRLAAPTGKAAARLTESLGGALQKLPLTGEQLALFPNEASTLHRLLGAQPGSQRLRYHAGNPLHLDVLVVDEASMIDLTMMSRLIDALPPHARVIFLGDRDQLASVEAGAVLGDICTYASLGYTAERAQELARLTGCSLTSENHSLAGALRDSLCLLQKSYRFGSDSGIGQLAAAVNRGDRRTTTAVFDGTFTDIEKKSLQSGEEYQAMLDDALQGYQHFLTGVQQQSTPEQVIAAFGEYQLLCALREGPFGVRGLNDRLEQLLAQKRKINRTPHSRWYEGRPVMISRNDSALGLFNGDIGIALDCGQGLRVWFQMPDGTVKSFQPSRLPEHETAWAMTVHKSQGSEFNHAALILPTQLSPVVTRELIYTAITRARQRLSLYTDERVLVQAIATRTERRSGLGAIFESL

SEQ ID NO: 55851 - protein, 1167 aa, Enterobacter cloacae
SLDPLRLPLQGERLIEASAGTGKTFTIAALYLRLLLGLGGNAAYPRPLSVEELLVVTFTEAATAELRGRIRSNIHELRIACLRQSTDNPLYASLLEEIADKQQAAQWLLLAERQMDEASVFTIHGFCQRMLSLNAFESGMLFEQQLIEDESVLRYQACADFWRRHCYPLERDIAEAVHALWKGPEALLRAIDRYLQGEAPVIKSPPPADETLASRHEKIIAQIADIKQKWMESVGEIDAIIENSGIDRRKFNRGNQGKWIDKISAWAQEETRGYQLPDALEKFSRRFLVERTKSDGIVPEHPLFVAIETLLAEPLTLNDLMITRAMTEIREAVAREKRRRGELGFDDMLSRLDAALCSENGEALAAAIRTRFPVAMIDEFQDTDPQQYRIFRRIWRQQPGTALLLIGDPKQAIYAFRGADIFTYMKARSEVDAHYTLDTNWRSSPGMVESVNALFSRMDTAFMFREIPFQPVKFAEKNASLRFEFNGETQPAMNFWLLDGEGCGVADYQNAMAQHCAAQIRDWLSAGAHGKALLWKGDKPNPVKASDITVLVRSRQEAALIRDALTLLNIPSVYLSNRDSVFETLEAQEMLWLLQAVLAPERESTLRSALASAMLGLNARDIDALNNDEAAWDAVVEEFVRYREKWQKRGVMAMVRELMAQRHIAENMLATAGGERRLTDILHISELLQEAGTQLESEHALVRWLAQQIADPNSNSSSQQMRLESDKHLVQIVTIHKSKGLEYPLVWLPFIANYRVQDQAFYHDRESFEAVLDLSNAESSVELAEAERLAEDLRLLYVALTRSVWHCSLGIAPLFRRRGEKTGESDFHLSALGRLIQHGEPKDAAGLRQCIESLCTEHVALHIPSQPDNSRWQMPELGESELHARQVVRTIADDWRVTSYSGLQQHGQSIAQDLMPKLDVDAAGAGSVPVEPGVTPHQFPRGASPGTFLHSLFEELDFTQPVSEEWVLKMLQSGGYDAQWQPVLTDWIRAVLHAPLTTQGISLNQLTAKDKQVEMEFYLPIASPLRAGALDTLIREYDPLSAGCPPLNFRQVQGMLKGFIDLVFRHEGRYYLLDYKSNWLGESSEAYTQDAMASAMQMHRYDLQYQLYTLALHRYLRHRMADYCYEAHFGGVIYLFLRGVDANDTHSGVFSTRPAAELIEKMDNLFA

SEQ ID NO: 55852 - protein, 516 aa, Enterobacter cloacae
MKKLKINYLLIGIVTLLLAVALWPSIPWFGKAENRIAAIQERGELRVSTLNSPLIYSDVNGKIIGLDYELAQQFADYLGVKLKITVRQNINELFDDLDNDDADMLAAGLVYNSERSKNYQPGPTYYSVSQQLVYRVGSLRPRSLASINDRQLTIAPGHVVIDDLRELKEKKYPDLGWTVDPKLGTTELLEQVKDQKVPYTIADSVAISLFQRVHPEIAVALDVTDEQPVTWFSQLDDDQTFSAAMLDFFNTINEDGTLARLEEKYLGHGDDFDYVDTRSFLRAVDSVLPDLQPLFEKYAQEIDWKLLAAISYQESHWDTQATSPTGVRGLMMLTKNTALSLGVNDRTDAEQSISGGARYLQDMMAKVPETVPEEERIWFALAAYNMGYAHMLDARALTAKTKGNPDSWSDVKQRLPLLSQKPWYNKLTYGYARGHEAYAYVENIRKYQISLVGYLLEKEKEATEAKQLAQSYPVVAPDELNRPTASILPFAAFSADGAFERNRLIAPNTLVQAPHR

SEQ ID NO: 55853 - protein, 453 aa, Enterobacter cloacae
MDKTAALASDILQGIGGEKNIQRLENCMTRVRVEVHNDDQLDVPRLKQLSGVSGYVKQGQQHQLIVGPGKAAQVVDAMRALMGVSASASMDDAERTKAQAKAKYKAPMSDALRQLANVFIPLIPAFIASGLITGIINILKRPDIVGDFATQYPNLLGVLGIFGSAVFAIMNILVGVNTAKVFGGSLAMGGVMAGILSSPQLAQITLFGEALQPGRGGVIAVLLVVILMCWIEKRLRAVLPGSIELILNPLLTTLITGSVAIVALQPLGGWISEAIAHGASLAIDRGGLLVGAVLSGTFLPLVLTGLHQGLVPIHVELVQAHGYNALLPILSMAGVGQVGAAIAVLMKTRNARLKKMIKGALPVGLLGIGEPLIFGVTLPLGKPFLAACLGGAVGGALISYWKVATVITFGLSGLPLALTIVTGKVMLYLLGYLVAVIAGFLFTWLLGFNDPEE

SEQ ID NO: 55854 - protein, 295 aa, Enterobacter cloacae
MNLGSLVSETRNPQTMDLDALSTLELVNRFNQQDTLVAQAVKETLPEVAKAVDAAAEALKAGGRIIYMGAGTQGRLGVLDASECPPTFGVPHGLVVGLIAGGPGALLKAVEGAEDNKQLGEDDLKDLNLTAKDLVVGLAASGRTPYVIGGLEYANRTGCTTVAISCNPGSPIAQVAAIAISPVVGPEALTGSTRLKSGTAQKLVLNMISTGAMVKFGKVYQNLMVDMQATNVKLVDRACRMVMEATGAGREEAEAVLRQTAHDVKPAILMILSGLDAAAARAKLAAHNGFLRAAL

SEQ ID NO: 55855 - protein, 306 aa, Enterobacter cloacae
  MISC_FEATURE (152)..(152): X=any amino acid
MEYKIHSGEQNSICADNHIFARRPYNCLIRIRQRYAGFAQSDKKLADFLLSQPDHARHLSSQQLASEAGVSQSSVVKFAQKIGFKGFPALKLAISERLVSNPNPQSMPVHNQIRGDDPMRLVGEKLIKENVAAMHATLDVNTEEKLLESVRXLRGARRIILTGIGASGLVARNFGWKLTKIGLNAIVEQDMHALLATVQAMDPDDLLLAISYSGERREINMATDEALRVGGKILAITGFTPNALQQRATRCLYTIAEEQATRSAAISSTSAQMMLTDLLFMALVQQDLERAPERIRHSEELVKKLV

SEQ ID NO: 55856 - protein, 86 aa, Enterobacter cloacae
MALLITKKCINCDMCEPECPNQAISMGDSIYEINSDRCTECIGHYETPTCQKVCPIPNTILKDPAHVESEEQLWDKFVLMHHADKL

SEQ ID NO: 55857 - protein, 126 aa, Enterobacter cloacae
MAILGLGTDIVEIARIEAVIARSGDRLARRVLSDNEWAIWEAHQQPVRFLAKRFAVKEAAAKAFGTGIRNGLAFNQFEVFNDELGKPSLRLWGEAQKLAEKLGVNHMHVTIADERHYASATVIIES

SEQ ID NO: 55858 - protein, 180 aa, Enterobacter cloacae
MSALTIYSDKDASQHQWHSTDAAEIAQQLNAKGVRFERWAADRDLGHDPAPEAVIAAYQHAIDKLVAEKGYQSWDVISLRADNPQKEALRAKFLNEHTHGEDEVRFFVEGAGLFCLHIDDEVYQVLCEKNDLISVPAGTPHWFDMGSEPNFTAIRIFDNPEGWVAQFTGDAIADAYPRLA

SEQ ID NO: 55859 - protein, 43 aa, Enterobacter cloacae
MSLINTKIKPFKNQAFKNGEFIEVTEKDTEGRWRRRFGGQHKR

SEQ ID NO: 55860 - protein, 204 aa, Enterobacter cloacae
MTDNLQLTHLVDACRWIGAKGWAPATGGNMSVRQDEHLCWLSESGKDKGSLTTADFLQVEIATNRAPSGRRPSAETGLHTLIYRLFPEANAVLHVHTVNATVLSRLVKEAELNISGFEMQKSLTGQTTHLDTVAIPIFDNDQDIDALASRIAHYAEERPLNYGFLLRGHGLTCWGRDVAEARRHLEGLEFLFECEMRLRQLERI

SEQ ID NO: 55861 - protein, 299 aa, Enterobacter cloacae
MANLYDLKKFDLNLLVIFECIYQHLSISKAAETLYITPSAVSQSLQRLRGQLNDPLFIRSGKGITPTTVGVNLHHHLEQNLNQLEQTINIMHSSGLKKNFVIYCPHFMSMKATLDPIKLLMENHNYSIELHDVFLSSDSAEDLLAYRRADLIFSFSSSNNHSVACSLYHKLPFVLVCREGHPRLSENPTREEILNENFTAYLNDENSFKDYQEKAESLLTKRNIVYRSDSFISLLSVIGSSDLIGLVPAPAFEQYGPALNLRRVETDIQFPSIDIYMMYNRSALNSSAFASFIEEISLP

SEQ ID NO: 55862 - protein, 315 aa, Enterobacter cloacae
DSPLSEDMDANRDHVKRISYPVVIKASGGGGGRGMRVVRSDAELEQSISMTKAEAKAAFSNDMVYMEKYLENPRHIEIQVLADGQGNAIYLAERDCSMQRRHQKVVEEAPAPGITPELRRYIGERCAKACVDIGYRGAGTFEFLFENGEFYFIEMNTRIQVEHPVTEMITGVDLIKEQLRIAAGQPLSIKQEEVVVKGHAVECRINAEDPNTFLPSPGKITRFHAPGGFGVRWESHIYAGYTVPPYYDSMIGKLICYGENRDVAIARMKNALQELIIDGIKTNVDLQMRIMSDEHFQNGGTNIHYLEKKLGLNEK

SEQ ID NO: 55863 - protein, 483 aa, Enterobacter cloacae
MQLEVILPLIAYLLVVFGLSVYAMRKRTTGTFLNEYFLGSRSMGGVVLAMTLTATYISASSFIGGPGAAYKYGLGWVLLAMIQLPAVWLSLGILGKKFAILARRYNAVTLNDMLFARYQSRLLVWLASLSLLVAFIGAMTVQFIGGARLLETAAGIPYETGLVIFGVSIALYTAFGGFRASVLNDTMQGLVMLVGTLVLLVGIVHAAGGLSHAVETLEAIDPKLVSPQGADDILSPTFMTSFWVLVCFGVIGLPHTAVRCISYKDSKAVHRGIIIGTIVVAILMFGMHLAGALGRAVIPDLTVPDLVIPTLMVKVLPPFAAGIFLAAPMAAIMSTINAQLLQSSATIIKDLYLNLRPDQAENERRLKRMSAVITLALGALLLLAAWRPPEMIIWLNLLAFGGLEAVFLWPLVLGLYWERANAAGALSAMIVGGVLYAVLATFKIQYLGFHPIVPSLLLSLLAFVVGNRFGQPVPQPAMISTDK

SEQ ID NO: 55864 - protein, 422 aa, Enterobacter cloacae
MTWFIDRRLNGKNKSTVNRQRFLRRYKAQIKQSISEAINKRSVTDVDSGESVSIPTDDISEPMFHQGRGGLRHRVHPGNDHFVQNDRIERPQGGGGGSGSGQGQASQDGEGQDEFVFQISKDEYLDLLFEDLALPNLKKNQHRQLNEYKTHRAGYTANGVPANISVVRSLQNSLARRTAMTAGKRRELRELESSLKVVENTEPAQLLEEERLRKEIAELRAKIERVPFIDTFDLRYKNYEKRPEPSSQAVMFCLMDVSGSMDQATKDMAKRFYILLYLFLSRTYKNVEVVYIRHHTQAKEVDEHEFFYSQETGGTIVSSALKLMDEVVKERYDPAQWNIYAAQASDGDNWADDSPLCHEILAKKILPVVRYYSYIEITRRAHQTLWREYEHLQAMFDNFAMQHIRDQDDIYPVFRELFHKQS

SEQ ID NO: 55865 - protein, 356 aa, Enterobacter cloacae
MRVADFSFELPESLIAHYPMPERSSCRLLSLDGPTGELTHGTFTDLLDKLNPGDLLVFNNTRVIPARLFGRKASGGKIEVLVERMLDDKRILAHIRASKAPKPGAELLLGDDESIKATMTARHDALFEVAFDDERTVLDILNAIGHMPLPPYIERPDEEADRELYQTVYSQKPGAVAAPTAGLHFDEPLLEKLRAKGVEMAFVTLHVGAGTFQPVRVDSIEDHIMHSEYAEVPQDVVDAVLAAKARGSRVVAVGTTSVRSLESAAQAAKSDLIEPFFGDTQIFIYPGYQYKVIDALVTNFHLPESTLIMLVSAFAGYQHTMAAYKSAVEQKYRFFSYGDAMFITYNPLALNERVGE

SEQ ID NO: 55866 - protein, 375 aa, Enterobacter cloacae
MKFELDTTDGRARRGRLVFDRGVVETPAFMPVGTYGTVKGMTPEEVEATGAQIILGNTFHLWLRPGQEIMKLHGDLHDFMQWKGPILTDSGGFQVFSLGDIRKITEQGVHFRNPINGDPIFLDPEKSMEIQYDLGSDIVMIFDECTPYPADWDYAKRSMEMSLRWAKRSRDRFDSLQNKNALFGIIQGSVYEDLRDISVKGLVEIGFDGYAVGGLAVGEPKEDMHRILEHVCPQIPADKPRYLMGVGKPEDLVEGVRRGIDMFDCVMPTRNARNGHLFVTDGVVKIRNAKHKSDTSPLDSECDCYTCRNYSRAYLHHLDRCNEILGARLNTIHNLRYYQRLMAGLRKAIEEGKLESFVTDFYQRQGRDVPPLNVD

SEQ ID NO: 55867 - protein, 469 aa, Enterobacter cloacae
MKKYQSLAQQIISQIELGVWLPGDKLPSLREQVASSGMSFMTVGHAYQMLESQGRIVARPQSGYYVASRPTAHQPAPPAQVMRDEVVDINTYIFDVLQASRDPSVVPFASAFPDPRLFPLQQLNRSLANVSKTATAMSVIENLPPGNVDLRHAIARRYAQQGMNISPEEIVITAGALEALNLSLQAVTEPGDWVIVENPCFYGALQALERLKLKALSIATDVREGIDLNALEQALKEYPVKACWIMTNSQNPLGFTLSAEKKAHLVALLTQHNVPLIEDDVYSELYFGREKSLPAKAWDRQDMTLHCSSFQKCLVAGFRIGWVAAGKHARRIQQLQLMSTLSTSSPVQLALVDYLATKRYDAHLRRLRSTLAERKQQAWQSLLRHMPAGVKIHHNDSGYFLWLELPAQLDAGLLSEKALTHHISIAPGKMFSTSDAWTPFFRFNTSWAWGEREEQAVIQLGKLISTMLE

SEQ ID NO: 55868 - protein, 309 aa, Enterobacter cloacae
MVKVYAPASSANMSVGFDVLGAAVTPVDGSLLGDTVTVEAADSFSLNNVGRFASKLPSDPRENIVYQCWERFCQEIGKNVPVAMTLEKSMPIGSGLGSSACSVVAALVAMNEHCGKPLNNNRLLGLMGELEGRISGSIHYDNVAPCFLGGMQLMIEENGIISQQVPGFDEWLWVLAYPGIKVSTAEARAILPAQYRRQDCIAHGRHLAGFIHACYTRQPQLAAKLMKDVIAEPYRTKLLPGFNEARQASMDIGAQACGISGSGPTLFALCDKPDTAQRVADWLSKHYLQNQEGFVHICRLDTAGARVLG

SEQ ID NO: 55869 - protein, 343 aa, Enterobacter cloacae
LLKQDFVTRSTKILSAFIGDEIPQELLEERVRAAFAFPAPVKQVEPDVGCLELFHGPTLAFKDFGGRFMAQMLTHISGDKPVTILTATSGDTGAAVAHAFYGLKNVRVVILYPKGKISPLQEKLFCTLGGNIETVAIDGDFDACQALVKQAFDDEELKVALGLNSANSINISRLLAQICYYFEAVAQLPQEARNQLVISVPSGNFGDLTAGLLAKSLGLPVKRFIAATNANDTVPRFLKDGKWAPNATQATLSNAMDVSQPNNWPRVEELFRRKIWRLGDLGYAAVTDETTKETMRELKALGYTSEPHAAIAYRALRDQLNPGEYGLFLGTAHPAKFKESVEA

SEQ ID NO: 55870 - protein, 100 aa, Enterobacter cloacae
MSTLKPALIALSLVLAAPMAVQASEITLVPAVKLQIGDQDNNGHYWDGGRWRDHDWWKAHYDWRDNHWRPHDEHRKHDDRHDDHHHDDHRDDRGPDWKHH

SEQ ID NO: 55871 - protein, 317 aa, Enterobacter cloacae
MTDKLTSLRQFTTVVADTGDIAAMKLYQPQDATTNPSLILNAAQIPEYRKLIDDAVTWAKAQSNDRAQQVVDATDKLAVNIGLEILKLVPGRISTEVDARLSYDTEASIAKAKRLIKMYNDAGISNDRILIKLASTWQGIRAAEQLEKDGINCNLTLLFSFAQARACAEAGVYLISPFVGRILDWYKANTDKKEYAPAEDPGVVSVTEIYEYYKQHGYETVVMGASFRNVGEIIELAGCDRLTIAPALLKELAESEGTIERKLSYTGEVKARPERITESEFLWQHNQDPMAVDKLADGIRKFAVDQGKLEKMIGDLL

SEQ ID NO: 55872 - protein, 195 aa, Enterobacter cloacae
MNTLRIGLVSISDRASSGVYQDKGIPALEEWLGSALTTPFDIQTRLIPDEQPIIEQTLCELVDEMSCHLVLTTGGTGPARRDVTPDATLAIADREMPGFGEQMRQISLHFVPTAILSRQVGVIRKQALILNLPGQPKSIKETLEGLKAEDGSVLVHGIFASVPYCIQLLDGPYVETDEKVVAAFRPKNARRETIS

SEQ ID NO: 55873 - protein, 445 aa, Enterobacter cloacae
MSNRKYFGTDGIRGRVGDAPITPDFVLQLGWLAGKVLARHGSRKIIIGKDTRISGYMLESALEAGLAAAGLSASFTGPMPTPCVAYLTRTFRAEAGIVISASHNPFYDNGIKFFSIDGTKLPDDVEEAIEAEMEKEITCVDSAELGKANRIVDAAGRYIEFCKGTFPNELSLAHLKIVVDCANGATYHIAPNVFRELGAKVITIGCEPDGLNINEQVGATDVRALQARVLAEKADLGIALDGDGDRVIMVDHEGNKVDGDQILYIIAREGLRQGQLRGGAVGTLMSNMGLELALKQLGIPFVRAKHSDRYVLEKLQEKGWRIGAENSGHVILLDKTTTGDGIVAALQVVAAMARNHMSLHDLCSGMKMFPQILVNVRFTADKGDPLENENVKAVMADVEAALGNRGRVLLRKSGTEPLIRVMVEGEDEAQVTEFAHRIADAVKAA

SEQ ID NO: 55874 - protein, 300 aa, Enterobacter cloacae
MLRGFSFLFNDIDTRDFAMKLFAQDSHLDLSHPHVMGILNVTPDSFSDGGTHNTLIEAVKHANLMINAGATIIDVGGESTRPGAADVSVEEELARVVPVVEAIAQRFEVWISVDTSKPEVIREVARVGAHIINDIRSLTEPGALEAAAETGLPVCLMHMQGQPKTMQEAPKYDDVFADVNRFFIEHIARCERAGIPKEKLLLDPGFGFGKNLPHNYALLARLSEFHHFDLPLLVGMSRKSMIGQLLNVGPSERLSGSLACAVIAAMQGAHIIRVHDVKETVEAMRVVEATLAAKENKRYE

SEQ ID NO: 55875 - protein, 620 aa, Enterobacter cloacae
KNLILWLVIAVVLMSVFQSFGPSESNGRKVDYSTFLQEVNQDQVREARINGREINVTKKDSNRYTTYIPVNDPKLLDNLLTKNVKVVGEPPEEPSLLASIFISWFPMLLLIGVWIFFMRQMQGGGGKGAMSFGKSKARMLTEDQIKTTFADVAGCDEAKEEVGELVEYLREPSRFQKLGGKIPKGVLMVGPPGTGKTLLAKAIAGEAKVPFFTISGSDFVEMFVGVGASRVRDMFEQAKKAAPCIIFIDEIDAVGRQRGAGLGGGHDEREQTLNQMLVEMDGFEGNEGIIVIAATNRPDVLDPALLRPGRFDRQVVVGLPDVRGREQILKVHMRRVPLAPDIDAAIIARGTPGFSGADLANLVNEAALFAARGNKRVVSMVEFEKAKDKIMMGAERRSMVMTEAQKESTAYHEAGHAIIGRLVPEHDPVHKVTIIPRGRALGVTFFLPEGDAISASRQKLESQISTLYGGRLAEEIIYGVEHVSTGASNDIKVATNLARNMVTQWCFSDKLGPLLYAEEEGEVFLGRSVAKAKHMSDETARIIDQEVKSLVERNYARARQILTDNMDILHSMKDALMKYETIDAPQIDDLMARREVRPPAGWEDPGASNNSDNNGTPRAP

SEQ ID NO: 55876 - protein, 391 aa, Enterobacter cloacae
MKFVDEATILVVAGDGGNGCVSFRREKYIPRGGPDGGDGGDGGDVWLEADENLNTLIDYRFEKSFRAERGQNGQSRDCTGKRGKDVTIKVPVGTRVIDQGTGETMGDMTKHGQRLMVAKGGWHGLGNSRFKSSVNRTPRQKTMGTPGDKRDLQLELMLLADVGMLGMPNAGKSTFIRAVSAAKPKVADYPFTTLVPSLGVVRMDNEKSFVVADIPGLIEGAAEGAGLGIRFLKHLERCRVLLHLIDIDPIDGSDPVENARIIIGELEKYSEKLANKPRWLVFNKIDLMDKAEAEAKAKAIAEAMGWEDKYYLISAASQVGVKDLCWDVMTFIIENPIVQAEEAKQPEKVEFMWDDYHRQQLEELEAEEDDEDWDDDWDEDDEEGVEFIYKH

SEQ ID NO: 55877 - protein, 439 aa, Enterobacter cloacae
MVQKVGAQAPEIDYHSQQMALPASTQKVITALAALLQLGPDFRFTTTLETKGNVEGGALKGDLIARFGGDPTFKRQDIRNMVAVLKKSGVQKIDGNVLIDTSIFASHDKAPGWPWNDMTQCFSAPPAAAIVDRNCFSVSLYSAPKPDDLAFIRIASYYPVTMFSQVRTLAKGSPDAQYCELDVVPGDLNRFTLTGCLTQRADPLPLAFAIQDGASYAGAILKDELKQAGITYSGTLLRQTQVNQPGTVIASKQSPPLHDLLRIMLKKSDNMIADTVFRMIGHARFGVPGTWRAGSDAVRQILRQQAGIELGNTIAVDGSGLSRHNLISPATMMQVLQYIAQHDTELNFISMLPLAGHDGSLQYRAGLHAAGVDGKVSAKTGSLQGVYNLAGFITTASGQRMAFVQYLSGYAVEPADQRNRRIPLVRFESRLYKDIYQNN

SEQ ID NO: 55878 - protein, 275 aa, Enterobacter cloacae
PLVSIYMPTWNRQQLAIRAIKSVLRQDYDNWELIIVDDCSSSYEQLQKFVTDLNDPRVVYTHNAINSGACAVRNQAIMQAKGQYLTGIDDDDEWTPNRLSIFLSHKEQLVTHAFLYANDYVCQGEVYSQPASLPLYPKSPYSRRLFYKRNIIGNQVFTWAWRFKECLFDTELKAAQDYDIFLRMVVEYGEPWKVEEATQILHINHGEMQITSSPKKFSGYFHFYRKHKDKFDRASRKYQLFTLYQIRNKRMNWRTLVTLLSVRNGKRLADGLRGK

SEQ ID NO: 55879 - protein, 163 aa, Enterobacter cloacae
MFLEDCRANSWSLRPCCMVLAYRIAHFCSVWRKKNVLNNIWAAPVLVLYRIITECFFGYEIQAAATIGRRFTIHHGYAVVINKFVVAGDDFTIRHAVTIGNRGPDSLACPVIGNNVELGANVVIIGDITIGNNVTIGAGSVVLDSIPDNALVVGEKARVKVIK

SEQ ID NO: 55880 - protein, 407 aa, Enterobacter cloacae
MKILVYGINYSPELTGIGKYTGEMVEWMASQGHDVRVITAPPYYPEWKVGERYSSWRYRREEGAATVWRCPLYVPKQPSTLKRLLHLGSFALSSFFPLMAQRRWKPDRIIGVVPTLFCTPGMRLLGKLSGARTLLHIQDYEVDAMLGLGMAGKSKGGKVAKLASAFERSGLHNVDYVSTISRSMMNKAQEKGVPAEKVIFFPNWSEVARFRDVTEQDAHALRAQLGLPEDQKIILYSGNIGEKQGLESVIEAAQLLSEHPWTFVIVGQGGGKARLEKMAGERGLTNVKFFPLQSYEALPALLKMGDCHLVVQKRGAADAVLPSKLTNILAVGGNAVITAEAETELGQLCDSYPGIAVCVEPESVPALVTGIEQALAMPKVNTVAREYAERTLEKENVLSQFITDIRG

SEQ ID NO: 55881 - protein, 224 aa, Enterobacter cloacae
RMSRICKETVPEMVVMSDTCFCEYTSHGHCSVLCDHGVDNDATLLNLGKQAVVAAAAGADFIAPSAAMDGQVQAIRQALDAAGFTDTAIMSYSTKFASSFYGPFREAAGTALKGDRKTYQMNPLNRREAIRESLLDEAQGADCLMVKPAGAYLDILRDIRERTELPLGAYQVSGEYAMIKFAALAGAIDEEKVVLESLGAIKRAGADLIFSYFALDLAEKKILR

SEQ ID NO: 55882 - protein, 474 aa, Enterobacter cloacae
MSIRIEGNMQTQQENGQLKRTMKTRHLIMLSLGGVIGTGLFFNTGYIISTTGAAGTLLAYLIGALVVWLVMQCLGELSVAMPETGAFHVYAARYLGPATGYTVAWLYWLTWTVALGSSFTAAGFCMQYWFPQVPVWAWCVVFCVVIFGLNVISTRFFAEGEFWFSLVKVITIIAFIILGGAAVFGFIPMQDGSPAPGLSNITAEGWFPHGGLPILMTMVAVNFAFSGTELIGIAAGETENPHKVIPVAIRTTIARLIIFFIGTVFVLAALIPMQQAGVEKSPFVLVFEKVGIPYAADIFNFVILTAILSAANSGLYASGRMLWSLSNEKTLPRCFARVNKNGVPLTALSVSMLGGVVALFSSVVAPDTVFVALSAISGFAVVAVWISICASDFVFRRRHLQSGQPLSALQYRAPWYPLVPVLGFILCVVACVGLWFDPSQRIALYCGLPFVALCYGAYYLTRNMTSQEPEHVAE

SEQ ID NO: 55883 - protein, 172 aa, Enterobacter cloacae
MLVNNAGAMTKAPFLEMPFDDWRNIFTVDVDGAFLCSQIAARQMVKQGEGGRIVNITSVHEHTPLPEASAYTAAKHALGGLTKSMAMELVKHNILVNAVAPGAIATPMNDMDDSEVKEGSMPEIPLARPGHTKEIASLVAWLCDSDASYTTGQSFIVDGGFMLANPQFKPEG

SEQ ID NO: 55884 - protein, 208 aa, Enterobacter cloacae
MKIVEVKHPLVKHKLGLMREHDISTKRFRELASEVGSLLTYEATSDLETEKVTIEGWNGPVQVEQIKGKKITVVPILRAGLGMMEGVLEHVPSARISVVGIYRNEETLEPVPYFQKLVSNIDERMALVVDPMLATGGSMIATIDLLKNAGCNSIKVLVLVAAPEGIAALEKAHPDVELYTASIDQGLNEHGYIIPGLGDAGDKIFGTK

SEQ ID NO: 55885 - protein, 513 aa, Enterobacter cloacae
MNENSSIFTTNYTLSLLMPVMLWGAMRFGYKLISLIWTPILLVSIHYFYRYIPVNPGYDIQLAITSSSYLVFSFVVIYMSMLATRQRAANKRSRRLALLDPVVHMPNLRALSRDLAKNPWSALCLLRIPELEILGRNYGVLLRIQYKQQLAQWVNGILQPNELVYHLTGYDLAVRLNAESHQQRIEALDEHIKQFRFVWDGMPLQPQVGVSYCYVRSPVNHLYLVLGELGVVADLSLSSNHPENLQQRGAVHLQRNLKDKVAMMSRLQKALDNDEFTLLVQPVRGMRGDCYHEVLLRMPDINGLLISPDQFLPVAQEFGLSSRVDLWVLEHTLRFLSAHRERLPGQRFAINLAPSTVCRVQFPLEVSRLLAKYAIEPWQLIFEVTECSTFCNAEQAQHILRQLQKMGVRIAIDDFGTGYASYARLKSVDADILKIDGSFIRNIVNNSLDYQIVASICHLARMKKMLVVAEYVESEEIRSAVHALGIDYVQGYLIGRPAPLESLLEAEASTADA

SEQ ID NO: 55886 - protein, 727 aa, Enterobacter cloacae
MFKAFVLFFALWVPATQADSGWQPVQETIRKSEKDTRQYQAIRLDNGMTVLLVSDPQAVKSLSALVVPVGSLEDPDAHPGLAHYLEHMTLMGSKKYPQPDSLSEFLKMHGGSHNASTAPYRTAFYLEVENDALEGAVDRLADSIAAPLLDKKYADRERNAVNAELTLARTRDGMRMAQVSAETINPAHPGSRFSGGNLETLSDKPNSPVLDALHAFRDKYYSANLMKAVIYSNKPLPELAGMAAKTFGRVPNKNIDLPQIDVPVVTDAQKGIVIHYVPALPRKVLRVEFRIDNNTAKFRSKTDELVTYLIGNRSPGTLSDWLQKQGLVEGIRADSDPVVNGNSGVLAISATLTDKGLANRDEVVAAIFSYLSLLREKGVDKRYFDELAHVLDLDFRYPSITRDMDYVEWLADTMIRVPVEHTLDAVNIADRYDADAVKARLAMMTPENARIWYISPNEPHNKTAYFVDAPYQVDKISAQTFADWQKKSGEIALKLPELNPYIPDDFSLTKTTQDYPHPALIVDEPTLRVVYTPSRYFASEPKADVSVVLRNPKAMNSAKNQVMFALNDYLAGIALDQLSNQAAVGGISFSTNANNGLMLNANGYTQRLPQLFQALLEGYFSYTPTEEQLEQAKSWYAQMMDSAEKGKAYDLALMPAQMLSQVPYFQREDRRALLPSITLKDVLAYRDALKTNTRPEFLIVGNISDDQAKTLAENVRTQLGSKGDEWC

SEQ ID NO: 55887 - protein, 264 aa, Enterobacter cloacae
MKQYLELMKKVLDEGTPKNDRTGTGTLSIFGHQMRFNLQEGFPLVTTKRCHLRSIIHELLWFLQGDTNVAYLHENNVSIWDEWADENGNLGPVYGKQWRAWPTPDGRHIDQITTVMNQLKNDPDSRRIIVSAWNVGELDKMALAPCHAFFQFYVADGKLSCQLYQRSCDVFLGLPFNIASYALLVHMMAQQCDLEVGDFVWTGGDTHLYSNHMEQTHLQLTREPRALPKLIIKRKPASIFDYRFDDFEIEGYDPHPGIKAPVAI

SEQ ID NO: 55888 - protein, 331 aa, Enterobacter cloacae
MMLDIVELSRLQFALTAMYHFLFVPLTLGMAFLLAIMETVYVLSGKQIYKDMTKFWGKLFGINFALGVATGLTMEFQFGTNWSYYSHYVGDIFGAPLAIEGLMAFFLESTFVGLFFFGWDRLGKVQHMAVTWLVALGSNLSALWILVANGWMQNPIASDFNFETMRMEMVTFAELVLNPVAQVKFVHTVASGYVCGAMFVLGISSYYMLRGRDFAFAKRSFAIAASFGMAAILSVIVLGDESGYEMGDVQKTKLAAIEAEWETQPAPAAFTLFGIPDQDAQENRFAIQIPYALGIIATRSVDKQVTGLKELMVQHEERIRNGMKAYSLLEQ

SEQ ID NO: 55889 - protein, 289 aa, Enterobacter cloacae
MSVLINKDTKVICQGFTGSQGTFHSEQAIAYGTQMVGGVTPGKGGTTHLGLPVFNTVREAVEATGATATVIYVPAPFCKDSILEAIDAGIKLIITITEGIPTLDMLTVKVKLDEAGVRMIGPNCPGVITPGECKIGIMPGHIHKPGKVGIVSRSGTLTYEAVKQTTDYGFGQSTCVGIGGDPIPGSNFIDILKLFQEDPQTEAIVMIGEIGGSAEEEAAAYIKEHVTKPVVGYIAGVTAPKGKRMGHAGAIIAGGKGTADEKFAALEAAGVKTVRSLADIGEALKSIIK

SEQ ID NO: 55890 - protein, 935 aa, Enterobacter cloacae
MQNGAMKAWLDSSFLSGANQSWIEQLYEDFLTDPDSVDANWRSMFQQLPGTGVKPDQFHSKTRDYFRRLAKDASRYSSAISDPDTNAKQVKVLQLINAYRFRGHQHANLDPLGLWKQDRVADLDPAYHDLTEADFQESFNVGSFAIGKDTMKLGDLIDALKQTYCGSIGAEYMHITSTEEKRWIQQRIESVAGHATFSADEKKRFLNELTAAEGLERYLGAKFPGAKRFSLEGGDALVPMLKELIRHAGKSGTREVVLGMAHRGRLNVLVNVLGKKPQDLFDEFAGKHKEHLGTGDVKYHMGFSSDIETEGGLVHLALAFNPSHLEIVSPVVIGSVRARLDRLDEPSSNKVLPITIHGDAAVTGQGVVQETLNMSKARGYEVGGTVRIVINNQVGFTTSNPLDARSTPYCTDIGKMVQAPIFHVNADDPEAVAFVTRLALDFRNTFKRDVFIDLFCYRRHGHNEADEPSATQPLMYQKIKKHPTPRKIYADKLESDKVTTLEDATEMVNLYRDALDAGECVVKELRPMNMHSFTWSPYLNHEWDESYPNKVEMKRLQELAKRISTVPDAIEMQSRVAKIYADRQSMAAGEKLFDWGGAETLAYATLVDEGIPVRLSGEDAGRGTFFHRHAVVHNQSNGSTYTPLQHVHNGQGQFKVWDSVLSEEAVLAFEYGYATAEPRTLTIWEAQFGDFANGAQVVIDQFISSGEQKWGRMCGLVMLLPHGYEGQGPEHSSARLERYLQLCAEQNMQVCVPSTPAQVYHMLRRQALRGMRRPLVVMSPKSLLRHPLAVSSLEELANGTFLPAIGEIDELDPQGVKRVVMCSGKVYYDLLEQRRKNDQKDVAIVRIEQLYPFPHQAMQEVLKQYAHVHDFVWCQEEPLNQGAWYCSQHHFREVIPFGSALRYAGRPASASPAVGYMSVHQKQQQDLVNDALNVD

SEQ ID NO: 55891 - protein, 517 aa, Enterobacter cloacae
MKLPFKPHLLVLVCSAGLFAASGVMFVKGRATEPAAPAAVTQQPAPPAAPAAAQSAPAVAPAYTAAQIDQWVAPVALYPDALLSQILMASTYPANVIQAAQWSKDNPKMEGDAAIQAVASQPWDPSVKSLVAFPQLMSLMGENPPWVQNLGDAFLAQPKDVMDSVQRLRALAQKTGALQSTPQQTVTTVTKPAPAKTSTAETTTTTTSAPTVIKIESADPQVVYVPTYNPNTVYGTWPNAAYPPTYLPPTPGEQFGNSFVNGLGFSLGVATTYAIFSSIDWDDDDDWDHHHDDWDNHGGYNRNGDNNININVENFNKISGQRLTDANRTWQHNPAYREGVPYPTNQLNTRFHATNTATGLSSTQQKPVNRDSQRQAALSQMEKSTGKTFPQTARTGTKDVQRQASGEQLKQISQRNNYRGYDTKPQTAKRSTAQQRENRQTTAQRHEKRVSQPVQQRSLQQRNSQPRANALSGNDSRSANWQAQQQRGAQSRQLAARQQQPRQASGGRAERREIRHR

SEQ ID NO: 55892 - protein, 474 aa, Enterobacter cloacae
MSTEIKTQVVVLGAGPAGYSAAFRAADLGLETVIVERYSTLGGVCLNVGCIPSKALLHVAKVIEEAKALAEHGIVFGEPKTDIDKIRTWKEKVITQLTGGLAGMAKGRKVKVVNGLGKFTGANTLEVEGENGKTVINFDNAIIAAGSRPIELPFIPHEDPRVWDSTDALELKTVPKRLLVMGGGIIGLEMGTVYHALGSEIDVVEMFDQVIPAADKDIVKVFTKRISKKFNLMLETKVTAVEAKEDGIYVSMEGKKAPSEPQRYDAVLVAIGRVPNGKNLDAGKAGVEVDDRGFIRVDKQLRTNVPHIFAIGDIVGQPMLAHKGVHEGHVAAEVIAGMKHYFDPKVIPSIAYTEPEVAWVGLTEKEAKEKGISYETATFPWAASGRAIASDCADGMTKLIFDKETHRVIGGAIVGTNGGELLGEIGLAIEMGCDAEDIALTIHAHPTLHESVGLAAEVFEGSITDLPNAKAKKK

SEQ ID NO: 55893 - protein, 632 aa, Enterobacter cloacae
MAIEINVPDIGADEVEITEILVKVGDKVEAEQSLITVEGDKASMEVPSPQAGIVKEIKVSVGDKTETGKLIMIFDSADGAAAAAPAQEEKKEAAPAAAAPAAAAAAKEVNVPDIGGDEVEVTEILVKVGDTVAAEQSLITVEGDKASMEVPAPFAGTVKEIKINTGDKVSTGSLIMIFEVAGAEGAAAPAQAAAPAPAAAPAAAGGAKDVNVPDIGGDEVEVTEVMVKVGDKVAAEQSLITVEGDKASMEVPAPFAGTVKEIKISTGDKVSTGSLIMVFEVEGAAPAAAPAAAAAPAPAAAPAQAAKPAASPAAKAEKSEFAENDAYVHATPLIRRLAREFGVNLAKVKGTGRKGRILREDVQTYVKDAVKRAEAAPAAAAGGGIPGMLPWPKVDFSKFGEIEEVELGRIQKISGANLSRNWVMIPHVTHFDKTDITDLEAFRKQQNAEAEKRKLDVKFTPVVFIMKAVAAALEQMPRFNSSLSEDGQKLTLKKYINIGVAVDTPNGLVVPVFKDVNKKSITELSRELTVISKKARDGKLTAGEMQGGCFTISSIGGLGTTHFAPIVNAPEVAILGVSKSAMEPVWNGKEFVPRLMMPISLSFDHRVIDGADGARFITIINNMLSDIRRLVM

SEQ ID NO: 55894 - protein, 437 aa, Enterobacter cloacae
ELALGLGQVDTHNMELTDGGVLNVASRDYVLNSDLNNARYITNDKYNADYDYGVVAINSNGHLSVNGDVAGNYQVRIDDATGAGSVADYKNKEIIRVYDNNADTTASFTAANKADLGAYTYQAQQQGDAVVLQQKELTDSANMALSIPSANTNIWNLQQDTVGTRLTNSRHGLADNGGAWVSYFGGNFDGDNGVISYDQDVSGIMVGVDTQIDGNNAKWIVGGAAGFAKGDASDRTGQVDQDSQTAMIYASAKFMNDLFLDSSLSYTRFNSDLSANMSNGQYVDGNTTNDAVGFGLKLGYDWKPNLSGYFTPYAAVSGLFQSGDDYRLSNDMRADGQSYDSLRYELGVDTGYTFNYGGEQALTPYFKLAYVYDDADNNADINGDSIDNGVKGSAVRVGLGTQFSFTKNFSAYTDATYLGGGDVDQNWGANLGVKYTW

SEQ ID NO: 55895 - protein, 366 aa, Enterobacter cloacae
MAKQRVGIVFGGKSAEHEVSLQSAKNIVDAIDKSRFDVVLLGIDKQGQWHVNDASQYLLNAHDPAHIALNPSEVSVATVPGVVKGQLIDAGNAQALAQIDVVFPIVHGTLGEDGSLQGMLRMANLPFVGSDVLGSAACMDKDVTKRLLRDAGLNIAPFVTLTRANRDKHSFAQISGELGLPLFVKPANQGSSVGVSKVTSEAEFTQAVRLAFEFDHKVVVEQGIKGREIECAVLGNDFPQASTCGEVVLNSDFYSYDTKYIDDKGAQVVVPADIDPAINDKIRAIAIRAYQTLGCCGMARVDVFLTAENEVVINEINTLPGFTNISMYPKLWQASGLSYPELITRLIELALERHAADSALKSSVNS

SEQ ID NO: 55896 - protein, 207 aa, Enterobacter cloacae
MNVNAKPLSELRRLEQYLTAASTPFTCAPQQLITSDEWNEPCTIVLQTGVIEVYRTSDELLVGIATAPFIFGLSTVVINHSHEYRVIAKTACTGFYLPTETTRQLIQQYSLWKEAFCWLSWITYILEKRDKQLVGNNSYHQIRSMLLNMAEWDETLRSKIGVMNHIQQSTRISRSVVAEVLAALRQGNYINMSRGKLVSINRLPTEY

SEQ ID NO: 55897 - protein, 765 aa, Enterobacter cloacae
MLLSEFMSLILFLASVGVYAWKAGRHTWWFIATLVVLGIFIILNITLYASDYFTGDGINDAVLYTLTNSLTGAGVGKYILPGLGLIVALVTIFGALAWVLRRRRHLPHHHGYSLLALFLALASVDASPAFHQITELVKSQSRDGDPDFAAYYKEPSKTIASPKLNLVYIYGESLERTYFDNDAFPNLTPDLGALKNEGLDFSHTMQLPGTDYTIAGMVASQCGIPLFAPFEGNASASMSTFFPQNICLGDILKNSGYENYFVQGANLRFAGKDVFLKSHGFDHLYGSEELKTTVADPSYRNDWGFYDDTVLDETWKKFEELSRAGKRFSLFALTVDTHHPDGFVSRSCKRKSYDVDGKNNKSFSAVTCSQEHIAALVEKIKASPWFKNTVIVVSSDHLAMKNSAWDRLNKQDRSNLFFVLRGDQPQQEVIATKRNSMDNGATVLDILGGDNFIGLGRSTLSGQSLSEVFLNMKDKILAWKPDIIRLWNFPKEMKDFTIDRDKNTIAFSGSSFRLPLLVRVSAGRVEPLPESEYSAPLRYQLADFAPRDNFVWVDRCYKMGQLWSQPLALSTDWCVSQGQLGGEQTVQHVDKAQWKGKTAFNDTVIDTARYQHNIDMLKVSDNDIRYKADSFIFNVAGAPEEVKQFSGISRPESWGRWSNAQLGNEVKIEYAHPLPEQFDLVITARAYGPNANKPVPVRVGDREQTLTLGNDVSTQTLHFENPSRSNTLVIVPPDPQSTNEGNILGHSPRELGIGMVEIKIVSKAG

SEQ ID NO: 55898 - protein, 616 aa, Enterobacter cloacae
MRRVLTTLMILLVVLVAGLSALVLLVNPNDFRAYMVRQVEARSGYQLKLDGPLRWHVWPQLSILSGRMSLTAPGAAQPLVSADNMRLDVALFPLISHQLQVKQVMLKGAVIQLTPQTEAVRDASAPVAPRENTLPDDPSDTGWSFDIGKLKVADSVLVFQHEHQEQVTIRNINLQMEQDAHHLASLEFSGRVNRDQRDLTLSLNANVNASDYPHQLTADIQQLNWQLTGADLPTQGVTGQGTLQAVWREEQKQLELDNLNLQANDSSLKGQASVTLEEKPKWVLNLQFDKLNLENLLPPLPASATDSDATQTGQSQAPVSRPVISSNLDQPDYNALRGFTADILLKANSLRWRGIDFSDVSSQMFNHNGLLVISELSGKMGAGSLSLPGTLDVRKDEASAEFQPRLDNVEIGTILNAFNYPISLTGQLTLAGDFSGTKIDADAFRREWQGQAHLDLKNSRMEGLNFQQLVQQAVERSSDVKAQDNYDSATRLDSFTTDLTLDNGQLTLDGMQGTSSLLSMTGEGKLDLVKETADTRFNVRVLSGWQGESKLIDFLKETPVPLTVYGKWQALNYRLEVDQILRKHLQDEAKRRLSGWAERNKDSQDGKDVKKLLDKL

SEQ ID NO: 55899 - protein, 391 aa, Enterobacter cloacae
  MISC_FEATURE (4)..(4): X=any amino acid
  MISC_FEATURE (139)..(139): X=any amino acid
LSPXRHFVKVSPLLHWHGDSIVFIGFDYGTANCSVAIMQNGQPQLLKMEKESTLLPSMLCAPTREAVSEWLFRHHQVPATAAETQALLRRAVSFNREEDIDVSPSSVQFGLSSLGHYIEDPEEVYFVKSPKSFLGATDXKPQQVAMFEDLVCAMMLHIRNQAQTQVSDAITQAVIGRPINFQGLGGDEANQQAQGILERAAHRAGFRDVVFQYEPVAAGLDFEATLTEEKRVLVVDIGGGTTDCSLLLMGPQWHNRRDRENSLLGHSGCRVGGNDLDIALAFKSLMPLLGMGGQTEKGIALPILPWWNAIAINDVPAQSDFYSTANGRFLNDLVRDAQDAEKVALLYKVWRQRLSYRVVRTAEESKIALSDRAEHAVSLPFISDDLATAIS

SEQ ID NO: 55900 - protein, 320 aa, Enterobacter cloacae
MSAISLIQPDRDLFSWPQYWAACFGPAPFLPMSREEMDQLGWDSCDIILVTGDAYVDHPSFGMAICGRMLEAQGFRVGIISQPDWNSKDDFMRLGKPNLFFGVTAGNMDSMINRYTADRKLRHDDAYTPDNVAGKRPDRATLVYTQRCKEAWKDVPVILGGIEASLRRTAHYDYWSDTVRRSVLVDSKADMLIYGNGERPLVEVAHRLSQGEPVSSIRDVRNTAIMVKEALPGWSGVDSRIIDMPGKIDPIPHPYGEDLPCADNKPVEPKKAEAKAIVVQPPRPKPWEKTYVLLPSYEKVKADKVLYAHASRILHHETNP

SEQ ID NO: 55901 - protein, 498 aa, Enterobacter cloacae
MLVRSSVVKPNDSLHVSQLRVVLHLCGFLVLLYSLSMLPPMVIALLNKERTYFAFLTTFLTFFTLGGLTWRATRHAGIQLRTRDGFVIIVLFWLLFSFISAMPLWMDDGLRLSFADALFEGVSGITTTGATVIGDVSALPKSYLYYRAQLNFIGGLGVIVLAVAVLPLLGIGGMKLYQSEMPGPFKEERLTPRLADTARTLWVTYFALGVACTLAYWLAGMSFFDALCHGLSTVSLGGFSTRSESIGFYDSHAIELVAGAFSLLSAFNFTLWYVAIVRRTLKPIRRSPEVKFFLSAAAVIIAITAWQVWHAGMYNATDSLVHAFFLASSMMTDNGLSTADYAQWPAHTIFLLLSASFFGGCVGSTCGGIKALRFLIMFKQSIQEMNQLAHPRALLSIKVGKSVVNERVLRSVWSFFFLYVMITGFFVWSLNLMGYDLFTAFATVAACINNMGLGFGETASTFGTLTEGAKLLMCAAMILGRLEIYPVLILFSRFFWRA

SEQ ID NO: 55902 - protein, 246 aa, Enterobacter cloacae
ELSDPEMMRYNRQIVLRGFDFEGQEALKAASVLVVGLGGLGCAAAQYLAAAGVGRMTLLDFDTVSVSNLQRQTLHSDATVGQPKVDSARSALARINPNVQFTLIDAMLDNGALSAQIAQHDLVLDCTDNVTVRNQLNAGCFAHKIPLVSGAAIRMEGQISVFTYAEGEPCYRCLSRLFGENALTCVEAGVMAPLVGVIGSLQAMEAIKVLARYGTPAAGKIVMYDAMTCQFREMKLMRNPGCEVCG

SEQ ID NO: 55903 - protein, 410 aa, Enterobacter cloacae
MDFTAGLMPLETALTQMLDRVSPLHDVETLPLVRCFGRIAARDIVSPLNVPGFDNSAMDGYAVRLADLQAGNALPVAGKAFAGQPFSGEWPAGTCVRIMTGAPVPAGCDAVVMQEETEQTDGGVRFTANVKAGQNIRRTGEDITLGATVFAAGQKLTAGELPVLASLGVAEIDVIRKVRVAVFSTGDELQLPGQPLQDGQIYDTNRLAVHLMLEQLGCEVINLGIIPDDPEKLRAAFIEADNAADVVISSGGVSVGEADYTKTILEELGEIAFWKLAIKPGKPFAFGKLTHGWFCGLPGNPVSAALTFYQLVIPLLANVSGNSATSLPERQRVRAATRLKKSPGRLDFQRGILARNADGELEVSTTGHQGSHIFSSFSQGNCFIVLERERGNVEAGEWVEIERFNHLFGG

SEQ ID NO: 55904 - protein, 600 aa, Enterobacter cloacae
VLAVHQLNIAFQEERQFIPAVQNLSFTLRRGETLAIVGESGSGKSVTALALMRLLEQTGGQISSEKMLLRRRNRQVIDLNELSGAQMQGVRGADIAMIFQEPMTSLNPVFPVGEQIAESIRLHQGLSGDEALKEARRMLELVRIPEAQAILGRYPHQLSGGMRQRVMIAMALSCRPAVLIADEPTTALDVTIQAQILQLIKVLQQEMEMGVIFITHDMGVVADIADRVLVMHKGSAVETGPVEQIFHAPVHPYTKALLAAVPRLGAMNGSDLPRRFPLISLEASEQQEDEREQDTVVPGKPILEVRDLVTRFPLRSGILNRVKREVHAVENVSFDLWPGETLALVGESGCGKSTTGRALLRLVESQEGSITFNGERIDTLPDSRLQAVRRDIQFIFQDPYASLDPRHTVGYSIMEPLRVHNLLDGEAAQRRVAWLLERVGLKPEHAWRYPHEFSGGQRQRICIARALALNPKVVIADESVSALDVSIRAQIINLLLDLQRDMGIAFLFISHDMAVVERISHRVAVMFMGQIVEIGPRRAVFENPQHPYTRKLIAAVPVADPAHRHGQRVLLQDEMPGNIHKRGEAVERRALREVEPGHFV

SEQ ID NO: 55905 - protein, 303 aa, Enterobacter cloacae
MRLLNWRRQAVLNAMPGLKPDHVRTPWSEFWRRFRRQPVAMTAGLFVLLLIAVAAIAPWVAPFDAENYFDYDRLNDGPSMLHWFGVDSLGRDIFSRVLVGAQISLAAGVFAVLIGAAIGTVLGLVAGYYEGWWDRIIMRICDVLFAFPGILLAIAVVAIMGSGMANVIIAVAVFSIPAFARLVRGNTLVLKQQTFIESARSMGASDATILFSHILPGTVSSIVVYFTMRIGVSIISAASLSFLGLGAQPPTPEWGAMLNEARADMVIAPHVAIFPSLAIFLTVLAFNLLGDGLRDALDPRIKG

SEQ ID NO: 55906 - protein, 441 aa, Enterobacter cloacae
MSNVTHQPKIGFVSLGCPKNLVDSERILTELRTEGYDVVPSYDNADMVIVNTCGFIDSAVQESLEAIGEALTENGKVIVTGCLGAKEDQIREVHPKVLEITGPHSYEQVLEHVHHYVPKPKHNPFLSLVPEQGVKLTPRHYAYLKISEGCNHRCTFCIIPSMRGDLVSRPIGEVLAEAKRLADAGVKELLVISQDTSAYGVDVKHRSGFHNGEPVKTSMVGLCEQLSKLGIWTRLHYVYPYPHVDDVIPLMAEGKILPYLDIPLQHASPRILKLMKRPGSVDRQLARIKQWREICPDLTLRSTFIVGFPGETEEDFQMLLDFLKEARLDRVGCFKYSPVEGATANELADQVPEEVKEERWNRFMQLQQQISAERLQEKVGREIMVIVDEVDEEGAIGRSMADAPEIDGAVYLNGETNVKPGDIIRVKVENADEYDLWGSRV

SEQ ID NO: 55907 - protein, 451 aa, Enterobacter cloacae
LAGALLVLWGLIVAADRLWPLPLKEVNPARVVVDEKGTPLWRFADSDGIWRYPVTIEEVSPRYLEALIQYEDRWFWDHPGVNPLSVLRAAWQDLSSGKVVSGGSTLTMQVARLLDPHPRTFGGKVRQLWRAMQLEWHLSKRDILTLYLNRAPFGGTLQGVGAASWTYLGKPPSQLSYSEAALLAVLPQAPSRLRPDRWPERAEAARNKVLDRMVTQGVWSAKQVKESREESVWLAPRQMPQLAPLFARMMLGKSRDTKIVTTLDAGLQRQLEELAMNWKSRLPARSSLAMIVVDHTDMKVRGWVGSVDINDDTRFSHVDMVNAIRSPGSVLKPFIYGMALDDGLIHPASLLQDVPRKTGDYRPGNFDSGFHGPVSMSEALVRSLNLPAVQVLEAYGPKRFAGMLSNAGLPLILPAGAQPNLSLILGGAGARLADITAAYSAFARHGKAGRL

SEQ ID NO: 55908 - protein, 337 aa, Enterobacter cloacae
MNTEATHDQHEALSTGVRLRNAREQLGLSQQAVAERLCLKVSTVRDIEEDKAPADLASTFLRGYIRSYAKLVHIPENELLPMMEKQAPVRAAKVAPMQTFSLGKRRKKRDGWLMSFTWLVLFVVIGLTGAWWWQNHKAQQEEITTMADQSSAELNQAGSENAQNVPLNTDGAASSSEPQTAAPDASATDAVQAPAATANTAAPQVQDQNAVVAPSQANVDTAANAPAAAQPADNSAATLPTSPAGTATAADPNALVMNFSADCWLEVTDATGKKLFSGLQRKDGTLNLTGQAPYKLKIGAPAAVQIQYQGKPVDLSRFIRTNQVARLTVNAEQSAAQ

SEQ ID NO: 55909 - protein, 372 aa, Enterobacter cloacae
MHNQAPIQRRKSKRIYVGNVPIGDGAPIAVQSMTNTRTTDVEATVNQIKALERVGADIVRVSVPTMDAAEAFKLIKQQVSVPLVADIHFDYRIALKVAEYGVDCLRINPGNIGNEERIRMVVDCARDKNIPIRIGVNAGSLEKDLQEKYGEPTPQALLESAMRHVDHLDRLNFDQFKVSVKASDVFLAVESYRLLAKQIDQPLHLGITEAGGLRSGSVKSAIGLGLLLSEGIGDTLRVSLAADPVEEIKVGFDILKSLRIRARGINFIACPTCSRQEFDVIGTVNALEQRLEDIITPMDVSIIGCVVNGPGEALVSTLGVTGGNKKSGLYEDGVRKDRLDNSDMIDQLEARIRAKAAMMDETQRISVQQVEK

SEQ ID NO: 55910 - protein, 424 aa, Enterobacter cloacae
VAKNIQAIRGMNDYLPGETAIWQRIEGTLKQVLGSYGYSEIRLPIVEQTPLFKRAIGEVTDVVEKEMYTFEDRNGDSLTLRPEGTAGCVRAGIEHGLLYNQEQRLWYIGPMFRHERPQKGRYRQFNQLGVEVFGLQGPDIDAELIMLTARWWRALGIADHVSLELNSIGSLEARANYRDALVAFLEQHKEKLDEDCKRRMYSIPLRVLDSKNADVQALLNDAPALGDYLDEESREHFAGLCKLLEAAGIAYTVNQRLVRGLDYYNRTVFEWVTTSLGSQGTVCAGGRYDGLVEQLGGRAAPAVAFAMGLERLVLLVQAVNPEFKADSVVDIYLVASGAETQSAAMQLAERVRDALPDVKLMTNHGGGNFKKQFARADKWGASIALVLGESEVANGEVVVKDLRSGEQTTVTQDGVAAHLRTLLG

SEQ ID NO: 55911 - protein, 353 aa, Enterobacter cloacae
MQLRKLLLPGLLSVTLLSGCSLFSGEEDVVKMSPLPTVENQFTPSTAWDVSVGNGIGDFYSNLHPAYADSVVYAADRKGTVKAVNADDGKEVWSVNLAEKDGWFSRKPALLSGGLTVAGGHVYVGSEKAQVYALNSSDGSIAWQTTVAGESLSRPVVSDGLVLIHTSNGQLQALNEADGLVKWTVNLDMPALSLRGESAPATAFGAAIVGGDNGRVSAVLMQQGQMIWQQRISQATGSTEIDRLSDVDTTPVIVNGVVYALAYNGNLTALDLRSGQIMWKRELGSVNDFIVEGNRIYMVDQNDRLLALSTEGGVTLWTQSDLLHRLLTAPALYNGSLVVGDTEGYMHWIDPDT

SEQ ID NO: 55912 - protein, 531 aa, Enterobacter cloacae
PFLTTRKRPMKLNTLVTLMVCAIIASVLLVVFALYSVQITRATRDDVKDTALGIARTLANSPEIQRGLMQPPQADIIQPIAKAVTQRNDLLLTVVTDMRGIRYSHPNEALIGLHFIGNDLEPALEGKENVSVNRGALAEALRVFTPVYDSQHDQIGVVVVGISLKKVEDQIARGRLNAVWTILFSIFMSSMAIWGLVRVLKRILFGLEPYEISALFEQRQAMLQSLREGVLAVDIHGRVTMINQTAREILLLPSGKQTENASAPLLASLREVSKTGVARQDHEISCNGRLLLCNMVPVKSQDRVIGAITTFRDKTEISQLMQRIDGMVNYVDALRSHTHEFMNKLHVILGLLHMKRYDKLEEYIIQTAHNYQTDIGTIQSKVKSPVIAGFLLGKINRAKEAGVTLTLADQCQIPDTASEEQVAVLITVLGNLIENALDAMEGQQEGEIGLLLHYQNGWLSCEVSDDGPGIDPAQLEAIFTKGFSTKGENRGVGLFLARQQIQNLGGDITVESEPGVFTQFFVHIPWDSERN

SEQ ID NO: 55913 - protein, 388 aa, Enterobacter cloacae
MKRKVLAILVPALLMAGAANAAEMYNKNGNKVDLYGKVDARHTFSDNPGDDGDETYVQVGFKGETRIANDLIGYGQWEYKTFANDTEGAGNKSFNRLAYAGLKYGEYGSFDYGRNYGVVYDVEAWTDMLPVFGGDSYTWTDNFMNGRANGLATYRNQDFFGLVEGLNFALQYQGTNEGQDATEDQEGTKNGHDDVRFQNGDGFGMSTTYDFDFGLSLGAAYSSSDRTNTQVAYGAGNDNRYSPYAGGERAEAWTIGAKYDAQGVYLAMMYAETRNMTPYGNFGIANKTQNFEAVAQYQFDFGLRPSLAWVYSKGKDIGGNDYNPGNTYNYVDQDLVNYIDLGMTFSFNKNFSTYVDYKINLLDNDESFYKANGISTDDIVGAGMTYQF

SEQ ID NO: 55914 - protein, 471 aa, Enterobacter cloacae
MKQSALFIALLPLLITPAIYADTAQTSVLDNRAAKGDITQPGGARRLSEDQTAAIRASLNDKPAKNIILLIGDGMGDSEITAARNYAEGAGGFFKGIDALPLTGQYTHYALDKKTGKPDYVTDSAASATAWSTGVKTYNGALGVDIHEKDHQTLLEMAKAAGLATGNVSTAELQDATPAALVAHVTSRKCYGPSVTSEKCPTNALEKGGKGSITEQLLNARPDVTLGGGAKTFAETATAGEWQGKTLREQAQARGYQLVSDASSLAAITEANQDKPLLGLFSDGNMPVRWEGPKASYHGNIDKPAVTCTPNPKRTDSVPTLAAMTDKAISLLSKSEKGFFLQVEGASIDKQDHAANPCGQIGETVDLDEAVQKALEFAKKDGNTLVVVTADHAHASQIIPADTKAPGLTQALNTKDGAVMVLSYGNSEEESMEHTGTQLRIAAYGPHAANVVGLTDQTDLFYTMKAALGLK

SEQ ID NO: 55915 - protein, 63 aa, Enterobacter cloacae
MPTRPPYPREARIVTVEKGQTGHTVTWYQLRADHPKPDSLISEHETEQEALDAKRRYEDPDIT

SEQ ID NO: 55916 - protein, 106 aa, Enterobacter cloacae
MLHPLQLFKTLSDETRLAIVMLLREAAELCVCDLCVATAESQPKVSRHMALLRESGLVIDRREGKWVHYRLSPNMPAWAAVVIDNSWNCLREETRMKLKNRLSGSC

SEQ ID NO: 55917 - protein, 202 aa, Enterobacter cloacae
MLENLNYQLFYLINATPASPEWTIDFATFLAKDLISIVPALAAILWLWGPRSQVKAQRQLVIKVAMALGVSVLVSYILGHVFPHDRPFVDHVGYTFLHHAPDDSFPSDHGTVIFTFALAFLFWHRLWSGAVLMVAALAIAWSRVYLGVHWPLDMVGGFLVGMIGCVSAAILWSLFGEALYRTLSSLYRAIFAIPIRKGWIRD

SEQ ID NO: 55918 - protein, 407 aa, Enterobacter cloacae
MDKLLERFLQYVSLDTQSKPGVRQVPSTEGQWKLLNLLKEQLDAMGLVNVTLSEKGTVMATLPANVQGDIPAIGFISHVDTSPDFSGKHVNPQIVENYRGGDIALGIGDEVLSPVMFPVLHQLLGQTLITTDGKTLLGADDKAGIAEIMTALAVLKGKNIPHGDIRVAFTPDEEVGKGAKHFDVEAFNAQWAYTVDGGGVGELEYENFNAASVTIKIVGNNVHPGSAKGVMVNALSLASRIHAEVPAEESPEQTEGYEGFYHLTSIKGTVDSAQMHYIIRDFDRKAFEARKRKMMEIAKKVGKGLHPDCYIELIIEDSYYNMREKVMAHPHILDIAQQAMRDCDIEPQLKPIRGGTDGSQLSFMGLPCPNLFTGGYNYHGKHEFVTLEGMEKAVKVIVRIAELTAKR

SEQ ID NO: 55919 - protein, 370 aa, Enterobacter cloacae
MSDNSQKKVIVGMSGGVDSSVSAYLLQQQGYKVEGLFMKNWEEDDGEEYCTAAADLADAQAVCDKLGIELHTVNFAAEYWDNVFELFLEEYKAGRTPNPDILCNKEIKFKAFLEFAAEDLGADYIATGHYVRRADVNGKSQLLRGLDGNKDQSYFLYTLSHEQIAQSLFPVGELEKPQVRKIAEELDLITAKKKDSTGICFIGERKFRDFLGRYLPAQPGKIVTVDGEEIGQHQGLMYHTLGQRKGLGIGGTKEGSEDPWYVVDKDVENNILVVAQGHDHPRLMSVGLIAQQLHWVDREPLKGTLRCTVKTRYRQTDIPCTITALDDDRIDVRFDEPVAAVTPGQSAVFYSGEICLGGGIIEQRLPLPAV

SEQ ID NO: 55920 - protein, 456 aa, Enterobacter cloacae
MELSSLTAVSPVDGRYGDKVSALRGIFSEYGLLKFRVQVEVRWLQKLAAQAAIKEVPAFDEKANDYLDKIVAEFSEQDAARIKTIERTTNHDVKAVEYFLKEKVESVPALTPVSEFIHFACTSEDINNLSHALMLSTARKEVVLPYWRKIIDAVKALSVEYRDIPLLSRTHGQPATPSTMGKEMANVAYRMERQYRQLEQIEILGKINGAVGNYNAHIAAYPEVDWHQFSEEFVTSLGIQWNPYTTQIEPHDYIAELFDCIARFNTILIDFDRDVWGYIALNHFKQKTIAGEIGSSTMPHKVNPIDFENSEGNLGLANAVLQHMASKLPVSRWQRDLTDSTVLRNLGVGIGYALIAYQSTLKGVSKLEVNRDRLLDELDHNWEVLAEPIQTVMRRYGIEKPYEKLKELTRGKRVDAEGMKQFIDGLALPEEEKTRLKAMTPANYIGRAITMVDELK

SEQ ID NO: 55921 - protein, 487 aa, Enterobacter cloacae
MRGILRHILPLSLRVRFLLATAAVVLVLSLSYGMVALVGYSVSFDKTTFRLLRGESNLFYTLAKWENNRITVEMPENLNQQSPTLALIYNEKGKLLWAQRDIPWLVKSIRPEWLKTNGFHEIEADLNTTSSLIHEDRSLQQKLNEIRADNAETEMTHSVAINLYPATLNMPQLTIVVIDTIPVELKRSYMVWSWFIYVLAANLLLVIPLLWVAAWWSLRPIESLAKEVRELEEHHREKLNPETTRELTSLVRNLNRLLKSERERYDKYRTTLTDLTHSLKTPLAVMQSTLRSMRSSKLSVDDAEPVMLEQISRISQQIGYYLHRASMRSGSALLSRELHPVAPLLDNLTSALNKVYQRKGVNISLDISPEISFVGEKNDFMEVMGNLLDNACKYCLEFVEVSARQTETELHIIVEDDGPGIPRNKRDVVFDRGQRADTLRPGQGVGLAVAREIVDQYDGKIETSESLLGGARMEVIFGRQQLTLNDS

SEQ ID NO: 55922 - protein, 154 aa, Enterobacter cloacae
MRYHQYYPVDIVNGPGTRCTLFVSGCVHECPGCYNKSTWRLNSGMPFSAEMEDRIVNDLNDTRIHRQGISLSGGDPLHPQNVPDILKLVKRIRGECAGKDIWVWTGYRLDELNAQQMEVVDLINVLVDGKFVQDLKDPALIWRGSSNQVVHHLR

SEQ ID NO: 55923 - protein, 636 aa, Enterobacter cloacae
MRFPNQRLAQLFDLLQNETLPQDELAQRLSVSTRTVRADITALNALLASHGAQFILSRGNGYQLKIDDAQRYQQLHASHPRALRIPRTGPERVHYLVVRFLTSAFSLKLEDLADEWFVSRATLQSDMAEVREWFHRYNLTLETRPRHGMKLFGSEMSTRACLTDLLWELAQQDSLNPLVTDVALNAGVAEQMVPVLHEALTRHHIRLTDEGELFLRLYCAVSVRRISEGYPLPEFHAEDVEENVREAAKDIAVTIQQLAGKALSPSEESWLCVHIAARQIQEIAPSAINADDDEALVNYILRYINTHYNYNLLSDAQLHADLLTHIKTMITRVRYQIMIPNPLLDNIKQHYPMAWDMTLAAVSSWGKYTPYVISENEIGFLVLHIGVGLERHYNIGYQRQPRVLLVCDAGNAMVRMIEAVLQRKYPQIEVARTLTLREYELAETISEDFVIATARVSEKSKPVVTIAPFPTDYQLEQIGKLVLVDRTRPWMLDKYFDAAHFRIIDKPVDQQTLFRELCAQLEGEGFVGAEFLDSVVEREAIVSTMLGDGIALPHSLGLLAQKTVVYTVLAPHGVQWGDETAHVIFLLAISKSEYEEAMAIYDIFVTFLRERAMSRLCSCSDFAEFKAVAMESLSRF

SEQ ID NO: 55924 - protein, 392 aa, Enterobacter cloacae
MKDVVIVGALRTAIGCFQGSLARHSAVELGSVVVKALVERSGIAAHEVDEVILGQVLTAGAGQNPARQAALKGGLPNTVSAITINDVCGSGLKALHLATQAIQCGEADVIIAGGQENMSRAPHVLTDSRTGAQLGNSQLLDSLVHDGLWDAFNDYHMGVTAENLAREYGISREVQDAYALSSQQKARAAIDSGRFRDEIVPVSTQRQSGERILVDTDEQPRTDASAEGLARLNPAFEMQGSVTAGNASSINDGAAAVMMMSESKALELDLPVLARIKAFASVGVDPALMGIAPVYATRRCLERAGWQLSDVDLIEVNEAYAAQAISVGKMLEWDPLRVNVNGGAIALGHPIGASGCRILVSLVHEMKKRNARKGIATLCIGGGQGVALAIER

SEQ ID NO: 55925 - protein, 234 aa, Enterobacter cloacae
MAKLTKRMSVIRDKVDATKQYDINEAIALLKELATAKFVESVDVAVNLGIDARKSDQNVRGATVLPHGTGRSVRVAVFAQGANAEAAKAAGAELVGMEDLADQIKKGEMNFDVVIASPDAMRVVGQLGQVLGPRGLMPNPKVGTVTPNVAEAVKNAKAGQVRYRNDKNGIIHTTIGKVDFDADKLKENLEALLVALKKAKPTQAKGVYIKKVSISTTMGAGVAVDQAGLSAAAN

SEQ ID NO: 55926 - protein, 142 aa, Enterobacter cloacae
MAKKVQAYVKLQVAAGMANPSPPVGPALGQQGVNIMEFCKAFNAKTESLEKGLPIPVVITVYADRSFTFVTKTPPAAVLLKKAAGIKSGSGKPNKDKVGKISRAQLQEIAQTKAADMTGADIEAMTRSIEGTARSMGLVVED

SEQ ID NO: 55927 - protein, 181 aa, Enterobacter cloacae
MSEAPKKRWYVVQAFSGFEGRVATSLREHIKLHNMEELFGEVMVPTEEVVEIRGGQRRKSERKFFPGYVLVQMVMNDASWHLVRTVPRVMGFIGGTSDRPAPISDKEVDAIMNRLQQVGDKPRPKTLFEPGEMVRVSDGPFADFNGVVEEVDYEKSRLKVSVSIFGRATPVELDFAQVEKA

SEQ ID NO: 55928 - protein, 394 aa, Enterobacter cloacae
MSKEKFERTKPHVNVGTIGHVDHGKTTLTAAITTVLAKTYGGSARAFDQIDNAPEEKARGITINTSHVEYDTPTRHYAHVDCPGHADYVKNMITGAAQMDGAILVVAATDGPMPQTREHILLGRQVGVPFIIVFLNKCDMVDDEELLELVEMEVRELLSQYDFPGDDTPIVRGSALKALEGDAEWEAKIIELAGFLDSYIPEPERAIDKPFLLPIEDVFSISGRGTVVTGRVERGIIKVGEEVEIVGIKETAKSTCTGVEMFRKLLDEGRAGENVGVLLRGIKREEIERGQVLAKPGSIKPHTKFESEVYILSKDEGGRHTPFFKGYRPQFYFRTTDVTGTIELPEGVEMVMPGDNIKMVVTLIHPIAMDDGLRFAIREGGRTVGAGVVAKVLG

SEQ ID NO: 55929 - protein, 704 aa, Enterobacter cloacae
MARTTPIARYRNIGISAHIDAGKTTTTERILFYTGVNHKIGEVHDGAATMDWMEQEQERGITITSAATTAFWSGMAKQYEPHRVNIIDTPGHVDFTIEVERSMRVLDGAVMVYCAVGGVQPQSETVWRQANKYKVPRIAFVNKMDRMGANFLKVVGQIKTRLGANPVPLQLAIGAEEGFTGVIDLVKMKAINWNDADQGVTFEYEDIPAAMQDLADEWHQNLIESAAEASEELMEKYLGGEELTEEEIKKALRQRVLNNEIILVTCGSAFKNKGVQAMLDAVVDYLPSPVDVPAINGILDDGKDTPAERHASDEEPFSALAFKIATDPFVGNLTFFRVYSGVVNSGDTILNSVKAARERFGRIVQMHANKREEIKEVRAGDIAAAIGLKDVTTGDTLCDPDHPIILERMEFPEPVISIAVEPKTKADQEKMGLALGRLAKEDPSFRVWTDEESNQTIIAGMGELHLDIIVDRMKREFNVEANVGKPQVAYREAIRAKVTDIEGKHAKQSGGRGQYGHVVIDMYPLEPGSNPKGYEFINDIKGGVIPGEYIPAVDKGIQEQLKAGPLAGYPVVDMGVRLHFGSYHDVDSSELAFKLAASIAFKEGFKKAKPVLLEPIMKVEVETPEENTGDVIGDLSRRRGMLRGQESEVTGVKIHAEVPLSEMFGYATQLRSLTKGRASYTMEFLKYDDAPNNVAQAVIEARGK

SEQ ID NO: 55930 - protein, 156 aa, Enterobacter cloacae
MPRRRVIGQRKILPDPKFGSELLAKFVNILMVDGKKSTAEAIVYSALETLAQRSGKNELEAFEVALDNVRPTVEVKSRRVGGSTYQVPVEVRPVRRNALAMRWIVEAARKRGDKSMALRLANELSDAADNKGTAVKKREDVHRMAEANKAFAHYRW

SEQ ID NO: 55931 - protein, 124 aa, Enterobacter cloacae; identical to SEQ ID NO: 42609

SEQ ID NO: 55932 - protein, 95 aa, Enterobacter cloacae
MLHTLSHSPWQCDIDALLSMLREGDDLLLIQDGVLAALEGSRFVEILTNAPITVSALKDDLDARGLSGQISTKIDVVGYTDFVNLTVTHASQMNW

SEQ ID NO: 55933 - protein, 491 aa, Enterobacter cloacae
MANYFNTLNLRQQLAQLGKCRFMARDEFADGASYLQGKKVVIVGCGAQGLNQGLNMRDSGLDISYALRKEAIAEKRASWRKATENGFKVGTYEELIPQADLVVNLTPDKQHSDVVRSVQPLMKDGAALGYSHGFNIVEVGEQIRKDITVVMVAPKCPGTEVREEYKRGFGVPTLIAVHPENDPKGEGMAIAKAWAAATGGHRAGVLESSFVAEVKSDLMGEQTILCGMLQAGSLLCFDKLVEEGTDPAYAEKLIQFGWETITEALKQGGITLMMDRLSNPAKLRAYALSEQLKTIMAPLFQKHMDDIISGEFSSGMMADWANDDKKLLTWREETGKTAFETAPQYEGKIGEQEYFDKGVLMIAMVKAGVELAFETMVDSGIIEESAYYESLHELPLIANTIARKRLYEMNVVISDTAEYGNYLFSYACVPLLKEFMTTLQTGDLGKAIAEGAVDNAQLRDVNEAIRSHQIEKVGHKLRGYMTDMKRIAVAG

SEQ ID NO: 55934 - protein, 669 aa, Enterobacter cloacae
MRLNPGQQQAVEFVTGPCLVLAGAGSGKTRVITNKIAHLIHNCGYQARHIAAVTFTNKAAREMKERVGQTLGRKEARGLMISTFHTLGLDIIKREYAALGMKSNFSLFDDTDQVALLKELTEGLIEDDKVLLQQLISTISNWKNDLMTPAQAAAIAKGERDRIFAHCYGLYDAHMKACNVLDFDDLILLPTLLLQRNEEVRERWQNKIRYLLVDEYQDTNTSQYELVKLLVGQRARFTVVGDDDQSIYSWGGARPQNLVLLSKDFPALQVIKLEQNYRSSGRILKAANILIANNPHVFEKRLFSELGYGTELKVLSANNEDHEAERVTGELIAHHFVNKTEYKDYAILYRGNHQSRVFEKMLMQNRIPYKISGGTSFFSRPEIKDLLAYLRVLTNPDDDSAFLRIVNTPKREIGPATLQKLGEWAMTRNKSMFTASFDMGLSQTLTGRGYDSLTRFTHWLGEVQRLAEREPVAAVRDLIHGIDYESWLYETSASPKAAEMRMKNVNQLFSWMTEMLEGSEIDEPMTLTQVVTRFTLRDMMERGESEEEADQVQLMTLHASKGLEFPYVYLVGMEEGLLPHQSSIDEDNVDEERRLAYVGITRAQKELTFTLCKERRQYGELVRPEPSRFLLELPQDDLIWEQERKVITAEERMHKGQANVANIRAMLAK

SEQ ID NO: 55935 - protein, 395 aa, Enterobacter cloacae
VTTRPHSSFKIVFILGLLAMLMPLSIDMYLPALPVISAQFGVPAGSAQMTLSTYILGFALGQLFYGPMADSLGRKPVILGGTLVFQAAPVACALAQTIDHLIIMRFFHGLAAAAASVVINALMRDIYPKEEFSRMMSFVMLVTTIAPLVAPMAGGAVLMWFSWHVIFWILALAALLASAMIFFFIDETLPVERRQKFHIRTTIGNFASLFRHKRVLSYMLASGFSFAGMFSFLSAGPFVYIELNHVSPQHFGYYFALNIVFLFIMTIINSRFVRRVGALNMFRAGLWIQFVMAIWLVVSAFLGVGFWALVVGVAAFVGCVSMVSSNAMAVILDEFPHMAGTASSLAGTFRFGIGAIVGALLSMATFTTAWPMLWAMAFCATSSILFYLYASRPRK

SEQ ID NO: 55936 - protein, 235 aa, Enterobacter cloacae
MRLDKFIAQQLGVSRAIAGREIRASRVTVDGDIVRDSAFKLQPDHQVEYDGNPLTQQHGPRYFMLNKPEGYVCSTDDPDHPTVLYFLDEPVAHKLHAAGRLDIDTTGLVLMTDDGQWSHRITSPRHHCEKTYLVTLESPVSDDTAEQFTKGVQLHNEKDLTKPAVLEVIAPTEVRLTISEGRYHQVKRMFAAVGNHVVGLHRERIGAIELDPDLAPGEYRPLTEEEIASVGLPSH

SEQ ID NO: 55937 - protein, 588 aa, Enterobacter cloacae
  MISC_FEATURE (8)..(8): X=any amino acid
RGILCAEXRNRDPMTFTLRPYQQEAVDATLAWFRKHREPAAIVLPTGAGKSLVIAELARLARGRVLVLAHVKELVAQNHAKYCALGLEADIFAAGLKRKESHGKVVFGSVQSVARNLDLFRNEFSLLIVDECHRISDDDDSQYQQILAHLKAVNPHLRLLGLTATPFRLGKGWIYRYHYHGMVRGDDKALFSDCIYELPLRYMIKHGYLTPPERLDMPVVQYDFSRLQAQSNGLFSEADLNQELKKQKRITPHIISQIEEFAATRKGVMIFAATVEHAREITGLLPAGDAALITGETPGPERDGLIDAFKAQRFRYLVNVSVLTTGFDAPHVDLIAILRPTESVSLYQQIVGRGLRLAPGKTDCLILDYAGNPHDLYTPEVGAPKGKSDNVPVQVFCPACGFANTFWGKTTADGTLIEHFGRRCQGWFEDDDGHREQCDFRFRFKNCPQCNAENDIAARRCRECDAVLVDPDDMLKAALKLKDALVLRCSGMALQPGADEKGEWLKITYYDEDGADVSERFRVQTPAQRMAFEQLFIRPHTRTPGVPLRWITVADIVRQQMLLRHPDFVVARKKGQFWQVREKLFDYE

SEQ ID NO: 55938 - protein, 167 aa, Enterobacter cloacae
MKNAPKFAIALIAAACVSSSAFASETPKQQPLEKVAPYPQADKGMKRQVIQLPVQQGEANFKVELLIGKTLEVDCNQHRLGGQLESKTLEGWGYDYYVFDKVTSPVSTMMACPDGKKEKKFVTAYLGDNSLLRYNSKLPIVVYTPENVEVKYRIWKADENIGQAVVR

SEQ ID NO: 55939 - protein, 94 aa, Enterobacter cloacae
MFTIEAEVRNVQGKGASRRLRNANKFPAIVYGGEAAPVAIELDHDKLWNLQTKAEFYSEVLTIVVGGKEEKVKVQAVQRHAFKPKLTHIDFVRA

SEQ ID NO: 55940 - protein, 313 aa, Enterobacter cloacae
MAQPIILDCDPGHDDAIALVLALASPELEVKAVTSSAGNQTPDKTLRNVLRMLTLLKRTDIPVAGGAVKPLMRELIIADNVHGESGLDGPALPEPGFTPQNCTAVELMAKVLRESAEPVTLVATGPQTNVALLLNSHPELHNKIARIVIMGGAMGLGNWTPAAEFNIFVDPEAAEIVFQSGLPIVMAGLDVTHRAQIMADDIERFRSVGNTVATTVAELLDFFMEYHKAEKWGFHGAPLHDPCTIAWLLKPEMFTTVDRWVGVETQGKYTQGMTVVDYYSLTGNKANTTVMVDIDREAFVDLLAERLAYYSAA

SEQ ID NO: 55941 - protein, 301 aa, Enterobacter cloacae
MQLRKLATAMLVMGMSAGVVHAEDAPAAGSTLDKIAKNGVIVVGHRESSVPFSYYDNTQKVVGYSQDYSNAIVEAVKKKLNKPDLQVKLIPITSQNRIPLLQNGTFDFECGSTTNNLERQKQAAFSDTIFVVGTRLLTKKGGEIKDFADLKGKAVVVTSGTTSEVLLHKLNDEKKMDMRIISAKDHGDSFRTLESGRAVAFMMDDALLAGERAKAKKPDNWDIVGTAQSKEAYGCMLRKDDPQFKKLIDDTIAQVQTSGEAEKWFDKWFKNPIPPKNLNMNFELSDDMKALFKSPNDKALN

SEQ ID NO: 55942 - protein, 510 aa, Enterobacter cloacae
MAFAPLLERQRVRLLLALLLGASGTLAFSPYDIWPAAILSLIGLQGLTLNRRPVQAAAIGYFWGLGLFGSGINWVYVSIAQFGGMPGPVNVFLVVLLAAYLSLYTGLFAGILSRLWPKTTWVRVAIAAPVVWQITEFLRGWVLTGFPWLQFGTSQIDGPLKALAPVMGVEAINFLLMVVSGLLVLALVTRCWKPLAVALVLFALPFPVRYIQWFTPEPERTMQVSMVQGNIPQSMKWDEKELLNTLKIYANATEEVMGKSQLIIWPESAIPDLELNQQPFLNMMNDLLLARGSTLITGIVDARLNQHNRYDTYNSIITLGKDSEYSYHSTDRYNKNHLVPFGEFVPLESILRPLAPFFDLPMSSFSRGPYVQPQLHAHGLALTAAICYEIILGEQVRDNFRPDTDYLLTISNDAWFGKSIGPWQHFQMARMRSLELARPLLRSTNNGITAVIGPQGEIQAMIPQFTREVLTTKVTPTTGLTPYARTGNWPLWVLTALFGFGAVLMSLRQR

SEQ ID NO: 55943 - protein, 292 aa, Enterobacter cloacae
MSDDNSHSSDTTTSKKGFFSLILNQLFHGEPKNRDELLELIRDSGQNDLIDEDTREMLEGVMDIADQRVRDIMIPRSQMITLKRNQTLDECLDVIIESAHSRFPVISEDKDHIEGILMAKDLLPFMRTDAEAFSMEKVLRQAVVVPESKRVDRMLKEFRSQRYHMAIVIDEFGGVSGLVTIEDILELIVGEIEDEYDEEEDIDFRQLSRHTWTVRALASIEDFNDAFGTHFSDEEVDTIGGLVMQAFGHLPARGETVDIDGYQFKVAMADSRRIIQVHVRTPDDSPVPKLED

SEQ ID NO: 55944 - protein, 460 aa, Enterobacter cloacae
MTQLTMKDKIGYGLGDTACGFVWQATMFLLAYFYTDVFGLSAGIMGTLFLVSRVLDAVTDPLMGLLVDRTRTRHGQFRPFLLWGAIPFGIVCVLTFYTPDFSVQGKIIYACVTYILLTLVYTFVNVPYCAMPGVITADPKERHALQSWRFFLAAAGSLAISGIALPLVSIIGKGDEQVGYFGAMCVLGLSGVVLLYVCFFTTKERYTFEVQPGSSVAKDLKLLLGNGQWRIMCAFKMMATCSNVVRGGATLYFVKYVMDHPEMATQFLLYGSLATMFGSLCSSRLLGRFDRVTAFKWIIVAYSLISLLIFVTPAEHIALIFALNILFLFVFNTTTPLQWLMASDVVDYEESRSGRRLDGLVFSTYLFSLKIGLAIGGAVVGWILAYVNYSASSSVQPVEVLTTIKILFCVVPVVLYAGMFIMLSFYKLTDVRVEAISQQLIKHRAAQGEAIPDAATAASH

SEQ ID NO: 55945 - protein, 252 aa, Enterobacter cloacae
MDYPQILAPVLNFLQCPTPQAWIDKARDPANLPLLLTDHMVCELKAAQTALLLVRKYVADESGADALLDWLKPYEQFTFRDGPEPDFIALHRQIGKSVMPKTDDPWGQALIDSMVLLIKEELHHFWQVREAMLARDIPYVKITASRYAKGMLKEVRTHEPLTLIDKLICGAYIEARSCERFAALAPFLDDDLQKFYLSLLRSEARHYQDYLTLARQVSDDDISPRIQHFGEIEATLISTPDHEFRFHSGVPV

SEQ ID NO: 55946 - protein, 396 aa, Enterobacter cloacae
MLLLIHPNGSKYWRFRFRFGVKQHLMAFGVYPETSLAGARQKREEARKLVTAGIDPREHKRAVKEEQAKEVITFESVAREWHATNKKLSEDHSRRVLKSLEDNLFHAIGKRSIEELKTRDMLAPIKIVEAIGRFEVASRLQQRTTAIMRYAVQSGLIDYNPAQEMAGAVASSNRVHRPTLELKRLPELFHRINGYKGRPLTRLAVELTLLIFLRSSELRFARWSEIEFETAMWTIPSERDAIKGVKHSQRGSKMRTPHLVPLSRQVLNILQQVHKLNGNRDFVFVGDHNPRRPMSENTVNKALRVMGYDTKVEVCGHGFRTMACSSLIESGLWSKDAVERQMSHMERNSVRAAYIHKAEHLDERRLMLQWWADFLESLKYKLMTPFDYAKTNNSIR

SEQ ID NO: 55947 - protein, 1498 aa, Enterobacter cloacae
MGSPTSLGRFTDMLYDKSLEKDNCGFGLIAHIEGEPSHKVVRTAIHALARMQHRGAILADGKTGDGCGLLLQKPDRFFRIVAEERGWRLAKNYAVGMLFLNQDPEKAAASRRIVEEELQRETLSIVGWRNVPTNEGVLGEIALSSLPRIEQIFVNAPAGWRPRDMERRLFIARRRIEKRLQDDKEFYVCSLSNLVNIYKGLCMPADLPRFYLDLADLRLESAICLFHQRFSTNTVPRWPLAQPFRYLAHNGEINTITGNRQWARARTYKFQTPLIPDLHDAAPFVNETGSDSSSMDNMLELLLAGGMDIVRAMRLLVPPAWQNNPDMDPELRAFFDFNSMHMEPWDGPAGIVMSDGRFAACNLDRNGLRPARYVITKDKLITCASEVGIWDYQPDEVVEKGRVGPGELMVIDTRGGRILHSAETDHDLKSRHPYKEWMEKNVRRLVPFEDLSDEEVGRRELDDDTLASFQKQFNYSAEELDSVIRVLGENGQEAVGSMGDDTPFAVLSSQPRIIYDYFRQQFAQVTNPPIDPLREAHVMSLATSIGREMNVFCEAEGQAHRLTFKSPILLYSDFKQLTTMKEEHYRADTLDITFDLTEASLEETVNALCDKAEQMVRNGTVLLVLSDRNIAKNRLPVPAPMAVGAIQTRLVDKSLRCDANIIVETASARDPHHFAVLLGFGATAIYPYLAYETLARLVDTRAIDKDYRAVMLNYRNGINKGLYKIMSKMGISTIASYRCSKLFEAVGLHDEVANLCFQGVVSRIGGAGFADFQQDLVNLSKRAWLARKPLDQGGLLKYVHGGEYHAYNPDVVRTLQQAVQSGEYSDYQQYAELVNNRPAATLRDLIALNPGDEAVSIDEVEPASELFKRFDTAAMSIGALSPEAHEALAEAMNSIGGNSNSGEGGEDPARYGTNKVSRIKQVASGRFGVTPAYLVNADVIQIKVAQGAKPGEGGQLPGDKVTPYIAKLRYSVPGVTLISPPPHHDIYSIEDLAQLIFDLKQVNPKAMISVKLVSEPGVGTIATGVAKAYADLITIAGYDGGTGASPLSSVKYAGCPWELGLVETQQALVANGLRHKIRLQVDGGLKTGLDIIKAAILGAESFGFGTGPMVALGCKYLRICHLNNCATGVATQDEKLRKNHYHGLPFKVTNYFEFIARETRELMAQLGVKRLVDLIGRTDLLKELEGFTAKQQKLELSKLLETAQPHPGKAVYCTENNPPFDNGVLNAQLLQQAKPYVDDKQSKTFWFDIRNTDRSVGASLSGYIAQTHGDQGLAADPITAHFSGTAGQSFGVWNAGGVELYLTGDANDYVGKGMAGGLLAVRPPVGSAFRSHEASIIGNTCLYGATGGRLFAAGRAGERFAVRNSGAITVVEGIGDNGCEYMTGGIVCVLGKTGVNFGAGMTGGFAYVLDEDGEFRKRVNPELVEVLDVDTLAIHEEHLRGLITEHVQHTGSSRGEEILANWPAFSAKFALVKPKSSDVKALLGHRSRSAAELRVQAQ

SEQ ID NO: 55948 - protein, 455 aa, Enterobacter cloacae
REAVEPVDLPDDLPALLKRLYASRGVRRAEDLERSVKGMLPWQQLSGIEKATEMLYNALREGTRIVVVGDFDADGATSTALSVLSLRALGCDNVTYLVPNRFEDGYGLSPEVVDQAHARGAQMIMTVDNGISSHAGVDHAHALGIPVLVTDHHLPGETLPDAEAIINPNLRDCDFPSKSLAGVGVAFYLMLALRTLLRDKGWFDSRGIAVPNLAEYLDLVALGTVADVVPLDTNNRILTWQGLSRIRAGKCRPGIKALLEIANRDPLKLAASDLGFALGPRLNAAGRLDDMSVGVALLLCDNIGEARVLANELDALNQTRKEIEQGMQAEALTLCEKLERSGDTLPGGLAMYHPEWHQGVVGILASRIKERFHRPVIAFAPAGDGTLKGSGRSIQGLHMRDAVERLDTLYPGLMIKFGGHAMAAGLSLDKAKFDEFQPSVGELVPHWIDPALLQG

SEQ ID NO: 55949 - protein, 237 aa, Enterobacter cloacae
MKKTFALFTLLAASFTGFAHADDAAIKQSLAKLGVTGSDIQPAPVAGMKTVLTNSGVLYVTEDGKHIIQGPMYDVSGAQPVNVTNQLLMKNLNALEKEMIVYKAAQEKHVITVFTDITCGYCHKLHEEMKDYNALGITVRYLAFPRAGVQSQPEQDMKAIWCAKDRNKAFDDAMNGKGVKPASCDIDIANHYALGVQFGVSGTPAIVLSNGYVVPGYQGPKEMKEFLDAHQKQFGGK

SEQ ID NO: 55950 - protein, 298 aa, Enterobacter cloacae
VEKDLALIEQFLDALWLEKNLAENTLSAYRRDLTMLVEWLAHRGLSLASAQRDDLQALLGERIAGGYKATSSARLLSAMRRLFQHLYREKIREDDPSALLASPKLPQRLPKDLSETQVERLLQSPAVDLPLELRDKAMLELLYATGLRVSELVGLTMSDISLRQGVVRVIGKGNKERLVPLGEEAVYWLETYLEHGRPWLLNGTSIDVLFPSQRAQQMTRQTFWHRIKHYATLAGIDSEKLSPHVLRHAFATHLLNHGADLRVVQMLLGHSDLSTTQIYTHVATERLRQLHQQHHPRA

SEQ ID NO: 55951 - protein, 477 aa, Enterobacter cloacae
MKKLTLPKDFLWGGAVAAHQVEGGWNKGGKGPSICDVLTGGAHGVPREITQEVVPGKYYPNHEAIDFHGHYKEDIKLFAEMGFKCFRTSIAWTRIFPKGDETQPNEEGLKFYDDMFDELLKYNIEPVITLSHFEMPLHLVQEYGSWTNRKVVDFFVRFAEVVFERYKNKVKYWMTFNEINNQRNWRAPLFGYCCSGVVYTEHDNPEETMYQVLHHQFVASALAVKAARRINPEMKVGCMLAMVALYPFSCKPEDVMFAQESMRERYVFTDVQLRGYYPSYVLNEWERRGFSIKMEAGDEQILREGTCDYLGFSYYMTNAVKAEGGTGDAISGFEGSVPNPHVKASDWGWQIDPVGLRYSLCELYERYQKPLFIVENGFGAYDKVEEDGSINDDYRIDYLRAHVEEMIKAVTHDGVDLMGYTPWGCIDCVSFTTGQYSKRYGFIYVNKHDDGTGDMSRSRKKSFEWYKGVIASNGEKL

SEQ ID NO: 55952 - protein, 136 aa, Enterobacter cloacae
MVLWQSDLRVSWRSQWMSLLLHGLVAAFVLLMPWPLSYTPLWLLLLSFVVFDSVRSQRRINARQGEIKLLMDSRLRWQGKEWDILGMPWMLNCGMMLRLRKVDGGRCQHLWLAADSMDAAEWRDLRRMLLQQTTQG

SEQ ID NO: 55953 - protein, 88 aa, Enterobacter cloacae
MDINNKARIHWACRRGMRELDISIMPFFEYEYDSLSDDDKRLFVRLLESDDPDLFNWLMNHGKPADTELQRMVQLIQTRNRERGPVAI

SEQ ID NO: 55954 - protein, 326 aa, Enterobacter cloacae
MAFTPFSPRQPAASARLPLTLISLDDWALATLSGADAEKYLQGQVTADVSQMTEHQHLLAAHCDPKGKMWSNLRLFRRQDGFAFIERRSLQEAQLKELKKYAVFSKVTIAPDDEHVLLGVAGFQARAALKNLFSELPDAEKQVVSEGATSILWFEHPAERFLLVTDAATAERVTEALRGEAQLNNSQQWLALNIEAGLPVIDAANSAQFIPQATNLQALGGISFKKGCYTGQEMVARAKFRGANKRALWTLAGHASRVPEAGEDLELKMGDNWRRTGTVLAAVQLDDGRLLVQAVMNNDMEADSVFRVRDDANTLSIEPLPYSLEE

SEQ ID NO: 55955 - protein, 219 aa, Enterobacter cloacae
MVSRPLIAQGYSLAEEVANSISHGIGLVFGIVGLVLLLVQAVDANASAMAITSYSLYGGSMILLFLASTLYHAIPHQRAKMWLKKFDHCAIYLLIAGTYTPFLLVGLNSPLSRGLMIVIWSLALLGILFKLTIAHRFKVLSLVTYLTMGWLSLIVVYQLAVKLSVGGVTLLALGGVVYSLGVIFYVCKRIPYNHAIWHGFVLGGSVCHFLAIYLYVGQV

SEQ ID NO: 55956 - protein, 317 aa, Enterobacter cloacae
MNKLDAFIQHAVSSVPVSGTSLISSLYGDALSHRGGEIWLGSLAALLEGMGFGERFVRTALFRLNKEGWLDVSRIGRRSFYRLSDKGLRLTRRAENKIYRAELPAWDGKWLLLLSEGLDKATLADVKKQLIWQGFGTLAPSLMASPSQHLADVQSLLHDAGVAENVIFFEAHSPLALSRAALRSRVEECWQLTEQNAMYESFINSFRPLLPLLKEAAPEELTPERCFQIQLLLIHFYRRVVLKDPLLPEELLPAHWAGQSARQLCINIYQRVAPGALAFVSEKGETSVGELPVPGTLYYQRFGGLTAHKERRCQFIK

SEQ ID NO: 55957 - protein, 199 aa, Enterobacter cloacae
MSATNAINNALIVTAHPVDNSLSHSLAARIAGKLREQGTQVEIADLHAEGFNPAMTRADLDLYHGDPSALPEDILREQQRVERADMLVFVFPVYWWSVPALLKGWFDRVLTLNWAYKVADDGRIVGSLRDVPVRLIATGGSDLTGFDKHGYSTAIQTQIIEGVFGFCGLKNVKLDILYQADAATPEQVEEFLKGLEGLK

SEQ ID NO: 55958 - protein, 312 aa, Enterobacter cloacae
MTRNIVAGMMMAAFSGAVYAGPTIVTPDFSPDSLAVSASAGMLSGKSHEMVYDEATGRKISQLDWKIKNVAILKGDITWDAYSFLTLNARGWTSLASGSGHMDDYDWMNEKQSSWTDHSSHPATNVNYANEYDLNVKGWILQGDNYKAGVTAGYQETRFSWTATGGTYNYDNGAYQGNFPAGERGIGYSQRFSMPYIGLAGQYRFNDFEFNALFKFSDWVRAHDNDEHYMRDLTFREKTTDSRYYGASVDAGYYVTPHAKVFAEFTYSSYEEGKGGTQIIDTNTGDSGSIGGDAAGISNHNYTITAGLQYRF

SEQ ID NO: 55959 - protein, 144 aa, Enterobacter cloacae
MSLREAIEKAEEAGVDLVEISPNAEPPVCRIMDYGKFLYEKSKSSKEQKKKQKVIQVKEIKFRPGTDDGDYQVKLRSLIRFLEDGDKAKITLRFRGREMAHQQIGMEVLNRVRDDLSELAVVESFPTKIEGRQMIMVLAPKKKQ

SEQ ID NO: 55960 - protein, 65 aa, Enterobacter cloacae
MPKIKTVRGAAKRFKKTGGGGFKRKHANLRHILTKKSTKRKRHLRPKGLVSKGDLGLVIACLPYA

SEQ ID NO: 55961 - protein, 118 aa, Enterobacter cloacae [sequence omitted]

SEQ ID NO: 55962 - protein, 327 aa, Enterobacter cloacae
MSHLAELVASATAAINQASDVAALDNVRVEYLGKKGHLTLQMTTLRELPAEERPAAGAVINEAKEQVQQALNARKAELESAVLNARLAAETIDVSLPGRRIENGGLHPVTRTIDRIESFFGELGFTVATGPEIEDDYHNFDALNIPGHHPARADHDTFWFDATRLLRTQTSGVQIRTMKEQAPPIRIIAPGRVYRNDYDQTHTPMFHQMEGLIVDKNISFTNLKGTLHDFLNNFFEEDLQVRFRPSYFPFTEPSAEVDVMGKNGKWLEVLGCGMVHPNVLRNVGIDPEVYSGFAFGMGMERLTMLRYGVTDLRAFFENDLRFLKQFK

SEQ ID NO: 55963 - protein, 311 aa, Enterobacter cloacae
MMVSIYTLTLSPSLDSATLTPQIYPEGKLRCSAPVFEPGGGGINVARAITHLGGKATAIFPAGGATGEHLVSLLADEQVAVETVEAKDWTRQNLHVHVGSSGEQYRFVMPGAKLSDNEFRQLEEKVLTIESGALLVISGSLPPGVSTEKLTALIQAAQQRVIRCIVDSSGEALQAALVPGNLELVKPNQKELSALVNRELTQPDDVRTAAQELVRTGKARRVVVSLGPQGALAVDESSSVQVVPPPMKSQSTVGAGDSMVGAMTLKLAQGASLLEMTRYGVAAGSAATINQGTRLCSLADTQKIVDYLSRN

SEQ ID NO: 55964 - protein, 575 aa, Enterobacter cloacae
MKFSELWLREWVNTTLDSDALSNQITMAGLEVDGVEPVSGAFNGVVVGEVVECGQHPNADKLRVTKVNVGGDRLLDIVCGAPNCRQGLKVAVATVGAVLPGDFKIKAAKLRGEPSEGMLCSFSELGISDDHNGIIELPLDAPIGTDIREYLKLDDNTIEISVTPNRADCLGIIGVARDVAVLNQTELNAPEIAPVEATISDVLPIQVDAADACPRYLGRVVKGINVKAPTPLWMKEKLRRCGIRSIDAVVDVTNYVLLELGQPMHAFDKDRIDGGIVVRMAKEGETLVLLDGSEAKLNADTLVIADHSKALAMGGIFGGEHSGVNDETQNVLLECAFFSPLSITGRARRHGLHTDASHRYERGVDPALQYKAMERATRLLIDICGGEAGPVIDVTNEATLPKRATITLRRSKLDRLIGHHVADAQVTDILKRLGCEVTEGQDEWKAVAPSWRFDMEIEEDLVEEVARVYGYNNIPDEPVQAGLVMGTHREADLSLKRVKTMLNDKGYQEVITYSFVDPKLQQLIHPGQEALILPSPISSEMSAMRLSLWTGLLGTVVYNQNRQQNRVRIVESGLR

SEQ ID NO: 55965 - protein, 642 aa, Enterobacter cloacae
MPVITLPDGSQRHFDRAVSPMDVALDIGPGLAKATIAGRVNGELVDASDLIENDATLAIITAKDEEGLEIIRHSCAHLLGHAIKQLWPNTKMAIGPVIDNGFYYDVDLDHTLTQEDIDALEKRMHELAETNYDVIKKKVSWHEARETFVKRGESYKVSILDENISHDDKPGLYHHEEYVDMCRGPHVPNMRFCHHFKLMKIAGAYWRGDSNNKMLQRIYGTAWADKKALNAYLLRLEEAAKRDHRKIGKQLDLYHMQEEAPGMVFWHNDGWTIFRELETFVRSKLKEYQYQEVKGPFMMDRVLWEKTGHWDNYKDAMFTTSSENREYCIKPMNCPGHVQIFNQGLKSYRDLPLRMAEFGSCHRNEPSGALHGLMRVRGFTQDDAHIFCTEDQVRDEVNACIRMVYDMYSTFGFEKIVVKLSTRPEKRIGSDETWDRAEADLAVALEENGIPFEYQLGEGAFYGPKIEFTLYDCLDRAWQCGTVQLDFSLPQRLSASYVGEDNERQVPVMIHRAILGSLERFIGILTEEFAGFFPTWLAPVQVVVMNITDSQADYVKELTQKLQNAGIRVKADLRNEKIGFKIREHTLRRVPYMLVCGDKEVEAGKVAVRTRRGKDLGSLDVSEVIEKLQQEIRSRSLQQLEE

SEQ ID NO: 55966 - protein, 505 aa, Enterobacter cloacae
MSEQQAQGADAVVDLNNELKTRREKLAALREQGVPFPNDFRRDHTSDQLHADFDAKENEELEALNVEVAVAGRMMTRRIMGKASFVTLQDVGGRIQLYVSRDDLPEGIYNEQFKKWDLGDILGAKGKLFKTKTGELSIHCTELRLLTKALRPLPDKFHGLQDQEARYRQRYLDLISNDESRKTFKIRSQVMAGIRQFMVNRDFMEVETPMMQVIPGGASARPFITHHNALDLDMYLRIAPELYLKRLVVGGFDRVFEINRNFRNEGISVRHNPEFTMMELYMAYADYKDLIELTESLFRTLAQDILGTTQVPYGEEVFDFGKPFEKLTMREAIKKYRPETNMADLDNFDSAKAIAESIGIKVEKSWGLGRIVTEIFEEVAEAHLIQPTFITEYPAEVSPLARRNDENPEITDRFEFFIGGREIGNGFSELNDAEDQAQRFQDQVDAKAAGDDEAMFFDEDYVTALEHGLPPTAGLGIGIDRMVMLFTNSHTIRDVILFPAMRPVK

SEQ ID NO: 55967 - protein, 365 aa, Enterobacter cloacae
MFEINPVKNRIQDLTERSDVLRGYLDYDAKKERLEEVNAELEQPDVWNEPERAQALGKERSSLEAIVDTLDQMAQGLEDVSGLLELAVEADDEETFNEAVAELDVLEEKLAQLEFRRMFSGEYDSADCYLDIQAGSGGTEAQDWASMLTRMYLRWAEARGFKTEIIEESEGEVAGIKSVTIKIIGDYAYGWLRTETGVHRLVRKSPFDSGGRRHTSFSPAFVYPEVDEDIDIEINPADLRIDVYRASGAGGQHVNRTESAVRITHIPTGLVTQCQNDRSQHKNKDQAMKQMKAKLYELEMQKKNAEKQAMEDNKSDIGWGSQIRSYVLDDSRIKDLRTGVETRNTQAVLDGSLDQFIEASLKAGL

SEQ ID NO: 55968 - protein, 141 aa, Enterobacter cloacae
MLQSLNHLTLAVSDLQKSVTFWHELLGLTLHARWNSGAYLTCGDLWVCLSYDEARRYVPPQESDYTHYAFTVAEADFEPFSNKLEQAGVTVWKQNKSEGASFYFLDPDGHKLELHVGNLAARLAACREKPYAGMVFTSDEA

SEQ ID NO: 55969 - protein, 297 aa, Enterobacter cloacae
MKILLTGGTGLIGRHLIARLQALHHDITVVTRSPEKARQVLGAGIDIWKNLADQQNLDGFDAVINLAGEPIADKRWTEEQKQLLCSSRWNITEKLVELIRNSHTPPSVLISGSAVGYYGDLGEVVVTEEEPPHNEFTHKLCAQWERIASAAQSDRTRVCLLRTGVVLAPKGGILAKMLPPFRLGLGGPIGNGRQYLAWIHIDDMVNGILWLLDNDLRGPFNMVAPYPVRNEQFAHALGHALHRPAILRVPATVIRLMMGEASVLVLGGQRALPKRLEAAGFAFRWYELEEALGDVVR

SEQ ID NO: 55970 - protein, 260 aa, Enterobacter cloacae
MKKLVLSLSLVLAFSSATAAFAAIPQKIRIGTDPTYAPFESKNSKGELVGFDIDLANELCKRIKAQCTYVENPLDALIPSLKAKKIDVIMSSLSITEKRQQEIAFTDKLYAADSRLVVAKASDIQPTLESLKGKRVGVLQGTTQETYGNEHWAPKGIEIVSYQGQENIYADLTAGRIDAAFQDEVAASEGFLKTPVGKDYKFGGPSIKDVKLFGVGTGMGLRKEDNELREALNKAFAEMRADGTYDKLAKKYFDFNVYGG

SEQ ID NO: 55971 - protein, 228 aa, Enterobacter cloacae
MLYGFSGVILQGALVTLELAISSVVLAVLIGLAGAGAKLSANKPLALIFEGYTTLIRGVPDLVLMLLIFYGLQIALNSVTDAMGMRQIDIDPMVAGIITLGFIYGAYFTETFRGAYMAVPKGHIEAATAFGFTSSQTFRRIMFPAMMRYALPGIGNNWQVILKATALVSLLGLEDVVKATQLAGKSTWEPFYFAVVCGVIYLVFTTVSNGVLLLLERRYSVGVKRADL

SEQ ID NO: 55972 - protein, 163 aa, Enterobacter cloacae
  MISC_FEATURE (12)..(12): X=any amino acid
  MISC_FEATURE (14)..(14): X=any amino acid
QGYDLTRRVPGXDXRFALSDPSATDEYLEDRFAPPRWERIYPHDLQKTARARQIQAWLRSDLVPIRVERSTDVVFAGVKKPALSAEGRESAQKLIETATSLLAHGNPNLFGEWCIADADLALMLNRLILNGDEVPQLLVDYAAFQWQRASVQRYVALSARRAG

SEQ ID NO: 55973 - protein, 151 aa, Enterobacter cloacae
MSTPENPSVNFFSLFRRGQHYAKTWPMEKRLAPMFIENRTIRATRYAIRFMPPVAVFTLCWQIALGGQLGPAVATALFALSLPMQGLWWLGKRSITPLPPSILHWFYEVRGKLEEAGQALAPVEGKPDYQALADTLKRAFKQLDKTFLDDL

SEQ ID NO: 55974 - protein, 147 aa, Enterobacter cloacae
MLKKWIYDTTITLQDCVENWPQALELCAKPLLDLQVIEPEYVTAIIQQHHALGPYYVLAPGLAMPHARPEEGAKGLGLSLLKLKQGVSFGAGEFDPVDVIIMLAAPDKHSHIEMISALAELFSSDEDMEKLHQANTLEEIKTIIDRF

SEQ ID NO: 55975 - protein, 465 aa, Enterobacter cloacae
MDMFILETLNFVVDILKVPSVLVGLIALIGLVAQKKAFSDVVKGTIKTILGFIVLGGGATVLVGSLNPLGGMFEHAFTIQGIIPNNEAIVSIALEKYGAATALIMAFGMVANIIVARFTRLKYIFLTGHHTFYMACMIGVILTVAGFEGVGLVFTGSLILGLIMAFFPAIAQRYMKRITGNDEIAFGHFGTLGYVLSGWIGSKVGKGSRSTEEMNLPKNLSFLRDSSISISLTMMIIYLIMAVSAGREYVEATFSGGQNYLVYAIIMAITFAAGVFIILQGVRLILAEIVPAFTGFSEKLVPNARPALDCPVVYPYAPNAVLIGFLFSFLGGIVGLFICGQFSWVLILPGVVPHFFTGATAGVFGNATGGRRGAMIGAFANGLLITFLPVLLLPVLGAIGFANTTFSDADFGAVGIVLGNLARFLSPLAITGLVVALFALLVAYNVFAKNKPAGGNAQENTGAKS

SEQ ID NO: 55976 - protein, 317 aa, Enterobacter cloacae
MIKVAPAGEKDAVEMRKVYAGFVAKQIEAGSEIIALEADLMSSMAMDGVARDYPQHVINCGIMEANVIGTAAGLSLTGRKPFVHTFTAFASRRCFDQLFMSLDYQRNNVKVIASDAGVTACHNGGTHMSFEDMGIVRGLAHSVVLEVTDAVMFEDVLRQLIDLEGFYWVRTIRKQAPSVYAPGSTFTIGKGNVLREGTDITLIANGIMVAEALEAARQLEQEGVSAAVIDMFTLKPIDRMLVKNYAEKTGRIVTCENHSIHNGLGSAVAEVLVETCPVPMRRVGVKERYGQVGTQDFLQKEYGLTAHDIVSAARELL

SEQ ID NO: 55977 - protein, 322 aa, Enterobacter cloacae
SPPAGAVCAPAFAKPVLTVYTYDSFSADWGPGPVVKKAFEADCNCELKFVALEDGVSLLNRLRMEGKNSKADVVLGLDNNLLEAASQTKLFAKSGVAADAVNVPGGWKNDTFVPFDYGYFAFVYDKNKLKNPPKSLKELVESDQKWRVIYEDPRTSTPGLGLLLWMQKVYGDKAPEAGQKLAAKTVTVTKGWSEAYGLFLKGESDLVLSYTTSPAYHIIAEKKDNYAAADFAEGHYLQVEVAARTAASKQPELAEKFLKFMVSPAFQNAIPAGNWMYPVTNVALPAGFEQLTKPNTSLEFTPQQVAAQRAAWVSEWQRAVSR

SEQ ID NO: 55978 - protein, 551 aa, Enterobacter cloacae
MPSGRLQQQFIRLWQCCEGQSQETTLNELADLLSCSRRHMRTLLNTMQQQGWLNWEAEAGRGKRSRLTFLYTGLALQQQRAEDLLEQDRIDQLVQLVGDKAAVRQMLVSHLGRSFRQGRHILRVLYYRPMKNLLPGTALRRSETHMARQIFSGLTRINEENGELEADIAHHWQQVSPLHWRFFLRPGIHFHHGRELEMHDVIASLERARRLPLYSHISRVHSPTAWTLDIELSQQDKWLPWLLGYVPSMILPGEWESMNNFASLPIGTGPYSVSRNNSNQLKIRAFDDYFGYRALIDEVNVWVLPDLNEDLSCGLTLEGPTTGEKAVESRLEEGCYYLLFDRRTHRGANQAVRKWISHVLSPSNLIYHAEEQYQTYWFPAYGLLPRWHHARPVHCDKPAGLESITLTYYREHVEHRFIARIMTRLLAAEGVRLEVREVDYDEWHQGEIASDIWLNSANFTLPLDFSLFSHLYEVPLIQHCIDRDWQQDAALWRAGEMNLAAWCQQLLAEQAIVPLIHHWLMIQGQRSMRGLRMNTLGWFDFKSAWFAPPEP

SEQ ID NO: 55979 - protein, 620 aa, Enterobacter cloacae
MSFDIAKYPTLALVDSTQELRLLPKESLPKLCDELRRYLLDSVSRSSGHFASGLGTVELTVALHYVYNTPFDQLIWDVGHQAYPHKILTGRRDKIGTIRQKGGLHPFPWRGESEYDVLSVGHSSTSISAGIGIAVAAEKENKQRRTVCVIGDGAITAEMAFEAMNHAGDIKPDMLVILNDNEMSISENVGALNNHLAQLLSGKLYSSLREGGKKVFSGVPPIKELLKRTEEHIKGMVVPGTLFEELGFNYIGPVDGHDVLGLVTTLKNMRDLKGPQFLHIMTKKGRGYEPAEKDPITFHAVPKFDPSSGCLPKSSGGMPSYSKIFGDWLCETAAKDNKLMAVTPAMREGSGMVEFSRKYPDQYFDVAIAEQHAVTFAAGLAIGGYKPVVAIYSTFLQRAYDQVIHDVAIQKLPVLFAIDRAGIVGADGQTHQGAFDLSFLRCIPDMVVMTPSDENECRQMLFTGYHYQDGPSAVRYPRGNAVGVELQPLEKLPIGKGLVKRRGEKVAILNFGTLMPEAAKAAEALNATLVDMRFVKPLDDSLILSMAETHDVLVTLEENAIMGGAGSGVNEVLMANRTAVPVLNLGLPDHFIPQGTQDEARAAIGLDAAGIEAKIRTWLD

SEQ ID NO: 55980 - protein, 299 aa, Enterobacter cloacae
MDFANELQARVVRANDALRRFIAPQPFQNTPLVEAMHYGALLGGKRLRPFLVYATGNMFGISDNTLDAPAAAVECIHAYSLIHDDLPAMDDDDLRRGQPTCHIKFGEANAILAGDALQTLAFSILSDAPMAEVADRDRLAMISELAMASGVAGMCGGQALDLEAEGRQVNLEQLERIHRHKTGALIRSAVRLGALSAGEQGRKALPILDRYAESIGLAFQVQDDILDVVGDTATLGKRQGADQQLGKSTYPALLGLEQAQRKARDLIDDARQSLNELAAQSLDTSALEALADYIIQRDK

SEQ ID NO: 55981 - protein, 444 aa, Enterobacter cloacae
MTMFKMPVFTWASLCANILIIASFPILTVTIALLTLDRYLGTHFFTNDMGGNMMMYINLIWAWGHPEVYILVLPVFGVFSEIAATFSRKRLFGYTSLVWATVCITVLSFIVWLHHFFTMGAGANVNAFFGITTMIIAIPTGVKIFNWLFTMYQGRIVFHSAMLWTIGFIVTFSVGGMTGVLLAVPGADFVLHNSLFLIAHFHNVIIGGVVFGCFAGVTYWWPKAFGFTLNEKWGKRAFWFWIIGFFVAFMPLYVLGFMGMTRRLSQQIDPQFHPMLMVAAGGAVLIACGIASQLIQFYVSIRDRDQNRDLTGDPWGGRTLEWATSSPPPFYNFAIVPQVHERDAFWEMKEKGEAYKQPAHYEEIHMPKNSGAGIVIAAFATVFGFAMIWHIWWMAIVGFAGIVISWIVKSFDEDVDYYVPVREVEKLENQHFDEISKAGLKNGN

SEQ ID NO: 55982 - protein, 224 aa, Enterobacter cloacae
PLLSPPSSEGQLLQQAQRLAGFSLGELAAMAGLQIPKDLKRDKGWIGMLLELWLGATAGSKPEQDFAALGVELKTIPIDSQGKPLETTFVCVAPLTGNTGVTWETSHVRHKLKRVLWVPVEGERQIPLAERRVGAPLLWSPNDDEEQQLRLDWEELMDMIVLGQVERITARHGEVLQLRPKAANSKALTEAIGAQGEPILTLPRGFYLKKNFTGALLARHFLLK

SEQ ID NO: 55983 - protein, 365 aa, Enterobacter cloacae
MSEMDITKSTDLDFPRYTSPAIHAKEIDLFGLLAVLLAAKKRIVTISLAFALAGVAISFLLPQKWTSKAVITPAEQSQWNPLRQMMVALQVLDVDVKITRPEVFDLFIKKFQSQSLLEEYLKSSSYVMSQLKDTEVDPLELHRAIVNISDRMVAVNNAQGKDADKIPYVSWTLSFTAPTADDAQAVLNGYIDYIAAIVEKETVQNIRNQIALKKNVVEQQLELDRVRLTNIHNTNLQRLNYSLEVANAAGIKKPVYSNGQAVKDDPDYSVALGADGIAQKLQIEKNLKDVTELNADFQNREYHLAQLKKLSFADVKLEPFRYQLSPSMPVKKDGPGKALMVVLAALLGGLFACGSVLLREAMLAR

SEQ ID NO: 55984 - protein, 41 aa, Enterobacter cloacae
MANADDLIKSYVSAGFKKIHLDCSMSCEDDPVPLTDAIVAG

SEQ ID NO: 55985 - protein, 75 aa, Enterobacter cloacae
AGRVIIVISHFDRKSILTTDTHTLHIEEILELLPHRYPFLLVDRVLDFEEGRFLRAVKNVSVNEPFFQGHFPGKP

SEQ ID NO: 55986 - protein, 341 aa, Enterobacter cloacae
MPSIRLADLAQQLDAELHGDGDLVITAVASMQSAKAGTITFMVSPKYREQLAQCQASAVVLTQDDLPFATVSALVVKNPYLTYARMAQILDTTPQPAQNIAASAAIDPTAKLGNNVAVGANAVIESGVVLGDNAVIGPGCFVGKNTKIGAGTRLWANVSVYHDVEIGENCLVQSSTVIGSDGFGYANDRGNWVKIPQLGRVIIGDRVEIGACTTIDRGALDDTIIGNGVIIDNQCQIAHNVVIGDNTAVAGGVIMAGSLKIGRYCMIGGASVINGHMEICDKVTVTGMGMVMRPITEPGVYSSGIPLQPNKVWRKTAALVMNIDDMSKRLKSLERKIDQQD

SEQ ID NO: 55987 - protein, 185 aa, Enterobacter cloacae
MINDIRKDAEVRMDKCVEAFKNQISKIRTGRASPSLLDGIIVEYYGTPTPLRQLASVTVEDTRTLKINVFDRSMSPAVEKAIMASDLGLNPSSAGADIRVPLPPLTEERRKDLIKVVRGEAEQGRVSVRNVRRDANDKVKALLKEKEISEDDDRRSQDDIQKMTDAAIKKIDAALAEKEAELMQF

SEQ ID NO: 55988 - protein, 241 aa, Enterobacter cloacae
MATNAKPVYKRILLKLSGEALQGSEGFGIDASILDRMAQEIKELVELGIQVGVVIGGGNLFRGAGLAKAGMNRVVGDHMGMLATVMNGLAMRDALHRAYVNARLMSAIPLNGVCDNYSWAEAISLLRNNRVVILSAGTGNPFFTTDSAACLRGIEIEADVVLKATKVDGVFTADPAKDPSATMYDQLSYSEVLDKELKVMDLAAFTLARDHKLPIRVFNMNKPGALRRVVMGEKEGTLITE

SEQ ID NO: 55989 - protein, 283 aa, Enterobacter cloacae
MAEITASLVKELRERTGAGMMDCKKALTEANGDIELAIENMRKSGAIKAAKKAGNVAADGVIITKIDGNYGIILEVNCQTDFVAKDGGFQAFANKVLDAAVAGKITDVEVLKAQFEEERVALVAKIGENINIRRVSSLEGDVLGSYQHGARIGVLVAAKGADEELVKQLAMHIAASKPEFVKPEDVSAEVVEKEYQVQLDIAMQSGKPKEIAEKMVEGRMKKFTGEVSLTGQPFVMDPSKSVAQLLKEHNADVTGFIRFEVGEGIEKVETDFAAEVAAMSKQS

SEQ ID NO: 55990 - protein, 241 aa, Enterobacter cloacae
MATVSMRDMLKAGVHFGHQTRYWNPKMKPFIFGARNKVHIINLEKTVPMFNEALAELNKISSRKGKILFVGTKRAASEAVKDAANSCDQFFVNHRWLGGMLTNWKTVRQSIKRLKDLETQSQDGTFDKLTKKEALMRTRELDKLENSLGGIKDMGGLPDALFVIDADHEHIAIKEANNLGIPVFAIVDTNSDPDGVDFVIPGNDDAIRAVSLYLSAVAATVREGRSQDLASQAEESFVEAE

SEQ ID NO: 55991 - protein, 285 aa, Enterobacter cloacae
MLKYRLISAFVLIPIVIAALFLLPPVGFAIVTLVVCMLAAWEWGQFSGFTSRTQRVWLAVLCGFILAIMLFTLPEYHHDIHQPLVAGSLWISLAWWVAALLLVLFYPGSASLWRNSKVLRLIFGLLTIIPFFWGMVALRAWHYDENHYSGAIWLLYVMILVWGADSGAYMFGKLFGKHKLAPKVSPGKTWQGFIGGLFTAAIISWGYGVWANLEVAPSILLVCSIFAALASVLGDLTESMFKREAGIKDSGHLIPGHGGILDRIDSLTAAVPVFACLLLLVFGTI

SEQ ID NO: 55992 - protein, 229 aa, Enterobacter cloacae
MDGNGRWAKRQGKIRAFGHKAGAKSVRRAVSFAANNGIDALTLYAFSSENWNRPLQEVTALMELFVWALDSEVKSLHRHNVRLRIIGDTSRFNSRLQERIRKAEALTENNTGLTLNIAANYGGRWDIIQGVRHLAEQVQEGLLRPDQIDEEALSKQICMNEQAPVDLVIRTGGEHRISNFLIWQIAYAELYFTDVLWPDFDEQDFEGALHAFANRERRFGGTEPGGDKA

SEQ ID NO: 55993 - protein, 581 aa, Enterobacter cloacae
SAEQLIEARTEFIDQLLQRLWIDYGFGQISDVALVAVGGYGRGELHPLSDIDLLILSRKKLPDEQAQKIGELPTLLWDVKLEVGHSVRTLEECLLEGLSDLTVATNLIATRLLIGDVALLLELQKHIFSDGFWPSEKFFAAKVEEQNQRHQRYHGTSYNLEPDIKSSPGGLRDIHTLQWVARRHFGATSMDEMVGFGFLTEAERNELNECLHLLWRIRFALHLEVTRYDNRLLFDRQLSVAQRLNYQGEGNEPVEHMMKDFFRVTRRVTELNQMLLQLFDEAILALTADEKPRPIDDEFQLRGTLIDLRDETLFIREPEAILRMFYTMVRNSTITGIYSTTLRHLRHARRHLTEPLCYIPEARSLFLSMLRHPGAVSRGLLPMHRHSVLWAYMPQWSHIVGQMQFDLFHAYTVDEHTIRVMFKLESFAKEETRSRHPLCVELWPRLTHPELILIAALFHDIAKGRGGDHSVLGAQDVLKFAELHGLNSRETQLVAWLVRHHLLMSVTAQRRDIQDPEVIKQFAEEVQTENRLRYLVCLTVADICATNETLWNSWKQSLLRELYFATEKQFVSGMQNTPGHS

SEQ ID NO: 55994 - protein, 128 aa, Enterobacter cloacae
MAYSEKVIDHYENPRNVGSFDNSDESVGSGMVGAPACGDVMKLQIKVNNEGIIEDARFKTYGCGSAIASSSLVTEWVKGKSLDEAQAIKNTDIAEELELPPVKIHCSILAEDAIKAAIADYKSKREAK

SEQ ID NO: 55995 - protein, 258 aa, Enterobacter cloacae
MSETKNELETLLEQAATEPAHRPAFFRTLLESTVWVPGTAAEGEQVVEDSALDLLHWEKDDGTSVIPFFTSLEALQEAVEDEQAFVVMPVRTLFEMTLGQTLFLNAKLPTGKEFTPREISHLIGEEGNPLSTQEVLEGGETLLLSEVAEPPAQMIDSLTTLFKTLKPVRRAFLCSIKERADEQPVLLIGIEADGDIDDIIQAAGSVATDTLPGDEPIDICQVKNGEKGISHFITEHITPFYERRWGGFLRDLKTNRII

SEQ ID NO: 55996 - protein, 616 aa, Enterobacter cloacae
MALLQISEPGLSAAPHQRRLAVGIDLGTTNSLVATVRSGQAETLADEQGRHLLPSVVHYQQQGHAVGYDARANAARDPANTISSVKRMMGRSLADIQTRYPHLPYQLQASENGLPMIATAAGLLNPIRVSSDILKALAARATATLGGDLDGVVITVPAYFDDAQRQGTKDAARLAGLHVLRLLNEPTAAAIAYGLDSGQEGVIAVYDLGGGTFDISILRLSRGVFEVLATGGDSALGGDDFDHLLADYIREQAGISDRSDARVQRELLDAAIDAKIALSDAQTVTVNVAGWQGEIARDQFSDLIAPLVKRTLLACRRALKDAGVEANEVLEVVMVGGSTRVPLVRERVGEFFGRTPLTSIDPDKVVAVGAAIQADILVGNKPDSEMLLLDVIPLSLGLETMGGLVEKVIPRNTTIPVARAQEFTTFKDGQTAMSIHVMQGERELVQDCRSLARFALRGIPALPAGGAHIRVTFQVDADGLLSVTAMEKSTGVESSIQVKPSYGLTDGEIASMIQDSMSYAEQDVKARMLAEQKVEAARVLESLNGALAADAALLSAAERQVIDDAAARLSAVAEGNDADAIEEAIKNVDKQTQDFAARRMDKSVRVALKGQSVDEV

SEQ ID NO: 55997 - protein, 590 aa, Enterobacter cloacae
MTDADFGKPIIAVVNSFTQFVPGHVHLRDLGKLVAEQIEASGGVAKEFNTIAVDDGIAMGHGGMLYSLPSRELIADSVEYMVNAHCADAMVCISNCDKITPGMLMASLRLNIPVIFVSGGPMEAGKTKLSDKIIKLDLVDAMIQGADPKVSDEQSEQVERSACPTCGSCSGMFTANSMNCLTEALGLSQPGNGSLLATHADRKQLFLNAGKRIVELTKRYYEQDDASALPRNIASKAAFENAMTLDIAMGGSTNTVLHLLAAAQEAEIDFTMSDIDKLSRKVPQLCKVAPSTQKYHMEDVHRAGGVLGILGELDRAGLLNRDVKNVLGLTLPESLDQYDVMLTKDDAVKKMFRAGPAGIRTTQAFSQDCRWDTLDDDRAEGCIRSLEHAYSKDGGLAVLYGNFAENGCIVKTAGVDDSILKFTGPAKVYESQDEAVDAILGGKVVEGDVVVIRYEGPKGGPGMQEMLYPTTFLKSMGLGKACALITDGRFSGGTSGLSIGHVSPEAASGGNIAIIEDGDLIEIDIPNRGIQLKLSDQEIAARREAQEARGDKAWTPKDRQREVSFALRAYASLATSADKGAVRDKSKLGG

SEQ ID NO: 55998 - protein, 309 aa, Enterobacter cloacae
MTTKKADYIWFNGEMVRWEDAKVHVMSHALHYGTSVFEGIRCYDSHKGPVVFRHREHMQRLHDSAKIYRFPVSQSVDELMEACRDVIRKNNLTSAYIRPLVFVGDVGMGVNPPAGYTTDVIIAAFPWGAYLGAEALEQGIDAMVSSWNRVAPNTIPTAAKAGGNYLSSLLVGSEARRHGYQEGIALDVNGYISEGAGENLFEVKDGILFTPPFTSSALPGITRDAIIKLAKDLGIEVREQVLSRESLYLADEVFMSGTAAEITPVRSVDGIQVGEGRCGPVTKRIQQAFFGLFTGETEDKYGWLDQVNH

SEQ ID NO: 55999 - protein, 546 aa, Enterobacter cloacae
TMNGAQWVVHALRAQGVETVFGYPGGAIMPIYDALYDGGVEHLLCRHEQGAAMAAIGYARATGKTGVCMATSGPGATNLITGLADALLDSVPVVAITGQVASPFIGTDAFQEVDVLGLSLACTKHSFLVQSLEELPRVMAEAFDVANSGRPGPVLVDIPKDIQVALGELEPHFSTVESDDVFPEAEVEEARQMLAQAKQPMLYVGGGVGMAQAVPALREFIATTQMPATCTLKGLGAVDADYPYYLGMLGMHGTKAANLAVQECDLLIAVGARFDDRVTGKLNTFAQNAKVIHMDIDPAEMNKLRQAHVALQGDLNALLPALSSRWDINAWRQHTADMRAEHAWRYDHPGEAIYAPLLLKQLSDRKPADSVVTTDVGQHQMWSAQHMTYTRPENFITSSGLGTMGFGLPAAVGAQVARPNDTVICISGDGSFMMNVQELGTVKRKQLPLKIVLLDNQRLGMVRQWQQLFFQERYSETTLTDNPDFLTLASAFGIPGQHITRKDQVEAALDTMLNSDGPYLLHVSIDELENVWPLVPPGASNSQMME

SEQ ID NO: 56000 - protein, 349 aa, Enterobacter cloacae
MATGTLPDAGQILNSLINSILLVDDELAVHYANPAAQQLLAQSARKLFGTPLPELLSYFSLNIGLMQESLQAGQGFTDNELTLVIDGRSHILSLTAQRLPDGLILLEMAPMDNQRRLSQEQLQHAHRFAARDLVRGLAHEIKNPLGGLRGAAQLLTKALPDPALAEYTNVIIEQADRLRNLVDRLLGPQQPGMHVTESIHKVAERVVKLVSMELPENVTLVRDYDPSLPELAHDPDQIEQVLLNIVRNALQALGPEGGEIILRTRTAFQLTLHGVRYRLAARIDVEDNGPGIPSHLQDTLFYPMVSGREGGTGLGLSIARSLIDQHSGKIEFTSWPGHTEFSVFLPIKK

SEQ ID NO: 56001 - protein, 469 aa, Enterobacter cloacae
MSAEHVLTMLNEHEVKFVDLRFTDTKGKEQHVTIPAHQVNAEFFEEGKMFDGSSIGGWKGINESDMVLMPDATTAVIDPFFEEPTLIIRCDILEPGTLQGYDRDPRSIAKRAEEYLRSTGIADTVLFGPEPEFFLFDDIRFGASISGSHVAIDDIEGAWNSSTKYEGGNKGHRPGVKGGYFPVPPVDSAQDIRSTMCLVMEEMGLVVEAHHHEVATAGQNEVATRFNTMTKKADEIQIYKYVVHNVAHRFGKTATFMPKPMFGDNGSGMHCHMSLSKNGTNLFSGDKYAGLSEQALYYIGGVIKHAKAINALANPTTNSYKRLVPGYEAPVMLAYSARNRSASIRIPVVASPKARRIEVRFPDPAANPYLCFAALLMAGLDGIKNKIHPGEAMDKNLYDLPPEEAKEIPQVAGSLEEALQALDADREFLTAGGVFTDDAIDAYIALRMEENDRVRMTPHPVEFELYYSV

SEQ ID NO: 56002 - protein, 607 aa, Enterobacter cloacae
MIENLRNIAIIAHVDHGKTTLVDKLLQQSGTFDARAETQERVMDSNDLEKERGITILAKNTAIKWNDYRINIVDTPGHADFGGEVERVMSMVDSVLLVVDAMDGPMPQTRFVTKKAFAHGLKPIVVINKVDRPGARPDWVVDQVFDLFVNLDATDEQLDFPIVYASALNGIAGLDHEDMAEDMTPLYQAIVDRVPAPNVDLDGTLQMQISQLDYNNYVGVIGIGRIKRGKVKPNQQVTIIDSEGKTRNGKVGKVLTHLGLERIESDVAEAGDIIAITGLGELNISDTICDPQNVEALPALSVDEPTVSMFFNVNTSPFCGKEGKFVTSRQILDRLNKELVHNVALRVEETEDADAFRVSGRGELHLSVLIENMRREGFEMAVSRPKVIFREIDGRKQEPFENVTLDVEEQHQGSVMQALGERKGDLKNMNPDGKGRVRLDYVIPSRGLIGFRSEFMTMTSGTGLLYSTFSHYDDVRPGEVGQRNNGVLISNGQGKAVAFALFGLQDRGKLFLGHGAEVYEGQIIGIHSRSNDLTVNCLTGKKLTNMRASGTDEATVLVPPIKMTLEQALEFIDDDELVEVTPQSIRIRKRHLTENDRKRAMRGAKEE

SEQ ID NO: 56003 - protein, 178 aa, Enterobacter cloacae
RLLGDTTDGIGLLSDLERLSFIKPGFRVLLIDAGYASRGVLLPVLSLDCAVTITNRTFSRAEAMAALFAHTGSVSAVALDDLADREFDLVINATSSGINGEIPAIPASLVSAHMYFYDMFYQKGKTPFLNWCEQHGAKQLADGLGMLVGQAAHAVLLWHGVLPAVEPVIEKLKQELSA

SEQ ID NO: 56004 - protein, 57 aa, Enterobacter cloacae; identical to SEQ ID NO: 55697
  MISC_FEATURE (11)..(11): X=any amino acid

SEQ ID NO: 56005 - protein, 631 aa, Enterobacter cloacae
RAGLSVDGVFNLTNIDRWFLVQIEELVRLEEQVAELGITGLDADFLRVLKRKGFADARLAKLAGVREAEIRKLRDQYDLHPVYKRVDTCAAEFSTDTAYMYSTYEDECEANPSVDRDKIMVLGGGPNRIGQGIEFDYCCVHASLALREDGYETIMVNCNPETVSTDYDTSDRLYFEPVTLEDVLEIVRIEKPKGVIVQYGGQTPLKLARALEAAGVPVIGTSPDAIDRAEDRERFQQAVDRLKLKQPANATVTAIEQAVEKAKEIGYPLVVRPSYVLGGRAMEIVYDEADLRRYFQTAVSVSNDAPVLLDRFLDDAVEVDVDAICDGEMVLIGGIMEHIEQAGVHSGDSACSLPAYTLSQEIQDVMRQQVQKLAFELQVRGLMNVQFAVKDNEVYLIEVNPRAARTVPFVSKATGVPLAKVAARVMAGQTLAQQGVTKEIIPPYYSVKEVVLPFNKFPGVDPLLGPEMRSTGEVMGVGRTFAEAFAKAQLGSSSTMRKSGRALLSVREGDKERVVDLAAKLLKQGFELDATHGTAIVLGEAGINPRLVNKVHEGRPHIQDRIKNGEYTYIINTTAGRQAIEDSKLIRRSALQYKVHYDTTLNGGFATAMALNADATEKVISVQEMHAQISK

SEQ ID NO: 56006 - protein, 159 aa, Enterobacter cloacae
MISLIAALAVDRVIGMENAMPWNLPADLAWFKRTTLNKPVVMGRLTWESIGRPLPGRKNIVISSQPGTDDRVEWVKSVDEAIAACGNAEEIMVIGGGRVYEQFLPKAQKLYLTHIDAEVEGDTHFPDYDPDEWESVFSEFHDADAQNSHSYCFEILERR

SEQ ID NO: 56007 - protein, 273 aa, Enterobacter cloacae
MTNRVHQGHLARKRFGQNFLNDQFVIESIVSAINPQKGQAMVEIGPGLAALTEPVGERLDELTVIELDRDLAARLQTHPFLGPKLTIYQQDAMTMNFGELSEKMGQPLRVFGNLPYNISTPLMFHLFSYTDAIADMHFMLQKEVVNRLVAGPNSKAYGRLSVMAQYYCNVIPVLEVPPSAFTPPPKVDSAVVRLVPHKTKPYPVKDLRVLSRITTEAFNQRRKTIRNSLSNSFTVEVLAELGIDPAMRAENISVEQYCKLANYISDNAPPKES

SEQ ID NO: 56008 - protein, 91 aa, Enterobacter cloacae
MPHSPEDKKRILTRVRRIRGQVEALERALESGDPCLAILQQIAAVRGAANGLMGEMVEIHLKDELVTGETTPDQRAVRMAEVGHLLRSYLK

SEQ ID NO: 56009 - protein, 341 aa, Enterobacter cloacae
  MISC_FEATURE (20)..(20): X=any amino acid
  MISC_FEATURE (23)..(23): X=any amino acid
CCNSNRSNVKNILLSGYQNXTTXLVTRIALFLTSPMEKNGLFSQRIRLRHLHTFVAVAQQGTLGRAAETLNLSQPALSKTLNELEQLTGARLFDRGRLGAQLTIVGEQFLTHAVKVLDALNTAGQSLHRKEEQTSEVVRVGALPTAALGILPPVIGQFHKQQRHTTIQVATMNNTMLLAGLKSGELDLGIGRMSDPELMGGLNYELLFLESLKLVVRPDHPLLQDTVTLSRVMEWPVVVCPKGTVPRQTAETLLQMQGCTLPSGCIETLSASLSRQLTLDYDYVWFVPSGAVKDDLRQGTLIALPITSPGPGEPIGILTRVDTPLSTGAQTLLSAIRKSMP

SEQ ID NO: 56010 - protein, 294 aa, Enterobacter cloacae
MSDTKQRTNAYPQPPFPEQPQTPPGLASEMQPVPDHGETSYKGHGRLAGKKALITGGDSGIGRAVAIAYAREGADVAINYLPEEEKDAAEVIDLIEAEGRKAIALPGDVRDETFCQNLVEEAVSKLGGLDILVNNAGRQQFRESLEELTTEDFDATFKTNVYAPFWITKAALRHLKASSVIINTSSVQAVKPSPVLLDYAQTKACLAVFTKSLAKQLGPKGIRVNAVAPGPYWTVLQSSGGQPMEKVKEFGGDTPLGRPGQPVEIAPLYVTLASDECSFTSGQVWCSDGGDGVI

SEQ ID NO: 56011 - protein, 580 aa, Enterobacter cloacae
MRVLKFGGTSVANAERFLRVADILESNARQGQVATVLSAPAKITNHLVAMIEKTIGGQDALPNISDAERIFADLLQGLAEALPGFPHAQLKSFVEQEFAQIKHVLHGISLLGQCPDSVNAALICRGEKLSIAIMAGVLEARGHSVTVIDPVEKLLAVGHYLESTVDIAESTRRIAASKIPSDHMILMAGFTAGNEKGELVVLGRNGSDYSAAVLAACLRADCCEIWTDVDGVYTCDPRQVPDARLLKSMSYQEAMELSYFGAKVLHPRTISPIAQFQIPCLIKNTGNPQAPGTLIGASTDEDGLPVKGISNLNNMAMFSVSGPGMKGMVGMAARVFAAMSRNGISVVLITQSSSEYSISFCVPQADCLRARRALEDEFYLELKEELLEPLAIQERLAIISVVGDGMRTLRGISAKFFAALARANINIVAIAQGSSERSISVVVDNDDATTGVRVVHQMLFNTDQVIELFLIGVGGVGGALLEQVKRQQEWLKKKHIDLRVCGIANSRALLTNVHGLNLENWQAEMNEAKEPFNLGRLIRLVKEYHLLNPVIVDCTSNQAVADQYADFLRDGFHVVTPNKK

SEQ ID NO: 56012 - protein, 555 aa, Enterobacter cloacae
VAQFVYTMHRVGKVVPPKRHILKNISLSFFPGAKIGVLGLNGAGKSTLLRIMAGIDTDIEGEARPQPGIKIGYLPQEPQLNPEHTVRESVEEAVSEVVNALKGLDEVYAKYAEPDADFDKLAAQQGKYEEIIQAHDGHNLNVQLERAADALRLPDWDAKIANLSGGERRRVALCRLLLEKPDMLLLDEPTNHLDAESVAWLERFLHDFEGTVVAITHDRYFLDNVAGWILELDRGEGIPWEGNYSSWLEQKDQRLAQEASQEAARRKSIEKELEWVRQGAKGRQSKGKARLARFEELNNTEYQKRNETNELFIPPGARLGDKVVEVTNLRKSYGDRVLIDDLTFSVPKGAIVGIIGPNGAGKSTLFRMMSGQEQPDSGSITLGETVKLASVDQFRDAMDNSKTVWEEVSGGLDIMRIGNTEMPSRAYVGRFNFKGTDQGKRVGELSGGERGRLHLAKLLQVGGNVLLLDEPTNDLDIETLRALENALLEFPGCAMVISHDRWFLDRIATHILDYQDEGKVEFFEGNFTEYEEYKKRTLGADALEPKRIKYKRIAK

SEQ ID NO: 56013 - protein, 487 aa, Enterobacter cloacae
LILLGWLCLSASVCAQAISFIAPKDRPQLEASKPWPKNQFLVLAYHDVEDDAADQRYLSVRTSALNEQISWLLHNGYHAISVQDILDAHDGKKTLPPKAVLLSFDDGYSSFYTRVWPLLQAWNVPALWAPVGSWVDTPANQKVNFGGLMTPRDRFATWDMVRELSRSPLIEIGSHTWASHYGIPANPQGSREPAIANRFYDKATGRYETDQQFSRRIGDDVRKVTEKITQVTGKAPRALVWPYGAASGTSLAIARQQGYQLAFTLEDGLGNVQDLGNIPRLLIAGNPSLKAFASTVSQVQERDPVRVMHVDLDYVYDPDPAQQTQNINRLIQRVYDMKISHVFLQAFADPQADGRIKALYFPNRRLPVRADLFNFVAWQLQTRAGVKVFAWMPVLSFDLNPSLPRVQRRDRQTGELREATEPYIRLSPWDPQVRQQVTDIYEDLARYASFNGILFHDDAALTDVDDAGQNTTRQKSQTLIGFTHALS

SEQ ID NO: 56014 - protein, 442 aa, Enterobacter cloacae
MTDRIIAFSILCLVFGLPLGVAALFTGELILDFVFFWPLFMSVLWITGGLYFWYQLERHWSWDKDTPAPTLAGEPLISILIPCFNEGRNARETISAALDQRYENIEVIAINDGSSDNTAQVLQELAQEQPRLRVINLAENQGKALALKAGAAAARGDLLVCIDGDALLDRDTAAYLVAPLIQYPHVGAVTGNPRIRTRSTLIGRIQVGEFSSIIGLIKRTQRIYGRVFTVSGVIAAFRRQALADVGYWSPDMITEDIDISWKLQLRHWDIFFEPRALCWILMPETLRGLWKQRLRWAQGGAEVFLVNLRRIVRWEHHRMWPLFLEYALSTLWAFAYAMTVLLFLLSHVAPVPARLTVESLFPPEFTGLLLGVMCLLQFLVSLYIERRYERKVASSLFWVIWFPMVYWMIGLFTTLVAFPKVMLKRQRARARWISPDRGKGSI

SEQ ID NO: 56015 - protein, 621 aa, Enterobacter cloacae
MRKGKLSSDAPFGTLLGYAPGGVAIYSSNYGSLDPRSYPQDADFRSYIGNEYMGHKWQCVEFARRFLFLNYGFVFTDVGMAWEIFSLRFLRQVVNDNILPLQAFANGSKRAPRAGALLIWQKGGEFHETGHVAVITQLLDDRVRIAEQNVIHSPLPLGQQWTRELRLSVENGCYTIHDTFNDTEILGWMIQTDDAEHSIPQPEIDGELLKISGARLKNKRQFDGKWLNENDVLQQAYIRANGHVINKDPCQYFTITESAEQELIKATNELHLMYLHATDKVLKDDSLLALFDIPKILWPRLRLSWQWRRHHMITGRMDFCMDERGIKVYEYNADSASCHTEGGLILEEWVKNGYRGNGHNPAEGLLEELTGAWKHSHARPFVHIMQDNDVEEDYHALFIQRSLMQAGFETKILHGLEALSWDAAGQLIDDEGRHVNCVWKTWAWETAIEQIREVSETEYAAVPIRTGHPEGEVRLIDVLLRPEVLVFEPLWTVIPGNKAILPVLWQLFPNHRYLLDTDFEVNELLKQTGYAVKPIAGRCGSNIDLISAQDELLDKSSGKFVDRKNIYQQLWCLPKVDGKYIQVCTFTVGGNYGGTCLRGDDSLVVKKESDIEPLIVVKDSL

SEQ ID NO: 56016 - protein, 379 aa, Enterobacter cloacae
MIISAASDYRAAAQRILPPFLFHYIDGGAYAEYTLRRNVEDLSEVALRQRVLKNMSDLSLETKLFNETLSMPVALAPVGLCGMYARRGEVQAAAAADAKGIPFTLSTVSVCPIEEVAPTIKRPMWFPLYVLRDRGFMRNALERAKAAGCSTLVFTVDMPTPGARYRDAHSGMIGPNAALRRYWQAVTHPQWAWDVGLNGRPHDLGNISAYLGKPTGLEDYIGWLANNFDPSISWKDLEWIREFWDGPMVIKGILDPEDARDAVRFGADGIVVSNHGGRQLDGVLSSARALPTIADAVKGDIAILADSGIRNGLDVVRMIALGADSVLLGRAYLYALATAGQAGVANLLNLIEKEMKVAMTLTGAKTIGEISRDSLVQEL

SEQ ID NO: 56017 - protein, 157 aa, Enterobacter cloacae
MLNIVLFEPEIPPNTGNIIRLCANTGFRLHIIEPMGFTWDDKRLRRAGLDYHEFTAVVRHHDYAAFLEAEKPQRMFSLTTKGTPSHSAVSYQAGDYLMFGPETRGLPATILDALPAEQKIRIPMMPDSRSMNLSNAVSVVVYEAWRQLGYPGAILRS

SEQ ID NO: 56018 - protein, 273 aa, Enterobacter cloacae
MPCEELDIVWNNIKAEARALADCEPMLASFYHATLLKHENLGSALSYMLANKLASSIMPAIAIREVVEEAYAADPEMIASAACDIQAVRTRDPAVDKYSTPLLYLKGFHALQAYRIGHWLWNEGRRALAIFLQNQVSVTFQVDIHPAAKIGRGIMLDHATGIVVGETAVIEDDVSILQSVTLGGTGKTSGDRHPKIREGVMIGAGAKILGNIEVGRGAKIGAGSVVLQPVPPHTTAAGVPARIVGKPDSDKPSMDMDQHFNGIHHTFEYGDGI

SEQ ID NO: 56019 - protein, 304 aa, Enterobacter cloacae
MVFSVVSALALAAPVYAGKLAIVIDDFGYRPHYENQVLAMPSAISVAVLPNAPHAREMATKAHSSGHQVLIHLPMAPLSKQPLEKDTLRPDMSSEEIERIIRDAYNKVPYAVGLNNHMGSAMTSSLFGMLKVMQALERYNLYFLDSMTIGNSQAMRAAQGTGVKVIKRKVFLDDTQNEADIRMQFNRAVQLARRNGSAIAIGHPHPSTVRVLQQMLPTLPDDITLVRPSDLLNEPQVDSSKPNSAQPVPTAPRNPFRGVKRCVPKQPLEPVYATRFFSVIGDSISNSTLVNYVQQQWQGWGKKA

SEQ ID NO: 56020 - protein, 339 aa, Enterobacter cloacae
MSTVNASMTVIGAGSYGTALAITLARNGHEVVLWGHDPKHIATLQRDRCNVAFLPDVPFPDSLHLESDLATALAASRNILIVVPSHVFGDVLRQIKPLMRPDARIVWATKGLEAETGRLLQDVAREALGDAIPLAVISGPTFAKELAAGLPTAISLASTDQAFSDDLQQLLHCGKSFRVYSNPDFIGVQLGGAVKNVIAIGAGMSDGIGFGANARTALITRGLTEMSRLGEALGADPATFMGMAGLGDLVLTCTDNQSRNRRFGMMLGQGSDVKGAQEKIGQVVEGYRNTKEVRELAHRFGVEMPITEEIYQVLYCGKNAREAALTLLGRARKDERSSN

SEQ ID NO: 56021 - protein, 83 aa, Enterobacter cloacae
MANIEIYTKATCPFCHRAKALLNSKGVTFQELPIDGDAIKREEMIKRSGRTTVPQIFIDAQHIGGCDDLYALDARGGLDPLLS

SEQ ID NO: 56022 - protein, 143 aa, Enterobacter cloacae
MQEIMQFVSRHPVLSIAWIGLLAAVLFTTFKSLTSKIKVITRGEATRLINKEDAVVVDLRQRDDFRKGHIAGAINLLPAEIKANNVGELEKHKAQPIIVVDATGMQAQESASALHKAGFENVTVLKEGISGWSGENLPLVRGK

SEQ ID NO: 56023 - protein, 417 aa, Enterobacter cloacae
MLEQMGAAAKAASYKLALLSSREKNRVLEKIADYLESQSQEILLANEQDLLEARRNGLSEAMLDRLALTPARLKGIADDVRQVCNLADPVGQVIDGGLLDSGLRLERHRVPLGVIGVIYEARPNVTVDVASLCLKTGNAAILRGGKETWRTNAATVKVIQQALEECGLPAGAVQAIESPDRALVNEMLRMDKYIDMLIPRGGAGLHKLCREQSTIPVITGGIGVCHIVVDDSAEIEPALKIIVNAKTQRPSTCNTVETLLVHQDIANTFLPALSKQMAESGVTLHADASALALLEDGPANVVPVKAEQYDDEFLSLDLNVKIVADLDDAIAHIREHGTQHSDAILTRTLRNADRFVNEVDSSAVYVNASTRFTDGGQFGLGAEVAVSTQKLHARGPMGLEALTTYKWIGFGDDTIRA

SEQ ID NO: 56024 - protein, 404 aa, Enterobacter cloacae
MKLNARQVDTAKPKDKPYKLADGGGLYLLIKPNGGKYWRLKYRVAGKEKLLALGVYPEVTLADARAKREEAKRGIAGGIDPMEAKREEKIARETQLNNTFKDIALEWHSSKLKKWSAGYASDILEAFNKDVFPYIGKKPIADIKPLELLNVLRRIEGRGATEKAKKVRQRCGEVFRYAIVTGRAEYNPAPDLTSAMQGHESNHYPFLTPKELPDFFKALSGYTGSALVVLAARLLIITGLRTGELRGAFWDEINISKAIWEIPASRMKMRRPHVVPLSRQALTLIGQLQELTGNYPLMFPGRNDPRKTMSEASINQVFKRIGYDGKVTGHGFRHTMSTILHEQGYNTAWIETQLAHVDKNSIRGTYNHAQYIDGRREMLQWYADYMEALENGENVVHGTFGKSA

SEQ ID NO: 56025 - protein, 445 aa, Enterobacter cloacae
MLNSILVILCLIAVSAFFSISEISLAASRKIKLKLLADEGNINATRILKMQENPGMFFTVVQIGLNAVAILGGIVGDAAFSPAFYSLFVKYMSVELAEQLSFILSFSLVTGLFILFADLTPKRIGMIAPEAVALRIINPMRFCLYVFRPLVWFFNGLANVIFRIFKLPMVRKDDITSDDIYAVVEAGALAGVLRKQEHELIENVFELESRTVPSSMTGRESIIWFDLHEDEQSLKNKVAQHPHSKFLVCNEDIDHIIGYVDSKDLLNRVLANQSLALNSGVQIRNTLIVPDTLTLSEALESFKTAGEDFAVIMNEYALVVGIITLNDVMTTLMGDLVGQGLEEQIVQRDDNSWLIDGGTPIEDVMRVLDIDEFPQSGNYETIGGFMMFMLRKIPKRTDSVKFSGYKFEVVDIDNYRIDQLLVTRIDNKPTVLVPKLPDAEEKVSA

SEQ ID NO: 56026 - protein, 1258 aa, Enterobacter cloacae
MSLWKKISLGVLIFIVLLLGTVAFLVGTTTGLHLLFNAANRWVPGLEIGQVTGGWRDLRLKNIRYEQPGVAVNAGEFHLAVKLGCLRDSKLCVNDLSLKDVNVAIDSKKMPKPAPVEEEDSGPLNLSTPYPIALYRVALDNVNIKIDDTTVSVMDFTSGLRWQEKNLTLTPTSLQGLLIALPKVTDVAQEEIVEPKIQNPQPEEKPLGETLKDLFSKPVLPEMTDVHLPLNLNIEEFKGEQLRMTGDTDLTVYNMLLKVSSIDGNMKLDALDIDTNQGSVNASGNAPVRDNWPVDITLNSALNIDPLKGEKVKVKVGGALRDKLDVGVNLSGPVDMVLRAQTQLAEAGLPLNLEVVSKQLYWPFTGEKQFQADDLKLKLSGKMTDYTLSFRTAVKGQGVPPANITLDAKGNEQQVNLDKLTVAALEGKTELTALLDWQQAISWRGELKLTGINTAKEVPDWPSKLDGLIKTRGSLYGGTWQMDVPEIKLTGNVKQNKVNVEGSVKGNSYLQWVIPGLHVALGRNTADIKGELGVKDLNLDATIDAPNLDNALPGLGGTAKGLVKVRGTVEAPQLLADITANNLRWQELSVARVRVEGDVKSTDQIGGSLNLRVERISQPDVNISLVTLDAKGNEKQHDLQLRVQGEPVSGQLHLTGSFDRKEERWKGTLDNTRFNTPVGPLALSRSIALDYRNAEQKISIGPHCWTNPNAELCVPQTIDAGAEGRAQINLNRFDLAMLKPFMPDTTQASGVFSGKADVAWDTTKEGLPQGSVTLSGRNVKVTQEVNDAPLPVAFDTLNLSADLHNNRAQLGWTIRLTNNGQLDGQVQITDPQGRRNLGGNVNVRNFNLAMVNPIFARGEKAEGMLNANLRLAGNVQSPQLFRKIRFTALNIDGNFMPFDMQPSQIAMNFNGMSSTLSGSVLTQQGQINLSGDADWSQLDNWRARIAAKGSKVRITVPPMVRLDVSPDVVFEATPSLFTLDGRVDVPWARIVVHDVPESAVGVSSDEVMLNENLKPIEQKSAGIPINSNLIVHVGNNVRLDAFGLKARLTGDLKVAQDKQGLGLNGQINIPEGRFHAYGQDLIVRKGELLFSGPPDQPLLNIEAIRNPEATENDVIAGVRVTGSADEPKAEIFSDPAMSQQEALSYLLRGQGLDSGQSDSAAMTSMLVGLGVAQSGQVVGKIGETFGVSNLALDTQGVGDSSQVVVSGYVLPGLQVKYGVGIFDSLATLTLRYRLMPKLYLEAVSGVDQALDLLYQFEF

SEQ ID NO: 56027 - protein, 101 aa, Enterobacter cloacae
MKQLSFLPGEMTPQDRRLIQRALRALDRHLHEPGVAFTSSHAVREWLRLHMAALEREEFRVLYLDNQNQLIAHETLFTGTINRTEVHPREVVKRALHFNVA

SEQ ID NO: 56028 - protein, 211 aa, Enterobacter cloacae
LSRMPVKVLTAISAPQASVQTPPPADREAFTRNIHLPEHTLYPHTPAIAAGVFIDGDIPMTTQTQYDLAPANQPEFELTVTPVPDEQRLDFWPQHFGTIPQWLLLEPHIFAWMERFCATYSGGIWSLYTLSNGGAFMAPDADSDDKWHLLNSMNGNDAEMSAEAAGIAVCLIAYSHHACRKECDAMTAHYYRLRDYALQHPEAHAILRIID

SEQ ID NO: 56029 - protein, 287 aa, Enterobacter cloacae
MNNSEGLKPFQQSLDGLPQWVSERILQQINQLTRYEPVIGIMGKSGAGKSSLCNALFASEVSPVSDVAACTREPLRFRLQVGERFMTLVDLPGVGESGARDTEYAALYREQLPRLDLVLWLIKADDRALAVDEHFYHQVIGEAYRHKVLFVISQSDKAEPTSGEGLLSTAQKQNISRKICLLHELFQPVHPVCAVSVRLQWGLKVMAERMIKCLPREATSPVVSQLQSSFRTTVVREQARSDFGETVGAVLDSISAFPLIPAPVRAVIQAVRNTVVSVARAVWDFFF

SEQ ID NO: 56030 - protein, 228 aa, Enterobacter cloacae
MAAESQLNPTQPVNQQIYRILRRDIVHCLIPPGTPLSEKEVSVRFDVSRQPVREAFIKLAENGLIQIRPQRGSYVNKISLSQVRNGCFVRQAIECAVARRAATLINDNQCYQLEQNLHQQRIAIDRKQLNDFFQLDDEFHQKLAQIADCQLAWDTIENIKATIDRVRYMSLDHVSPPEMLLRQHHDIFSALEKRDPDGVEKAMTLHLQEISESVQLIRQENSEWFSEE

SEQ ID NO: 56031 - protein, 487 aa, Enterobacter cloacae
MENTLLQANATLPQYDRDSLQPRIVHLGFGAFHRAHQAVYADILAAEHGSGWGYCEVNLIGGEQQIADLNAQDNLYTVAEMSADAWTSRVVGVVKKALHAKVDGLECVLAAMCEPQVTIVSLTITEKGYCHSPATGQLMLDHPFIVADLQNPHQPKSAPGVVVEALARRKAAGLPAFSVMSCDNMPENGHVMRNVTCAYARAVDGELADWIEANVTFPSTMVDRIVPAVTPDTLDKIEQLTGVRDPAAVACEPFRQWVIEDNFVAGRPEWEKAGAELVSDVIPFEEMKLRMLNGSHSFLAYLGYLAGYPHINDCMEDENYRLAAHTLMLNEQAPTLKVKGVDLGRYADLLIARYSNPALRHRTWQIAMDGSQKLPQRMLDSVRWHLVHQKPFPLLALGVAGWMRYVGGVDEQGNAIDVSDPLLAVIQAAVKGSAEGESRVNALLGIEAIFGKELPQEPRFVAAVMTAYRTLLQKGAKATLAQYASQR

SEQ ID NO: 56032 - protein, 246 aa, Enterobacter cloacae
MTDKISAPRYALRGLQLIGWRDMQHALDFLFADGQMKSGTLVAINAEKMLAVEDNAEVKSLIEAAEFKYADGISVVRSIRKKYPDANVSRVAGADLWEQLMARAGAQGTPVFLIGGKPEILAQTEEKLRRQWNVNIVGSQNGYFKPEDRQALFERVRDSGAKIVTVAMGSPRQEILMRDCRLVCPDALYMGVGGTYDVFTGHVTRAPKVWQNLGLEWLYRLLSQPTRIKRQIRLLRYLAWHYTGKM

SEQ ID NO: 56033 - protein, 367 aa, Enterobacter cloacae
MNLLDTFTELTSIFLFTTCFLFLARKVAKYLGLVDKPNFRKRHQGMIPLVGGISVFAGICFTFAIADYYIPHARLYLTCATVLVVVGALDDRYDISVKIRAFVQAAVAIAMMVFAKLHLSSLGYIFGSWEMELGPFGYFLTLFAVWVAINAFNMVDGIDGLLGGLSCVSFAAIGFILWFDGQYSLAMWCFAMIAAILPYILLNLGALGRRYKVFMGDAGSTLIGFTIIWILLETTQGDVHPISPVTALWIIAIPLMDMVAIMYRRLRKGMSPFSADRQHIHHLIMRAGFTSRQAFVLITLAAAILAGIGVTAEYTHFVPEWAMLVLFLLAFSLYGYCIKRAWKVARFIKRIKRRMRRNSGKNTTLTK

SEQ ID NO: 56034 - protein, 265 aa, Enterobacter cloacae
EDVTARVLDLASPIGRSQRGSIVAPPIAGTTMLLQNIAQSIAYNHPDCVLMVLLIDERPEEVTEMQRLVKGEVVASTFDEPASRHVQVAEMVIEKAKRLVEHKKDVIILLDSITRLARAYNTVVPASGKVLTGGVDANALHRPKRFFGAARNVEEGGSLTIIATALIDTGSKMDEVIYEEFKGTGNMELHLSRKIAEKRVFPAIDYNRSGTRKEELLTTQEELQKMWILRKIIHPMGEIDAMEFLINKLAMTKTNDDFFDMMKRS

SEQ ID NO: 56035 - protein, 692 aa, Enterobacter cloacae
NVAVITIDVPDEKMNTLKAEFGVQVRAMLKQIRDNKAIRGLVFISAKPDNFIAGADINMIARAQSALEAEELARQGQQVMAEISGLPIPVIAAIHGACLGGGLELALACHSRICTDDAKTILGLPEVQLGLLPGSGGTQRLPRLVGVSTALEMILTGKQLRARQALKAGLVDDVVPQSILLEAAVELALKGRQAKRPLPVRERVLAGPLGRTLLFNMVGKKTEQKTKGNYPAAKRILEVIETGLSQGSSSGYAAEAKAFGELAMTPQSQALRSIFFASTDVKKDPGSEAQPAPLRAIGVLGGGLMGGGISFVTASKGKLPVRIKDINPKGINHALQYSWQNLDQKVKRRHIKASERDKTLAMISGATDYSGFAHRDLVIEAVFEDLALKQQMVADVEQHCAPHTIFASNTSSLPIGDIAAKAARPEQVIGLHFFSPVEKMPLVEVIPHATTSPQTVATVVKLAKKQGKTPIVVADKAGFYVNRILAPYINEAMRLLTEGEKIEHVDEALVKFGFPVGPIQLLDEVGIDTGTKIIPVLEAAYGDRFSPPANIVSAILKDDRKGRKNERGFYLYGAKGRKSRKQVDPSVYGLISTTGQGKLSAVQCAERCVMMMLNEAARCFDEQVIKSARDGDIGAVFGIGFPPFLGGPFRYMDTLGAGEVVAILQRLGSQYGPRFTPCDELLQMAERGQTFW

SEQ ID NO: 56036 - protein, 442 aa, Enterobacter cloacae
FLQGSVMSQALPLITRQGDRIAIVSGLRTPFARQATAFHGIPAVDLGKMVVGEMLARSEIPPEVIEQLVFGQVVQMPEAPNIAREIVLGTGMNVHTDAYSVSRACATSFQAVANVAESLMAGTIRAGIAGGADSSSVLPIGVSKKLARILVDANKARTTGQKLKLFSRLRLRDLMPVPAAVAEYSTGLRMGDTAEQMAKTYGITREQQDALAHRSHQLAAKAWSEGKLTDEVMTAYIPPYREPLVEDNNIRGTSTLADYAKLRPAFDRKHGTVTAANSTPLTDGAAAVILMTESRAKELGITPLGYLRSYAFTAIDVWQDMLLGPAWSTPLALERAGLTLADLTLIDMHEAFAAQTLANVQLLASERFARDVLGRAHATGEVDQSKFNVLGGSIAYGHPFAATGARMITQTLHELRRRGGGFGLVTACAAGGLGAAMVLEAE

SEQ ID NO: 56037 - protein, 361 aa, Enterobacter cloacae
MAGNSIGQLFRVTTFGESHGLALGCIVDGVPPGIELTEADLQHDLDRRRPGTSRYTTQRREPDQVKILSGVFEGRTTGTSIGLLIENTDQRSQDYGAIKDVFRPGHADYTYEQKYGFRDYRGGGRSSARETAMRVAAGAIAKKYLQQKFGIVIRGCLTQMGDIPLAIKDWDQVEQNPFFCADADKLEALDELMRGLKKEGDSIGAKVTVVADGVPAGWGEPVFDRLDADIAHALMSINAVKGVEIGDGFDVVQLRGSQNRDEITKAGFQSNHAGGILGGISSGQQIIANIALKPTSSITVPGHTINRDGEEVEMITKGRHDPCVGIRAVPIAETMLAIVLMDHFPRQRAQNADVTTTIPRW

SEQ ID NO: 56038 - protein, 100 aa, Enterobacter cloacae
IQRKLSMSKCSADETPVCCCMDVGTIMDNSDCTASYSRVFATRAEAEETLTALSKRARDVESDPCEIKSTFTEVEGSVKLDIDFVFACEAETLIFQLGLR

SEQ ID NO: 56039 - protein, 442 aa, Enterobacter cloacae
MVMSQKTLFNKTALAVAVALVSTSAWSAGFQLNEFSSSGLGRAYSGEGAIADDAGNASRNPALIMMFDRPTFSAGAIFVDPGVDISGRSPTGADLKSDNIAPTAWVPNMHFVAPINDQFGWGASVTSNYGLATEFNNDFAAGAFGGKTDLETLNLNLSGAYRLDNHWSFGVGFDAVYAKAKIERYAGDLGKVVAGSGALPPALAQRVAGIPADTQIAYLKGDEWGFGWNAGILYELDKNNRYGLTYRSEVKIDFDGDYKSSLPSAYNQILGNFGLPMGTNGQTTGGSLSLHLPEMWELSGYNKVAPQWAVHYSLTYTSWSQFQELKATNSNGDTLFYKDESFRDAYRIALGTTYYMDDNWTFRTGIAFDDSPVPADKRSISIPDQDRFWLSAGATYAFNKDASIDAGISYMHGQKVNFKEGPYEFSSEGKAWLYGMNFNYAF

SEQ ID NO: 56040 - protein, 250 aa, Enterobacter cloacae
MKLRLSALALGATMLVGCASSGEQTGRSDPLEGFNRSMYSFNYNVLDPYVVRPVAVAWRDYVPQPARNGLSNFTSNLEEPAVMVNYFLQGDPYQGMVHFTRFFLNSILGMGGFIDVAGMANQKLQREQPHRFGSTMGHYGVGYGPYVHLPFYGSFTLRDDGGDMVDTLYPVLSWLTWPLSVGKWTVEGIETRAQLLDSDGLLRQSSDPYIMVREAYFQNHDFIANGGKLKPEENPNAKAIENELKDIDSE

SEQ ID NO: 56041 - protein, 741 aa, Enterobacter cloacae
MTRSNCWIQETDMLYKGDTLYLNWLEDGIAELVFDAPGSVNKLDTATVASLGQALDVLEKQPELKGLLLRSNKAAFIVGADITEFLSLFLVPEEQLSQWLHFANSVFNRLEDLPVPTISAVNGYALGGGCECVLATDYRLATPDLRIGLPETKLGIMPGFGGSVRMPRMLGADSALEIIAAGKDVGAEQAQKIGLVDGVVKPEKLVEGALAILRQAINGDLDWKAKRQPKLEPLKLSKIEATMSFTIAKGMVMQTAGKHYPAPITAVKTIEAAARLGRDEALKLENQSFVPLAHTNEARALVGIFLNDQFVKGKARQLTKNVETPKHAAVLGAGIMGGGIAYQSAWKGVPVVMKDISEKSLTLGMTEASKLLNKQLERGKIDGLKLAGVISTIQPVLEYSGFDRVDVVVEAVVENPKVKKAVLAETEDKVRPETVLASNTSTIPISELASVLKRPENFCGMHFFNPVHRMPLVEVIRGEKTSDETIAKVVAWASKMGKTPIVVNDCPGFFVNRVLFPYFAGFSQLLRDGADFRKIDKVMEKQFGWPMGPAYLLDVVGIDTAHHAQAVMAAGFPQRMQKDYRDAIDALFDANRFGQKNGQGFWRYKEDSKGKPKKEEDAVVDGLLADVSQPKRDFTDDEIIARMMIPMINEVVRCLEEGIIASPAEADMALVYGLGFPPFHGGAFRWLDTLGSARYLDMAQQYQHLGPLYEVPEGLRNKARHNEPYYPAVEPARPVGDLKTA

SEQ ID NO: 56042 - protein, 386 aa, Enterobacter cloacae
MEKVVIVDAIRTPMGRSKGGAFRNVRAEDLSAHLMRSLLARNPALDPAALDDIYWGCVQQTLEQGFNIARNASLLAEIPHSVPAVTVNRLCGSSMQALHDAARMIMTGDAQACLVGGVEHMGHVPMSHGVDFHPGMSRNVAKTAGMMGLTAEMLSRLHGINREMQDAFAARSHARAWASTQSGAFKNEIIPTGGHDADGVLKQFSYDEVIRPETTVEALSTLRPAFDPVTGTVTAGTSSALSDGAAAMLVMSESRARELGLTPRARVRSMAVVGCDPSIMGYGPVPASKLALKKAGLTASDIDLFEMNEAFAAQSLPCIKDLGLMEQIDEKINLNGGAIALGHPLGCSGARISTTLINLMERKDAQFGLATMCIGLGQGIATVFER

SEQ ID NO: 56043 - protein, 233 aa, Enterobacter cloacae
MTTLSCKVTSVDAITDTVYRVRLVPEAPFSFRAGQYLMVVMDERDKRPFSMASTPAEQEFIELHIGASELNLYAMAVMDRILKEREIVVDIPHGDAWLRDDEDRPLILIAGGTGFSYVRSILLTALARNPDRDITIYWGGREEKHLYDLSELEALSVTHPNLRIEPVVEQPEEGWRGRSGTVLTAVLQDHGTLAGHDIYIAGRFEMAKIARDLFCNERDAREDRLFGDAFAFI

SEQ ID NO: 56044 - protein, 260 aa, Enterobacter cloacae
MFDIGLNLTSSQFAKDRDEVVARAFAAGVKGLLLTGTNLHESEQAQQLAQGYDRCWSTAGVHPHDSSQWTAESGDTLYRLAKTPEVVAIGECGLDFNRNFSTPEEQEKAFTAQLALAAELEMPVFMHCRDAHERFLALLDPWLEKLPGAVLHCFTGSRQEALDCLKRGLYLGITGWVCDERRGLELRELLPVIPADRLLLETDAPYLLPRDMKSKPASRRNEPAYLGHIVESVAKWRGEDPHWLSAQTDDNVRNLFRINV

SEQ ID NO: 56045 - protein, 315 aa, Enterobacter cloacae
MQNRLTIKDIARLSGVGKSTVSRVLNNESGVSERTRERVEAVMNQHGFSPSRSARAMRGQSDKVVAIIVSRLDSLSENLAVQTMLPAFYEQGYDPIMMESQFSVQLVEEHLGMLQRRNIDGVVLFGFTGIKDEMLKPWQPSLVLLARDAHGFASVCYDDEGAIITLMQRLFDEGHRHISFLGVPHADVTTGKRRHEAYLAFCKKHNLSAVASLPGLGMKQGYEQVASVLTPQTTALVCATDTLALGASKYLQEQRIDNLQVASVGSTPLMKFLHPEIITVDPGYAESGRQAAAQLIEQINGRSEPRQIVIPAHLS

SEQ ID NO: 56046 - protein, 902 aa, Enterobacter cloacae
MFKNITRQLQALLSRHLPHRLVQRDPLPNAKNMAGAAIPASLTERCLNVAAMDENEVWRAFGGHPEGLNAAEVEKMRAVHGDNQIPAQKPSPWWVHLWLCYRNPFNLLLTVLGLISYATEDLFAAGVIALMVGISTLLNFIQEARSTKAADALKAMVSNTATVSRVINDLGENAWVELPIDQLVPGDLVKLAAGDMIPADLRIIQARDLFVAQASLTGESLPVEKVARSRDPQQMNPLECDTLCFMGTTVVSGTAQAIVTATGGNTWFGQLAGRVSEQESEPNAFQKGIGRVSMLLIRFMMVMTPIVLLINGYTKGDWWEAALFALSVAVGLTPEMLPMIVTSTLARGAVKLSKQKVIVKHLDAIQNFGAMDILCTDKTGTLTQDKIVLENHTDISGKTSERVLHSAWLNSHYQTGLKNLLDVAVLEGVDEESARTLSGRWQKVDEIPFDFERRRMSVVVSEQTDVHQLICKGALQEILNVSTQVRYNGDIVPLDDTMLRRIKRVTDNLNRQGLRVVAVASKFLPAREGDYQRIDESDLILEGYIAFLDPPKETTAPALKALKASGITVKILTGDSELVAAKVCHEVGLDAGDVVVGSDIEHLSDDELAKLAQRTTLFARLTPMHKERIVTLLKREGHVVGFMGDGINDAPALRAADIGISVDGAVDIAREAADIILLEKSLMVLEEGVIEGRRTFANMLKYIKMTASSNFGNVFSVLVASAFLPFLPMLPLHLLIQNLMYDVSQVAIPFDNVDDEQIQKPQHWNPADLGRFMMFFGPISSIFDILTFCLMWFVFHANTPEHQTLFQSGWFVVGLLSQTLIVHMIRTRRIPFIQSRAAWPLIVMTGIVMALGIALPFSPLAGYLQLQALPLGYFPWLVAILAGYMVLTQMVKGFYARRYGWQ

SEQ ID NO: 56047 - protein, 467 aa, Enterobacter cloacae
MGKFKFPSAYTILFFLIAVVAALSWVVPAGQYQMAMNETLGKEVPIAGTYAHVAAHPQGLVSVLMAPIAGLYDPVSGQAGAIDVALFILIIGGFLGIVTKTGAIDAGIERVTTRLRGREEWMIPILMALFAAGGTIYGMAEESLPFYTLLVPVMLAARFDPVVAASTVLLGAGIGTLGSTINPFATVIAANAAGIPFTNGIALRVALLVIGWIICVAWVMRYARKVRQDPSLSIVADKQEENRAHFLGDKGEQSLEFTLVRKIILVIFALAFAVMIYGVAVLGWWMAEISAVFLASAIIVGLIARMSEEELTSTFINGARDLLGVALIIGIARGIVVIMDKGMITHTILHSAEGLVSGLSTVAFINVMYWLEVVLSFLVPSSSGLAVLTMPIMAPLADFANVNRDLVVTAYQSASGIVNLVTPTSAVVMGGLAIARVPYMRYLKWVAPLLGILTVVIMVALSLGALL

SEQ ID NO: 56048 - protein, 194 aa, Enterobacter cloacae
MTLQPAFTLAVQDAQHSFRRLLKAMSEPGAIVSLHQLSQGWLPLNLATTSVLLTLADNDTPVWLSGALSNDIASQNLRFHTSAPLVDQPQQAVFAVADEQISHEQLNALSEGSTVAPETSATLILQVSSLSGGRMLRLTGAGIADERMVAPQLPECIIHELTERPHPFPLGIDLILTCGERLLAIPRTTHVEVC

SEQ ID NO: 56049 - protein, 91 aa, Enterobacter cloacae; identical to SEQ ID NO: 43001

SEQ ID NO: 56050 - protein, 318 aa, Enterobacter cloacae
MKIALVIFITLALAGCALLSLHMGVIPVPWRALLTDWQDGREHYYVLMEYRLPRLLLALFVGAALAVAGVLVQGIVRNPLASPDILGINHAASLASVGALLLMPSLSVMVLPLLAFAGGMAGLILLKMLAKTHQPMKLALTGVALSACWASLTDYLMLLHPQDVNSALLWLTGSLWGRDWHFVKIAVPLLILFLPLSLRFCRDLDLLALGDARAATLGVSVQRTRFQGLMLAVAMTATGVAVCGPISFIGLVVPHMVRRIAGGRHRWLMPVSALTGALLLVIADLLARIIHPPLELPAGVLTAIIGAPWFVWLLVRMR

SEQ ID NO: 56051 - protein, 255 aa, Enterobacter cloacae
MRLRTENLTVSYGAQTVLDGLSLALPAGKITALLGPNGCGKSTLLNCFSRLLTPDSGEILLDEKPIAGFSARQLARRLALLPQHHLSPEGITVRELVSYGRSPWLSLWGRLSAEDNERVNVAMSQTRTRNLADRRLTQLSGGQRQRAFLAMVLAQDTPLILLDEPTTYLDINHQVELMRLMVELKRQGKTVVTVLHDLNQASRYCDHLVVLASGRVMAQGAPEAVMKPELLKTVFSVEAEIHPEPVSGRPMCVVK

SEQ ID NO: 56052 - protein, 317 aa, Enterobacter cloacae
MNPSLTDSRRQAWRSASHWYAVLSGERVSPQQEARWQQWYEQDQDNQWAWQQVENLRNQLGGVPGDVASRALHDTRLTRRHVMKGLLLLLGAGGGWQLWQSETGEGLRADYRTAKGAVSRQQLEDDSLLTLNTQSAADVRFDAHQRTVRLWYGEIAITTAEDAQNRPFRVLTRQAQLTALGTEFTVRQQDNFTQLDVQQHAVEVLLASAPAQKRIVNAGESLQFSASEFGAVKPLDDESTSWTKGILSFSDKPLGEVIATLSRYRNGVLRCDPAVAGLRLSGTFPLKNTDAILNVIAQTLPVKIQSITRYWINISPL

SEQ ID NO: 56053 - protein, 774 aa, Enterobacter cloacae
MTPLRVFRKTTPLVNAIRLSLLPLAGLSFSAFAAQVDIAPGSLDKALNQYAAHSGITLSVDASLTRGKQSNGLHGDYDVESGLQQLLDGSGLQVKPLRNNSWTLETAPAPKEDALTVVGDWLGDARENDVFEHAGARDVIRREDFAKTGATTMREVLNRIPGVSAPENNGTGSHDLAMNFGIRGLNPRLASRSTVLMDGIPVPFAPYGQPQLSLAPVSLGNMDAIDVVRGGGAVRYGPQSVGGVVNFVTRAIPQDFGIEAGVEGQLSPTSSQNNPKETHNLMVGGTADNGFGTALLYSGTRGSDWREHSATRIDDLMLKSKYAPNEVHTFNSLLQYYDGEADMPGGLSRADYDADRWQSTRPYDRFWGRRKLASLGYQFQPDSQHKFNIQGFYTQTLRSGYLEQGKRITLSPRIYWVRGIEPRYSQSFMIGPSAHEVGVGYRYVNESTHEMRYYTATSSGQLPSGSSPYDRDTRSGTEAHAWYLDDKIDIGNWTITPGMRFEHIESYQNNAIKGTHEEVSYNAPLPALNVLYHLTDSWNLYANTEGSFGTVQYSQIGKAVQSGNVEPEKARTWELGTRYDDGALTAEMGLFLINFNNQYDSNQTNDTVTARGKTRHTGLETQARYDLGTLTPTLDNVSVYASYAYVNAEIREKGDTYGNQVPFSPKHKGTLGVDYKPGNWTFNLNSDFQSSQFADNANTVKESADGSTGRIPGFMLWGARVAYDFGPQMADLNLAFGVKNIFDQDYFIRSYDDNNKGIYAGQPRTLYMQGSLKF

SEQ ID NO: 56054 - protein, 300 aa, Enterobacter cloacae
MLAFIRFLFAGLLLVIGHAFAATVQDEHGTFTLDKTPQRIVVLELSFADALAAVDVSPIGIADDNDAKRILPEVRAHLKPWQSVGTRAQPSLEAIAALKPDLIIADSSRHAGIYTALQQIAPVLLLKSRNETYAENLHSAAIIGEVVGKKREMQARLEQHKEKMAQWSSQLPTGTRVAFGTSREQLFNLHTQETWTGSVLASLGLNVPAAMAGASMPSIGLEQLLAVNPAWLLVAHYREESIVKRWQQDPLWQILTAAQKQQVASVDSNAWARMRGIFAAERIAADTVKIFHHQPLTDVK

SEQ ID NO: 56055 - protein, 499 aa, Enterobacter cloacae
MSLISGFVKSLSKLSMIGRALMLPISLLPAAGLLLAFGDKFHLPLMMNAGGVIFDNLPMLFAIGSAVGLASESGIAALSAAVSVFVTNITISTVLSITPEMASQGGKYAMVVGIPTLQMGVFGGLICGILAAWCYNRFHTMQLPEFLGFFSGKRFVAIATAFLSFLMGLLLPYVWQHIQAGIDALSVVVNGDNQAASTFIFGLVERALIPLGLHHIWYPSFWYSFGDYTTQAGQVIHGDQTIWFKMLEEGVKSFSSDTYQNAGKFMQGEFPLMLFALPAACLAMYHEAHTKNKKIAAGILFSAALTCFLTGITEPVEFTFIFVAPILYVFNAIMAGLAYMTMYLLHAHIAKSFSAGFIDYLSFGILPSFNGYQTNFLNAIIIGIPMGLIYYFTFRFVIRRFDVKTPGRTEVTANADDKSDSELATEIITLLGGAHNIDSVGSCITRLRLEVAKSEVVDRDGLNGLGARGVVFVGDNGIQVIFGARAQFIAQTMSTMIGK

SEQ ID NO: 56056 - protein, 461 aa, Enterobacter cloacae
MLKIFNTMTRQKEEFKPIHAGEVGMYVCGITVYDLCHIGHGRTFVAFDVVSRYLRFLGYTLKYVRNITDIDDKIIKRANENGESFVALVDRMIVEMHKDFDALNIQRPDSEPRATHHIHEIIEITEKLIARGHAYVADNGDVMFSVPTDPTYGSLSRQDLDQLQAGARVDVVDVKRNPMDFVLWKMSKEGEPSWPSPWGEGRPGWHIECSAMNCKQLGKHFDIHGGGSDLMFPHHENEIAQSTCAHGGEYVNYWMHSGMVMVDREKMSKSLGNFFTVRDVLKYYDAETVRYFLMSGHYRSQLNYSEENLKQARSALERLYTALRGTDRSVPAAGGEAFEARFVEVMNDDFNTPEAYSVLFDMAREVNRLKSEDMAAANALASHLRKLSSVLGLLEQDPDAFLQSGAQADDGEVAEIEALIKARLEARQAKDWAAADAARNRLTEMGIILEDGPQGTTWRRK

SEQ ID NO: 56057 - protein, 189 aa, Enterobacter cloacae
LPFLFLILMTFRAAAADTLLILGDSLSAGYRMAASAAWPALLNDKWQSKTSVINASISGDTSQQGLSRLPALLKQHQPRWVLVELGGNDGLRGFQPQQTEQTLRTILQDIKAANAQPLLMQIRLPANYGRRYNEAFSAIYPKLAKEFDIPLLPFFMEDGYVKPQWIQDDGIHPNRDAQPFIADWMATRL

SEQ ID NO: 56058 - protein, 1225 aa, Enterobacter cloacae
MRKILLTIDRFEHYGQHESIFFDLIEYFHRHNWQVDVFAKTTGRYWLNNLNIINENKTIRLLEQPDGQLHAFYDLMWIFNGYIPAELNTIFMQGDWVSRVFFHHFYSYADYDLPYGADVENALSCNSFACSTASYVRLVEKGIKQPRIKIFPLTLNNQFASASGVFTDKLEKALLISSGYNKNLVELTESFQTRNIELDYYNLDSAPGPVTPALLSQYQLIIGDEARVVLAMGMGLPVVISDGISSHGYLSEANLLERRAYHFALTGAPKIANQNRWIKEILDGYSQAAQWAWEYRAEANAQLSLDACVGRILERLPAPKVLKISQEQYRNLEFHRKVMDSFGEETTRSVGSWMNDRKPTSLRSAIIGTLLQSFPACASISVIIIDREGERDKLRASLRSVNNQTLSADSLIVVGKQPSHSITDDSTIRFVGDLNLAVDGIASANLLIIEAGDILEEHALLTCAEFTMRDPQKAFWYFDELIIRDDKEDGLILKPECDIDMLRAHPYIGSSAFISTDALRRRNGFNPDCLYLSHIDLCWKLIEEEGPFAVGHIPEALVARTISMSEWCKKPAIIDEMKNITAAHLSRCGIRATIASGEEPGVQFVTYQLPAIAKVSVIIPTRDRLVLLQRCIDSLMEKTAYHQYEIIIVDNGSTDEDARRYLDQLESMQLTQIRVLRWETAFNFAAINNYASRYATGEYLLFMNNDIEIHDGNWMGALVELTQRPEVAIVGSKLEYPDGTLEHGGYITGINDGVVVCGKGSSPDDTGFLSRLKIPRGAHAVSAACMMVRKDVFDELGGFDEENFPIYYADVDLALKAKAQGYITLWTPFSRVKHLGGLRVLYPEKFAVATHADVLYNDVLLEKWGAELARDPYYNPNMNRLGSTFSLNTRMSRLPHALPGKPLPVIMGTHINWTGCGNYRVIKPLHALQQELKADGGLILGLPTVMEVAQFQPDRLILEVPIADDIPQTVQRYRQVCNAKIIMEFDDYYLDVPEKNIFRENVPKDIQNRLTSALAQADWVVVSTEPLAEAYSRFHSDIRVAKNRLDIELWGNLKSAKRRGKKPRVGWAGGASHTGDLEILLPIISELKDEVEWVFMGMKPEGVACEFHLPVPFEHYPQKLSELDLDLALVPLEQNLFNECKSNLRLLELGSCGFPIICTDIEPYRCGLPVHRVKNTPNAWIAAVREYIHDWNALEKAGEELRKAVHRDWMLRDGGLDDWQRAWIG

SEQ ID NO: 56059 - protein, 220 aa, Enterobacter cloacae
MSNTLTGTDKSVILLMTIGEDRAAEVFKHLSQREVQILSAAMANVRQISNKQLTEVLAEFEQEAEQFAALNINANDYLRSVLVKALGEERASSLLEDILETRDTASGIETLNFMEPQSAADLIRDEHPQIIATILVHLKRGQAADILALFEERLRHDVMLRIATFGGVQPAALAELTEVLNNLLDGQNLKRSKMGGVRTAAEIINLMKTQQEEAVITAVR

SEQ ID NO: 56060 - protein, 263 aa, Enterobacter cloacae
MKPTTISLLQKCKQEKKRFATITAYDYSFAKLFAEEGINVMLVGDSLGMTVQGHDSTLPVTVEDIAYHTRAVRRGAPACLLLSDLPFMAYATPEQAFENAAAVMRAGANMVKIEGGAWLVDTVKMLTERAVPVCGHLGLTPQSVNIFGGYKVQGRGDAAQTLLDDALALEAAGAQLLVLECVPVELAKRITEALSIPVIGIGAGNVTDGQILVMHDAFGITGGHIPKFAKNFLTEAGDMRAAVRQYIADVESGVYPGEEHSFH

SEQ ID NO: 56061 - protein, 308 aa, Enterobacter cloacae
MAIALELEQLKKTYPGGVQALRGIDLKVEAGDFYALLGPNGAGKSTTIGIISSLVNKTSGRVSVFGYDLQKDVVNAKRQLGLVPQEFNFNPFETVQQIVVNQAGYYGVERKEALERSEKYLKQLDLWEKRNERARMLSGGMKRRLMIARALMHEPKLLILDEPTAGVDIELRRSMWGFLKDLNDKGTTIILTTHYLEEAEMLCRNIGIIQHGELVENTSMKNLLSKLKSETFILDLAAKSALPKLEGYNYRLVDTSTLEVEVLREQGINSVFSQLSAQGIQVLSMRNKANRLEELFVSLVHDKQGDKA

SEQ ID NO: 56062 - protein, 197 aa, Enterobacter cloacae
MQKVVLATGNAGKVRELASLLNDFGLNVVAQTDLGVESAEETGLTFIENAILKARHAAQITGLPAIADDSGLAVDFLGGAPGIYSARYSGVDATDQQNLEKLLVALKDVPDEQRTAQFHCVLVYMRHAEDPTPIVCHGSWPGVITHEAAGNGGFGYDPIFFVPTEGKTAAELTREEKSAISHRGRALKLLLEALRNG

SEQ ID NO: 56063 - protein, 243 aa, Enterobacter cloacae
MRIPRIYHPELITAGREIALSDDAANHVGRVLRMGAGQAIQLFDGSNQVFDAEITRSDKKSVHVNVLRGEVDDRESPLHIHLGQVMSRGEKMEFTIQKSIELGVSLITPLFSERCGVKLDAERLNKKIQQWQKIAIAACEQSGRNRIPEIRPAMDLEDWCAEEESGLKLNLHPRASASINTLPLPVERVRLLIGPEGGLSADEIAMTARYQFTDILLGPRVLRTETTALTAITALQVRFGDLG

SEQ ID NO: 56064 - protein, 233 aa, Enterobacter cloacae
MNDIAHNLAQVRDKISAAAARCGRASEEITLLAVSKTKPASAIAEAIDAGQRAFGENYVQEGVDKIRYFQEQGNTDLQWHFIGPLQSNKSRLVAEHFDWCHTIDRLRIATRLNDQRPAEMPALNVLIQVNISDENSKSGIALSELDTLAADVAELPRLTLRGLMAIPAPESSYERQFAVAQQMAVAFEALKARYNTVDTLSLGMSDDMEAAIAAGSTMVRIGTAIFGARDYSK

SEQ ID NO: 56065 - protein, 326 aa, Enterobacter cloacae
MDVEEIVALSVKHNVSDLHLCSDSPPRWRRLGRLEPAPFPPPDVGALLKAWLNDEQQGIWWAKGQVDFASTVTGGQRLRGSAFKQMRGVSVTLRLLPRSCPQLSSLGAPRAIPELLSNDAGLILVTGATGSGKSTTLAAMVDFLNHHADGHILTLEDPVEFIYQSERCLIQQREIGQHSPSFAEALRSALRQDPDVILLGELRDSETIRLALTAAETGHLVLATLHTRGASQAIERLVDTFPAQEKDPVRNQLGGSLRAVLAQRLLPDLQGGRVALYELLVNTAAAANLIREGKTWQLPGIIQTGQQAGMQNFDQSLAERRAQGRL

SEQ ID NO: 56066 - protein, 138 aa, Enterobacter cloacae
MSGTLLAFDFGTKSIGVAVGQRITGTARPLTALKANDGTPDWNLIERLLKEWQPDDVIVGLPLNMDGTEQPLTARARKFANKIHGRFGVSVKLHDERLSTVEARAGLFEHGGFRALNKGSVDSASAVIILESYFEQGF

SEQ ID NO: 56067 - protein, 277 aa, Enterobacter cloacae
WYRWQYDSAGRLLVQDGTLPGQEQWRWDAAGNPLEGAAEKVTHNRLTQLNGIRWRYDIHGRTVEKDNGQTRWHYRYDGEHRLTEVISQPRDGNKPQTQVSFRYDPLGRRISKTRRQILGGQPTGKPVTTRFVWEGFRLLQEVHGDVPLTYVYSEQDSYDSVARIDGVDSPEIFWFHCQPNGTPERMTDIEGQVRWEGVNSAWGKLLRESETQVSGYSQNLRMQGQYLDRETGLHYNLFRYYDPDCGRFTQQDPIGLAGGINLYQYAPNALGWVDPWG

SEQ ID NO: 56068 - protein, 66 aa, Enterobacter cloacae
MTGNNRSHALNATKRRFLPNLHSHRFWVESEKRFVTLRVSAKGMRVIDKKGIDTVLSELRARGEKY

SEQ ID NO: 56069 - protein, 55 aa, Enterobacter cloacae
MAKGIREKIKLVSSAGTGHFYTTTKNKRTKPEKLELKKFDPVVRQHVLYKEAKIK

SEQ ID NO: 56070 - protein, 269 aa, Enterobacter cloacae
MPELPEVETSRRGIEPHLVGATILHAVVRNGRLRWPVSDEIHALSDKPVLSVQRRAKYLLLELPDGWIIIHLGMSGSLRILTEELPAEKHDHVDLVMSNGKVLRYTDPRRFGAWLWTKELEGHNVLAHLGPEPLSDAFNAEYLKAKCAKKKSPIKPWLMDNKLVVGVGNIYASESLFAAGIHPDRLASSLSAQECELLVRVIKAVLLRSIEQGGTTLKDFLQSDGKPGYFAQELQVYGRKGEPCRVCGTPVIATKHAQRATFYCRQCQK

SEQ ID NO: 56071 - protein, 397 aa, Enterobacter cloacae
  MISC_FEATURE (4)..(4): X=any amino acid
WKKXNCDFISLTLIMSLISLALALLSSGKQREFFYIAIYASIIGLACEYKKITVRPFSIALPILLIGLLNLGWYLVYEYHSEGLNVYSDYLGASKKLILASILIFYLDRFKSYIDKASFQKYFLYASGAGFILATGYGLWQASQGMGRIEMAINRATVSAYVYSVLSLAFVYSLYLQKNIKLYITAGLIILISYFVIILTGTRAAMGLYLILANVLTLYNFKRIHLKSTLIFLCIVAGIVIVSYKPLILPKLQQTQTEVESYQKGNDATSLGARFSMWSVGIQNGLAHPLGQSVEDREVWTQQYVKNGHPHLASALDYIRVHLHNEFIEKYSLQGIPGLVILFFFYISMIVYALKNRNGLLLTTMLLLLLYGLTDVILLSSEALIFFVTVFALSTPF

SEQ ID NO: 56072 - protein, 141 aa, Enterobacter cloacae
MFVIWSHEKGFIMSHQLTFADSEFSSKRRQTRKEIFLSRMEQILPWQNMVEVIEPFYPKAGNGRRPYPLETMLRIHCMQHWYNLSDGAMEDALYEIASMRLFARLSLDSALPDRTTIMNFRHLLEQHQLARQLFKTINRWL

SEQ ID NO: 56073 - protein, 375 aa, Enterobacter cloacae
MKHHRLVIVRQKYRPDGGAERFVSRALTALSNQNLELNVITREWQGEKQDDWHIHICNPQKWGRISRERGFAQAARALWQQQQFDIVQSHERIPGCDIYRAGDGVHRRWLLQRARILPAWRAQMLMYDRYHRYVMRAEREMYQAPELKAVICNAEMIKREIVEDFDIDAKKIHVIYNSIDSSRFVPAQEAQRAILRQQFGLPADAVVFCFVGSGFERKGLASAIRAIAGTSAWLIVVGQDKAERRYRDLARSLGCEGQIRFLGMQKETLPFYQLSDGLLLPTLYDPFPNVILEAMACGLPVITSESCGGAEFIQQGQNGFYCDALDISTLKEAVAAIPSLEKNNNMGRAARERVKDATPEKLSSQLITLYQKLLD

SEQ ID NO: 56074 - protein, 309 aa, Enterobacter cloacae
MSIRIIPQDELGSSEKRTADYIPPLLFPRLKNLYNRRAERLRELAENNPLGDFLRFAALVAHAQEVVLYDHPLQMDLTARIKEASAQGKPPLDIHVLPRDKHWQKLLHSLIAELKPEMSGTALAVIENLEKASDLELEEMASALFASDFSLVSSDKAPFIWAALSLYWAQMASLIPGKARAEYGEARQFCPVCGSMPVSSMVQIGTTQGLRYLHCNLCETEWHVVRIKCSNCEQTRDLNYWSLENEEAAVKAESCGDCGTYLKILYQEKDPKVEAVADDLASLILDAKMEQEGFARSSINPFLFPGEGE

SEQ ID NO: 56075 - protein, 211 aa, Enterobacter cloacae
MRKRDTIVRYTAPERINHWVTAFCFMLAAISGLGFFFPSFNWLMQVLGTPQLARILHPFVGVIMFASFIIMFFRYWHHNLINRDDIFWAKNIRKIVVNEEVGDTGRYNFGQKCVFWAAIIFLVLLLVSGVIIWRPYFAPAFSIPVIRFALMLHSFAAVALIVVIMVHIYAALWVKGTITAMVEGWVTSTWAKKHHPRWYREVRQKQEKSSE

SEQ ID NO: 56076 - protein, 247 aa, Enterobacter cloacae
MSTHILFEHPLNEKMRTCVRIEFLIQQLSQHLPVNDHATALHFFRNVGDLLDVIERGDVRTELLKELERQQRKLQAWTEVPGVDQSRIDALRQQLKSSSAVLMAAPRVGQFLREDRLIGLVRQRLSIPGGCCSFDLPTLHMWLHMPQAQRDAQVNSWLASLEPMHQTLSLILDLIRNSAPFRKQTSLNGFFQDNGDDADLLRLNLSLGEQLYPQISGHKSRFAIRFMPLDSENGTVPERLDFELACC

SEQ ID NO: 56077 - protein, 254 aa, Enterobacter cloacae
MAYSKIRQPKLSDVIEQQLEFLILEGTLRPGEKLPPERELAKQFDVSRPSLREAIQRLEAKGLLLRRQGGGTFVQNSLWQSFSDPLVELLSDHPESQFDLLETRHALEGIAAYYAALRSTDEDRVRIRELHQAIERAQQSGDLDAESSAVVQYQIAVTEAAHNVVLLHLLRCMEPMLAQNVRQNFELLYARRDMLPLVSNHRTRVFEAIMAGEPEQAREASHRHLAFIEEILLDRSREQSRRERSLRRIQQRKD

SEQ ID NO: 56078 - protein, 145 aa, Enterobacter cloacae
MDRQQGFTLIELMVVIGIIAILSAIGVPAYQNYLRKAALTDMLQTFVPYRTAIELCALDHGGVESCDAGSNGIPSPTTTRYVSGMSVAKGTVTLTGQESLNGLEVVMTPQWNDGNGMTGWTRDCNISADSALKQACEDVFRFDNN

SEQ ID NO: 56079 - protein, 273 aa, Enterobacter cloacae
MRKSVVLLLGTFGLFSGFSHADDGGDDTISAKELKTLFFGHDDRTRVVDPTQAPWDAIGQLETASGNLCTATLITPQLALTAGHCLLTPPNGKPDKAVALRFVSQKGTWRYEIHGIEGRVDPSLGKRLKPDGDGWIVPPAAASWDYGLIVLRYPPSGITPLPLFDGDKAALTAALKAADRKVTQSGYPVDHLDTLYTHTDCIVTGWAQTSVLSHQCDTLPGDSGSPLMLKTDKGWQLIGVQSSAPAAKDRWRADNRALSVTGFRDQLEALATQ

SEQ ID NO: 56080 - protein, 115 aa, Enterobacter cloacae
MALIPKNYARLESGYREKALKIYPWVCGRCSREFVYSNLRELTVHHIDHDHTNNPEDGSNWELLCLFCHDHEHSKYTEADQYGTTVVAGEDAQKDVGVATFNPFADLKAMMDKKK

SEQ ID NO: 56081 - protein, 417 aa, Enterobacter cloacae
VSRTTTIDIDPARDINDLPAAPQPVQFIKRGTPQFMRVTLALFSAGLATFALLYCVQPILPVLSHEFGVSPASSSVSLSISTGMLAIGLLFTGPLSDAIGRKPVMVTALMLASVCTLLSTMMTSWHGILVMRALIGLSLSGVAAVGMTYLSEEIHPSFVAFSMGLYISGNSIGGMSGRLLSGVFTDFFNWRIALAVIGCFALASALMFWKILPESRHFRPTSLRPKTLFINFRLHWRDKGLPRLFLMGFLLMGAFVTLFNYIGYRLMLSPWHLNQAVVGLLSVAYLTGTWSSPKAGAMTARYGRGPVLLVFTGVMLLGLLLTLLSSLWFIFAGMLLFSAGFFAAHSVASSWIGPRARRAKGQASSLYLFSYYLGSSIAGTLGGVFWHYYGWNGVGGFIALMLCAALLVGTSLHKRLH

SEQ ID NO: 56082 - protein, 337 aa, Enterobacter cloacae
MTTMLEVAKRAGVSKATVSRVLSGNGYVSQETKDRVFQAIEESGYRPNLLARNLATKRTQTLGLVVTNTLYHGVYFSELLFHAARMTEEKGRQLILADGKHSADEEREAIQYLLDMRCDAVIIYPRFLSVEEMDEIVEKCEQPIMVLNRRLRKNSSHCVWSDHKASSQEAVSQLIAKGHREIAFITGSLDSPTGVERLSGYRDALAQHGIPLREGLIAQGKWNPASGAAAVSELLARGERFTALVASNDDMAIGAMKQLHDSGVAAPDAVSVIGFDDVAIAPYIVPSLSSVRIPVTEMIKETISRLIFMLDGGEFKYQQTFSGELVLRDSVIDGPYR

SEQ ID NO: 56083 - protein, 483 aa, Enterobacter cloacae
MAKNYAALANDVISALGGKENIVAVTHCMTRLRFVLKDESLTDAARLKSISGVLGVVRNDNQCQVIIGNTVSQAYREVVSLLPADLQPAVPEGPQKLTLRRVGAGILDALIGTMSPLIPAIIGGSMVKLLAMILEMTGVLPKGAPTLTILTVIGDGAFFFLPLMVAASAAVKFKTNMSLAIAIAGVLVHPSFIELMAKAAQGEHVEFAFIPVTAVKYTYTVIPALVMTWCLSYIERWVDRITPAVTKNFLKPMLIVLIAAPLAIVLIGPLGIWIGSAISALVYTIHGYLGWLSVAIMGALWPLLVMTGMHRVFTPTIIQTIAETGKEGMVMPSEIGANLSLGGSSLAVAWKTKNPELRQTALAAAASAIMAGISEPALYGVAVRLKRPLIASLISGFICGAVAGMAGLASHSMAAPGLFTSVQFFDPANPMTIVWVFGVMGLAVVLSFVLTLLLGFEDIPVEDEAEKARALQTAPVQNNAAKA

SEQ ID NO: 56084 - protein, 257 aa, Enterobacter cloacae
MARSWVRLFAGATLTLSLTGHALADEGKITVFAAASLTNALQDIAAAYKKEKNVEVVSSFASSSTLARQIEAGAPADLFISADQKWMDYAAEKKAIDAITRETLLGNSLVVVAPKASVQADFTINKQTNWTRLLNGGRLAVGDPEHVPAGIYAKEALQKLGAWETLSPKLAPAEDVRGALALVERNEAPLGIVYGSDAVASKGVKVVATFPEDSHKKVEYPVAIVDGHKNAAVTAFRDYLKGPEASAIFKRYGFTTH

SEQ ID NO: 56085 - protein, 352 aa, Enterobacter cloacae
MLELHFTQTQGNHTLTLNETLPASGITAIFGVSGAGKTSLINAISGLTRPQSGRIVLNNRVLNDVENKVYLTPDKRRIGYVFQDARLFPHYSVRGNLRYGMAKSMAGQFEKLVTLLGIEPLLDRLPSSLSGGEKQRVAIGRALLTAPELLLLDEPLASLDIPRKRELLPYLQRLTREINIPMLYVSHSLDEILHLADRVLVLEEGSVKAFGNLEEVWGSSVMHPWLPREQQSSILKVSVLEHHPHYAMTALALGDQHLWVNKNDKPLQSALRIRIQASDVSLVLQPPLQTSIRNILRAKVAECFDDNGQVEVKLEVGSRTLWARISPWARDELGIKPGLWLYAQIKSVSITA

SEQ ID NO: 56086 - protein, 427 aa, Enterobacter cloacae
MNISRISRLALALAFGVTLSACSSTPPDQRPSEQVAPGTASRPILSADEAKNFDRAHYFSAMDPNAAPWTPSSINLPKQPDFVVGPAGAQGVTHTSIQAAVDAAITKHSASRQYIAILPGEYEGTVYVPAAPGSITLYGLGEKAIDVKIGLAIDSEIDSNTWRHLVNPAGKYMPGKPAWYMFDNCQSKRSATIGVMCSAVFWSQNNGLQLQNLTIQNTLGDSVDAGSHQAVALRSDGDKVQINNVNILGRQNTFFVTNSGVQNTLQNNRLTRTLVTNSYVEGDVDLVSGRGAVVFDNTDFRVVNSRTQQEGYVFAPATQSNLFYGFLAVNSRFNAAGDGVAQLGRSLDVDSATNGQVVIRDSVINEGFNMAKRGADAAISKRPFSGNTGAVDDKGNVQRNLNDANFNRMWEYNNRGLGSKVVAEPKQ

SEQ ID NO: 56087 - protein, 416 aa, Enterobacter cloacae
MESKVVVPAEGKKITLQNGKINVPHNPIIPFIEGDGIGVDVTPAMLKVVDAAVEKAYKGERKISWMEIYTGEKSTQVYGQDVWLPAETLDLIRDYRVAIKGPLTTPVGGGIRSLNVALRQELDLYVCLRPVRYYQGTPSPVKHPELTDMVIFRENSEDIYAGIEWKADSADAEKVIKFLREEMGVKKIRFPEHCGIGIKPCSEEGTKRLVRAAIEYAITNDRDSVTLVHKGNIMKFTEGAFKDWGYQLAKEEFGGELIDGGPWQKIKNPNTGKEIIIKDVIADAFLQQILLRPAEYDVIACMNLNGDYISDALAAQVGGIGIAPGANIGDECALFEATHGTAPKYAGQDKVNPGSIILSAEMMLRHMEWFEAADLIVKGMEGAINAKTVTYDFERLMEGAKLLKCSEFGDAIIANM

SEQ ID NO: 56088 - protein, 641 aa, Enterobacter cloacae
MTAHTHSIGQEVSSVLAQSWHRCSKFMQRETWQAPHQAQGLTFESICRRKTALLTIAQAALEDAWEFMDGRPCALLILDESACILSRCGDPQTIEQLAELGFRDGSYCAESIIGSCALSLATMPGQPTKTSGAQHFKQALHPWSFCSTPVFDNHGHLFGSISLCCLVEHESVSDLSLTLAIAREVGNSLLTDSLLAESNRHLNQMYGLLESMDDGVMAWNEQGVLQFLNARAALLLHLDAQASQGKNIHDLLNMPMLLRRAIKHARGLNHVEVTFESQHQFVDAVITLKPIVEEQGNSFILLLHPVEQMRQLMTSQLGKVSHTFEQMSTDDPETRRLIHFGRQAARGSFPILLCGEEGVGKELLSQAIHNESERASGPYIAVNCQLYANSVLGQDFMGSAPTDDENGRLSRLELANGGTLFLEKIEYLAPELQSALLQVIKQGVLTRLDARRLIPVDVKVIATTTVDLANLVEQNRFSRQLYYALHSFEIVIPPLRARRNSIPSLIYTRLNSLKKRFSSSLKIDDDALAQLVAYSWPGNDFELNSIIENIAISSDNGHIRLSNLPDYLFAERPGLETASSLLPASLTFTAIEKEAIIHAARVTSGRVQEMSQLLNIGRTTLWRKMKQYDIDASQFKRKHLE

SEQ ID NO: 56089 - protein, 1259 aa, Enterobacter cloacae
VRRLPGILLLTGATLVVIVALLVSGLRLVLPHLDSWRPQLLAKIESTTGVPVNVSQLSANWQNFGPTLDVRDINASLKDGGHLKIKRVTLALDVWQSLLHLRWQFRDLTFYQLQFLTNTPLSGGDSGQGLEANRFSDLFLRQFDHFDLRDSEVSFITLSGQRAELAIPQLTWLNGKERHRAEGQVNLSSLNGQHGVMQVRMDLRDDDGLLNNGKVWLQADDVDVKPWLGDWIQQNMQLETARFSLEGWLTLTKGEFASGDIWLKQGGASWKGEKQQHQLSVDNLTAHVTQEKGGWQFAIPDTRITMDGKSWPARCVTLAWMPEQDVGGTASKRSDELRIRASNLDLAAIEGLRSMAAKLSPDLGEIWLATQPSGTIDALGLDIPLQATEKTRFQATWKDLAWKQWKLLPGAEHFSGKLEGSVENGRLTVDMHDAKMPYETVFRAPLEIEQGSAVLNWLRNDKGFQLDGRHIDVKAKAVHARGDFRYLQPEGDEPWLGILAGISTDDGSQAWRYFPENLMGKALVDYLSGAIQGGQADNATLVYGGNPHLFPYKHNEGQFQVLVPLHNATFAFQPGWPALKDLDIELNFLNDGLWMKSDSVALGGVTASNLTANIPDYSKEKLLIDADINGPGKAVGPYFEETPLKESLAATLQQLQLDGDVNARLHLDIPLDGEMTTAKGDVRLKNNSLFIKPLESTLKNLSGQFSFDNGNLKSEPLTASWFNQPVNIDFTTTEGEKAYQVAVNLDGNWQPARMDVLPKPIEASVQGAVAWQGKVAIDLPYHAGAQYKVDITGDLKNLQSQLPAPLDKQAGQPLPVKLNVDGNLNSFALTGSAGGTNHFNSRWLLNRKLTLDKAIWTTDSRSTPPLPEQAGIELNLPPMDGAEWLALFQKGVGQNVDETAQFPQAITVRTPSLMLGGQQWNNLSIVSQPGANGTKVEAQGREINGTLTMRNHAPWQAAIRYLYYNPASAASGKDKPAETSPLSNVSRVDFSGWPDLQLRCAECWLWGQKYGRIDGDFTIQANTLTLSGGLVDTGFGRMTAAGEWVNNPGEQRTSLKGDIKGNKLDAAANFFGISTPLRGSSFDVDYDLHWRDAPWKPDEASLNGILKTHFGKGEIADVSTGRAGQILRLLSFDALLRKLRFDFSDTFSEGFYYDSIRSTAWIKDGVLHTDDTLVDGLEADIAMKGSVNLVRRELDMEAVVAPEISASVGVAAAFVVNPIVGAAVFAASKVLGPLWSKVSILRYRITGPVDKPQINEVLR

SEQ ID NO: 56090 - protein, 347 aa, Enterobacter cloacae
MLKKFRGMFSNDLSIDLGTANTLIYVKGQGIVLNEPSVVAIRQDRAGSPKSVAAVGHDAKQMLGRTPGNIAAIRPMKDGVIADFFVTEKMLQHFIKQVHSNSFMRPSPRVLVCVPVGATQVERRAIRESAQGAGAREVFLIEEPMAAAIGAGLPVSEATGSMVVDIGGGTTEVAVISLNGVVYSSSVRIGGDRFDEAIINYVRRNYGSLIGEATAERIKHEIGSAYPGDEVREIEVRGRNLAEGVPRGFTLNSNEILEALQEPLTGIVSAVMVALEQCPPELASDISERGMVLTGGGALLRNLDRLLMEETGIPVVVAEDPLTCVARGGGKALEMIDMHGGDLFSEE

SEQ ID NO: 56091 - protein, 646 aa, Enterobacter cloacae
MRLTAKFSAFITLLTGLTIFVTLLGCSLSFYTAIQDKLVNRVQSVASVIDTRLLTTPLPALSRELDELMVPVDIVQIDIQQGKHRVLSHERPGSYQPAGVVSQYREVTVHSLKNPGMTIRMVYLDPMASYFRSMMTTAPLTVAVAFIVLLIFLAVRWLRRQLSGQELLEMRSVRILNGERGPQVRGSVHEWPSRASSALDTLLSEIQFASDQRSRMDTLIRSYAAQDNKTGLNNRLFFDNQLATLLDDSEKVGTHGVVMMIRLPDFDLLRDTWGQRAAEENLFTLINLLSTFIMRYPGALLARYHRSDFAVLLPHRTLKESESIASQLLKAVDALPQSKMLDRDDMVHMGICAWRGGQSTEQVMEHAEAATRNAVLQGANGWAVYDDSLPEKGRGNVRWRTLIEQMLSRGGPRIYQKPAVMKNGNVHHRELMCRIFDGTEEVISAEYLPMVLQFGLSEEYDRQQITRLIPFLSFWPEENLALQVTVESLIRPRFQRWLRDTLMQCEKSQRKHIIFELAEADVGQYISRLRPVVRLINALGARIAVTQAGLTLVSTNWIKELDVELLKLHPGLVRNIEKRTENQLLVQSLVEACKGTRTQVFATGVRSRSEWQMLTARGVMGGQGDFFAASQPLDTNVKKYLQRYSV

SEQ ID NO: 56092 - protein, 150 aa, Enterobacter cloacae
MALKFLLATLLVSPLAAYAKQPLLIRTRRLLGLWCFAWATLHLTSYALLELGINNLALLGRELVTRPYLTLGIVSWVVLLALALTSTQYAQRKLGRRWQLLHNFVYLVAILAPIHYLWSVKILSPQPILYALAAVALLAWRYKKFRLWLR

SEQ ID NO: 56093 - protein, 153 aa, Enterobacter cloacae
MDIRKIKKLIELVEESGISELEISEGEESVRISRAAPAASFPVMQQAYAAPVQQPALSAAVAPQLKPHLPAAAEISGHIVRSPMVGTFYRTPSPDAKAFIEVGQKVNVGDTLCIVEAMKMMNQIEAEQSGTVKAILVESGQPVEFDEPLVVIE

SEQ ID NO: 56094 - protein, 701 aa, Enterobacter cloacae
KKLLKHVPWALLGILGAFCLAVVALRRGEHVSALWIVVASVSVYLVAYRYYSLYIAQKVMKLDPTRATPAVINNDGLNYVPTNRYVLFGHHFAAIVGAGPLVGPVLAAQMGYLPGTLWLLAGVVLAGAVQDFMVLFISSRRNGASLGEMVKEEMGRVPGTIALFGCFLIMIIILAVLALIVVKALAESPWGVFTVCSTVPIALFMGIYMRFLRPGRVGEVSVIGIVLLVASIYFGGVIAHDPYWGPALTFKDTTITFALIGYAFISALLPVWLILAPRDYLATFLKIGVIVGLAIGILVINPDLKMPAVTQYIDGTGPLWKGALFPFLFITIACGAVSGFHALIASGTTPKLLANEKDARLIGYGAMLMESFVAIMALVAASIIEPGLYFAMNTPPAGLGITMPNLHEMGGDNAALIMAQLKDASAHAAATVSSWGFVISPEQIMQTAKDIGEPSVLNRAGGAPTLAVGIAHVFHKVLPWADMGFWYHFGILFEALFILTALDAGTRAGRFMLQDLLGNFVPFLKKTDSLVAGILGTAGCVGLWGYLLYQGVVDPLGGVKSLWPLFGISNQMLAAVALVLGTVVLVKMKRTKYIWVTVVPALWLLLCTTWALGLKLFSANPQLEGFFFMANQYKEKIAAGGADLTAQQIANMNHIVVNNYTNAGLSILFLVVVYSIIFYGIKTWLNVRNADGRTDKETPYV

SEQ ID NO: 56095 - protein, 67 aa, Enterobacter cloacae
MFGNLGEAKKYLGQAAKMLIGIPDYDNYVEHMKTNHPDKPYMTYTEFFRERQEARYGGSGEGGVRCC

SEQ ID NO: 56096 - protein, 283 aa, Enterobacter cloacae
VIENEFGEVSVDDQLIGDRATQIKTLTNGCICCTRSNELEDALLDLLDSRDRGEIDFDRLVIECTGMADPGPIIQTFFSHEILCQRYLLDGVIALVDAVHADEQMNQFTIAQSQVGYADRILLTKTDVAGESEKLRDRLTRINSRAPVYTVTHGDIDLSQLFNTNGFMLEENVTAKPRFHFMGDKQNDVASIVVELDYPVDIGEVSRVMENLLLSFADKLLRYKGMLWIDGEPNRLLFQGVQRLYSADWDRPWGEEAPRSVMVFIGIQLPEEEIRAAFAGLKK

SEQ ID NO: 56097 - protein, 453 aa, Enterobacter cloacae
LDEGFICDMFEGHASYKPRYVLPDYAKFLANGSECLELEGAKDLDDALSLLTILYHHVPSVTSMPVYLGQLDAILTPYVRILTQEEVDSRIKRFWRYLDRTLPDAFMHANIGPEDTPVARAILRADAELKQVAPNLTFIYDPDITPDDLLLEVAKNICECSKPHISNGPMNDKIFTKGRYGVVSCYNSLPLAGGGSTLVRLNLKAIAERSASIEDFFTRAVPHYCQQQIAIIDARCGFLYEQSGFFENSFLVKEGLIDADRFVPMFGMYGLAEAVNTLCEKEGIEGRYGKDEQANALGYRISEQLAAFVESTPVKHGWKHRAMLHAQSGISSDSGTTPGARLPYGDEPDPVSHLLAVAPHHKHYHSGISDILTLEETVKRNPQAVVQLCLGAFGAGMREFTANVAGNDLVRVTGYMVRLSDLEKYREAGSRTNTTWLGEEAARNTRILERQPR

SEQ ID NO: 56098 - protein, 527 aa, Enterobacter cloacae
LSPYLQEVAKRRTFAIISHPDAGKTTITEKVLLFGQAIQTAGTVKGRGSSQHAKSDWMEMEKQRGISITTSVMQFPYHDCLVNLLDTPGHEDFSEDTYRTLTAVDCCLMVIDAAKGVEDRTRKLMEVTRLRDTPILTFMNKLDRDIRDPMEVMDEVESELKIACAPITWPIGCGKLFKGVYHLYKDETYLYQTGKGHTIQEVRVVKGLDNPELDVAVGEELAAQVRDELELVKGASHEFDKELFLSGEITPVFFGTALGNFGVDHMLDGLVEWAPRPMPRNTDTREVEAQEEKFTGFVFKIQANMDPKHRDRVAFMRVVSGKYEKGMKLRQVRTGKDVVISDALTFMAGDRSHVEEAYPGDIIGLHNHGTIQIGDTFTQGEMMKFTGIPNFAPELFRRIRLRDPLKQKQLLKGLVQLSEEGAVQVFRPIANNDLIVGAVGVLQFDVVVARLKSEYNVEAIYESVNVATARWVECSDVKKFEEFKRKNEIQLALDGGDNLTYIAPTMVNLNLTQERYPDVQFRKTREH

SEQ ID NO: 56099 - protein, 258 aa, Enterobacter cloacae
MTDLTASSLRALKLMDLTTLNDDDTNEKVIALCHQAKTPVGNTAAICIYPRFIPIARKTLKEQGTPDVRIATVTNFPHGNDDIEIALAETRAAIAYGADEVDVVFPYRALIAGNEQVGFDLVKACKDACAAANVLLKVIIETGELKEEALIRKASEISIKAGADFIKTSTGKVPVNATPKSARIMMEVIRDMGVSKTVGFKPAGGVRTAEDAQEFLAIADELFGADWADSRHYRFGASSLLASLLKALGHGDGKSATA

SEQ ID NO: 56100 - protein, 333 aa, Enterobacter cloacae
MSVKAIAVNPENPSTFIEITPPMPQPGEHDLLVEVKAVSVNPVDTKVHAGIARNGLNEPRILGWDASGIVKAVGGGVTGFKPGDEVWYAGDITRPGSNTTHQLIDARIVGHKPASLGWAAAAALPLTALTAWEGLFERLNIQDAGADKTLLIIGGAGGVGSLAIPFAKHNSKVKIIATASREDSARWCRDRGADIVVNYRDLKGELAKQGLTFVDYIFILNDTDGHWDAVSDLIAPQGHICSIVENERPLNQDKLKSKSAALHWEFMYTRSMYQTADMARQGEILNEVAKLVDNGVVESSLSETLHGLSVESITEAHRKVLEGHMRGKVVVEF

SEQ ID NO: 56101 - protein, 461 aa, Enterobacter cloacae
VAKAPKRAFVCNECGADYPRWQGQCSACHAWNTITEVRGVAASASVARNERLSGYAGNAGVAKVQKLSDISLEELPRFSTGFKEFDRVLGGGVVPGSAILIGGNPGAGKSTLLLQTLCKLAEQMKTLYVTGEESLQQVAMRAHRLGLPTGNLNMLSETSIEQICMIAEEEQPKLMVIDSIQVMHMADIQSSPGSVAQVRETAAYLTRFAKTRGVAIVMVGHVTKDGSLAGPKVLEHCIDCSVMLDGDADSRFRTLRSHKNRFGAVNELGVFAMTEQGLREVSNPSAIFLSRGDEITSGSSVMVLWEGTRPLLVEIQALVDVSMMGNPRRVAVGLEQNRLAILLAVLHRHGGLQMADQDVFVNVVGGVKVTETSADLGLLLAMVSSLRDRPLPQDLVVFGEVGLAGEIRPVPSGQERISEAAKHGFRRAIVPAANVPKKIPEGMQVFGVKKLADALNVFDDL

SEQ ID NO: 56102 - protein, 91 aa, Enterobacter cloacae; identical to SEQ ID NO: 43000

SEQ ID NO: 56103 - protein, 167 aa, Enterobacter cloacae
MPGNRPHYGRWPQHDFPPFKKLRPQSVTSRIQPGSDVIVCAEMDEQWGYVGAKSRQRWLFYAYDRLRKTVVAHVFGERTMATLGRLMSLLSPFDVVIWMTDGWPLYESRLKGKLHVISKRYTQRIERHNLNLRQHLARLGRKSLSFSKSVELHDKVIGHYLNIKHYQ

SEQ ID NO: 56104 - protein, 149 aa, Enterobacter cloacae
MQVILLDKVANLGSLGDQVNVKAGYARNFLVPQGKAVPATKKNVEFFEARRAELEAKLADVLAAANARAEAINALGTVTIASKSGDEGKLFGSIGTRDIADAVTAAGVKVAKSEVRLPNGVLRTTGEHEVDFQVHSEVFAKLVVNVVAE

SEQ ID NO: 56105 - protein, 75 aa, Enterobacter cloacae; identical to SEQ ID NO: 42796

SEQ ID NO: 56106 - protein, 104 aa, Enterobacter cloacae
MTNRLALSGIVCRAPLRKVSPSGIPHCQFVLEHRSVQEEAGFHRKAWCQMPVIISGHENQAITHSLTVGSAVIVQGFISCHKAKNGLSKMVLHAEQIDLIDSGD

SEQ ID NO: 56107 - protein, 131 aa, Enterobacter cloacae
  MISC_FEATURE (57)..(57): X=any amino acid
MRHYEIVFMVHPDQSEQVPGMIERYSAAITGAEGTIHRLEDWGRRQLAYPINKLHKXNYVLMNVEAPQEVIDELETTFRFNDAVIRSMVMRTKNAVTEASPMVKAKDERRERRDDFANETADDSDAGDSEE

SEQ ID NO: 56108 - protein, 141 aa, Enterobacter cloacae
MQLTSFTDYGLRALIYMASLPDGKMTSISEVTEVYGVSRNHMVKIINQLSRAGYVAAVRGKNGGIRLGKPAQSIRVGDVVRELEPLSLVNCSSEFCHITPACRLKKALSKAVQSFLMELDNYTLADLVEENQPLYKLLLVE

SEQ ID NO: 56109 - protein, 446 aa, Enterobacter cloacae
MVESIFKQTVILKKMGNNVVVLGTQWGDEGKGKIVDLLTERAKYVVRYQGGHNAGHTLVINGEKTVLHLIPSGILRENVTSIIGNGVVLSPAALMKEMKGLEDRGIPVRERLLLSEACPLILDYHVALDVAREKARGAKAIGTTGRGIGPAYEDKVARRGLRVGDLFDKATFAEKLKEVMEYHNFQLVNFYKADAVDYQKVLDDVMAIADILTGMVVDVSDLLDQARKRGDFVMFEGAQGTLLDIDHGTYPYVTSSNTTAGGVATGSGLGPRYVDYVLGIIKAYSTRVGAGPFPTELFDETGEFLCKQGNEFGATTGRRRRTGWLDAVAVRRAVQINSLSGFCLTKLDVLDGLKEVKICVGYRMPDGREVTTTPLAADDWEGIEPIYETMPGWSETTFGVKERSGLPQAALDYIKRIEELTEVPIDIISTGPDRTETMILRDPFDA

SEQ ID NO: 56110 - protein, 419 aa, Enterobacter cloacae
MAWNQPGNNGQDRDPWGSSKPGGNSEGNGNKGGREQGPPDLDDIFRKLSKKLGGLGGGKGSGSGGNSTQSSRPPMGGRVVGIVAAAVVIIWAASGFYTIKEAERGVVTRFGKFSHLVEPGLNWKPTFIDDVTAVNVESVRELAASGVMLTSDENVVRVEMNVQYRVTDPERYLFSVTSADDSLRQATDSALRGVIGKYTMDRILTEGRTVIRSDTQRELEETIRPYNMGITLLDVNFQGARPPEEVKAAFDDAIAARENEQQYIREAEAYTNEVQPRANGQAQRILEEARAYKTQTILEAQGEVARFAKILPEYKAAPEITRERLYIETMEKVLSHTRKVLVNDSKGGNLMVLPLDQMLKGGSAPQRIGDTSGANNLLRLPPASTGSASTNTTPSSNDGDIMDQRRANAQRNDYQRQGE

SEQ ID NO: 56111 - protein, 273 aa, Enterobacter cloacae
MAVVKCKPTSPGRRHVVKVVNPELHKGKPFAPLLEKNSKSGGRNNNGRITTRHIGGGHKQAYRIVDFKRNKDGIPAVVERLEYDPNRSANIALVLYKDGERRYILAPKGLKAGDQIQSGVDAAIKAGNTLPMRNIPVGSTVHNVEMKPGKGGQLARSAGTYVQIVARDGAYVTLRLRSGEMRKVEADCRATLGEVGNAEHMLRVLGKAGAARWRGVRPTVRGTAMNPVDHPHGGGEGRNFGKHPVTPWGVQTKGKKTRSNKRTDKFIVRRRSK

SEQ ID NO: 56112 - protein, 104 aa, Enterobacter cloacae
MAAKIRRDDEVIVLTGKDKGKRGKVKNVLSSGKLVVEGINLVKKHQKPVPALNQPGGIVEKEAAIQVSNVAIFNAATGKADRVGFRFEDGKKVRFFKSNSETIK

SEQ ID NO: 56113 - protein, 443 aa, Enterobacter cloacae
MAKQPGLDFQSAKGGFGELKRRLLFVIGALIVFRIGSFIPIPGIDAAVLAKLLEQQRGTIIEMFNMFSGGALSRASIFALGIMPYISASIIIQLLTVVHPALAELKKEGESGRRKISQYTRYGTLVLAIFQSIGIATGLPNMPGMQGLVLNPGFAFYFTAVVSLVTGTMFLMWLGEQITERGIGNGISIIIFAGIVAGLPPAIAHTIEQARQGDLHFLLLLLVAVLVFAVTFFVVFVERGQRRIVVNYAKRQQGRRVYAAQSTHLPLKVNMAGVIPAIFASSIILFPATIASWFGGGTGWNWLTTISLYLQPGQPLYVLLYASAIIFFCFFYTALVFNPRETADNLKKSGAFVPGIRPGEQTAKYIDKVMTRLTLVGALYITFICLIPEFMRDAMKVPFYFGGTSLLIVVVVIMDFMAQVQTLMMSSQYESALKKANLKGYGR

SEQ ID NO: 56114 - protein, 144 aa, Enterobacter cloacae
MRLNTLSPAEGSKKAGKRLGRGIGSGLGKTGGRGHKGQNSRSGGGVRRGFEGGQMPLYRRLPKFGFTSRKAAITAEIRLSDLAKVEGGVVDLNTLKAANIIGIQIEFAKVILAGEVSTPVTVRGLRVTKGARAAIEAAGGKIEE

SEQ ID NO: 56115 - protein, 122 aa, Enterobacter cloacae
MWLLDQWAERHIRDAQKKGEFDDLPGSGEPLALDDDSHIAPELRAGYRLLKNAGCLPPELEQRREAVELADLLREIRHDDPRHSELSRRLALLELKLRQAGMNTNFLHGEYGERLMQKISEE

SEQ ID NO: 56116 - protein, 123 aa, Enterobacter cloacae
MIQEQTMLNVADNSGARRVMCIKVLGGSHRRYAGVGDIIKITIKEAIPRGKVKKGDVLKAVVVRTKKGVRRPDGSVIRFDGNACVILNNNSEQPIGTRIFGPVTRELRTEKFMKIISLAPEVL

SEQ ID NO: 56117 - protein, 59 aa, Enterobacter cloacae
MAKTIKITQTRSAIGRLPKHKATLLGLGLRRIGHTVEREDTPAVRGMVNAVYFMVKVEE

SEQ ID NO: 56118 - protein, 438 aa, Enterobacter cloacae
MFPGIFIFTVMKKQNLRSMAAQAVEQVIEQGQSLSNVLPPLQLKVSDKDKALLQELCFGVLRTLSQLEWLINKLMSRPMTGKQRTVHYLIMVGFYQLLHTRIPPHAALAETVEGAVAIKRPQLKGLINGVLRQFQRQQEELLAEFAQSEARFLHPDWLLKRLKKAYPQQWQEIADANNQRPPMWLRVNRNHHTRAAWLALLEEAGMSGFPHEAYPDAVRLASPAPVHALPGFDEGWVTVQDASAQGCMTWLEPKNGEQILDLCAAPGGKTTHILEVAPQASVMAVDVDEQRLSRVYDNLKRLGMKAQVKQGDGRKPAEWCGETQFDRILLDAPCSATGVIRRHPDIKWLRRDRDIQELAQLQSDILDAIWPHLKSGGTLVYATCSVLPEENSQQIAAFLKRTPDAALRDTGTPESPGLQNLPGAEEGDGFFYAKLIKE

SEQ ID NO: 56119 - protein, 127 aa, Enterobacter cloacae [sequence omitted]

SEQ ID NO: 56120 - protein, 84 aa, Enterobacter cloacae
MTDKIRTLQGRVVSDKMEKSIVVAIERIVKHPIYGKFIKRTTKLHVHDENNECGIGDKVEIRECRPLSKTKSWTLVRVVEKAVL

SEQ ID NO: 56121 - protein, 166 aa, Enterobacter cloacae
MAHIEKQAGELQEKLIAVNRVSKTVKGGRIFSFTALTVVGDGNGRVGFGYGKAREVPAAIQKAMEKARRNMINVALNNGTLQHPVKGVHTGSRVFMQPASEGTGIIAGGAMRAVLEVAGVHNVLAKAYGSTNPINVVRATIDGLENMNSPEMVAAKRGKSVEEILG

SEQ ID NO: 56122 - protein, 458 aa, Enterobacter cloacae
MKIIILGAGQVGGTLAENLVGENNDITIVDTNGDRLRVLQDKFDLRVVQGHGSHPRVLREAGADDADMLVAVTSSDETNMVACQVAYSLFNTPNRIARIRSPDYVRDAEKLFNSEAVPIDHLIAPEQLVIDNIYRLIEYPGALQVVNFAEGKVSLAVVKAYYGGPLIGNALSTMREHMPHIDTRVAAIFRHDRPIRPQGSTIVEAGDEVFFIAASQHIRAVMSELQRLEKPYKRIMLVGGGNIGAGLAHRLEKDYSVKLIERDQQRAAELAEKLQNTIVFYGDASDQELLAEEHIDQVDLFIAVTNDDEANIMSAMLAKRMGAKKVMVLIQRKAYVDLVQGSVIDIAISPQQATISALLSHVRKADIVGVSSLRRGVAEAIEAVAHGDETTSRVVGRSIDEIKLPPGTIIGAVVRGNDVMIANDNLRIEQGDHVIMFLTDKKFITDVERLFQPSPFFL

SEQ ID NO: 56123 - protein, 329 aa, Enterobacter cloacae
MQGSVTEFLKPRLVDIEQVSSTHAKVTLEPLERGFGHTLGNALRRILLSSMPGCAVTEVEIDGVLHEYSTKEGVQEDILEILLNLKGLAVRVQGKDEVILTLNKSGIGPVTAADITHDGDVEIVKPQHVICHLTDENAAISMRIKVQRGRGYVPASARIHSEEDERPIGRLLVDACYSPVERIAYNVEAARVEQRTDLDKLVIEMETNGTIDPEEAIRRAATILAEQLEAFVDLRDVRQPEVKEEKPEFDPILLRPVDDLELTVRSANCLKAEAIHYIGDLVQRTEVELLKTPNLGKKSLTEIKDVLASRGLSLGMRLENWPPASIADE

SEQ ID NO: 56124 - protein, 63 aa, Enterobacter cloacae
MKAKELREKSVEELNAELLNLLREQFNLRMQAASGQLQQTHLLKQVRRNVARVKTLLTQKAGA

SEQ ID NO: 56125 - protein, 117 aa, Enterobacter cloacae
MDKKSARIRRATRARRKLKELGATRLVVHRTPRHIYAQVIAPNGSEVLVAASTVEKAISEQLKYTGNKDAAAAVGKAVAERALEKGISNVSFDRSGFQYHGRVQALADAAREAGLQF

SEQ ID NO: 56126 - protein, 206 aa, Enterobacter cloacae
MARYLGPKLKLSRREGTDLFLKSGVRAIDTKCKIEQAPGQHGARKPRLSDYGVQLREKQKVRRMYGVLERQFRNYYKEAARLKGNTGENLLALLEGRLDNVVYRMGFGATRAESRQLVSHKAIMVNGRVVNIASYQVKANDVVSIREKAKKQSRVKAALELAEQREKPTWLEVDAGKMEGTFKRSPERSDLSADINEHLIVELYSK

SEQ ID NO: 56127 - protein, 136 aa, Enterobacter cloacae
MLQPKRTKFRKVHKGRNRGLAQGTDVSFGTFGLKAVGRGRLTARQIEAARRAMTRAVKRQGKIWIRVFPDKPITEKPLEVRMGKGKGNVEYWVALIQPGKVLYEMDGVPEELAREAFGLAAAKLPIKTTFVTKTVM

SEQ ID NO: 56128 - protein, 177 aa, Enterobacter cloacae
MSRVAKAPVVIPAGVDVKIDGQVITIKGKNGELTRTLNKAVEVKHADNALTFGPRDGFVDGWAQAGTARALLNSMVVGVTEGFTKKLQLVGVGYRAAIKGNAVGLSLGFSHPVEHPLPAGITAECPTQTEIVLKGADKQLIGQVAADLRAYRRPEPYKGKGVRYADEVVRTKEAKKK

SEQ ID NO: 56129 - protein, 129 aa, Enterobacter cloacae
MAKAPVRARKRVRKQVSDGVAHIHASFNNTIVTITDRQGNALGWATAGGSGFRGSRKSTPFAAQVAAERCAEAVKEYGIKNLEVMVKGPGPGRESTVRALNAAGFRITNITDVTPIPHNGCRPPKKRRV

SEQ ID NO: 56130 - protein, 233 aa, Enterobacter cloacae; identical to SEQ ID NO: 42750

SEQ ID NO: 56131 - protein, 130 aa, Enterobacter cloacae
MSMQDPIADMLTRIRNGQAANKVAVTMPSAKLKVAIANVLKEEGFIEDFKVEGDTKPELELTLKYFQGKAVVESIQRVSRPGLRIYKKKDELPKVMAGLGIAVVSTSKGVMTDRAARQAGLGGEIICYVA

SEQ ID NO: 56132 - protein, 118 aa, Enterobacter cloacae
MARIAGINIPDQKHAVIALTSIYGVGKTRSKAILAAAGIAEDVKISELSEEQIDTLRDEVAKFVVEGDLRREISMSIKRLMDLGCYRGLRHRRGLPVRGQRTKTNARTRKGPRKPIKK

SEQ ID NO: 56133 - protein, 110 aa, Enterobacter cloacae
METLAQHRHARSSAQKVRLVADLIRGKKVSQALDILTYTNKKAAVLVKKVLESAIANAEHNDGADIDDLKVAKIFVDEGPSMKRIMPRAKGRADRILKRTSHITVVVSDR

SEQ ID NO: 56134 - protein, 101 aa, Enterobacter cloacae
MAKQSMKAREVKRVALADKFFAKRAELKAIISDVNASDEDRWNAVLKLQSLPRDSSPSRQRNRCRQTGRPHGYVGKFGLSRIKLREAAMRGEVPGLKKASW

SEQ ID NO: 56135 - protein, 92 aa, Enterobacter cloacae; identical to SEQ ID NO: 42685

SEQ ID NO: 56136 - protein, 179 aa, Enterobacter cloacae
MAKLHDYYKDEVVNKLMTEFNYNSVMQVPRVEKITLNMGVGEAIADKKLLDNAAADLTAISGQKPLITKARKSVAGFKIRQGYPIGCKVTLRGERMWEFFERLITIAVPRIRDFRGLSAKSFDGRGNYSMGVREQIIFPEIDYDKVDRVRGLDITITTTAKSDEEGRSLLAAFDFPFRK

SEQ ID NO: 56137 - protein, 452 aa, Enterobacter cloacae
MISVFDIFKIGIGPSSSHTVGPMKAGKQFTDDLIARGILHDVTRVVVDVYGSLSLTGKGHHTDIAIIMGLAGNLPDTVDIDAIPGFIQDVNTHGRLLLANGEHEVEFPVDHCMNFHADNLSLHENGMRITALAGDKAVYSQTYYSIGGGFIVDEDHFGQTNTSSVEVPYPYKTAADLQRHCQETGLSLSGLMMKNELALHSKEELEQHFTNVWEVMRGGIERGITTEGVLPGKLRVPRRAAALRRMLVSTDKTTTDPMAVVDWINMFALAVNEENAAGGRVVTAPTNGACGIVPAVLAYYDKFIREVNANSLARYLLVASAIGSLYKMNASISGAEVGCQGEVGVACSMAAAGLAELLGASPTQVCIAAEIGMEHNLGLTCDPVAGQVQVPCIERNAIASVKAVNAARMALRRTSEPRVCLDKVIETMYETGKDMNAKYRETSRGGLAMKIV

SEQ ID NO: 56138 - protein, 431 aa, Enterobacter cloacae
METTQTSTVASIESRSGWRKTDTMWMLGLYGTAIGAGVLFLPINAGVGGLIPLIIMAIIAFPMTFFAHRGLTRFVLSGKNPGEDITEVVEEHFGVGAGKLITLLYFFAIYPILLVYSVAITNTVESFMLHQLHMTPPPRAILSLILIVGMMTIVRFGEQMIVKAMSVLVFPFVAALMLLACYLIPQWNGAALETLSLSSASATGNGLLMTLWLAIPVMVFSFNHSPIISSFAVAKREEYGNGAEKKCSSILARAHIMMVLTVMFFVFSCVLSLSPADLAAAKEQNISILSYLANHFNAPVIAWMAPIIAIIAITKSFLGHYLGAREGFNGMVIKSLRGKGKSIEINKLNKITALFMLLTTWAVATLNPSILGMIETLGGPVIAMILFLMPMYAIQKVPAMRKYSGHVSNVFVVIMGLIAISAIFYSLYTMF

SEQ ID NO: 56139 - protein, 316 aa, Enterobacter cloacae
MNQLDGIKKFTTVVADSGDIESIRHYQPEDATTNPSLLLKAAGLAHFSHLIDDAIAYGKQRGKTQEQQVAEASDKLAVNFGAEILKSIPGRVSTEVDARLSFDKEKSINKARRLVELYEEQGIDKSRILIKLASTWEGIRAAEVLEKEGIHCNLTLLFSFAQARACAEAGVFLVSPFVGRIYDWYQAKQPMDPYVVDEDPGVKSVRNIYDYYKQHRYETIVMGASFRRTEQILALAGCDRLTISPNLLQELQDKEETVIRKLVPTSTVLPKPKPMTEAEFRWEHNQDAMAVEKLADGIRQFAVDQRKLEDLLAAKL

SEQ ID NO: 56140 - protein, 198 aa, Enterobacter cloacae
MTQFPEVSASRQDIRQLIRQRRRALTADQQAHFAQQAAARMMAYPPVVMAHTVALFLSFDGELDTQPLIEQLWRAGKKVYLPVLHPFSEGNLLFLHYHPHSELVVNRLKITEPKLDVRDVLPLSQLDVLITPLVAFDEQGQRLGMGGGFYDRTLQNWQQYGLQPVGYAHDCQGVEALPVEKWDVPLPAVVTPSKLWEW

SEQ ID NO: 56141 - protein, 387 aa, Enterobacter cloacae
MSVIKMTDLDLAGKRVFIRADLNVPVKDGKVTSDARIRASLPTIELALKQGAKVMVTSHLGRPTEGEYNEEFSLLPVVNYLKDKLSNPVRLVKDYLDGVEVAAGELVVLENVRFNKGEKKDDETLSKKYAALCDVFVMDAFGTAHRAQASTHGIGKFADVACAGPLLADELEALGKALKEPARPMVAIVGGSKVSTKLTVLDSLSKIADQLIVGGGIANTFVAAQGHNVGKSLYEADLVDEAKRLLGTCDIPVPTDVRVATEFSETATATLKSVNDIKDEEQILDLGDVSAQKLAEILKNAKTILWNGPVGVFEFPNFRKGTEIVANAIADSEAFSIAGGGDTLAAIDLFGIADKISYISTGGGAFLEFVEGKVLPAVAMLEERAKK

SEQ ID NO: 56142 - protein, 297 aa, Enterobacter cloacae
MKRPDYRTLQALDAVIRERGFERAAQKLCITQSAVSQRIKQLENMFGQPLLVRTVPPRPTEQGQKLLALLRQVELLEDEWLGDEQTGSTPLLLSLAVNADSLATWLLPALAPVLADSPIRLNLQVEDETRTQERLRRGEVVGAVSIQPQALPSCLVDQLGALDYLFVGSKAFAERYFPNGVTRAALLKAPAVAFDHLDDMHQAFLQQNFDLPPGSVPCHIVNSSEAFVQLARQGTTCCMIPHLQIEKELKSGELIDLTPGLYQRRILYWHRFAPESRMMRNVTDALLAYGHKVLRQD

SEQ ID NO: 56143 - protein, 663 aa, Enterobacter cloacae
MSSRKELANAIRALSMDAVQKAKSGHPGAPMGMADIAEVLWRDFLNHNPQNPSWADRDRFVLSNGHGSMLIYSLLHLTGYDLPIEELKNFRQLHSKTPGHPEVGYTAGVETTTGPLGQGIANAVGMAIAEKTLAAQFNRPGHDIVDHFTYAFMGDGCMMEGISHEVCSLAGTLKLGKLVAFYDDNGISIDGHVEGWFTDDTAARFEAYGWHVVRGVDGHDADSIKRAVEEARAVTDKPSLLMCKTIIGFGSPNKAGTHDSHGAPLGDAEIALTREALGWKHPAFEIPSEIYAQWDAKEVGQAKEAAWNEKFAAYAKAFPQEAAEFTRRMKGDMPSDFDAKANEFIAKLQANPSKIASRKASQNAIEAFGPWLPEFLGGSADLAPSNLTLWSGSKPINEDTAGNYIHYGVREFGMTAIANGISLHGGFLPYTSTFLMFVEYARNAVRMAALMKQRQVMVYTHDSIGLGEDGPTHQPVEQVASLRVTPNMSTWRPCDQVESAVAWKYGVERQDGPTALILSRQNLAQQERTPEQLANIARGGYVLKDCAGQPELIFIATGSEVELAVAAWEKLTAEGVKARVVSMPSTDAFDKQDAAYRESVLPKAVSARVAVEAGIADYWFKYVGLNGAIVGMTTFGESAPAEQLFEEFGFTVENVVAKAKELL

SEQ ID NO: 56144 - protein, 246 aa, Enterobacter cloacae
MKFKVMALAALVSFGAVSVQASELPDGPHIVTSGTASVDAVPDVATLAIEVNVSAKDAASAKKQADDRVAQYLSFLEQNGVGKKDINSANLRTQPDYDYQNGKSILKGYRAVRTVEVTVRQLDKLNSLLDGALKAGLNEIRSVSLGVAQPEKYKDEARKAAIDDAIHQAEQLASGFKSKLGPVYSVRYHVSNYQPSPMVRMMKADAAPVSAQETYEQPTIQFDDQVDVVFQLEPTQTQQTEAAKAQ

SEQ ID NO: 56145 - protein, 271 aa, Enterobacter cloacae
VITGVPFDMATSGRAGGRHGPAAIRQVSTNLAWEHNRFPWNFDMRDRLNVVDCGDLVYAFGDAREMSEKLQAHAEKLLAAGKRMLSFGGDHFVTLPLLRAHAKHFGKMALVHFDAHTDTYANGCEFDHGTMFFTAPNEGLIDPNHSVQIGIRTEFDKDNGFTVLDAGQVNDRGVDDIIAQVKQIVGDMPVYLTFDIDCLDPAFAPGTGTPVIGGLTSDRAIKLVRGLKDLNIVGMDVVEVAPAYDQSEITALAAATLALEMLYIQAAKKGE

SEQ ID NO: 56146 - protein, 97 aa, Enterobacter cloacae
MAHVFGERTLVTLERLLGLLSAFEVVVWMTDGWPLYESRLKGELHVISKRYTQRIERHNLNLRQHLARLGRKSLSFSKSVELHDKVIGHYLNIKHYQ

SEQ ID NO: 56147 - protein, 91 aa, Enterobacter cloacae
MASVSISCPSCSATEGVVRNGKSTAGHQRYLCSHCRKTWQLQFTYIASQPGTHQKIIDMAMNGVGCRASARIMGVGLNTILRHLKNSGRSR

SEQ ID NO: 56148 - protein, 340 aa, Enterobacter cloacae
MIRIIGCSLCSITEHEGRIIQSRSEDSIINEIEAIRDSVPGFTGVISDLGGPTANMYMLRCKSPRAEQTCRRLSCVYPSICEHMDTNHEPTINLYRRARDLKGIKKILIASGVRYDIAVEDPRYIKELATHHVGGYLKIAPEHTEEGPLSKMMKPGMGSYDRFKELFDTYSKQAGKEQYLIPYFISAHPGTRDEDMVNLALWLKQRRFRLDQVQNFYPSPLANSTTMYYTGKNPLSKIGHKSDEVVVPKGDKQRRLHKALLRYHDPKNWPLIRQALEEMGKKHLIGSRRDCLVPAPTLDEMREARRQNRNTRPALTKHTPIVHQRSNGNSSVKKPVKRKA

SEQ ID NO: 56149 - protein, 346 aa, Enterobacter cloacae
MSWHPYPGRYESMQYRYCGKSGLRLPALSLGLWHSFGHVQPLDAQRALLRKAFDLGITHFDLANNYGPPPGSAEENFGRLLREDFAAYRDELIISTKAGYDMWPGPYGSGGSRKYLLASLDQSLQRLGVDYVDIFYSHRVDENTPMEETASALAHAVQSGKALYVGISSYSTDRTQKMAELLREWKIPLLIHQPSYNLLNRWVDKTGLLDALEANGTGCIAFTPLAQGLLTGKYLNGIPEGSRMQREGNKARGLTQKMLTDANLSSLRLLNEMAQARGQTMAQMALSWLLKDTRVTSVLIGASRPEQLEENVQALENLRFTEDELKRIDQHVADGELNLWQASSDK

SEQ ID NO: 56150 - protein, 213 aa, Enterobacter cloacae
MKSYQRQFIEFALNKQVLKFGEFTLKSGRKSPYFFNAGLFNTGRDLALLGRFYAEALVDSGIDFDLLFGPAYKGIPIATTTAVALAEHHDRDVPYCFNRKEAKTHGEGGNLVGSALQGRVMLVDDVITAGTAIRESMEIIQANGATLAGVLISLDRQERGRGEISAIQEVERDYNCKVTSIITLKELIAYLEEKPEMADHLAAVKAYREEFGV

SEQ ID NO: 56151 - protein, 704 aa, Enterobacter cloacae
MYLFESLNQLIQTYLPEDQIKRLQQAYLVARDAHEGQTRSSGEPYITHPVAVACILAEMKLDYETLMAALLHDVIEDTPATYQDMEQLFGKSVAELVEGVSKLDKLNFRDKKEAQAENFRKMIMAMVQDIRVILIKLADRTHNMRTLGSLRPDKRRRIARETLEIYSPLAHRLGIHHIKTELEELGFEALYPNRYRVIKEVVKAARGNRKEMIQKILSEIEGRLQEAGIPCRVSGREKHLYSIYCKMVLKEQRFHSIMDIYAFRVIVHDSDTCYRVLGQMHSLYKPRPGRMKDYIAIPKANGYQSLHTSMIGPHGVPVEVQIRTEDMDQMAEMGVAAHWAYKEHGGESSTTAQIRAQRWMQSLLELQQSAGSSFEFIESVKSDLFPDEIYVFTPEGRIVELPAGATPVDFAYAVHTDIGHACVGARVDRQPYPLSQPLSSGQTVEIITAPGARPNAAWLNFVVSSKARAKIRQLLKNLKRDDSVSLGRRLLNHALGGSRKLAEIPQENVQRELERMKLASLDDLLAEIGLGNAMSVVVAKNLQQGDTTAVPATTQSHGHLPIKGADGVLITFAKCCRPIPGDPIIAHVSPGKGLVIHHESCRNIRGYQKEAEKFMAVEWDKETAQEFITEIKVDMFNHQGALANLTAAINTASSNIQSLNTEEKDGRVYSAFIRLTARDRVHLANIMRKIRVMPDVIKVTRNRN

SEQ ID NO: 56152 - protein, 287 aa, Enterobacter cloacae
MIRSMTAYARREIKGSWGSATWEMRSVNQRYLETYFRMPEQFRSLEPVVRERIRTRLTRGKVECNLRFEPDASAQGELILNEKLAKQLVNAANWVKMQSDEGEINPVDILRWPGVMAAGEQDLDAIAAEILAALDGTLDDFIVARETEGQALKAMIEQRLEGVSTEVAKVRTHMPEVLQWQRERLVAKLEEAEVQLENTRLEQELVLMAQRIDVAEELDRLEAHVKETYNILKKKEAVGRRLDFMMQEFNRESNTLASKSINAEVTNSAIELKVLIEQMREQIQNIE

SEQ ID NO: 56153 - protein, 438 aa, Enterobacter cloacae
  MISC_FEATURE (83)..(83): X=any amino acid
MPLVIVAIGVVLLLLLMIRFKMNGFIALVLVALAVGLMQGMPLVKVISSIKAGVGGTLGSLALIMGFGAMLGKMLADCGGAQXIATTLIAKFGKKNIQWAVVLTGFTVGFALFYEVGFVLMLPLVFTIAAAANIPLLYVGVPMAAALSVTHGFLPPHPGPTAIATIFHADMGKTLLFGTILAIPTVILAGPVYARFLKGIDKPIPEGLYSAKTFTEEEMPGFGVSVWTSLVPVILMAMRAVAEMILPKGHPFLSVAEFLGDPVMATLIAVLIAMFTFGLNRGRSMDQINDTLTSSIKIIAMMLLIIGGGGAFKQVLVDSGVDKYIAAMMHETNVSPLLMAWSIAAVLRIALGSATVAAITAGGIVAPLIATTGVTLELMVIAVGSGSVIFSHVNDPGFWLFKEYFNLTIGETIKSWSALETIISVCGLVGVLLLNMVV

SEQ ID NO: 56154 - protein, 312 aa, Enterobacter cloacae
MERFDAVVIGAGAAGMFCAAMAGQAGRRVLLLDNGKKPGRKILMSGGGRCNFTNLYVEPAAYLSQNRHFCKSALARYTQWDFIDLVGKHGIAWHEKTLGQLFCDDSAQQIVDMLVAECEKGGVVMRLRTEVLEVARDDQGYTLQLNGETVSADSLVIASGGLSMPGLGASPFGYKIAEQFGLKVLPTRAGLVPFTLHKPLLEQLQTLSGVSVPSVITAEDGTVFRENLLFTHRGLSGPAVLQISSYWQPGEFVTVNLLPDCDLDAFLNEQRTAHPNQSLKNTLAMQLPKRLVECLQVLGQIPDVSLKQLNSR

SEQ ID NO: 56155 - protein, 499 aa, Enterobacter cloacae
MLHLFAGLDLHTGLLLLLALVFVLFYEAINGFHDTANAVATVIYTRAMRSQLAVVMAAVFNFFGVLLGGLSVAYAIVHMLPTDLLLNVSSGHGLAMVFSMLLAAIIWNLGTWYFGLPASSSHTLIGAIIGIGLTNALMTGTSVVDALNLPKVLGIFGSLIISPIVGLVVAGGLIFILRRYWSNTKKRARIHLTPAEREKKDGKKKPPFWTRIALIISAIGVAFSHGANDGQKGIGLVMLVLIGVAPAGFVVNMNASGYEITRTRDAVNNVETYFQQHPDLLKKATGVDQLIPSPEAGATTAPGEFHCHPANAINALERAKGMLGDIESYDKLAVEQRGQLRRIMLCISDVTDKVAKLPEVNGDDKRLLKKLKSDMLNTIEYAPIWIIMAVALALGIGTMIGWRRVATTIGEKIGKKGMTYAQGMSAQMTAAVSIGLASYTGMPVSTTHVLSSSVAGTMIVDGGGLQRKTVTNILMAWVFTLPASILLSGGLYWISLKLI

SEQ ID NO: 56156 - protein, 280 aa, Enterobacter cloacae
MLSYRHSFHAGNHADVLKHTVQSLIIESLKEKEKPFLYLDTHAGAGRYQLSGEHAERTGEYLEGIARVWQQDDLPAELEPYIGVVNHFNRNGQLRYYPGSPLIARQLLREQDSLQLTELHPSDYPLLRSEFQKDSRARVEKSDGYQQLKAKLPPVSRRGLVLIDPPYEIKTDYQAVVTGIHEGYKRFATGTYALWYPVVLRAQIKRMIKDLEATGIRKILQIELAVRPDSDQRGMTASGMIVINPPWKLEAQMNNVLPWLHKTLVPAGTGHATVSWIVPE

SEQ ID NO: 56157 - protein, 450 aa, Enterobacter cloacae
MTKHYDYIAIGGGSGGIASINRAAMYGQKCALIEAKALGGTCVNVGCVPKKVMWHAAQIREAIHMYGPDYGFDTTINHFDWEKLIASRTAYIDRIHTSYDNVLGKNNVDVIHGFARFVDAKTIEVNGETITADHILIATGGRPSHPNIPGVEYGIDSDGFFELPALPKRVAVVGAGYIAVELAGVINGLGAEAHLFVRKHAPLRSFDPLIVDTLVEVMNTEGPTLHTNAVPKAVVKNADGSLTLELEDGRSQTVDCLIWAIGREPANDNFNLGVTGVKTDEKGYIVVDKFQNTSVPGIYAVGDNTGAVELTPVAVAAGRRLSERLFNNKPDEHLDYSNIPTVVFSHPPIGTVGLTEPQAREQYGDDQVKVYKSAFTAMYTAVTSHRQPCRMKLVCVGPEEKIVGIHGIGFGMDEILQGFAVALKMGATKKDFDNTVAIHPTAAEEFVTMR

SEQ ID NO: 56158 - protein, 311 aa, Enterobacter cloacae
MSDKRTAEEGRFAGLALAEEELVARVAWCYYHDGLTQNDIGERLGLPRLKISRLLEKGRQSGVIRVQINSRYEGCLALETELQQRFGLKLVRVMPALNTPPMNVRLGIGAAQSLMGVLEPGQLLAVGFGETTMSSLQHLSGFISSQQIRLVTLSGGVGPYMTGIGQLDAACSVSMIPAPLRVSSAEVAGILKRETSVRDVILAATAADVAVVGIGSVNQRRDATILRSGYISEGEQLMYARKGAVGDILGYFLNAEASAVEELEIHKELLGVTLDELAQLPTIVGVAGEEEKADAIYAALKGRRINGLVTE

SEQ ID NO: 56159 - protein, 310 aa, Enterobacter cloacae
FLAILALFAVLVALNPSYFSLQTLGMIFASSQILILLAIGAALVMLTRNIDVSVGSIVGLSAIAVGVALNSGYSLPVSILFAMSIGALAGAFNGFLVVGLRIPAIVATLGTLGLYRGAMLLWTGGKWIEGLPPGLKSLSEPAAIGISPLGMLVLIIAVVGAWTLSRTAFGRDFYAVGDNLAAARQLGVAVNRTRMIAFTLNGMLAACAGIVFAAQIGFVPNQTGSGLEMKAIAACVLGGISLLGGTGTLVGALLGAFFLTQIDTVLVLFRLPAWWNDFIAGLVLLGVLVLDGRLRQALARHQRALKYGRF

SEQ ID NO: 56160 - protein, 459 aa, Enterobacter cloacae
MNRLPSSASALACTAHALNLIEKRTLDHEEMKQLNREVIDYFKEHVNPGFLEYRKSVTAGGDYGAVEWQAGSLNTLVDTQGQEFIDCLGGFGIFNVGHRNPVVVSAVQNQLAKQPLHSQELLDPLRAMLAKTLAALTPGKLKYSFFSNSGTESVEAAIKLAKAYQSPRGKFTFIATSGAFHGKSLGALSATAKSTFRKPFMPLLPGFRHVPFGDINAMRTVLSECRKTSDDVAAVILEPIQGEGGVILPPQGYLPAVRQLCDEFGALLILDEVQTGMGRTGKMFACEHENVQPDILCLAKALGGGVMPIGATVATEEVFSVLFDNPFLHTTTFGGNPLACAAALATINVLLEQNLPAQAEQKGDMLLDGFRQLGREYPDLVQDARGKGMLMAIEFVDNETGYSFASEMFRQRVLVAGTLNNSKTIRIEPPLTLTIEQCEQVLKAARKALAALRISVEEA

SEQ ID NO: 56161 - protein, 438 aa, Enterobacter cloacae
MTSLRHTALGLALGLAFATNAMAVTTIPFWHSMEGELGKEVDSLAQRFNDTHPDYKIVPVYKGNYEQSLSAGIAAFRTGNAPALLQVYEVGTATMMASKAIKPVYEVFKEAGINFDESQFVPTVAGYYTDSKTGHLLSQPFNSSTPVLYYNKDAFKKAGLDPEQPPKTWQDLAEYTAKLKAAGMKCGYASGWQGWIQIENFSAWHGLPVATKNNGFDGTDAVLEFNKPEQVKHIALLADLNKKGDFSYFGRKDESTEKFYNGDCAITTASSGSLADIRHYAKFNYGVGMMPYDADVKGAPQNAIIGGASLWVMQGKDKGTYKGVAEFLDFLAKPENAAEWHQKTGYLPITKAAYDLTREQGFYSKNPGADIATRQMLNKPPLPFTKGLRLGNMPQIRTIVDEELESVWTGKKTPQQALDSAVERGNQLLRRFEQSTKS

SEQ ID NO: 56162 - protein, 581 aa, Enterobacter cloacae
MMKPTFLRWVAIAALMAGGTFSVAANPPAAPPVSYGVEEDVFHPVRATHGMVASVDALATRVGVDILRQGGNAVDAAVAVGYALAVTHPQAGNLGGGGFMMLRTKDGKTTAIDFREIAPSQASRDMFLDDQGNPDSKKSLTSHLASGTPGTVAGFSLALEKYGTMPLNKVVQPAIKLARDGFVVNDALADDLKTYGSEVIPNHENSKAIFWKDGEPLKKGDRLVQKNLTKSLELIAEHGPDAFYKGAIADQIAEEMQKNGGLITKADLAEYKAVEREPISGTYRGYEVFSMPPPSSGGIHIVQILNILENFDMHKFGFGSADAMQVMAEAEKRAYADRSEYLGDPDFVKVPWQALTNKAYAKSIADQIDINKAKPSSEIRPGKLAPYESNQTTHFSVVDKDGNAVAVTYTLNTTFGTGIVAGNSGILLNNEMDDFSAKPGVPNVYGLVGGDANAVGPKKRPLSSMSPTIVVKDGKTWLVTGSPGGSRIITTVLQMVVNSIDFGMNVAEATNAPRFHHQWLPDELRVEKGFSPDTIKLLEQRGQKVAVKEAMGSTQSIMVGPDGALFGASDPRSVDDLSAGY

SEQ ID NO: 56163 - protein, 248 aa, Enterobacter cloacae
MSNWPYPHVVAHRGGGKLAPENTLAAIDVGARYGHTMIEFDAKLSKDGEIFLLHDDNLERTSNGWGVAGELPWRDLLKVDAGSWYSGEFKGEPLPLLAEVADRCRLHGMMANIEIKPTTGTWPLTGKVIALAARELWEGMTAPLLSSFEIDALEAAQAAVPELPRGLLLDEWREDWRELTTRLACVSIHLNHRLLDEARVKMLKDAGLHILVYTVNKPQRAAELLRWGVDSICTDAIDLIGPDFSSAD

SEQ ID NO: 56164 - protein, 425 aa, Enterobacter cloacae
MKPMHFAMALLSAAMFFVLASVFMGVQLELNGTKLVVDTAADIRWQWVFIGTAVVFLFQLLRPLFQKTLKNVSGPKFMLPAIDGSTVKQKLFLVALLVAAVAWPFVVSRGTVDIATLTMIYVILGLGLNVVVGLSGLLVLGYGGFYAIGAYTFALLNHYYGLGFWTCLPLAGLVSAAAGFLLGFPVLRLRGDYLAIVTLGFGEIVRILLLNNTEVTGGPNGISQIPKPTFFGLEFSRTAREGGWDTFSNFFGVKYDPSDRVIWLYLVALLLVVITLFVINRLLRMPLGRAWEALREDEIACRSLGLNPTRIKLTAFTISAAFAGFAGTLFAARQGFVSPESFTFAESAFVLAIVVLGGMGSQFAVILAAILLVVSRELMRDFNEYSMLMLGGLMVLMMIWRPQGLLPMTRPQLKLKNGQAKGEQA

SEQ ID NO: 56165 - protein, 195 aa, Enterobacter cloacae
MHSAAQVNLRPNNRLSDMQAIMEQTQAFENRVLERLNAGKTVRSFLIAAVELLTEAVNILVLQVFRKDDYAVKYAVEPLLDGDGPLGDLSVRLKLIYGLGVLNRQEYEDAELLMSLREELNHDGNEYTFTDDEILGPFGELHCVTALPPAPHFDNSDPELYAMQKLRYQQVVRSTMVLSLTELISRISLKKAFQK

SEQ ID NO: 56166 - protein, 382 aa, Enterobacter cloacae
MKALHFGAGNIGRGFIGKLLADAGITLTFADVNQVVLDALNARHSYQVHVVGENEQVETVSGVNAVSSIGEDVIDLIASVDLVTTAVGPVVLERIAPAVAKGLAKRKAQGIDTPLNIIACENMVRGTTQLKGHVLNAVADEDKAWVEAHVGFVDSAVDRIVPPSESATNDPLEVTVETFSEWIVDKTQFKGALPTIPGMELTDNLMAFVERKLFTLNTGHAITAYLGKLAGHQTIRDAILDEKIRAVVKGAMEESGAVLIKRYGFDADKHAAYIQKILGRFENPYLKDDVERVGRQPLRKLSAGDRLIKPLLGTLEYGLPHANLVKGIAAAMHYRSEQDPQAQELAQLIDDKGAQAALAQISGLDANSDVVVEAVNAYNATK

SEQ ID NO: 56167 - protein, 298 aa, Enterobacter cloacae
  MISC_FEATURE (296)..(296): X=any amino acid
LTELEVVMAVVRRGSFRAAAQELGMSATAVSNAIAGLESRLDTRLFNRTTRSVALTDAGQRYVARIGPALQEIRLASEEIHSDTGEPAGTLRLNVPNHIGALFLDQLLIDFMIRYPKMRVETVSEARMIDIVAEGYDAGIRLEESVPQDMIAVPLTGEIRQLVTATPDYFARHGIPQTPDDLLSHQGIGMRMAHGGIYLWELARRGETYALAVPPRFATSDLFASIRAVKAGLGVGFLPELYIREELERGELVSVLNDWAQRLPGLRLYYPGHRHVPPGLRALVATIRERGIIPGXPC

SEQ ID NO: 56168 - protein, 162 aa, Enterobacter cloacae
MTRGFPMSEEELFSRRPMGMRMAMIVRQWRAVIDDAILDTGLTQSSWTVMMQLHQLGDNVSVSELAEVQGIELPPLMRTLAQLEKQGYLLRSVSPYDKRIRLLTLTPEGKAILKRLTQVIETYQARVSQNIAPEHIDIFSATLNQFACNLRTIREEDNKTEK

SEQ ID NO: 56169 - protein, 434 aa, Enterobacter cloacae
MKTRTQQIEELKKEWTQPRWEGIRRPYSAEEVVKLRGSVNPECTLAQNGAAKMWKLLHGGSKKGYINSLGALTGGQALQQAKAGIEAIYLSGWQVAADANLASSMYPDQSLYPANSVPSVVDRINNTFRRADQIQWAAGIEPGDPRFTDYFLPIVADAEAGFGGVLNAFELMKSMIEAGAAAVHFEDQLASVKKCGHMGGKVLVPTQEAVQKLVAARLAADVLGVPTLVIARTDADAADLITSDCDPYDSEFITGERTSEGFYRTHAGIEQAISRGLAYAPYADLVWCETSTPDLALAKRFADAIHAKYPGKLLAYNCSPSFNWQKKLDDKTIASFQQQLSDMGYKYQFITLAGIHSMWFNMFDLAHAYAQGEGMKHYVEKVQQPEFAAGKDGYTFVSHQQEVGTGYFDNVTTIIQGGTSSVTALTGSTEEAQF

SEQ ID NO: 56170 - protein, 276 aa, Enterobacter cloacae
MVATVPAKRGRKPAATAAAAQQGGQVQSLTRGLKLLEWIAESHGSVALTELAQQAGLPNSTTHRLLTTMQQLGFVRQVGELGHWAVGAHAFIVGSSFLQSRNLLAIVHPILRKLMEESGETVNLAVLDQSDHQAIIIDQVQCTQLMRMSAPIGGKLPMHASGAGKAFLSQLSEEQVTGLLHRKGLHAYTHATLVSPVHLKEDLALTRKRGYSFDDEEHALGLRCLAACIFDEHREPFAAISISGPISRMTDDRVTELGALVIKAAKEVTLAYGGIR

SEQ ID NO: 56171 - protein, 1227 aa, Enterobacter cloacae
MSSKVEQLRAQLNERILVLDGGMGTMIQGYRLSEDDFRGERFADWPCDLKGNNDLLVLSKPSVIKDIHNAYFEAGADIVETNTFNSTTIAMADYQMESLSAEINLEAAKLARACADEWTARTPDKPRYVAGVLGPTNRTASISPDVNDPAFRNITFDQLVAAYRESTKALVEGGSDLILIETVFDTLNAKAAIYAVKEEFEALGVDLPIMISGTITDASGRTLSGQTTEAFYNSLRHAEALSFGLNCALGPDELRQYVQELSRIAECYVTAHPNAGLPNAFGEYDLDADTMAAQIREWAESGFLNIVGGCCGTTPEHIAAMSNAVAGLPPRKLPELPVACRLSGLEPLTIGDDSLFVNVGERTNVTGSAKFKRLIKEEKYSEALDVARQQVESGAQIIDINMDEGMLDAEAAMVRFLNLIAGEPDIARVPIMIDSSKWEVIEKGLKCIQGKGIVNSISMKEGVDIFIHHAKMVRRYGAAVVVMAFDEVGQADTRERKIEICRRAYKILTEEVGFPPEDIIFDPNIFAVATGIEEHNNYAQDFIGACEDIKRKLPHALISGGVSNVSFSFRGNDPVREAIHAVFLYYAIRNGMDMGIVNAGQLAIYDDLPAELRDAVEDVILNRRDDATERMLDLAEKYRGSKSDEAANVQQAEWRSWDVKKRLEYSLVKGITEFIELDTEEARQQADRPIEVIEGPLMDGMNVVGDLFGEGKMFLPQVVKSARVMKQAVAYLEPYIEASKEKGSSNGKMVIATVKGDVHDIGKNIVGVVLQCNNYEIIDLGVMVPADKILKTAREVNADLIGLSGLITPSLDEMVNVAKEMERQGFTIPLLIGGATTSKAHTAVKIEQNYSGPTVYVQNASRTVGVVSALLSDTQRDDFVARTRKEYETVRIQHGRKKPRTPPVSLQAARDNDLAFDWSSYTPPVAHRLGVQDVTASIETLRNYIDWTPFFMTWSLAGKYPRILEDEVVGEEAKRLFKDANDMLDTLSAEKTLNPRGVVGLFPANRVGDDIEIYRDETRTHVLAVSRHLRQQTEKVGFANYCLADFVAPKLSGKADYIGAFAVTGGLEEDALADAFEAQHDDYNKIMVKAIADRLAEAFAEYLHERVRKVHWGYAANENLSNEDLIRENYQGIRPAPGYPACPEHTEKGTIWKLLDVEAHTGMKLTESFAMWPGASVSGWYFSHPDSKYFAVAQLQRDQIEDYALRKGMSVSEVERWLAPNLGYDAD

SEQ ID NO: 56172 - protein, 535 aa, Enterobacter cloacae
VLTLLHLLSAVALLVWGTHIVRTGVMRVFGARLRTVLSSSVEKKPLAFCAGIGVTALVQSSNATTLLVTSFVAQDLVALAPALVIVLGADVGTALMARILTFDLSWLSPLLIFIGVIFFLGRKQTRAGQLGRVGIGLGLILLALELIVQAVTPITEANGVQVIFASLTGDIMLDALIGAVFAIVSYSSLAAVLLTATLTATGAISFPVALCLVIGANLGSGLLAMLNNSAANAAARRVALGSLLFKLVGSLIILPFVHPLANLMDNLPLPKAELVIYFHVFYNLVRCLAMVPFAAPMARFCERLIQDEPELDARLKPKHLDTSALDTPALALANAARETLRMGDAMETMLEGLQKVMHGEPREEKELRRLADDINVLYTAIKLYLARMPQDELAEEESRRWAEIIEMSLNLEQASDIVERMGSEIADKSLAARRAFSGEGLKELEALHEQLVSNLKLAMLVFFSSDVPSARRLRRNKHRFRILNRRYSHAHVERLHQQNVQSIETSSLHLGLLGDMKRLNSLFCAVAYSVMEHPD

SEQ ID NO: 56173 - protein, 542 aa, Enterobacter cloacae
TQTAAWQALQKHFDEMKDVTIADLFAKDADRFNKFSATFDDLMLVDFSKNRITEETLAKLQDLAKETELADAIKSMFSGEKINRTEDRAVLHVALRNRSNTPIIVDGKDVMPEVNAVLEKMKAFSEAIISGSWKGYTGKAITDVVNIGIGGSDLGPFMVTEALRPYKNHLNMHFVSNVDGTHIAEVLKNVNPETTLFLVASKTFTTQETMTNAHSARDWFLKTAGDNKHVAKHFAALSTNGKAVSEFGIDTANMFEFWDWVGGRYSLWSAIGLSIILSVGFDNFVELLSGAHAMDKHFSTTAPEKNLPVLLALIGIWYNNFFGAETEAILPYDQYMHRFAAYFQQGNMESNGKYVDRNGNAVDYQTGPIIWGEPGTNGQHAFYQLIHQGTKMVPCDFIAPAITHNPLSDHHPKLLSNFFAQTEALAFGKSREVVEQEYRDQGKDPATLDHVVPFKVFEGNRPTNSILLREITPFSLGRLIALYEHKIFTQGAILNIFTFDQWGVELGKQLANRILPELGDDKAIASHDSSTNGLINRYKAWR

SEQ ID NO: 56174 - protein, 290 aa, Enterobacter cloacae
MLPTQSTRLNKYISESGICSRREADRYIEQGNVFLNGKRATIGDQVVPGDVVKVNGQVIEPRDAEDLVFIALNKPVGIVSTTEDGERDNIVDFVNHSSRIFPIGRLDKDSQGLIFLTNHGDLVNKILRAGNDHEKEYIVTVNKPVTDEFIRGMGAGVPILGTVTKKCKVKKEAPFAFRITLVQGLNRQIRRMCEHFGYEVTKLERTRIMNVSLSGIPLGEWRDLTDDELIELFKLIENSSSEAKPKAKAKPKTQAIKRPVVKAPQAEDKGRGKPGNGKRFTQPGRKKKGR

SEQ ID NO: 56175 - protein, 75 aa, Enterobacter cloacae
MQFTPDSAWKITGFTREISPAYRQKLLSLGMLPGSSFQVVRVAPLGDPVHIETRRVNLVLRKKDLALIEVEALSR

SEQ ID NO: 56176 - protein, 776 aa, Enterobacter cloacae
MMKDSLCRIIAGDIQARAEQVEAAVRLLDEGNTVPFIARYRKEVTGGLDDTQLRNLETRLGYLRELEERRQAILKSIGEQGKLTSELESAINGTLSKTELEDLYLPYKPKRRTRGQIAIEAGLEPLADLLWNEPSHDPETEAAKFIDADKGVADTKAALDGARYILMERFAEDATLLAKVRDYLWKNAHIVSTVVAGKEEEGAKFRDYFDHHEPISTAPSHRALAMFRGRNEGVLQLSLNADPQFDEPPKESHCEQIIIDHLGLRLNNAPADSWRKGVVSWTWRIKVLMHLETELMGTVRERAEDEAINVFARNLHDLLMAAPAGLRATMGLDPGLRTGVKVAVVDGTGKLVATDTIYPHTGQAAKAAVVVAALCEKYNVELVAIGNGTASRETERFYLDVQKQFPKVTAQKVIVSEAGASVYSASELAAQEFPDLDVSLRGAVSIARRLQDPLAELVKIDPKSIGVGQYQHDVSQTQLARKLDAVVEDCVNAVGVDLNTASVPLLTRVAGLTRMMAQNIVAWRDENGQFQNRQQLLKVSRLGPKAFEQCAGFLRINHGDNPLDASTVHPEAYPVVERILAATQQALKDLMGDSSALRNLKAVDFTDDKFGVPTVTDIIKELEKPGRDPRPEFKTATFADGVETMNDLLPGMVLEGAVTNVTNFGAFVDIGVHQDGLVHISSLADKFVEDPHTVVKAGDIVKVKVLEVDLQRKRIALTMRLDEQPGDTSARRGGNGGGREQQRPAAKAAKPRGRDAQPAGNSAMMDALAAAMGKKR

SEQ ID NO: 56177 - protein, 444 aa, Enterobacter cloacae
MRRMRFSPRSSFARTLLLIVTLLFVSLVTTYLVVLNFAILPSLQQFNKVLAYEVRMLMTDKLQLEDGTQLVVPPAFRREIYRELGISLYSNEAAEDAGLRWAQHYEFLSQQMAHQLGGPTEVRVEVNKSSPVVWLKTWLSPNIWVRVPLTEIHQGDFSPLFRYTLAIMLLAIGGAWLFIRIQNRPLVDLEHAALQVGKGIIPPPLREYGASEVRSVTRAFNHMAAGVKQLADDRTLLMAGVSNDLRTPLTRIRLATEMMGEEDGYLAESINKDIEECNAIIEQFIDYLRTGQEMPMEMADLNAVLGEVVAAESGYEREIDTDLQAGEIQVRMHPLSIKRAVANMVVNAARYGNGWIKVSSGSELNRAWFQVEDDGPGIKPEQRKHLFQPFVRGDSAASTSGTGLGLAIVQRIIDNHNGLLEIGTSERGGLSIRAWLPVPVTRGQ

SEQ ID NO: 56178 - protein, 539 aa, Enterobacter cloacae
MRVTGLTPQDLKAYGIHDVQEIVYNPDYDTLYQEELNPALEGYERGVLTNLGAIAVDTGIFTGRSPKDKYIVRDETTRDTLWWADKGKGKNDNKPLSPETWQHLKGLVTHQLSGKRLFIVDAFCGANADTRLSVRFITEVAWQAHFVKNMFIRPTDEELQDFTPDFIVMNGAKCTNPQWKEQGLNSENFVAFNLTERIQLIGGTWYGGEMKKGMFSVMNYLLPLRGIASMHCSANVGEKGDVAVFFGLSGTGKTTLSTDPKRRLIGDDEHGWDDDGVFNFEGGCYAKTIRLSEEAEPDIFHAIRRDALLENVTVRADGSIDFDDASKTENTRVSYPIYHIDNIVKPVSKAGHATKVIFLTADAFGVLPPVSRLTASQTQYHFLSGFTAKLAGTERGVTEPTPTFSACFGAAFLSLHPTQYAEVLVKRMQASGAQAYLVNTGWNGTGKRISIKDTRAIIDAILDGSLDDAETFTLPMFDLAIPTSLPGVDTHILDPRNTYGSPEQWREKAESLAKLFIENFEKYTDTPAGAALVSAGPKL

SEQ ID NO: 56179 - protein, 826 aa, Enterobacter cloacae
MYKYIEPQLPDVATLRDVRLQIPMQVYSADGELMAQYGEKRRIPLTLNQIPPVMVKAFIATEDSRFYEHHGVDPVGIFRAASIALFSGHASQGASTITQQLARNFFLSPEKTLIRKIKEVFLAIRIEQLLSKDEILELYLNKIYLGYRAYGVGAAAQVYFGKPVEQLTLSEMATIAGLPKAPSTFNPLYSLDRATARRNVVLSRMLSEGYISQSEYDQARNDVIDANYHAPEIAFASPYLTEMVRQEMVNRYGDKAYEDGYRVYTTVTRKVQQAAQEAVRNNVMDYDMRHGYRGPSNVLWKVGESAWDSKKITSTLKALPTYGPLLPAVVTQADPQEAVATLADGTSVSLRMDGIRWARPYRSDTLQGATPRKVTDAVQTGQQIWVRKVGESWWLAQVPDVNSALVSINPQNGAILALVGGFDFNQSKFNRATQALRQVGSNIKPFLYTAAMDKGLTLASILNDVPISRWDAGAGSDWQPKNSPAEYAGPIRLRQGLGQSKNVVMVRAMRAMGVDYAAEYLQRFGFPAQNIVRTESLALGSASFTPLQVARGYSVMANGGFLIDPYFISKIENDQGGVLFEAKPKIACPDCDIPVIYGNTPKSDVLENKDMEDPAVSQEQQNGVVPQPQLEQANQSLVAQTGAPEYAPHVINTPLSFLIKSALNTNIFGEPGWQGTGWRAGRDLQRHDIGGKTGTTNSSKDAWFSGYGPGVVTSVWIGFDDHRRDLGRTTASGAIKDQISGYEGGAKSAQPAWDAYMKSVLEGVPEQPLTPPPGVVTVNIDRSTGQLANGGNSREEYFIEGTQPTTQAVHEVGTEIIDNGETHELF

SEQ ID NO: 56180 - protein, 294 aa, Enterobacter cloacae
MKMAQHDQLHRYLFEQFAVRGELVTVSETWKQILENHNYPLPVKTLLGELLVATSLLTATLKFAGDITVQLQGDGPMTLAVINGNNQQQMRGVARVQGDVPENADLKTLVGNGYLVITISPEEGERYQGVVGLEGDTLAACLEDYFMRSEQLPTRLFIRTGEVDGQPAAGGMLLQVLPAQDAQTNDFEHLATLTETIKAEELFNLSATDVLWRLYHEEEVTVYDPQSVEFKCTCSRERCAGALKTLPDEEIDSIMAEDGEIDMHCDYCGTHYVFNSMDIAEIRNNASPADPQVH

SEQ ID NO: 56181 - protein, 263 aa, Enterobacter cloacae
TGDKEIVSMAFKIWQTGVHIQQDRVLIVALAREKLSWCMRRWWAIPLDEGIIRDGKICQPEQLVDALRDWRKTLPHYHRAFLSFPAARTLQRALPRPTVALRDSEQLSWLGAALARELEMSADTLCFDYAQDTFSNTFHVTAAQNNEIDTLLALAKTLRLRLVAITPDASALANLLPAVAPATCVAWRDDRQWLWAMRHQWGRRITTEAENVSELSALLGLGSDDIALFDSRRDPWEILERCHAPLPDCGADYTVALALAMSE

SEQ ID NO: 56182 - protein, 133 aa, Enterobacter cloacae
MKEKPSDGVRLDKWLWAARFYKTRALAREMVDGGKVHYNGQRSKPSKLVELNATLTLRQGNDERTVVIKAVTEQRRPAAEAVLLYEETAESIEKREKTALARKMNALTMPHPDRRPDKKERRDLMKFKHGETD

SEQ ID NO: 56183 - protein, 346 aa, Enterobacter cloacae
MPALKSYLSLKSSALRNAARISVMLSTASLMGMALHLPKPYWILMTVLFVTQNGYGATRVRILHRAGGTMAGLIIAGVTLHFHVPEGYTLAGMLAITLVSYLIIRKNYGWAMVGFTVTAVYTLQLLTLNGEQFIIARLIDTLIGCLIAFGGMVWLWPQWQSGLLRQNAHDALEADQQAIRLILSDDPQPSPLAYQRMKVNQAHNALFNSLNQAMQEPGFNSHYLADMKLWVTHSQFIVEHINAMTTLAREHTMLTPDLAQRYLQSCEIALQRCQQRLEYDAPGESGDSNILEAPETLTHGPMSTLEQHLQRVLGHLNTMHTISSVAWRQRPHHGIWLTRRLKRTEY

SEQ ID NO: 56184 - protein, 406 aa, Enterobacter cloacae
MATEQPAITRATFDEVILPIYAPAEFIPVKGKGSRVWDQQGKEYVDFAGGIAVTALGHCHPALVEALKTQGETLWHTSNVFTNEPALRLGRKIIDATFAERVLFMNSGTEANETAFKLARYYATTRHSPYKTKIIAFHNAFHGRSFFTVSVGGQPKYSDGFGPKPADIVHVPFNDLHAVKAVMDDHTCAVVVEPIQGEGGVTAATPEFLKGLRELCDEHKALLVFDEVQCGMGRTGDLFAYMHYGVTPDILTSAKALGGGFPVSAVLTTQEIASAFHVGSHGSTYGGNPLATAVAGAAFDIINTPEVLNAVSAKRELFVKHLQKIDEQYDVFSEIRGMGLLIGAELKPQYKGRARDFLHAAAHEGVMVLNAGPDVMRFAPSLVVEDKDIEEGLTRFASAVAKIVKG

SEQ ID NO: 56185 - protein, 194 aa, Enterobacter cloacae
MKKLTDKQKSRLWEQQRNVNLQASCLLEKGNGPSEPHIETLELGPSAPGLPHLCLIHRHLYRSEMKRAGEFRTDDIFKGDIPFCHFEYIEKMGNELMAALESEKYLVGLEKAAFVDRVSHYYCEINMLHPFMRGNGIAQRVFFEQLALHAGYSLDWRDIDPDQWVAANRSGATGDLTALNAIFAKVVSEARESE

SEQ ID NO: 56186 - protein, 457 aa, Enterobacter cloacae
MDHLPIFCQLRNRDCLLVGGGDVAERKARLLLEAGARLTVNALTFAPQFEVWAQEGMLTLEQGEFNESLLDTCWLTIAATDDDEVNQRVSDACEVRRIFCNVVDAPKEASFIMPSIIDRSPLMIAVSSGGRSPVLARLLREKLEAVLPQHLGQIAHYAGQLRSRVKQTFSTVGERRRFWEKFFVNDRLAQSLANQDTKAVEETTEQLLSEPLDHRGEVVLVGAGPGDAGLLTLKGLQQIQQADTVVYDRLVSDDIMNLVRRDADRVFVGKRAGYHCVPQEEINQILLREAQKGKRVVRLKGGDPFIFGRGGEELETLCDAGIPFSVVPGITAASGCSAYSGIPLTHRDYAQSVRLVTGHLKTGCELDWHNLAAEKQTLVFYMGLNQAATIQAKLLEHGMEADMPVALVENGTSIKQRVVDGVLTQLGELAQQVESPALIVVGRVVELREKLNWFSNH

SEQ ID NO: 56187 - protein, 56 aa, Enterobacter cloacae
MFKLAKAAVLVGLLSTLTACTGHVQNTKNNCSYDYLLHPAISISKIIGGCGPAAQQ

SEQ ID NO: 56188 - protein, 387 aa, Enterobacter cloacae
MTNSNRIKLTWISFFSYALTGALVIVTGMVMGNIADYFQLPVSSMSNTFTFLNAGILISIFLNAWLMEIVPLKTQLRFGFVLMVAAVAGLMLSHSIALFSAAMFVLGLVSGITMSIGTFLITHMYEGRQRGARLLFTDSFFSMAGMIFPMVAAVLLARHIEWYWGYACIGLVYVAIFILTFGCEFPVLGKKAQTTAEPVAKEKWGIGVLFLSVAALCYILGQLGFISWVPEYAKGLGMSLNDAGKLVSDFWMSYMFGMWAFSFILRFFDLQRILTVLAGLATVLMYLFINGSPEHMPWFILTLGFFSSAIYTSIITLGSLQTKVASPKLVNFVLTCGTIGTMLTFVVTGPIVAHSGPLAALHTANGLYAVVFIMCFILGFVTRHRQH

SEQ ID NO: 56189 - protein, 334 aa, Enterobacter cloacae
MTKPIVFSGAQPSGELTIGNYMGALRQWVSMQDEYHCIYCIVDLHAITARQDPEKLRKATLDTLALYLACGIDPEKSTIFVQSHVPEHAQLGWALNCYTYFGELSRMTQFKDKSARYSENINAGLFDYPVLMAADILLYQTNQVPVGEDQKQHLELSRDIAQRFNAIYGDVFKVPEPFIPKSGARVMSLLEPTKKMSKSDDNRNNVIGLLEDPKSVVKKLKRAVTDSDEPPVVRYDVQNKAGVSNLLDILSGVTGQSIPELEKHFEGKMYGHLKGEVADAVSGMLTELQERYHRYRNDEAFLQKVMKDGAEKASARASETLKAVYEAIGFVGKP

SEQ ID NO: 56190 - protein, 847 aa, Enterobacter cloacae
MSKVRLAIIGNGMVGHRFIEDLLDKADAEQFDITVFCEEPRKAYDRVHLSSYFSHHTAEELSLVREGFYEKHGVKVLVGERAITINRQEKVIHSSAGRTVFYDKLIMATGSYPWIPPIKGSETQDCFVYRTIEDLNAIESCARRSRRGAVVGGGLLGLEAAGALKNLGVETHVIEFAPMLMAEQLDHMGGDQLRRKIESMGVKVHTSKNTKEIVQEGTEARKTMRFADGSELEVDFIVFSTGIRPRDKLATQCGLAVAQRGGIMINDTCQTSDPDIYAIGECASWNNRVYGLVAPGYKMAQVAVDHILGSENAFTGADMSAKLKLLGVDVGGIGDAHGRTAGARSYVYLDESKEVYKRLIVSQDNKTLLGAVLVGDTSDFGNLLQLVLNAIELPENPDALILPAHASSGKPSIGVDKLPDSAQICSCFDVTKGMLISAINKGCHTVAALKAETKAGTGCGGCIPLVTQVLNAELAKQGIEVNNNLCEHFAYSRQELYHLIRVEGIKSFDELLAKHGQGYGCEVCKPTVGSLLASCWNEYVLKPEHTPLQDTNDNFLANIQKDGTYSVIPRSAGGEITPEGLVAVGRIAREFNLYTKITGSQRIGLFGAQKDDLPEIWRQLIEAGFETGHAYAKALRMAKTCVGSTWCRYGVGDSVGFGVELENRYKGIRTPHKMKFGVSGCTRECAEAQGKDVGIIATEKGWNLYVCGNGGMKPRHADLLAADLDRDTLIQYLDRFMMFYIRTADKLTRTASWLDNLEGGIDYLKSVIIDDKLGLNEHLEAEMARLREAVICEWTETVNTPAAQTRFKHFINSAQRDPNVQVVPEREQHRPATPYERIPVTLVEENA

SEQ ID NO: 56191 - protein, 108 aa, Enterobacter cloacae
MSQWINICDINDIIPATGVCALLGSEQVAIFRPRHDEQVFAISNIDPFFEASVLSRGLIAEHQGELWVASPLKKQRFRLSDGYCMEDESHSVKHYDVRVKDGKVQLKG

SEQ ID NO: 56192 - protein, 432 aa, Enterobacter cloacae
MDEFKPEDELKPDPSDRRTGRSRQSSERDNEPQIKFDDVDLDADDRRPSRSRNAHEERAEEDYESEEDSMDEQPVERRPRKRKKAAAPKPASRQYIMMGLGVLVLVLLIVGIGSALKAPSTNSTEQTASAEKSINLSGNDATNQANGAQPAPGATSAEQTAGNTTAPQDVSLPPVSSTPAQGQAPATPEGQQRVEVQGDLNNALTQPQNQQQVDNVVVNSTLPTEPATVAPIRGGNAQPQTAATETKPRQTQAATRPERKQAVIEPKRETKPQAVVKAPEVKAAPAQPKHTETAAVSEPAKAPVTQTAPKATATTAAPAATAPAATAAASSAAAGKTAGNVGSLKSAPSSNYTLQLSSSSNYDNLNGWAKKSNLKNYVVYQTTRNGQPWYVLVSGVYSSKDEAKRAVAALPADVQAKNPWAKPIHQVQADLK

SEQ ID NO: 56193 - protein, 290 aa, Enterobacter cloacae
MSIISTKYLLQDAQAKGYAVPAFNIHNAETIQAILEACSEMRSPVILAGTPGTFKHIALEEIYALCSAYSHTYDMPLALHLDHHESLDDIRRKVNAGVRTRMIDGSHYPFEQNVKLVKSVVDFCHLNDCSVEAELGRLGGMEDDMSVDAESAFLTDPQEAKRFVELTGVDSLAVAIGTAHGLYTKRPKIDFQRLAGIREVVTVQLVLHGASDVPDEFVRRTIELGVCKVNVATELKIAFSDAVKAWFAENPQGNDPRFYMRVGMDAMKEVVRSKIAVCGSANRLLLPAEA

SEQ ID NO: 56194 - protein, 287 aa, Enterobacter cloacae
MKQHETADNSQGQLYIVPTPIGNLSDITQRALTVLQAVDLIAAEDTRHTGLLLQHFAINARLFALHDHNEQQKAETLVAKLKEGQNIALVSDAGTPLINDPGYHLVRTCREAGIRVVPLPGPCAAIAALSAAGLPSDRFCYEGFLPAKSKGRRDVLKGLEAEPRTLIFYESTHRLLESLEDMVTVWGEARYVVLARELTKTWETIHGASVGELLAWVKEDENRRKGEMVLIVEGHKAQEDALPADALRTLALLQAELPLKKDAALAAEIHGVKKNALYKHALEQQGE

SEQ ID NO: 56195 - protein, 712 aa, Enterobacter cloacae
MLNPIVRKFQYGQHTVTLETGMMARQATAAVMVSMDDTAVFVTVVGQKKAKPGQDFFPLTVNYQERTYAAGKIPGGFFRREGRPSEGETLIARLIDRPVRPLFPEGFVNEVQVIATVVSVNPQVNPDIVAMIGASAALSLSGIPFNGPIGAARVGYINDQYVLNPTQEELKESKLDLVVAGTEAAVLMVESEAELLSEDQMLGAVVFGHDQQQIVIQNINDLVKEAGKPRWDWQPEAANDALNARVAALAESRLSDAYRITDKQERYAQVDVIKSETIATLVAEDEALDANELSDILHAIEKNVVRSRVLAGEPRIDGREKDMIRGLDVRTGVLPRTHGSALFTRGETQALVTATLGTARDAQIIDELMGERTDSFLFHYNFPPYSVGETGMVGSPKRREIGHGRLAKRGVLAVMPEADKFPYTVRVVSEITESNGSSSMASVCGASLALMDAGVPIKAAVAGIAMGLVKEGDNFVVLSDILGDEDHLGDMDFKVAGSREGISALQMDIKIEGITKEIMQVALNQAKGARLHILGVMEQAINAPRGDISQFAPRIHTIKINPDKIKDVIGKGGSVIRALTEETGTTIEIEDDGTVKIAATDGEKAKFAIRRIEEITAEIEVGRVYAGKVTRIVDFGAFVAIGGGKEGLVHISQIADKRVEKVTDYLQMGQEVPVKVLEVDRQGRIRLSIKEATEQSQPAAAPEAQAAEQQGE

SEQ ID NO: 56196 - protein, 89 aa, Enterobacter cloacae
MSLSVEAKAKIVSEFGRGTNDSGSTEVQVALLTAQINHLQGHFAEHKKDHHSRRGLLRMVSQRRKLLDYLKRKDVARYTALIERLGLRR

SEQ ID NO: 56197 - protein, 631 aa, Enterobacter cloacae
MAEFETTFADLGLKAPILEALNDLGYEKPSPIQAECIPHLLSGRDVLGMAQTGSGKTAAFSLPLLNNIDPDLRAPQILVLAPTRELAVQVAEAMTEFSKHMRGVNVVALYGGQRYDVQLRALRQGPQIVVGTPGRLLDHLKRGTLDLSKLSGLVLDEADEMLRMGFIEDVETIMAQIPDGHQTALFSATMPEAIRRITKRFMKDPQEVRIQSSVTTRPDISQSYWSVYGMRKNEALVRFLEAEDFDAAIIFVRTKNATLEVAEALERSGYNSAALNGDMNQALREQTLERLKDGRLDILIATDVAARGLDVERISLVVNYDIPMDSESYVHRIGRTGRAGRAGRALLFVENRERRLLRNIERTMKLTIPEADLPNAELLGKRRLEKFAAKVQQQLESSDLDQYRALLSQIQPVAEGEELDMETLAAALLKMAQGERSLIVPPDAPMRPKREFRDRDDRFERRGDRNDRGPRGDRPERGGEDRPRRERRDAGDMELYRIEVGRDDGVEVRHIVGAIANEGDISSRYIGNIKLFASHSTIELPKGMPGEVLQHFTRTRILNKPMNMQLMGDAQPRPDRGGERRGGGRSFGGERREGGRSEGRGGEGRRFSGERRENRGPRREEGTSRRRFGDA

SEQ ID NO: 56198 - protein, 209 aa, Enterobacter cloacae
MYKPDFPPVPYRLGLYPVVDSVEWIERLLETGVRTIQLRIKDKRDDEVEADVVAAIALGRRHNARLFINDYWRLAVKHQAYGVHLGQEDLETTDLSAIREAGLRLGVSTHDDMEIDVALAARPSYIALGHVFPTQTKQMPSAPQGLTQLTSHVKRLADYPTVAIGGISLERAPAVLETGVGSIAVVSAITQAADWRLATEQLLQLAGAG

SEQ ID NO: 56199 - protein, 279 aa, Enterobacter cloacae
ASSGNISRSMTATRSCCFRLSQGAEMLRIADKVFGSHLFTGTGKFASPQLMVDAIRESGSQLVTLALKRVDLRHHSDAILAPLLEAGVTLLPNTSGAKTAEEAIFAAHLAREALGTRWLKLEIHPDARWLLPDPIETLKAAEKLVQQGFTVLPYCGADPVLCKRLEEVGCAAVMPLGAPIGSNQGLETRAMLEIIIEQATVPVVVDAGIGVPSHAAQALEMGADAVLVNTAIAVADDPVMMARAFRMAVEAGLLARESGPGSRSFQAQATSPLTGFLEA

SEQ ID NO: 56200 - protein, 105 aa, Enterobacter cloacae
MEDLETTIMELLVNAGAARSAALTALQMARKGDFDEAEKAMEESREYVKHAHTIQTQLIGLDEGTGKLPVNLITVHSQDHLMNAMVIQDLAGDMIELYRRIPLVN

SEQ ID NO: 56201 - protein, 1407 aa, Enterobacter cloacae
MKDLLKFLKAQTKTEEFDAIKIALASPDMIRSWSFGEVKKPETINYRTFKPERDGLFCARIFGPVKDYECLCGKYKRLKHRGVICEKCGVEVTQTKVRRERMGHIELASPTAHIWFLKSLPSRIGLLLDMPLRDIERVLYFESYVVIEGGMTNLERHQILTEEQYLDALEEFGDEFDAKMGAEAIQALLKSMDLEQECEQLREELNETNSETKRKKLTKRIKLLEAFVQSGNKPEWMILTVLPVLPPDLRPLVPLDGGRFATSDLNDLYRRVINRNNRLKRLLDLAAPDIIVRNEKRMLQEAVDALLDNGRRGRAITGSNKRPLKSLADMIKGKQGRFRQNLLGKRVDYSGRSVITVGPYLRLHQCGLPKKMALELFKPFIYGKLELRGLATTIKAAKKMVEREEAVVWDILDEVIREHPVLLNRAPTLHRLGIQAFEPVLIEGKAIQLHPLVCAAYNADFDGDQMAVHVPLTLEAQLEARALMMSTNNILSPANGEPIIVPSQDVVLGLYYMTRDCVNAKGEGMVLTGPKEAERIYRAGLASLHARVKVRITEYEKDENGEFVAKTSLKDTTVGRAILWMIVPKGLPFSIVNQALGKKAISKMLNTCYRILGLKPTVIFADQTMYTGFAYAARSGASVGIDDMVIPEKKHEIISEAEAEVAEIQEQFQSGLVTAGERYNKVIDIWAAANDRVSKAMMDNLQTETVINRDGVEEQQVSFNSIYMMADSGARGSAAQIRQLAGMRGLMAKPDGSIIETPITANFREGLNVLQYFISTHGARKGLADTALKTANSGYLTRRLVDVAQDLVVTEDDCGTLEGITMTPVIEGGDVKEPLRDRVLGRVTAEDILKPGTADILVPRNTLLHEHWCDLLEANSVDSVKVRSVVSCDTDFGVCAHCYGRDLARGHIINKGEAIGVIAAQSIGEPGTQLTMRTFHIGGAASRAAAESSIQVKNKGSIKLSNAKSVVNSAGKLVVTSRNTELKLIDEFGRTKESYKVPYGAVMAKGDGEQVAGGETVANWDPHTMPVITEVSGFIRFTDMIDGQTITRQTDELTGLSSLVVLDSAERTTGGKDLRPALKIVDAQGNDVLIPGTDMPAQYFLPGKAIVQLEDGIQIGAGDALARIPQESSGTKDITGGLPRVADLFEARRPKEPAILAEISGIISFGKETKGKRRLVITPVDGSEPYEEMIPKWRQLNVFEGERVERGDVVSDGPEAPHDILRLRGVHAVTRYITNEVQDVYRLQGVKINDKHIEVIVRQMLRKATIENAGSSEFLEGEQVEYSRVKIANRELEANGKIGATFSRDLLGITKASLATESFISAASFQETTRVLTEAAVAGKRDELRGLKENVIVGRLIPAGTGYAYHQDRMRRRAAGELPAAPQVTAEDASASLAELLNAGLGGSDNE

SEQ ID NO: 56202 - protein, 476 aa, Enterobacter cloacae
MKVTLPEFERAGVMVVGDVMLDRYWYGPTSRISPEAPVPVVKVDTIEERPGGAANVAMNIASLGAQSRLVGLTGIDDAARALSKSLADVNVKCDFVSVPTHPTITKLRVLSRNQQLIRLDFEEGFEGVDPEPLHERINQALGNIGALVLSDYAKGALASVKTMIQLARKANVPVLIDPKGTDFERYRGATLLTPNLSEFEAVAGKCKTEEELVERGMKIIADFELSALLVTRSEQGMTLLQPGKAPLHMPTQAQEVYDVTGAGDTVIGVLAATLAAGNSLEEACYFANAAAGVVVGKLGTSTVSPIELENAVRGRADTGFGVMTEDELKVAVAAARKRGEKVVMTNGVFDILHAGHVSYLANARKLGDRLIVAVNSDASTKRLKGETRPVNPLEQRMIVLGALEAVDWVVSFEEDTPQRLIAGILPDLLVKGGDYKPEQIAGSEEVWANGGEVMVLNFEDGCSTTNIIKKIQKDSQ

SEQ ID NO: 56203 - protein, 217 aa, Enterobacter cloacae
MNQTLLSSFGTSTQRVEHALDALREGRGVMVLDDENRENEGDMIFAAENMTVEQMALTIRHGSGIVCLCINEDRRKQLDLPMMVENNTSAFGTGFTVTIEAAHGVTTGVSAADRLTTVRAAIADGAKPSDLHRPGHVFPLRAQAGGVLTRGGHTEATIDLVTLAGFKPAGVLCELTNDDGTMARAPECITFARLHNMPVVTIEDLVEYRQAHERKAS

SEQ ID NO: 56204 - protein, 140 aa, Enterobacter cloacae
MKRYTPDFPEMMRLCETNFAQLRRLLPRNDAPGETVSYQVSNAQYRLTITESTRYTTLVEIEQTAPSISYWSLPSMTVRLYHDAMVAEVCSSQQIFRFKARYDYPNKKLHQRDEKHQINQFLADWLRYCLAHGAMAIPVC

SEQ ID NO: 56205 - protein, 275 aa, Enterobacter cloacae
MESLLNLTVAGGAPVRILQITDTHLFAEKHETLLGVNTWESYQAVLSAIHAENRACDLIVATGDLAQDQSSAAYQHFAEGIASFSVPCVWLPGNHDFQPAMYSSLQDAGISPAKCVFAGEQWQILLLDSQVFGVPHGELSEFQLDWLETKLAAEPERHTLLLLHHHPLPAGCSWLDQHSLRNSAALDRVLAKFPRVKNLLCGHIHQEQDLDWNGRRMLATPSTCVQFKPHCANFTLDTIAPGWRWLELHADGTLTTEVCRLTGAKFRPDTASEGY

SEQ ID NO: 56206 - protein, 91 aa, Enterobacter cloacae; identical to SEQ ID NO: 55475

SEQ ID NO: 56207 - protein, 125 aa, Enterobacter cloacae
MDEQWGYVGAKSRQRWLFYAYDRIRRTVVAHVFGERTLSTLERLLGLLSAFEVVVWMTDGWPLYESRLKGELHVISKRYTQRIERHNLNLRQHLARLGRKSLSFSKSVELHDKVIGHYLNIKHYQ

SEQ ID NO: 56208 - protein, 330 aa, Enterobacter cloacae
MFQQKKDWETRENAFAAFSMGPLTDFWRQREEDEFTGVGGIPVRFVRFRNEKNDRVIVVCPGRIESYVKYAELAYDLVHMGFDVLIIDHRGQGLSGRMLPDTHRGHVDRFSDYVDDFAAFWQQDVQPGPWRKRYILAHSMGGAISTLFLQRYAHECDAIALTAPMYGIVIRFPDWMVRHLLDWAEGHQRIREGYAIGTGRWRALPFAINVLTHSRQRYRRNLRFYADEPRLRVGGPTWHWVREGILAGEQVLAGIGDDDTPTLLIQAEEERVVDNRMHDRYCELRAAAGHPCEGGKPLVINGAFHEILFEKDAMRSVALNAIVEFFNRHN

SEQ ID NO: 56209 - protein, 271 aa, Enterobacter cloacae
QRLKSLMYQVVASDLDGTLLSPDHTLSPYAKETLKLLTARGVNFVFATGRHHVDVGQIRDNLEIKSYMITSNGARVHDTDGNLIFTHNLDRDIAADLFGVVHDNPAIVTNVYRDDDWFMNRHRPDEMRFFKEAVFNYSLYEPGLLEPEGISKVFFTCDSHEELLPLEQAINARWGDRVNVSFSTLTCLEVMAGGVSKGHALEAVAKRLGFGLKDCIAFGDGMNDAEMLSMAGKGCIMQNAHQRLKDLHPELEVIGSNADNAVPKYLRKLFL

SEQ ID NO: 56210 - protein, 609 aa, Enterobacter cloacae
MAQAEVLNQESLAKQVLHETFGYQQFRPGQETIIETVLEGRDCLVVMPTGGGKSLCYQVPALVLNGLTVVVSPLISLMKDQVDQLLANGVAAACLNSTQTREQQQEVMAGCRTGQIRLMYIAPERLMLDNFLDHLAHWNPVLLAVDEAHCISQWGHDFRPEYAALGQLRQRFPELPFMALTATADDTTRLDIVRLLGLNDPYIQVSSFDRPNIRYMLMEKFKPLDQLLRYVQEQRGKSGIIYCNSRAKVEDTAARLQNRGFSAAAYHAGLENHIRADVQEKFQRDDLQIVVATVAFGMGINKPNVRFVVHFDIPRNIESYYQETGRAGRDGLPAEAMLFYDPADMAWLRRCLEEKPQGQLQDIERHKLNAMGAFAEAQTCRRLVLLNYFGEGRQEPCGNCDICLDPPKQYDGLMDARKALSTIYRVNQRFGMGYVVEVLRGANNQRIRDMGHDKLPVYGIGKEQSHEHWVSIIRQLIHLGFATQNIAQHSALQLTEAARPVLRGDVELKLAVPRVIALKPRVMQKSYGGNYDRKLFAKLRKLRKAIADEENIPPYVVFNDATLIEMAEQMPLSASEMLSVNGVGTRKLERFGKEFMALIRSHADGDDEE

SEQ ID NO: 56211 - protein, 206 aa, Enterobacter cloacae
MTFEWWFAYLLTSIILSLSPGSGAINTMTTSINHGYRGAAASIAGLQTGLGIHIVLVGIGLGTLFSRSVLAFEVLKWAGAAYLIWLGIQQWRAAGSINLNTLALTQNRGHLFKRAVFVNLTNPKSIVFLAALFPQFIVPHQPQVMQYVVLGATTIIVDIIVMIGYATLAQRIAAWIKGPKQMKALNKVFGSLFMLVGALLASARHA

SEQ ID NO: 56212 - protein, 251 aa, Enterobacter cloacae
MADDSQDTTHFGFQTVAKAQKADMVAHVFHSVAAKYDVMNDLMSFGIHRLWKRFTIDCSGVRRGQTVLDLAGGTGDLTAKFSRLVGETGRVVLADINDSMLKMGREKLRNIGVVGNVEYVQANAEALPFPDNTFDCITISFGLRNVTDKEKALRSMFRVLKPGGRLLVLEFSKPIIEPLSKAYDAYSFHVLPRIGELVANDAESYRYLAESIRMHPDQDTLKAMMQDAEFENVEYFNLTAGVVALHRGYKF

SEQ ID NO: 56213 - protein, 86 aa, Enterobacter cloacae
MKPDIHPAYRTVVFHDTSANEYFKVGSTIRTDREIELDGETYPYITIEVSSKSHPFYTGKQKTFSTDGSAARFRKRFGGFLNAKRG

SEQ ID NO: 56214 - protein, 46 aa, Enterobacter cloacae
MQVLNSLRSAKQRHPDCQIVKRKGRLYVICKSNPRFKAVQGRKKRR

SEQ ID NO: 56215 - protein, 624 aa, Enterobacter cloacae
MKGQETRGFQSEVKQLLHLMIHSLYSNKEIFLRELISNASDAADKLRFRALSNPDLYEGDGELRVRVSFNKENRTLTIADNGIGMNRDEVIDHLGTIAKSGTKAFLESMGSDQAKDSQLIGQFGVGFYSAFIVADKVTVRTRAAGDSAENGVLWESKGEGEYTVDDITKADRGTEITLHLREGEDDFLNDWRVRSIISKYSDHIALPVEIEKQEEKDGETVVSWEKINKAQALWTRNKSEIKDDEYNEFYKHIAHDFTDPLTWSHNRVEGKQEYTSLLYIPAQAPWDMWNRDHKHGLKLYVQRVFIMDDAEQFMPNYLRFVRGLIDSNDLPLNVSREILQDSTVTRNLRNALTKRALQMLEKLAKDDAEKYQTFWKQFGLVLKEGPAEDTANVETIAKLLRFASTHTDSSAQTVSLEEYVSRMKEGQEKIYYITADSYAAAKSSPHLELLRKKGIEVLLLSDRIDEWMMNYLTEFDGKAFQSVAKADESIDKLADEVDESAKEAEKALEPFVERVKTLLGERVKEVRFTHRLTDTPAIVTTDADEMSTQMAKLFAAAGQAVPEVKYIFELNPDHPLVKRAADTQDDARFAEWVELLLDQSLLAERGTLEDPNLFIKRVNALLLA

SEQ ID NO: 56216 - protein, 183 aa, Enterobacter cloacae
MSLEKQKMIAGEHYRPGDETLRADRLRARHLVYRYNHTAPDEKTERQNILAELLGQSAGAYIEPSFRCDYGYNIYLGKNFYANFDCVMLDVCPVHIGDNCMLAPGVHIYTATHPLNAEERNSGVEFGKPVNIGNNVWIGGRAVINPGVTIGDNVVVASGAVVTKDFPANVVVGGNPAKIIKTL

SEQ ID NO: 56217 - protein, 1090 aa, Enterobacter cloacae
PVFALLFAMLFFFATAPLTWARADNSNDIPSRGDVQSQLDTLNKQKDLSPQEKLVQQDLTETLETLDKIERIKAETVQLRQKVAQAPENMRKATEALNALSDVDNDDETRKTLSTLSLRQLESRVAQLLDDLQTAQSDLATYNSQLVSLQTQPERVQNAMYAASQQLQQIRNRLNGTTVGEGTLRPTQQTLLLVQQTLLNAQIEQQRKSLEGNTVLQDTLQKQRDYVTANINRLEHQLQLLQEAVNSKRLTLTEKTAQEAVSPDETARIQANPLVKQELEANHQLSQRLILATENGNSLVQQNIKVKNWLDRALQAERNIKEQIAVLKGSLLLSRILYQQQQTLPSADELEDMTNRIADLRLEQFDVNQQRDALFQSDAFVAKIEEGHSSDVNPEVHDALLQVVDMRRELLDQLNKQLGNQLMMAINLQINQQQLVSVSKSLQEILTQQIFWVNSNKPMDWDWVKSFPETLKTQIKSMKITVNWEKAWPAVMIAFLAGLPLLLIAGLIRWRLGWLKKYQAKLASEVGQLRNDSQLHTPKAILIDLIRALPVCLIILAVGLILLTMQLNVSDLLWAFSKKLALFWLVFGVCWKVLEKDGVAVRHFNMPAQLTTHWRRQIVRIALALLPLHFWSVVSELSPLHLMDDVLGQLVILLNLLLIAILMWPMCRDSWRDKESHNIRLATVTVLAIIALALMVLTATGYFYTHVRLSGRWIETVYLVIVWNLLYQTVLRGLSVAARRIAYRRAIARRQHQVKEGAEGAEPQEEPTIALEQVNQQTLRITMLVMIALFAVMFWAIWSDLITVFAYLDSITLWQYNGTEAGAAVMKSVTMGSLLFALVSSVVAWALIRNLPGLLEVLLLSRLNLRQGASYAITTILNYVIIIVGAMTVFGSLGVSWDKLQWLAAALSVGLGFGLQEIFGNFVSGLIILFERPVRIGDTVTIGTFSGTVSKIRIRATTITDFDRKEVIIPNKAFVTERLINWSLSDTVTRVVIRLGVAYGSDLEKVKEVLLKAASEHPKVMHDPAPAVFFTTFGPSTLDHELRLYVRELRDRSYTVDELNRSIDRLCRENDINIAFNQLEVHLRNEKGDE

SEQ ID NO: 56218 - protein, 214 aa, Enterobacter cloacae
MRIILLGAPGAGKGTQAQFIMEKYGIPQISTGDMLRAAVKSGSELGKQAKDIMDAGKLVTDELVIALVKERIAQEDCRNGFLLDGFPRTIPQADAMKEAGINVDYVLEFDVPDELIVDRIVGRRVHAASGRVYHIKFNPPKVEGKDDVTGEELTTRKDDQEETVRKRLVEYHQMTAPLIGYYTKEAQAGNTKYAKVDGTKAVADVRAELEKILG

SEQ ID NO: 56219 - protein, 175 aa, Enterobacter cloacae
MKTALLLERLQNQLIALREQATPLMGHATLKPRFDRQLFRTRSTVIQDYLAETQTNLDELRHAVESEQQEQVAWLAEHLTEQITALHREIAAWPLRAWDSASPGLGKWQRKRLENQEFERRLFEMKRERETRLNNSETLEEQQLLMREICALEGRIVRCRQALDEIERVIERLTR

SEQ ID NO: 56220 - protein, 434 aa, Enterobacter cloacae
MKFPGKRKSKHYFPVDARDPLLQQIQPENETSAAWVVGIDQTLVDIEAKVDDAFVARYGLSAGHSLVIEDDVAEALYQELVRENLITHQFAGGTIGNTMHNYSVLADDRSVLLGVMCSNIEIGGYAYRYLCNTSSRTDLNYLQGVDGPIGRCFTLISDSGERTFAISPGHMNKLRAESIPEEVIAGASALVLTSYLVRCKPGEPMPEATMKAIEYAKKYNVPVVLTLGTKFVIADNPEWWQAFLKEHVSILAMNEEEAEALTGESDPLLASDKALDWVDLVLCTAGPVGLYMAGFTEEESKRKTQHPLLPGAIAEFNQYEFSRGMRYKDCVNPLRIYSHIAPYMGGPEKIMNTNGAGDGALAALLHDITANAYHKTNVPNSSKHKFSWLTYSSLAQVCKYANRVSYQVLNQHSPRLTRGLPEREDSLEEAYWDR

SEQ ID NO: 56221 - protein, 1048 aa, Enterobacter cloacae
MPNFFIDRPIFAWVIAIIIMLAGGLAILKLPVAQYPTIAPPAVTISATYPGADAKTVQDTVTQVIEQNMNGIDNLMYMSSNSDSTGTVQITLTFQSGTDADIAQVQVQNKLQLAMPLLPQEVQQQGVSVEKSSSSFLMVVGVINTNGTMTQEDISDYVGANMKDAISRTSGVGDVQLFGSQYAMRIWMDPNKLNNFQLTPVDVISAIKAQNAQVAAGQLGGTPPVKGQQLNASIIAQTRLTSADEFSKILLKVNQDGSQVRLRDVAKVELGGENYDIIAKYNGKPASGLGIKLATGANALDTATAIRAELKRMEPFFPSGLKIVYPYDTTPFVKISIHEVVKTLIEAIILVFLVMYLFLQNFRATLIPTIAVPVVLLGTFAILSIFGYSINTLTMFGMVLAIGLLVDDAIVVVENVERVMAEEGLPPKEATRKSMGQIQGALVGIAMVLSAVFIPMAFFGGSTGAIYRQFSITIVSAMALSVLVALILTPALCATMLKPIQKGGHGEHKGFFGWFNRMFDKSTHHYTDSVGNILRSTGRYLLLYIIIVVGMAYLFVRLPSSFLPDEDQGVFLSMAQLPAGASQERTQKVLDEMTDYYLTKEKANVESVFAVNGFGFAGRGQNTGIAFVSLKDWSERPGKENKVEAITGRAMGTFSQIKDAMVFAFNLPAIVELGTATGFDFQLIDQGGLGHEKLTQARNQLFGEVAKHPDLLVGVRPNGLEDTPQYKIDIDQEKAQALGVSISDINTTLGAAWGGSYVNDFIDRGRVKKVYVMSEAQYRMLPNDINNWYVRGSNGQMVPFSAFSTSRWEYGSPRLERYNGLPSMEILGQAAPGRSTGEAMNLMEELASKLPAGIGYDWTGMSYQERLSGNQAPALYAISLIVVFLCLAALYESWSIPFSVMLVVPLGVIGALLAATFRGLTNDVYFQVGLLTTIGLSAKNAILIVEFAKDLMEKEGKGLIEATLEAVRMRLRPILMTSLAFILGVLPLVISSGAGSGAQNAVGTGVMGGMITATVLAIFFVPVFFVVVRRRFSRKNEDIEHSHSVEPH

SEQ ID NO: 56222 - protein, 642 aa, Enterobacter cloacae
MSYQVLARKWRPQTFADVVGQEHVLTALANGLSLGRIHHAYLFSGTRGVGKTSIARLLAKGLNCETGITATPCGVCDNCREIEQGRFVDLIEIDAASRTKVEDTRDLLDNVQYAPARGRFKVYLIDEVHMLSRHSFNALLKTLEEPPAHVKFLLATTDPQKLPVTILSRCLQFHLKALDVEQIRAQLEHILDEEKIVHEPRALQLLARAADGSLRDALSLTDQAIASGDGKLSTEAVSTMLGTLDDDQALSLIEAMIAANGERVMSQVNAAAARGIEWEGLLVEMLSLLHRVAMLQLSPSAIGADMAAIEQRMRELARTVPPADVQLYYQTLLIGRKELPFAPDPRMGVEMTLLRALAFHPRMPLPEPEAPRQSFAPVAPTAVMSPQQVPPQPTPPPQQNVPLSDATSSVLAARSQLQRAQGVTKPKKSEPAAPGRARPVNNAALERLASVTERVQSRPAPSALEQKAPVKEEAYRWKATTITETVKEEVATPKALKKALEHEKTPELSAKLAEESIARDAWAAEVSKLQLPKLVEQVALNAWKEQDGNQVRLHLRPGQRHLNSPGAQKALAEALTALQGAPVELTIIEDDNPAVKTPLEWRQAIYEEKLAQAREAIIADNNIQTLRRFFDADLDEESIRPI

SEQ ID NO: 56223 - protein, 110 aa, Enterobacter cloacae
MFGGKGGLGGLMKQAQQMQEKMQKMQEEIAQLEVTGESGAGLVKVTINGAHNCRRVEIDPSLLEDDKEMLEDLVAAAFNDAARRIDETQKEKMASVSSGMQLPPGFKMPF

SEQ ID NO: 56224 - protein, 201 aa, Enterobacter cloacae
MQTSPLLTQLMEALRCLPGVGPKSAQRMAFTLLQRDRSGGMRLAQALTRAMSEIGHCADCRTFTEQEVCNICTNPRRQENGQICVVESPADIYAIEQTGQFSGRYFVLMGHLSPLDGIGPDDIGLDRLEQRLESETIKEVILATNPTVEGEATANYIAELCSQYGVDASRIAHGVPVGGELEMVDGTTLSHSLAGRHKIIF

SEQ ID NO: 56225 - protein, 442 aa, Enterobacter cloacae
MSHYKPYPAYKDSGVEWIGLVPEHWKVAQIKRISALNPKKSTLSKEKDSLCTFLPMEKLRTNAITLDETRPIHEVYDGYSYFCDDDILIAKVTPCFENGNIAVANGLVNGIGFGSTEINVLRVNGKGHNRFLYYRLQEEQFRTIAKSEMRGTGGLKRVPTELFESFTFGLPDTDEQVTIAATLDRETARIDALVEKKTRFIELLKEKRQALITHAVTKGLDRNAKMKDSGIEWIGQVPEEWLNRKVFHAFQAIGSGTTPPAKEHEWYQGGTIPWITTSELRENTVVKTKKCVTSDAMQKFSALKIFPAGSLAIAMYGATIGRLGFLGIPATTNQACCVLSGERDLNIQFLYYWLMAFRADIVAFFSEGGGQPNINQEVIASLRVPSPAPDEQATIVATLDRETARIDALISKAEQSITLLKERRAAFITAAVTGQIDLRGKQ

SEQ ID NO: 56226 - protein, 675 aa, Enterobacter cloacae
MNEFTGSAASQADFIWKNAEDLWGDFKHTDFGKIILPFTLLRRLECALEPTREAVREAHDAFKDADVELDTILRSTAEYPFYNTSEYSLGTLGSTKTRRNLEDYIALFSDNARAIFEEFEFGNTVIRLEKAGLLYKICQNFAKIDLHPDVVPDRVMSNIYEHLIRRFGAEVNEGAEDFMTPRDIVHLATALLLDPDDALFEASPGLIRTLYDPTCGTGGFLTDAMNHVGDYGNRDKIPPVLVPHGQELEPETHAVCVAGMLIRRLESDPGRDLSKNIRQGSTLSNDQFAGERFHYCLSNPPFGKKWEKDKTAVEAEHKKGELGRFGPGLPKISDGSMLFLMHLASKLELPINGGGRAAIVLSGSPLFNGGAASGESEIRRWLLEDDLIEAIVALPTDLFFRTNIATYLWILSNKKPQERKGKVQLINATDLWTAIRNEGNKRRIVSDEQRRQILDIYAAGETGALSRMLDYRTFGYRRIKVLRPLRMTLELDKVGMERLEAEAAWEKLSDAHQTFWRKALKPLIGQTQPYSWAETFVRNSIKSDEAKQLKVKSNKTLITALINAFGHKDPKAEPVTDSNGELVPDTDLTDYENVPYLEDIDDYFAREVLPHVPDAWLDESFTDARDGQLGRVGYEINFNRFFYQYQPPRKLHDIDEDLKQVEAEIAALLAEVASE

SEQ ID NO: 56227 - protein, 452 aa, Enterobacter cloacae
LSKCLVGIYQKDSGSILFQVKEIDSHSAKEALENCTSMVHFGLNLVLQRSVMDNMWLGRYPTKGVFVDQDKMYRDTKAIFDELDIDIDPRARVGTLSVSQMQMIEIAKAFSYDAKIVIMDEPTSSLTEKEVNHLFTIIRKLKDRGCGIVYISHKMEEIFQLCDEITILRDGQWIATQPLEGLDMDKIIAMMVGRSLNQRFPDKENKPGEVILEVRNLTSLRQPSIRDVSFDLHKGEILGIAGLVGAKRTDIVETLFGIREKAEGTITLHGKKINNHNANEAINNGFALVTEERRSTGIYAYLDINFNSLISNIRNYKNKVGLLDNSRMKSDTQWVIDSMRVKTPGHRTQIGSLSGGNQQKVIIGRWLLTQPEILMLDEPTRGIDVGAKFEIYQLIAELAKKNKGIIIISSEMPELLGITDRILVMSNGLVAGIVDTKTTTQNEILRLASLHL

SEQ ID NO: 56228 - protein, 166 aa, Enterobacter cloacae
MHENQQPQTEAFELSEAERAAIEHEMHHYEDPRAASIEALKIVQKQRGWVPDGAIYEIAKVLGIPASDVEGVATFYSQIFRQPVGRHVIRYCDSVVCHITGYQGIQAAIEKKLNIKPGQTTFDGRFTLLPTCCLGNCDKGPTMMIDEDTHSHLTPEAIPDLLEQYK

SEQ ID NO: 56229 - protein, 445 aa, Enterobacter cloacae
MKTVIRTAETHPLTWRLRDDKQPVWLDEYQSKNGYAGARKALGGMAPDDIVNAVKDSGLKGRGGAGFSTGLKWSLMPKDESMNIRYLLCNADEMEPGTYKDRLLMEQLPHLLVEGMLISAFALKAYRGYIFLRGEYIEAAENLRRAIAEATEAGLLGKNILGTGFDFELFVHTGAGRYICGEETALINSLEGRRANPRSKPPFPASSGVWGKPTCVNNVETLCNVPAILANGVEWYQGISSSKDAGTKLMGFSGRVKNPGVWELPFGTTAREILEDYAGGMRDGLKFKAWQPGGAGTDFLTEAHLDLPMEFESIGKAGSRLGTALAMAVDHEIGMVSLVRNLEEFFARESCGWCTPCRDGLPWSVKILRAIERGEGQPGDIETLEQLCRFLGPGKTFCAHAPGAVEPLQSAIKYFRDEFEAGIKQPFSNTHAINGIQPNLLKARW

SEQ ID NO: 56230 - protein, 613 aa, Enterobacter cloacae
MNMLALTIIFPLIGFVLLAFSRGRWSENLSATVGIGSIGLAALVTAYAGIDFFNNGRQPFSVPLWTWMSVGDFNIGFNLVLDGLSLTMLSVVTGVGFLIHMFASWYMRGEEGYSRFFAYTNLFIASMVVLVLADNLLLMYLGWEGVGLCSYLLIGFYYTDPKNGAAAMKAFVVTRVGDVFLAFALFILYNELGTLNFREMVELAPAHFAAGNNMLWWATLMLLGGAVGKSAQLPLQTWLADAMAGPTPVSALIHAATMVTAGVYLIARTHGLFLMTPEILHLVGIVGAVTLVLAGFAALVQTDIKRVLAYSTMSQIGYMFLALGVQAWDAAIFHLMTHAFFKALLFLSSGSVILACHHEQNIFKMGGLRKSIPLVYVCFLVGGAALAALPLITAGFFSKDEILAGAMANGHINLMVAGLVGAFMTSLYTFRMIFIVFHGKEQIHAHAGKGITHHLPLIVLLVLSTFVGAMIVPPLQGVLPDTTELEHGRVLTLEITSGVVAIAGILIAAWLWLGKRTLVTAVANSAPGRLLGTWWYNAWGFDWLYDMIFVKPFLGIAWLLKRDPLNSLMNIPAILSRFAGKGLLYSENGYLRWYVASMSIGAVVVLALLMVLR

SEQ ID NO: 56231 - protein, 147 aa, Enterobacter cloacae
MKNATFYLLDNDTHQDGLSAVEQLVCEIAAERWRAGKRVLIACEDEQQAIRLDEALWARPPESFVPHNLSGEGPRGGAPVEIAWPQKRNSSARDILISLRIDFADFATAFTEVVDFVPYEESLKQLARERYKAYRLAGFNLNTATWK

SEQ ID NO: 56232 - protein, 284 aa, Enterobacter cloacae
MVLMIVSGRSGSGKSVALRALEDMGFYCVDNLPVVLLPDLARTLAERQTSAAVSIDVRNMPESPEIFEQAMSNLPDAFSPQLLFLDADRNTLIRRYSDTRRLHPLSSKNLSLESAIDEESDLLEPLRSRADLIVDTSEMSVHELAEMLRTRLLGKRERELTMVFESFGFKHGIPIDADYVFDVRFLPNPHWDPKLRPMTGLDKPVAAFLDRHTEVHNFIYQTRSYLELWLPMLETNNRSYLTVAIGCTGGKHRSVYIAEQLADYFRSRGKNVQSRHRTLEKRKT

SEQ ID NO: 56233 - protein, 951 aa, Enterobacter cloacae
MEKTYNPRDIEQPLYEHWEQQGYFKPNGDESKESFCIMIPPPNVTGSLHMGHAFQQTIMDTMIRYQRMQGKNTLWQAGTDHAGIATQMVVERKIAAEEGKTRHDYGRDAFIDKIWQWKAESGGTITRQMRRLGNSVDWERERFTMDEGLSNAVKEVFVRLYKEDLIYRGKRLVNWDPKLRTAISDLEVENRESKGSMWHIRYPLADGAKTADGKDYLVVATTRPETLLGDTGVAVNPEDPRYKDLIGKFVVLPLVNRRIPIVGDEHADMEKGTGCVKITPAHDFNDYEVGRRHALPMINILTFDGDIRESAEVYDTKGNESDVYSSDIPAEFQKLERFAARKAIVAAVDALGLLEEIKPHDLTVPYGDRGGVVIEPMLTDQWYVRADVLAKPAVEAVENGSIQFVPKQYENMYFSWMRDIQDWCISRQLWWGHRIPAWYDNEGNVYVGRSEDEVRQENNLSADVALRQDEDVLDTWFSSALWTFSTLGWPENTDALRQFHPTSVMVSGFDIIFFWIARMIMMTMHFIKDEDGKPQVPFHTVYMTGLIRDDEGQKMSKSKGNVIDPLDMVDGISLEDLLEKRTGNMMQPQLAEKIRKRTEKQFPNGIESHGTDALRFTLAALASTGRDINWDMKRLEGYRNFCNKLWNASRFVLMNTEDQDCGFNGGEMTLSLADRWILAEFNQTVKAFREALDSYRFDIAAGILYEFTWNQFCDWYLELAKPVMNGGTEAELRGTRNTLITVLEGLLRLAHPVIPFITETIWQRVKVIAGINADTIMLQPFPEFDAAKVDEAASADTEWLKQAIVAVRNIRAEMNIAPGKPLELLLRGCSEAVVRRVTENNTFLKTMARLESITVLPADDKGPVSVTKIIDGAELLIPMAGLIDKDAELARLAKEVAKVDVEIGKIESKLANEGFVARAPEAVIAKERERLVAFADAKTKLIEQQAVIAAL

SEQ ID NO: 56234 - protein, 241 aa, Enterobacter cloacae
MRRKFAAGAGVKRFLLRIVLVLAVFWGGGLALFSIMPVPFSAVMVERQLSAWFSGDFGYVAHSDWVSMDEISPFMGLAVIAAEDQKFPEHWGFDVAAIEKALAHNERHENRVRGASTLSQQTAKNLFLWDGRSWVRKGLEAGLTLGMETVWSKKRILTVYLNVAEFGDGIFGVEAAAQRYFNKPASRLSMSEAALLAAVLPNPIRFKASAPSGYVRSRQAWIMRQMNQLGGEGFMQRNNLM

SEQ ID NO: 56235 - protein, 503 aa, Enterobacter cloacae
MEFSVKSGSPEKQRSACIVVGVFEPRRLSPIAEQLDKISDGYISALLRRGELEGKPGQTLLLHHVPNVLSERILLIGCGKERELDERQYKQVIQKTINTLNDTGSMEAVCFLTELHVKGRNTYWKVRQAVETAKESLYSFDQLKTNKSEPRRPLRKMVFNVPTRRELTSGERAIQHGLAIAAGIKAAKDLGNMPPNICNAAYLASQARQLADAYSKNVITRVIGEQQMKELGMHSYLAVGNGSQNESLMSVIEYKGNPSEDARPIVLVGKGLTFDSGGISIKPAEGMDEMKYDMCGAAAVYGVMRMVAELQLPINVIGVLAGCENMPGGRAYRPGDVLTTMSGQTVEVLNTDAEGRLVLCDVLTYVERFEPEAVIDVATLTGACVIALGHHITGLMSNHNPLAHELIGASEQAGDRAWRLPLGDEYQDQLESNFADMANIGGRPGGAITAGCFLARFTRKYNWAHLDIAGTAWRSGKAKGATGRPVALLSQFLLNRAGFNGDE

SEQ ID NO: 56236 - protein, 292 aa, Enterobacter cloacae
VKHLTEMVEQHKRGNSNGIYAVCSAHPLVLEAAIRYAHSHQTPLLIEATSNQVDQFGGYTGMTPADFHAFVCRLAESLGFPTSQLILGGDHLGPNRWQNLPAEQAMANADDLIKSYVSAGFKKIHLDCSMSCEDDPVPLTDAIVAGRAARLAKIAEVTCREQFGESDLVYVIGTEVPVPGGAHETLTELAVTTPDAARATLEAHRHAFEKEGLSDIWPRIIGLVVQPGVEFDHAHVCDYQPQKAVALSKMVEAYDTLVFEAHSTDYQTPQAVRQLVNDHFAILKVGPALTFA

SEQ ID NO: 56237 - protein, 256 aa, Enterobacter cloacae
MNNDIFPNKFKAALAAHQIQIGCWSALANPISTEVLGLAGFDWLVLDGEHAPNDISTFIPQLMALKGSPSAPVVRVPTNEPVIIKRLLDIGFYNFLIPFVETEEQAALAVASTRYPPEGIRGVSVSHRANMFGTVPDYFAQSNSNITILVQIESQQGVDNVDAIAATNGVDGIFVGPSDLAAAFGHLGNAGHPDVQRAIQHIFARAKAHGKPCGILAPVEADARRYLEWGATFVAVGSDLGVFRSATQKLADAFKK

SEQ ID NO: 56238 - protein, 764 aa, Enterobacter cloacae
MKVTIDTGVAPYSDAWAGFRGEEWKNAVNVRDFIQHNYTPYEGDEAFLAQATPATTALWQKVMVGIRQENATHAPVDFDTNIATTITAHGPGYIDQDLETIVGLQTDKPLKRALHPYGGINMIRSSFEAYGREMDPQFEYLFTDLRKTHNQGVFDVYSPEMMRCRKSGVLTGLPDGYGRGRIIGDYRRVALYGIAYLVRERELQFADLQGRLERGEDLEATIRLREELAEHRRALLQIQQMAANYGFDISRPAMNAQEAVQWVYFAYLAAVKSQNGGAMSLGRTASFLDIYIERDMQAGRLNEVQAQELIDHFIMKIRMVRFLRTPEFDTLFSGDPIWATEVIGGMGLDGRTLVTKNSFRYLHTLHTMGPAPEPNLTILWSEQLPIAFKKYAAQVSIVTSSLQYENDDLMRADFNSDDYAIACCVSPMVIGKQMQFFGARANLAKTLLYAINGGVDEKLKIQVGPKTEPLLDDELDYDTVMASLDHFMDWLAVQYISALNLIHYMHDKYSYEASLMALHDRDVYRTMACGIAGLSVAADSLSAIKYATVKPVRDHTGLAVDFVIEGDYPQYGNNDDRVDSIACDLVERFMKKIQALPTYRNAVPTQSILTITSNVVYGQKTGNTPDGRRGGTQFAPGANPMHGRDRKGAVASLTSVAKLPFTYAKDGISYTFSIVPQALGKDELVRKTNLVGLLDGYFHHEASIEGGQHLNVNVMNREMLLDAIAHPENYPNLTIRVSGYAVRFNALTREQQQDVISRTFTQSI

SEQ ID NO: 56239 - protein, 127 aa, Enterobacter cloacae
MVISPLALRRFAVAVITLIVLSAMLLAWSALSHQESTLAIRPVNQGASVPDGFSVWHHLDANGIRFKSITPQDDVLLIKFDSRAQSAAAKVVLDRTLPHGYIIAQQEDDSQPAAWLSLIRDTSHRFG

SEQ ID NO: 56240 - protein, 443 aa, Enterobacter cloacae
MSNTESIIVGQTKTSSWRKSDTTWTLGLFGTAIGAGVLFFPIRAGFGGLIPILLMLVLAFPIAFYCHRALARLCLSGSNVSGNITETVEEHFGKTGGVVITFLYFFAICPLLWIYGVTITNTFMTFWENQLQLPALNRGVVALFLLLLMAFVIWFGKDLMVKVMSFLVFPFIASLVLISLSLIPYWNSAVIDQVNLSDIAFTGHDGILVTVWLGISIMVFSFNFSPIVSSFVVSKREEYEPEFGKEFTEQKCSKIIGRASLLMVAVVMFFAFSCLFTLSPQNMADAKAQNIPVLSYLANHFASMSGTKSTFATVLEYGASIIALVAIFKSFFGHYLGTLEGLNGLILKFGYKGDKKKVSVGKLNTISMVFIMGSTWVVAYANPNILDLIEAMGAPIIASLLCLLPMYAIRKAPALAKYKGRTENIFVTAVGLLTILNIVYKLF

SEQ ID NO: 56241 - protein, 328 aa, Enterobacter cloacae
MGQLVDGVWQDVWYDTKSTGGRFKRSVSAFRNWLTADGAPGPSGEGGFAAEKDRYHLYVSLACPWAHRTLIVRKLKGLESLIPVSVVNPLMLENGWTFDSDFPAATGDDLYHHDFLYQLYLRADPHYTGRVTVPVLWDKKNQTIVSNESAEIIRMFNTAFDAHGARAGDYYPAELREKIDELNSWIYDNVNNGVYKAGFATSQEAYDEAVGKVFESLERLEQILGQHRYLTGDRLTEADIRLWTTLVRFDPVYVTHFKCDKHRISDYLNLHGFLRDIYQMPGIADTVDFDHIRTHYFRSHKTINPTGIISIGPWQNLEEPHGRDVRFG

SEQ ID NO: 56242 - protein, 392 aa, Enterobacter cloacae
MQYIKIHSLDNVAVALTDLAEGDVVTVDNQSVTLRQAIVRGHKFALIPIAKGENVVKYGLPIGHALADIAPGEYIHSHNIRTNLSDLDEYSYQPDLPAEERQAADREVQIYRRASGDVGIRNELWILPTVGCVNGIARQIQTRFLKETNDAEGTDGVHLFSHTYGCSQLGDDHINTRTMLQNMVRHPNAGAVLVIGLGCENNQVDAFRDTLGEFDPERVHFMVCQHQDDEVEAGVEQLHLLYEVMRHDRREPGKLSELKFGLECGGSDGLSGITANPMLGRFSDYVIANGGTTVLTEVPEMFGAERILMSHCRDEETFEKTVTMVNDFKQYFIAHNQPIYENPSPGNKAGGITTLEEKSLGCTQKAGAIQVVDVVRYGERLKTHGLNLLSAP

SEQ ID NO: 56243 - protein, 153 aa, Enterobacter cloacae
MDGCRDWCRSGCGTGCPSDASLIMEDPRHAQGPANNVLGIGQRILTTLVGIAETRVRLAVVELEEEKANLFQMLLMLGLTMLFAAFGLMSLMVLIIWAIDPQYRLNAMIATTVVLLVAALIGGIWTLRKARKSTFLRHTRQELANDRALLEDD

SEQ ID NO: 56244 - protein, 101 aa, Enterobacter cloacae
MSKDTTSEHLRAELKSLADTLEEVLNSSADKSKEEVSKLRSKAEQALKESRYRLGETGDALAKQTREAAARADEYVRDNPWTGVGIGAAVGVVLGVLLTRR

SEQ ID NO: 56245 - protein, 127 aa, Enterobacter cloacae
MEGSIMKFRMTLALALFSLSTASLAGGRGEEKEQDIQREIGYAEKHNNQHRVDGLKKALSEVKANCSDSKLRADHKKKIAEQKDEIAERRRDLQEAKEKGDAEKIAKREKKLKEAQDDLKALEARDY

SEQ ID NO: 56246 - protein, 215 aa, Enterobacter cloacae
MMVSACANASGGIALGATRVIYPAEAKQTSLAITNSNKQERYLINAWIENASGQKEKTFAVTPPLFVSEPNSENTLRIIYAGPALPADRESLFYMNVKAIPSVNKAKTENNNVLQLAILSRIKLFVRPNNLAMQPEEALSQLRFERAGSHLKVSNASPYYITLVNLKMGGQTLENLMVAPKSSAQQVLPAGASGTLSWQSVNDYGAITPARSVNL

SEQ ID NO: 56247 - protein, 834 aa, Enterobacter cloacae
SGAQAGWSESYFNPAFLSDDPPAWADLSRFEQGHQQAPGVYRVDIWRNDEFIGTQDVRFEQAENTPPVAGGLSACITRAMLDRFGVNVAAFPELAKVQGDTCVPLTTAIPGSETVFNFASQRLDVSLPKVALQNSARGYIPPEQWDEGIPAALVNYSFTGNRGSEDDSYYLNLQSGLNYGAWRLRNNGAWRYTQNNGQRHSEWQNIGTWAQRTVIPLKSELVLGDSNTGNDVFDSMGFRGGRLFSSDSMYPDSLQGYAPTVRGIARTPAKVVVRQNGYVIYQSYVQPGAFAITDLNPTSSSGDLEVTVEEKDGTQQRYTVPYSTVPLLQREGRWKYDLVAGDYRSGNSDQDTPFFTQGTLITGLANGYTLYGGTQLASRYTAVAVGAGKNLGDWGAVSLDITHARSQLADDSKHEGQSLRFLYAKSLNGFGTNFQLLGYRYSTKGFYTLDDVAWRSMEGYQYADSQNDNDVPDVQSYHNLTWNKKGRFQLNVSQSLGDYGSVYISGSEQTYWGTDETNLWYQLGYAGGVKGINYSVSWSWNKSVGIDGTDRIASFNVSVPFSLFTRQGYRRDSAIDRAYATASASRNSDGDTSWQTGVSGTLLEDRNLNYSVTQGHASTNGSSGSASANWQATYGTLGVGYNYSRDQHDLNWQLSGGVVGHADGVTFSQPLGDTNVLIKAPGASGVSIENQTGVKTDWRGYAVMPYATVYRYNRVALDTNTMSNNTDIENNVSSVVPTKGALVRASFDTRIGVRALLTVMRGNQPVPFGAVVRETKSGVTSMVGDDGQIYLSGLPLEGELLIQWGDGAQSQCRAPYSLPEKSLQQAITLKGIRC

SEQ ID NO: 56248 - protein, 335 aa, Enterobacter cloacae
MPLSEIGEQLMSETATWQPSASIPNLLKRAAIMAEIRRFFADRGVLEVETPCMSQATVTDIHLVPFETRFVGPGHSQGMNLYLMTSPEYHMKRLLAAGCGPVYQLCRSFRNEEMGRHHNPEFTMLEWYRPHYDMYRLMNEVDDLLQQVLDCSEAETLSYQQAFQRHLEIDPLSADKTQLREVAAKLDLSNVADTEEDRDTLLQLLFTFGVEPQIGKDRPTFVYHFPASQASLAQISTEDHRVAERFEVYYKGIELANGFHELTDAREQAQRFEQDNRKRAARGLPQQPIDVNLLEALKAGLPDCSGVALGVDRLVMLALGAEQLGDVIAFTVDRA

SEQ ID NO: 56249 - protein, 199 aa, Enterobacter cloacae
MFKILLIDRCHFTRTGFEAWLNHSGLFPGHYVVTGLNNLFLAREHILQWKPTLVIADLYGFRQDIHHFQQLSSLLSASERLPFILLQSGEDRGMTDWLGQFPVWSSLLKNASLEEVATTINDALISRASADRPTAAAPLLTRQEEKVLTLWMDGASNQKIAAHLSINGKTVYTYKRNIRMKLHMDTRFSPFLSLQESES

SEQ ID NO: 56250 - protein, 117 aa, Enterobacter cloacae
MRVKVCAGIVGAALLLAGCSSSNELSAAGQGVRFVEDKPGSECQLLGSATGEQSNWMSGQHGEEGGSMRGAANALRNQAAAMGGNVIYGVSSPTQSMLSSFVPTASQMNGQVYKCPN

SEQ ID NO: 56251 - protein, 547 aa, Enterobacter cloacae
MAAKDVKFGNDARVKMLRGVNVLADAVKVTLGPKGRNVVLDKSFGAPTITKDGVSVAREIELEDKFENMGAQMVKEVASKANDAAGDGTTTATVLAQAIITEGLKAVAAGMNPMDLKRGIDKAVASAVEELKALSVPCSDSKAIAQVGTISANSDETVGKLIAEAMDKVGKEGVITVEDGTGLEDELDVVEGMQFDRGYLSPYFINKPETGAVELESPFILLADKKISNIREMLPVLEAVAKAGKPLVIIAEDVEGEALATLVVNTMRGIVKVAAVKAPGFGDRRKAMLQDIATLTGGTVISEEIGMELEKATLEDLGQAKRVVINKDTTTIIDGVGEEAAIQGRVGQIRKQIEEATSDYDREKLQERVAKLAGGVAVIKVGAATEVEMKEKKARVDDALHATRAAVEEGVVAGGGVALVRVAAKLAGLTAQNEDQNVGIKVALRAMEAPLRQIVSNAGEEPSVVANNVKAGEGNYGYNAATEEYGNMIDFGILDPTKVTRSALQYAASVAGLMITTECMVTDLPKGDAPDLGVAGMGGMGGMGGMM

SEQ ID NO: 56252 - protein, 466 aa, Enterobacter cloacae
MPHSYDYDAIVIGSGPGGEGAAMGLVKQGARVAVIERYHNVGGGCTHWGTIPSKALRHAVSRIIEFNQNPLYSDHSRLLRSSFADILNHADTVINQQTRMRQGFYERNHCEILQGNAHFVDEHTLALECHDGSVETITAEKFVIACGSRPYHPADVDFSHPRVYDSDSILSLHHEPRHVIIYGAGVIGCEYASIFRGMDVKVDLINTRDRLLAFLDQEMSDSLSYHFWNSGVVIRHNEEYEKIEGCDDGVIMHLKSGKKLKADCLLYANGRTGNTDSLQLENIGLETDSRGQLKVNSMYQTALPHVYAVGDVIGYPSLASAAYDQGRIAAQALVKGEATAHLIEDIPTGIYTIPEISSVGKTEQQLTSMKVPYEVGRAQFKHLARAQIVGMSVGTLKILFHRETKEILGIHCFGERAAEIIHIGQAIMEQKGGGNTIEYFVNTTFNYPTMAEAYRVAALNGLNRLF

SEQ ID NO: 56253 - protein, 457 aa, Enterobacter cloacae
MALWGGRFTQAADQRFKQFNDSLRFDYRLAEQDIVGSVAWSKALVTVGVLTADEQLRLEEALNNLLEEVRLNPQQILESDAEDIHSWVEGKLIDKVGQLGKKLHTGRSRNDQVATDLKLWCKDTVGELLAANRQLQSALVETAQNNQDAVMPGYTHLQRAQPVTFAHWCLAYVEMLARDESRLQDTLKRLDVSPLGSGALAGTAYEIDREQLAGWLGFASATRNSLDSVSDRDHVLELLSNASIGMVHLSRFAEDLIFFNSGEAGFVELSDRVTSGSSLMPQKKNPDALELIRGKCGRVQGALTGMMMTLKRLPLAYNKDMQEDKEGLFDALDTWLDCLPMGALVLDGIQVKRPRCQEAAQQGYANSTELADYLVAKGVPVREAHHIVGEAVVEAIRQGKPLEDLALADLQKFSAVIGDDVYPSLALQSCLDKRAAKRRVSPKQVAQAIPDAKNRFG

SEQ ID NO: 56254 - protein, 220 aa, Enterobacter cloacae
MELYLDTANVAEVERLARIFPIAGVTTNPSIIAASRESIWDVLPRLQKATGPEGTLFAQTMSRDAEGMVAEAKRLSNAVPGIVVKIPVTAQGLIAIKALKKEGITTLGTAVYSAAQGLLAALAGAKYVAPYVNRVDAQGGDGIRMVQELQSLLELHAPESKVLAASFKTPRQALDCLLAGCEAITLPLDVAQQMLGTPAVESAIEKFEQDWKNAFGNLNL

SEQ ID NO: 56255 - protein, 714 aa, Enterobacter cloacae
SVGKCPFHQGGVDHSAGAGTGSRDWWPKQLRIDLLNQHSNRSNPLGEDFDYRKEFSKLDYSALKGDLKALLTDSQPWWPADWGSYAGLFIRMAWHGAGTYRSVDGRGGAGRGQQRFAPLNSWPDNVSLDKARRLLWPIKQKYGQKISWADLFILAGNVALENSGFRTFGFGAGREDVWEPDLDVNWGDEKAWLTHRDPEALAKRPLAATEMGLIYVNPEGPNASGEPLSAAAAIRATFGNMGMNDEETVALIAGGHTLGKTHGAGEATHVGTDPEASPIEAQGLGWASTHGTGVGADAITSGLEVIWSQTPTQWSNYFFENLFKYEWVQTRSPAGAIQFEAVDAPEIMPDPFDPSKKRKPTMLVTDLTLRFDPEFEKISRRFLNDPQAFNEAFARAWYKLTHRDMGPKSRYLGPEVPKEDLIWQDPLPQAVFNPSKEDIESLKAEIAASGLSVSELISVAWASASTFRGGDKRGAANGARLALAPQRDWDVNAAAVRALPALEAIQRTTNKASLADIIVLAGVVGVEQAAKAAGVYVNVPFTPGRVDARQDQTDIEMFNLLEPIADGFRNYRAQVDVSTTESLLIDKAQQLTLTAPELTVLIGGLRVLGANFDGSKNGVFTDREGVLSNDFFVNLLDMNTQWKATDESNELFAGSDRASGEVKYTATRADLVFGSNAVLRALAEVYASDDAHEKFVRDFVAAWAKVMDLDRFDL

SEQ ID NO: 56256 - protein, 287 aa, Enterobacter cloacae
MCASTHNLNLCNGDHTNGGWGVGVGRMERGCQIRRLSHVEPPYVSTSTSPKRMADMNIKTGARVFALSALAAMMVSAPALAKIEEGKLVIWINGDKGYNGLAEVGKKFEKDTGIKVTVEHPDKLEEKFPQVAATGDGPDIIFWAHDRFGGYAQSGLLAEVTPDKAFQDKLFPFTWDAVRYNGKLIAYPIAVEALSLIYNKDLVPNPPKTWEEIPKLDKELKAKGKSALMFNLQEPYFTWPLIAADGGYAFKFENGKYDVKDVGVDNAGAKAGLTFLVDLIKNKHMNA

SEQ ID NO: 56257 - protein, 486 aa, Enterobacter cloacae
MAKQKKRGFFSWLGFGEKEQETEQKTEEQQAVEEQSQPETPVETAAVVEAEETAHSKEEIESFAQEVVEVTEQVQESEKPEPIIVEDITEAPQAVIEHEELPLPEEVKAEEVSAEEWQAEAETVEIVEAVEEEAALEPELTDEELEAQALAAEAAEEAVIVVPVEEQAEEESVQEQEKPTKEGFFARLKRSLLKTKENLGSGFISLFRGKKIDDDLFEELEEQLLIADVGVETTRKIIANLTEGASRKQLRDAEALYGLLKDEMGEILAKVDEPLNIEGKTPFVILMVGVNGVGKTTTIGKLARQFEQQGKSVMLAAGDTFRAAAVEQLQVWGQRNNIPVIAQHTGADSASVIFDAIQAAKARNVDVLIADTAGRLQNKSHLMEELKKIVRVMKKLDEDAPHEIMLTIDASTGQNAISQAKLFTEAVGLTGIALTKLDGTAKGGVIFSVADQFGIPIRYIGVGERIEDLRPFKADDFIEALFARED

SEQ ID NO: 56258 - protein, 435 aa, Enterobacter cloacae
MITLRKQVPLAIAVAAGILSAQAGAVDFKGYARSGIGWTGSGGEQQCFQATGAQSKYRLGNECETYAELKLGQEVWKEGDKSFYFDTNVAYSVSQQNDWESTSPAFREANVQGKNLIEWLPGSTIWAGKRFYQRHDVHMIDFYYWDISGPGAGIENIDLGFGKLSLAATRSSESGGSATFADRDANGDRIYDNVVPNDVFDVRLAGLETNPGGTLELGVDYGHTNIPDDYYLQPGASKDGWLFTAEHTQSMMKGFNKFVLQYGTDSMTSNGKGIPQGGSVDNDGSMWRVLDHGAITLADRWDLMYVGMYQNIDRDNNNGTEWWTVGVRPMFKWTPIMSTLLEVGYDNVKSQRTDEKNSQYKITLAQQWQAGDSIWSRPAIRVFATYAKWDEKWGYANNSDTGYTSGVAYSDTSAKTFSRGDNDEWTFGAQMEIWW

SEQ ID NO: 56259 - protein, 369 aa, Enterobacter cloacae
MASVQLRNVTKAWGDVVVSKDINLDINEGEFVVFVGPSGCGKSTLLRMIAGLETITSGDLLIGDTRMNDIPPAERGVGMVFQSYALYPHLSVAENMSFGLKLAGAKKEVINQRVTQVAEVLQLAHLLERKPKALSGGQRQRVAIGRTLVAEPRVFLLDEPLSNLDAALRVQMRIEISRLHKRLGRTMIYVTHDQVEAMTLADKIVVLDAGRVAQVGKPLELYHYPADRFVAGFIGSPKMNFLPVKVTATAIEQVQVELPNRQQVWLPVDSANVQVGANMSLGIRPEHLLPSHIADVTLEGDVQVVEQLGHETQIHIQIPAIRQNLVYRQNDVVLVEEGATFAIGLPPERCHLFREDGTACRRLHKEPGV

SEQ ID NO: 56260 - protein, 428 aa, Enterobacter cloacae
MKTSLFKSLYFQVLTAIAIGILLGHYYPELGAQMKPLGDAFVKLIKMVIAPVIFCTVVTGIAGMESMKAVGRTGAVALLYFEVVSTLALIIGLIIVNVVQPGAGMNVDPSTLDAKAVAVYAEQAKDQGVVAFLLDVIPGSVIGAFASGNILQVLLFAVMFGFALHRLGSKGQLIFNVIESFSQVIFGIINMIMRLAPIGAFGAMAFTIGKYGVGTLVQLGQLIICFYITCILFVVVVLGSIARATGFNIFKFIRYIREELLIVLGTSSSESALPRMLDKMEKLGCRKSVVGLVIPTGYSFNLDGTSIYLTMAAVFIAQATNSHMDIFHQITLLVVLLLSSKGAAGVTGSGFIVLAATISAVGHLPVAGLALILGIDRFMSEARALTNLVGNGVATVVVAKWVKELDHKKLDDTLNNRSTDSKNPGLTS

SEQ ID NO: 56261 - protein, 668 aa, Enterobacter cloacae
MRVSRSLTIKQMAMVSAVTMLFVLLFCVILLFHSVQQNRYNTASQLESIARSVRGPLSASILKGDIPEAETILKRIQPAGVVSRADVVLPNQFQALRMSFIPERPVPMMVMRLFELPVQISLPVYSLERPANPQPLAYLVLQADSYRMYKFVMSWVVTLVTTCLLMTLILSVALTWCINRLIVHPLRRIARELNTLAPQDQMGHQLELPRLHHDDEIGMLVRSYNLNQQRIQRQQDELNSSATRFPVSELPNKAFLMAMLEQTVARQQTTALMVIACETLQDTAGVLKESQREMLLLTLVEKVKSVLAPRMVLTQVSGYDLVVIANGVKEPWHAITLGQQVLTVINERLPIQGIQLRPSASIGIAMYYGDLTAEQLYHRAFSAAFTARRKGKNQIQFFAPEEMEKAQQRLTEESDILTALDNRQFALWLQPQVNLLTGEVKSAEALLRVQQPDGSWELPEGLIERIESCGLMVTVGYWVLEESCRQLAAWQERGVTLPLSVNLSALQLMHPTMVSEMLELIHRYRIKPDTLTLEVTESRRIDDPNQAVAILKPLRSAGIRIALDDFGMGYAGLRQLQHMKTLPVDVLKIDKAFVDGLPGDSSMVQAIIQMARSLNLHLIAEGIETEAQRAWLAEAGVESGQGFLFAPAVPSDVFEERYLSGADNNAKV

SEQ ID NO: 56262 - protein, 368 aa, Enterobacter cloacae
MKAFRWCALAALMLAALPLRAACTWPAWEQFKKDYISEGGRVVDPSDTRKITTSEGQSYALFFALAANDRSAFDQLLTWTRDNLASGNLNDNLPAWLWGQKDKETWAVIDTNSASDADVWIAWSLLEAGRLWKHPDYTRTGKALLKRIVSEEVVKVPGLGAMLLPGKVGFADENVWRFNPSYLPPQLASYFTRFGTPWTQLRETNQRLLLESAPKGFSPDWVQYQKNKGWRLQQDKSLVGGYDAIRVYLWVGMMSDKDPQKARLLTRFQPMVAKTMKRGVPPEKVDVATGKRTGNGPVGFSAAMLPFLQQRDAQAVQRQRVADHFPDNNAYYSYVLTLFGQGWDQHRFRFTAKGELIPDWGQECASSQ

SEQ ID NO: 56263 - protein, 559 aa, Enterobacter cloacae
MTNSTYTASSPSPLWQYWRGLSGWNFYFLVKFGLLWAGYLNFHPLLNLVFMAFLLMPLPNIRLHRLRHWVAIPVGFALFWHDTWLPGPDSIMSQGSQVAGFSASYVLDLTERFINWQMIGAVFVLLVAWLFLSQWIRVTVFVVAIMIWLNVLTLAGPNFSLWPAGQPTTTVTTTGGSAAATVTTAGDTPVVGDIPTQTAPPTSTNLNAWLSSFYTAEDKRQTKFPDALPADAQPFELLVINICSLSWADVDAAGLMSHPLWSHFDIQFKDFNSATSYSGPAAIRLLRASCGQTSHKNLYQPAGNQCYLFDNLAKLGFTQHLMLGHNGQFGNFLKEVREQGGMQAPLMDQTGLPVSLLGFDGSPVYDDTAVLQRWLQTIEKDSNPRSATFFNTLPLHDGNHFPGVSKTADYKVRAQKFFDELDAFFTELEKSGRKVMVVVVPEHGGALKGDRMQVSGLRDIPSPSITNVPAGIKFFGMKAPHQGAPIEITQPTSYLAISELVARAVDGKLFVEDSVNWDQLTSKLPQTAEVSENANAVVIQYQNKPYVRLNGGDWVPYPQ

SEQ ID NO: 56264 - protein, 342 aa, Enterobacter cloacae
MNHSLKPWNTFGIQRNAKQIVRADNAQQLLDAWQSATENNEPVLILGEGSNVLFLDDFSGTVIVNRIMGIDVEERADSWHLHVGAGENWHHLVQFTLEKGMPGLENLALIPGCAGSSPIQNIGAYGIELKHVCEYVDCIELATGTAKRLTAEQCQFGYRDSIFKHEYQDRYVIVAVGLCLSKNWQPVLTYGDLTRLDPATVTARDVFDSVCHMRMTKLPDPKVNGNAGSFFKNPVISSENAKIFLEGWPAAPHYPQADGSVKLAAGWLIDQCQLKGTSVGGAAVHQQQALVLINQRDATSDDVVQLAHYVRQRVGEKFNVWLEPEVRFIGCTGEVNAVETIA

SEQ ID NO: 56265 - protein, 122 aa, Enterobacter cloacae
MANNTTGLTRIIKAAGYSWKGFRAAWINEAAFRQEGVAAIIAVIVACFLDIDAITRVLLIGSVLLVMIVEILNSAIEAVVDRIGSDFHELSGRAKDMGSAAVLLAIITAVITWVTLLWSHFR

SEQ ID NO: 56266 - protein, 470 aa, Enterobacter cloacae
MAGNKPFNKQTEPRERDFQVAGLKVPPHSIEAEQSVLGGLMLDNERWDDVAERVVAEDFYTRPHRHIFTEMARLQESGSPIDLITLAESLERLGQLDSCGGFAYLAELSKNTPSAANISAYADIVRERAVVREMISVANEIAEAGFDPQGRTSEDLLDLAESRVFKIAESRANKDEGPKNIADVLDATVARIEQLFQQPHDGVTGVNTGYDDLNKKTAGLQPSDLIIVAARPSMGKTTFAMNLVENAAMLQDKPVLIFSLEMPSEQIMMRSLASLSRVDQTRIRTGQLDDEDWARISGTMGILLEKRNIYIDDSSGLTPTEVRSRARRIAREHGGIGLIMIDYLQLMRVPSLSDNRTLEIAEISRSLKALAKELHVPVVALSQLNRSLEQRADKRPVNSDLRESGSIEQDADLIMFIYRDEVYHENSDLKGIAEIIIGKQRNGPIGTVRLTFNGQWSRFDNYAGPQYDDE

SEQ ID NO: 56267 - protein, 940 aa, Enterobacter cloacae
MDKIEVRGARTHNLKNINLIIPRDKLIVVTGLSGSGKSSLAFDTLYAEGQRRYVESLSAYARQFLSLMEKPDVDHIEGLSPAISIEQKSTSHNPRSTVGTITEIHDYLRLLYARVGEPRCPDHDVPLAAQTVSQMVDNVLSQPEGKRLMLLAPIIKERKGEHTKTLENLASQGYIRARIDGEVCDLSDPPKLELQKKHTIEVVIDRFKVRDDLATRLAESFETALELSGGTAVVSDMDDPKAEELLFSANFACPICGYSMRELEPRLFSFNNPAGACPTCDGLGVQQYFDPDRVIQNPELSLAGGAIRGWDKRNFYYFQMLKSLAEHYKFDVEAPWASLTPNVHKVILFGSGKENIEFKYMNDRGDTSVRRHPFEGVLHNMERRYKETESSAVREELAKFISNRSCATCEGTRLRREARHVFVENTALPTISDMSIGHAMDFFNNLKLSGQRAKIAEKVLKEIGDRLKFLVNVGLNYLTLSRSAETLSGGEAQRIRLASQIGAGLVGVMYVLDEPSIGLHQRDNERLLGTLVHLRNLGNTVIVVEHDEDAIRAADHVIDIGPGAGVHGGQVVAEGTLKDIMAVPESLTGQFMSGKRKIEVPKQRVAADPEKVLKLTGARGNNLKDVTLTLPVGLFTCITGVSGSGKSTLINDTLFPIAQTALNGATLAEPAPYRDIQGLEHFDKVIDIDQSPIGRTPRSNPATYTGVFTPVRELFAGVPEARSRGYTPGRFSFNVRGGRCEACQGDGVIKVEMHFLPDIYVPCDQCNGKRYNRETLEIKYKGKTIHEVLDMTIEEAREFFDAVPALARKLQTLMDVGLTYIRLGQSATTLSGGEAQRVKLARELSKRGTGQTLYILDEPTTGLHFADIQQLLEVLHQLRDQGNTIVVIEHNLDVIKTADWIVDLGPEGGSGGGEILVSGTPETVAECEASHTARFLKPLL

SEQ ID NO: 56268 - protein, 69 aa, Enterobacter cloacae
MNKDEIGGNWKQFKGKAKEQWGKLTDDDMTVIEGKRDQLVGKIQERYGYAKDQAEKEVGDWEKRNDYRW

SEQ ID NO: 56269 - protein, 359 aa, Enterobacter cloacae
MQAATVVINRRALRHNLQRLRELAPASKLVAVVKANAYGHGLLETARTLPDADAFGVARLEEALRLRAGGITQPILLLEGFFEASDLPTIADQHLHTAVHNEEQLTALETAELSEPVTVWMKLDTGMHRLGVRPESAEAFYQRLCRCKNVRQPVNIVSHFARADEPECGATERQLDIFNTFCEGKPGMRSIAASGGILLWPQSHFDWARPGIILYGVSPLENKPWGPDFGFQPVMSLVSNLIAVRDHKAGEPVGYGGTWTSERDTRLGVVAMGYGDGYPRAAPSGTPVLVNGREVKIVGRVAMDMICVDLGPEAQDKPGDDVVMWGEGLPVERIAEITKVSAYELITRLTSRVAMKYLD

SEQ ID NO: 56270 - protein, 176 aa, Enterobacter cloacae
MASRGVNKVILVGNLGQDPEVRYMPSGGAVANITLATSESWRDKATGEMKEQTEWHRVVLFGKLAEVAGEYLRKGSQVYIEGQLRTRKWTDQSGAEKYTTEVVVNVGGTMQMLGGRQGGGAPAGGGQSQQQGGWGQPQQPQGGNQFSGGAQSRPQQQSAPAPSNEPPMDFDDDIPF

SEQ ID NO: 56271 - protein, 331 aa, Enterobacter cloacae
MSSELQTAFPAHRFSIAPMLDWTDRHCRYFLRQLSRHTLLYTEMVTTGAIIHGKGDYLAYSEEEHPVALQLGGSDPAALAQCAKLAEERGYDEINLNVGCPSDRVQNGMFGACLMGNAQLVADCIKAMRDVVSIPVTVKTRIGIDDQDSYEFLCDFINTVSGKGECEMFIIHARKAWLSGLSPKENREIPPLDYPRVYQLKRDFPHLTMSINGGIKSLEEAKAHLAHMDGVMVGREAYQNPGILATVDREIFGIEGADTDPVAVVRAMYPYIERELSNGTYLGHITRHMLGLFQGIPGARQWRRYLSENAHKAGADIEVLEHALRLVADKR

SEQ ID NO: 56272 - protein, 152 aa, Enterobacter cloacae
MFVIWSHEKGFIMSHQLTFADSEFSSKRRQTRKEIFLSRMEQILPWQNMVEVIEPFYPKAGNGRRPYPLETHVRIHCMQHWYNLSDGAMEDALYEIASMRLFARLSLDSALPDRTTIMNFRHLLEQHQLARQLFKTINRWLAEAGVMMTGGS

SEQ ID NO: 56273 - protein, 547 aa, Enterobacter cloacae
MDSQRNLLIIALLFVSFMIWQAWEQDKNPQPQQQTTQTTTTAAGSAADQGVPASGQGKQITVKTDVLELTINTRGGDVEQALLLTYPKELKSNEPFQLLETTPEFIYQAQSGLTGRDGPDNPANGARPLYTVESDTFVLADGQNELAIPMTYTDAAGNTFTKTFTLKRGEYAVNVGYSVQNASAKPLELSTFGQLKQSINLPSHRDTGSSNFALHTFRGAAYSTPDAKYEKYKFDTIADNENLNVSSKGGWVAMLQQYFATAWIPNNDGTNNFYTANLGNGIAAIGYKSQPVLVQPGQTGKMASTLWVGPEIQDKMAAVAPHLDLTVDYGWLWFISQPLFKLLKFIHSFLGNWGFSIIVITFIVRGIMYPLTKAQYTSMAKMRMLQPKIQAMRERLGDDKQRQSQEMMALYKAEKVNPLGGCFPLLIQMPIFLALYYMLMGSVELRHAPFALWIHDLSAQDPYYILPILMGVTMFFIQKMSPTTVTDPMQQKIMTFMPVIFTVFFLWFPSGLVLYYIVSNLVTIIQQQLIYRGLEKRGLHSREKKKS

SEQ ID NO: 56274 - protein, 454 aa, Enterobacter cloacae
MSHNDTIVAQATPPGRGGVGILRISGLKAREVAEAVLGKLPKPRYADYLPFKDTDGTPLDQGIALWFPGPNSFTGEDVLELQGHGGPVILDLLLKRILTLPGLRIAKPGEFSERAFLNDKLDLAQAEAIADLIDASSEQAARSALNSLQGAFSARVNHLVEALTHLRIYVEAAIDFPDEEIDFLSDGKIEAQLNQVMADLDAVRAEARQGSLLREGMKVVIAGRPNAGKSSLLNALAGREAAIVTDIAGTTRDVLREHIHIDGMPLHIIDTAGLRDASDEVERIGIERAWQEIEQADRVLFMVDGTTTDAVDPAEIWPDFIARLPAKLPITVVRNKADVTGEMLGISDVNGHSLIRLSARTGEGVDDLRNHLKQSMGFDTSMEGGFLARRRHLQALEEAANHLVQGKAQLIGAWAGELLAEELRLAQQNLSEITGEFTSDDLLGRIFSSFCIGK

SEQ ID NO: 56275 - protein, 257 aa, Enterobacter cloacae
MSMVDTAPGKIQVRDLNFYYGKFHALKNINLDIAKNQVTAFIGPSGCGKSTLLRTFNKMYSLYPEQRAEGEIILDGENILTQAQDIALLRAKVGMVFQKPTPFPMSIYDNIAFGVRLFEKLSRADMDERVQWALTKAALWNETKDKLHQSGYSLSGGQQQRLCIARGIAIRPEVLLLDEPCSALDPISTGRIEELITELKQDYTVVIVTHNMQQAARCSDHTAFMYLGELIEFSDTDALFTRPAKKQTEDYITGRYG

SEQ ID NO: 56276 - protein, 513 aa, Enterobacter cloacae
MQLNSTEISELIKQRIAQFSVVSEAHNEGTIVSVSDGVIRIHGLADCMQGEMISLPGNRYAIALNLERDSVGAVVMGPYADLAEGMKVKCTGRILEVPVGRGLLGRVVNTLGAPIDGKGPVEHDGFSPIEVIAPGVIDRQSVDQPVQTGYKSVDAMIPIGRGQRELIIGDRQTGKTAMAIDAIINQRDSGIKCVYVAIGQKASTISNVVRKLEEHGALSNTIVVVATASESAALQYLAPYAGCAMGEYFRDRGEDALIVYDDLSKQAVAYRQVSLLLRRPPGREAFPGDVFYLHSRLLERASRVNAEYVENFTKGEVKGKTGSLTALPIIETQAGDVSAFVPTNVISITDGQIFLETNLFNSGIRPAVNPGISVSRVGGAAQTKIIKKLSGGIRTALAQYRELAAFSQFASDLDEATRKQLSHGQKVTELLKQKQYAPMSVAQQGLVLFAAERGYLEDVELAKIGSFEAALLAYVDRDHAPLMQEINQTGGYNDEIEGKLKAILDSFKATQSW

SEQ ID NO: 56277 - protein, 177 aa, Enterobacter cloacae
MSEFVTVARPYAKAAFDFAVEHQNVDRWQDMLAFAAEVTKNEQMAELLSGALAPETLAASFIAVCGEQLDANGQNLIKVMAENGRLRVLPDVLEQFEHLRALSEATAEVEVTSATELSNEQLAKITAAMEKRLSRKVKLNCKIDKSVMAGVIIRSGDMVIDGSVRGRLERLADVLQS

SEQ ID NO: 56278 - protein, 319 aa, Enterobacter cloacae
MAATKPAFNPPGKKGDMIFSALVKLAALIVLLLLGGIIVSLIFSSWPSIQKFGFSFLWTKEWDAPNDIYGALVPIYGTLVTSFIALLIAVPVSFGIALFLTELAPGWLRRPLGIAIELLAAIPSIVYGMWGLFIFAPLFATYFQEPVGNVLSAIPFVGALFSGPAFGIGILAAGVILAIMIIPYIAAVMRDVFEQTPVMMKESAYGIGCTTWEVIWRIVLPFTKNGVIGGVMLGLGRALGETMAVTFIIGNTYQLDSASLYMPGNSITSALANEFAEAESGLHVAALMELGLILFVITFIVLAISKLMIMRLAKNEGAR

SEQ ID NO: 56279 - protein, 609 aa, Enterobacter cloacae
MCGIVGAVAQRDIAEILLEGLRRLEYRGYDSAGLAVVDAEGHMTRLRRLGKVQMLAQAAEEHPLHGGTGIAHTRWATHGEPSEGNAHPHVSEHIVVVHNGIIENHEPLREELKARGYTFVSETDTEVIAHLVHWELEQGGTLRDAVLRAIPQLRGAYGTVIMDSRDPSTLLAARSGSPMVIGLGMGENFIASDQLALLPVTRRFIFLEEGDIAEVTRRSVTVFDTKGEQVKRQEIESNLQYDAGDKGAYRHYMQKEIYEQPNAIKNTLTGRISHGEVDLSELGANANELLGKVEHIQIVACGTSYNSGMVSRYWFESLAGVPCDVEIASEFRYRKSAVRRNSLMITLSQSGETADTLAALRLSKELGYLGSLAICNVPGSSLVRESDLALMTKAGTEIGVASTKAFTTQLTVLLMLVAKLARLKGEDASVEHDIVHGLQALPSRIEQMLSQDKRIEALAEDFSDKHHALFLGRGDQYPIALEGALKLKEISYIHAEAYAAGELKHGPLALIDADMPVIVVAPNNELLEKLKSNIEEVRARGGVLYVFADKDAGFVSNDNMHIIEMPHVEEVIAPIFYTVPLQLLAYHVALIKGTDVDQPRNLAKSVTVE

SEQ ID NO: 56280 - protein, 271 aa, Enterobacter cloacae
MASENMTPQDYIGHHLNNLQLDLRTFSLVDPHNPPATFWTINIDSMFFSVVLGLLFLAMFRGVAKRATSGVPGKFQTFIEMIIGFVHGSVKDMYHGKSKLIAPLALTVFVWVFLMNLMDLLPIDLLPFIGEHIFGLPALRVVPSADVNITLSMALGVFILILFYSIKMKGVNGFVKELTLQPFNHWAFIPVNLILEGVSLLSKPVSLGLRLFGNMYAGELIFILIAGLLPWWSQWILNVPWAIFHILIITLQAFIFMVLTIVYLSMASEEH

SEQ ID NO: 56281 - protein, 456 aa, Enterobacter cloacae
MSNSAMSVVILAAGKGTRMYSDLPKVLHTLAGKPMVQHVIDAANELGASQVHLVYGHGGDLLKKTLSDDKLNWVLQAEQLGTGHAMQQAAPFFADDEDILMLYGDVPLISVETLTRLREAKPQGGIGLLTVVLDDPSGYGRITRENGNVTGIVEHKDASDEQRQIQEINTGILIANGADMKRWLSRLDNNNAQGEYYITDIIAMAYHEGREIAAVHPARISETDGVNNRLQLSRLERIYQSEQAEKLLLAGVMLRDPARFDLRGSLSHGRDVEIDTNVILEGHVTLGNRVKIGAGCVIKNSVIGDDCEISPYSVMEDARLDAACTIGPFARLRPGAELLEGAHVGNFVEMKKARLGKGSKAGHLTYLGDAEIGNNVNIGAGTITCNYDGANKFKTIIGDDVFVGSDTQLVAPVTVGNGVTIAAGTTVTRDVAENELVLSRVPQVSKQGWKRPEKKK

SEQ ID NO: 56282 - protein, 453 aa, Enterobacter cloacae
YAFPDNFWWGSATSALQTEGAREGETTWDYWFAREPNRFHNGVGPQQTSTFYQHWKTDIQLLKQLNHNSFRTSISWARLIPDGIGEVNPEAVDFYNQVIDELNEQGITPFMTLFHFDMPMAMQEIGGWENRDVVDAYARYAQICFELFGDRVLHWFTFNEPIVPVEGGYLYDFHYPNVVDFRRAATVAYHTVLAHAKAVQAYRAGHYAGEIGIVLNLTPSYPRSQNPADVKAAHIADLMFNRSFLDPVLRGEYPADLVALLKSCDQLPACKPEDGFLIAEGKIDLLGVNYYQPRRVKCRDTAVNPQAPFMPEWFFDSYEMPGRKMNPYRGWEIYEPGIYDILVNLRDNYGNPRCFISENGMGVENEQRFIENGQINDQYRIEFISEHLAWLHKGISEGCNCLGYHMWTFIDNWSWCNAYKNRYGFIQLDLETQKRTIKKSGEWFAATALNNSF

SEQ ID NO: 56283 - protein, 327 aa, Enterobacter cloacae
MRASGHTQPCYAVDRINDNIAGENMGSTRKGMLNVLIAAVLWGSSGVCAQYIMEKSHISSPYLTMVRLLFTGVILLTLSFVHGDKIFSVIKHRKDALSLLFFSLVGALTVQLTFLLTIEKSNAATATVLQFLSPTIIVAWFALARKKRPGVFVLSAIVTSLVGTFLLVTHGDPTSLSISPAALFFGIASAFAAAFYTTYPSTLIARYGTLPIVGWSMLIAGLMLTPFYAGRGTTFVIDGSLLLAFFYLVVIGTALTFSLYLKGAQTIGGPKASILSCAEPLSSALLSVILLGVAFTLPDWLGTLLIVSSVVLISMDSRRRVQTSAYL

SEQ ID NO: 56284 - protein, 197 aa, Enterobacter cloacae
MSEIISAAVLLILIMDPLGNLPIFMSVLKHTEPKRRRAIMIRELLIALLVMFIFLFAGEKILAFLNLRAETVSISGGIILFLIAIKMIFPSAEGSSSGLPAGEEPFIVPLAIPLVAGPTILATLMLLSHQYPNQMSHLVIALLIAWGGTFIILLQSSLFLRLLGEKGVNALERLMGLILVMMATQMFLDGIRAWMKG

SEQ ID NO: 56285 - protein, 221 aa, Enterobacter cloacae
MTSFSESQRVKALFWLSLFHLLVITSSNYLVQLPISIFGFHTTWGAFSFPFIFLATDLTVRIFGAPLARRIIFSVMLPALFISYVVSSLFYMGSWQGFEALTHFNLFVARIAAASFMAYALGQILDVHVFNRLRQNHRWWMAPTASTLFGNVSDTLAFFFIAFWRSPDAFMAEHWMEIALVDYCFKVLISIVFFLPMYGVLLNMLLKRLADKSEITALQAG

SEQ ID NO: 56286 - protein, 129 aa, Enterobacter cloacae
MKGAFWAICSVLLVSAAQLLLRNAMQALPPVSEILVFVSALWHFSSGTGALLLGLTGYVASMGCWYLALHRMALSKAYALLSLSYILVWGAAILLPGWGERFSWHGLVGVGFIILGVLVIFLPRTSQRE

SEQ ID NO: 56287 - protein, 65 aa, Enterobacter cloacae
GENEPFDVALRRFKRSCEKAGVLAEVRRREFYEKPTTERKRAKASAVKRHAKKLARENARRTRLY

SEQ ID NO: 56288 - protein, 120 aa, Enterobacter cloacae
MSTTLFKDFTFEAAHHLPHVPEGHKCGRLHGHSFMVRLEITGEVDPHTGWIMDFAELKAAFKPTYDRLDHYYLNDIPGLENPTSEVLAKWIWDQMKPLVPLLSAVMIKETCTAGCIYRGE

SEQ ID NO: 56289 - protein, 809 aa, Enterobacter cloacae
HTPMMQQYLKLKAQHPEILLFYRMGDFYELFYDDAKRASQLLDISLTKRGASAGEPIPMAGIPHHAVENYLAKLVNQGESVAICEQIGDPATSKGPVERKVVRIVTPGTISDEALLQERQDNLLAALWQDGKGFGYATLDISSGRFRLSEPADRETMAAELQRTNPAELLYAEDFAEMALIEGRRGLRRRPLWEFEIDTARQQLNLQFGTRDLIGFGVENSPRGLCAAGCLLQYVKDTQRTALPHIRSITMERQQDSIIMDAATRRNLEITQNLAGGVENTLASVLDSTVTPMGSRMLKRWLHMPIRNTETLLCRQQTIAALQDRYTELQPVLRQVGDLERILARLALRTARPRDLARMRHAFQQLPELRAQLSDVDSAPVQKLRETMGEFTELRELLERAIIDAPPVLVRDGGVIAPGYNEELDEWRALADGATDYLDKLEIRERERLGLDTLKVGYNAVHGYYIQISRGQSHLAPIHYVRRQTLKNAERYIIPELKEYEDKVLTSKGKAWALEKQLYDELFDMLMPHLGDLQQQRQRAPELDVLVNLAERAETLNYTCPTFTDKPGIRITEGRHPVVEQVLNEPFIANPLSLSPQRRMLIITGPNMGGKSTYMRQTALIALLAYIGSYVPAQNVEIGPIDRIFTRVGAADDLASGRSTFMVEMTETANILHNATEHSLVLMDEVGRGTSTYDGLSLAWACAESLANKIKAMTLFATHYFELTQLPEKMEGVANVHLDALEHGDTIAFMHTVQDGAASKSYGLAVAALAGVPKDVIKRARQKLRELESLSPNAAATQIDGTQMSLLVP

SEQ ID NO: 56290 - protein, 201 aa, Enterobacter cloacae
MAAHDENVVWHPHPVTVAQREQLHAHRGVVLWFTGLSGSGKSTVAGALEEALHQQGVSTYLLDGDNVRHGLCSDLGFSDDDRKENIRRVGEVASLMLDAGLVVLTAFISPHRAERQMVRERVGQDRFIEVFVDTPLEICEARDPKGLYKKARAGELRNFTGIDAVYEAPESPEIHLEGQQLVTNLVSQLLDLLRRDDIIRS

SEQ ID NO: 56291 - protein, 236 aa, Enterobacter cloacae
MAVTFSDVCAVVPAAGFGRRMQTECPKQYLSIGDKTILEHAVAALLAHPRVTRVIVAISPGDARFAQLPLANHPQITVVDGGAERADSVLAGIQAAGNAPWVLVHDAARPCLHQDDLARLLALSETSKVGGILAAPVRDTMKRAEPGKQAIAHTVDRVDLWHALTPQFFPRELLHDCLTRALKEGATITDEASALEYCGFHPELVEGRADNIKVTRPEDLQLAEFYLTRSTHQEKA

SEQ ID NO: 56292 - protein, 158 aa, Enterobacter cloacae
MRIGHGFDVHAFGGEGPIIIGGVRIPYEKGLVAHSDGDVALHALTDALLRAAALGDIGKLFPDTDPVFKGADSRELLREAWRRIQAKGYTLGNVDVTIIAQAPKMLPHIPQMRVFIAEDLGCHMDDVNVKATTTEKLGFTGRGEGIACEAVALLVKAS

SEQ ID NO: 56293 - protein, 441 aa, Enterobacter cloacae
MWIRPLQAELSDNTLALYAPNRFVLDWVRDKYLNNINGLLNDFCGSDAPQLRFEVGTKPVTQTVRETVNVAAPAQAAPAPAPRVAPARQGWDNVPAPAEPTYRSNVNVKHTFDNFVEGKSNQLARAAARQVADNPGGAYNPLFLYGGTGLGKTHLLHAVGNGIMARKPNAKVVYMHSERFVQDMVKALQNNAIEEFKRYYRSVDALLIDDIQFFANKERSQEEFFHTFNALLEGNQQIILTSDRYPKEINGVEDRLKSRFGWGLTVAIEPPELETRVAILMKKADENDIRLPGEVAFFIAKRLRSNVRELEGALNRVIANANFTGRAITIDFVREALRDLLALQEKLVTIDNIQKTVAEYYKIKVADLLSKRRSRSVARPRQMAMALAKELTNHSLPEIGDAFGGRDHTTVLHACRKIEQLREESHDIKEDFSNLIRTLSS

SEQ ID NO: 56294 - protein, 366 aa, Enterobacter cloacae
MKFTVEREHLLKPLQQVSGPLGGRPTLPILGNLLLQVADGTLSLTGTDLEMEMIARVTLTQPHDAGATTVPARKFFDICRGLPEGAEIAVQLEGDRMLVRSGRSRFSLSTLPAADFPNLDDWQSEVEFTLPQATMKRLIEATQFSMAHQDVRYYLNGMLFETEGEELRTVATDGHRLAVCSMPIGDALPNHSVIVPRKGVIELMRMLDGGDTRLRVQIGSNNIRAHVGDFVFTSKLVDGRFPDYRRVLPKNPDKTLEAGCDSLKQAFARAAILSNEKFRGVRLYVSENQIKITANNPEQEEAEEILDVTYAGTEMEIGFNVSYVLDVLNALKCENVRILLTDSVSSVQIEDAASQSAAYVVMPMRL

SEQ ID NO: 56295 - protein, 803 aa, Enterobacter cloacae
MSNSYDSSSIKVLKGLDAVRKRPGMYIGDTDDGTGLHHMVFEVVDNAIDEALAGHCKDIVVTIHADNSVSVTDDGRGIPTGIHPEEGVSAAEVIMTVLHAGGKFDDNSYKVSGGLHGVGVSVVNALSQKLELVIQREGKIHRQLYTHGVPQAPLAVTGDTDKTGTMVRFWPSLETFTNVTEFEYDILAKRLRELSFLNSGVSIRLRDKRDGKEDHFHYEGGIKAFVEYLNKNKTPIHPNIFYFSTEKDGIGVEVALQWNDGFQENIYCFTNNIPQRDGGTHLAGFRAAMTRTLNAYMDKEGYSKKAKVSATGDDAREGLIAVVSVKVPDPKFSSQTKDKLVSSEVKSAVEQQMNELLSEYLLENPSDAKIVVGKIIDAARAREAARKAREMTRRKGALDLAGLPGKLADCQERDPALSELYLVEGDSAGGSAKQGRNRKNQAILPLKGKILNVEKARFDKMLSSQEVATLITALGCGIGRDEYNPDKLRYHSIIIMTDADVDGSHIRTLLLTFFYRQMPEIVERGHVYIAQPPLYKVKKGKQEQYIKDDEAMDQYQIAIALDGATLHANSHAPALAGEPLERLVSEFNATQKMITRMERRYPKTLLKELVYQPTLTEADLSDEQTVTRWVNALVTDLNEKEQHGSMWKCDIQQNADKQFEPIIRVRTHGVDTDYPLEHEFVTGPEYRRICTLGETLRGLIEDDAFIERGERRQPVASFEQALDWLVKESRRGLAIQRYKGLGEMNPEQLWETTMDPESRRMLRVTVKDAIAADQLFTTLMGDAVEPRRAFIEENALKAANIDI

SEQ ID NO: 56296 - protein, 270 aa, Enterobacter cloacae
MAIKLIAIDMDGTLLLPDHTISPAVKNAIAAARAKGVNVVLTTGRPYAGVHSYLKELHMNQPGDYCITYNGALVQKAADGSTVAQTALSYDDYLFLEKLSREVGSHFHALDRNTLYTANRDISYYTVHESYVATIPLVFCEAEKMDPATQFLKVMMIDEPEILDKAIARIPAEVKEKYTVLKSAPYFLEILDKRVNKGTGVKSLADALGIKQEEIMALGDQENDIAMIEFAGMGVAMDNAIPSVKEVANFVTKSNLEDGVAYAIEKFVLQ

SEQ ID NO: 56297 - protein, 501 aa, Enterobacter cloacae
MSSAFSRLIAVVASFFIFSAAWFCLWSISLHLVERPELAVLLFPFGLRLGLMLQCPRAYWPVLLGAEWLMLVWLAQEVALAHLPLLMTGSLLTLLPVALISRYRHQRDWRTLLRQGAALMAAALLQSLPWVGEKEMLNALLLTLTGGLTLAPTCLVIWHYLTSTVWQPLGPALVSQPVNWRARHLIWYLLLFVVSLWLQLGLPAELSRFTPFCLALPIIALAWHYGWQGALIATLMNAIALIASQTWHDHPVDLLLSLLAQSLTGLLLGAGIQRLRELNQSLQTELARNRRLAERLLETEESVRQEVARELHDDIGQTITAIRTQAGIVQRLAAENAGVKQGGAHIEQLSLGVYDSVRRLLGRLRPRQLDDLSLEQAVRSLMREMELESRGIVSHLDWRINESTLSEGQRVTLFRVCQEGLNNIVKHASASAVTIQGWQQDDSLKLIIEDDGCGLPPGSGQQGFGLAGMRERVKALGGTLNLSCTHGTRVSVSLPLRSYHV

SEQ ID NO: 56298 - protein, 183 aa, Enterobacter cloacae
MSGPPELACRNGSICESIRICRNNCAQNYTVPNSLLRRRFSMRNYDLSPLLRQWIGFDKLANALQSTTEQQTFPPYNIEKSDDNHYRITLALAGFRQDDLDIQLEGTRLTVKGSPEKQETETKWLHQGLVNQPFSLSFTLADHMEVSGATFTNGLLHIDLIRNVPEAIAPQRIAISERPALNS

SEQ ID NO: 56299 - protein, 431 aa, Enterobacter cloacae
  MISC_FEATURE (19)..(19): X=any amino acid
  MISC_FEATURE (37)..(37): X=any amino acid
LCPYMSIFTPKSRPDWSKXNHECDHESQRHAMFAHQXVLMLTSGQAKNHKGLYPYRLFHEDLKMLSQIQRFGGAMFTPVLLFPFAGIVVGIAIMLRNPLFVGEALTAPDHLFAQIVHIIEEGGWAVFRNMPLIFAVGLPIGLAKQAQGRACLAVLISFLTWNYFINAMGMTWGHFFGVDFSAEPTAGSGLAMIAGIKTLDTSIIGAIVISGIVTAIHNRYFEKPLPVFLGIFQGSSFVVILAFFVMIPCAWLTLLGWPKVQMGIESLQAFLRSAGALGVWVYTFLERILIPTGLHHFVYGPFIFGPAAVEGGIQVYWAQHLQEFSQSTLPLKTLFPEGGFALHGNSKVFGSVGIAFAIWYTASPENRVKVAGLLVPATLTAVLVGITEPLEFTFLFISPLLFAVHAVLAATMATVMYAFGVVGNMGGGLLD

SEQ ID NO: 56300 - protein, 92 aa, Enterobacter cloacae
QYRMRRYQNILKEQGITQSMSRKGNCLDNAVVECFFGTLKSECFYLDEFSNISELKDAVTEYIDYYNSRRISLKLKGLSPIEYRTQTYVPRV

SEQ ID NO: 56301 - protein, 179 aa, Enterobacter cloacae
EILVVLFIYFGSSQLLLTLSDGFTINLGFAQIPVQMQIENFDVSPFLCGVIALSLLYSAYGSQTLRGALKKMPQGQWESGQALGLSKSAIFFRLVMPQMWRQKNPGLGNQWLVLLKDTALVSLISVNDLMLQTKSIATRTQEPFTWYIVAAAIYLVITLLSQYILKRYGLGATRFERRP

SEQ ID NO: 56302 - protein, 378 aa, Enterobacter cloacae
MIINNVRLVLENEVVDGSVEVHEGVIRAFAETQSRTPEAMDGEGGWLLPGLIELHTDNLDKFFTPRPKVDWPAHSAMSSHDALMVASGITTVLDAVAIGDVRDGGDRLENLEKMINAVEETQKRGLNRAEHRLHLRCELPHHTTLPLFEKLVGREPVSLVSLMDHSPGQRQFANIEKYREYYQGKYSLSDAEMARYEEEQLALAAQWSQPNRLRIAAMCRDRNIALASHDDATHDHVRESHQLGSVIAEFPTTFEAAEASRQHGMNVLMGAPNIVRGGSHSGNVAASRLASLGLLDILSSDYYPASLLDAAFRVADDENNTFTLPQAIRLVTKNPASALNLQDRGEIAEGKRADLVLAHRKGEHVHIDHVWRQGKRVF

SEQ ID NO: 56303 - protein, 286 aa, Enterobacter cloacae
MPLISLADGLEHARAHRYALGAFNVLDSHFLRALFAAAKQERSPFIINIAEVHFKYVSLDSLVEAVKFEAARHDIPVVLNLDHGLHFEAVVRALRLGFSSVMFDGSTLSYEENIRQTREVVKMCHAVGVSVEAELGAVGGDEGGALYGHADEAFFTDPQLAREFVDSTGIDALAVAIGNAHGKYKGEPKLDFPRLDAIRQHTGLPLVLHGGSGISDADFRRAIELGIHKINFYTGMSQAALAAVEQRMANRQPLYDEFAELLLGIEEAITDTVAEQMRIFGSAGQA

SEQ ID NO: 56304 - protein, 714 aa, Enterobacter cloacae
  MISC_FEATURE (140)..(140): X=any amino acid
MKKVVTVCPYCASGCKIHLVVDNGKIVRAEAAQGKTNQGTLCLKGYYGWDFINDTQILTPRLKTPMIRRERGGKLEAVSWSEALDYVATRLSAIKAKYGPDAIQTTGSSRGTGNETNYVMQKFARAVIGTNNVDCCARVXHGPSVAGLHQSVGNGAMSNAINEIDNTDLVFIFGYNPADSHPIVANHVIRAKQNGAKIIVCDPRKIETARIADMHIALKNGSNIALLNAMGHVIIEENLYDQAFVATRTEGFEEYKKIVEGYTPESVEAITGVTAQEIRQAARMYAGAKTAAILWGMGVTQFYQGVETVRSLTSLAMLTGNLGKAHVGVNPVRGQNNVQGACDMGALPDTYPGYQYVKFPENREKFAKAWGVESLPEHTGYRISELPHRAAHGEVRAAYIMGEDPLQTDAELSAVRKGFEDVDLVMGQDIFMTKTAALADVILPSTSWGEHEGVYTAADRGFQRFFKAVEPKWDLKTDWQIISEIATRMGYPMRYNNTQEIWDELRSLCPDFYGATYEKMGELGYIQWPCRDESEADQGTSYLFKEKFDTPNGLAQFFTCDWVAPIDKLTDEYPMVLSTVREVGHYSCRSMTGNCAALAALADEPGYAQINTADAARLGIEDEALVWVNSRKGRIITRAQVSDRPNKGAVYMTYQWWIGACNELVTENLSPITKTPEYKYCAVRVEPIADQHAAEQYVIDEYNKLKARLRESAM

SEQ ID NO: 56305 - protein, 283 aa, Enterobacter cloacae
MKVLNELRQFYPLDELLKAAEIPRSTFYYHLKALSKPDKYADVKKRIGEIYHENKGRYGYRRVTLSLHRDGERINHKAVQRLMGTLSLKAAIKVKRYSSYRGEVGQTAPNVLQRDFKATRPNEKWVTDVTEFAVNGRKLYLSPVIDLFNNEVISYSLSERPVMNMVENMLDQAFKKLKPHEHPILHSDQGWQYRMRRYQNILKEQGITQSMSRKGNCLDNAVVECFFGTLKSECFYLDEFSNISELKDAVTEYIDYYNSRRISLKLKGLSPIEYRTQTYVPRV

SEQ ID NO: 56306 - protein, 548 aa, Enterobacter cloacae
MEIFFTILIMTLVVSLSGVVTRVLPFQVPLPLMQIAIGALLAWPTFGLHVEFDPELFLVLFIPPLLFADGWKTPTREFLEHGREIFGLALALVVVTVVGIGFLIYWAVPGIPLIPAFALAAVLSPTDAVALSGIVGEGRIPKKIMGILQGEALMNDASGLVALKFAVAVAMGTMVFTVGGATLEFFKVAIGGILAGFVVSWLYGRSLRFLSRWGGDEPATQIVLLFLLPFASYLIAEHIGVSGILAAVAAGMTITRSGVMRRAPLAMRLRANSTWAMLEFVFNGMVFLLLGLQLPGIMESSLVAAEADPNVEVWMLFTDIVLIYMALMLVRFGWLWTMKNFSVRFLKKKPMEFGSWTTRELLIASFAGVRGAITLAGVLSIPLLLPTGDVFPARYELVFLAAGVILFSLFVGVIMLPILLQHIDAGDSTQQHKEERIARAATAEVAIVAIQKMEERLAADAEENIDNQLLTEVSSRVIGNLRRRADGRNDVESSLQEENLERRFRLAALRSERAELYHLRATRQISNETLQKLLHDLDLLEALLIENQ

SEQ ID NO: 56307 - protein, 173 aa, Enterobacter cloacae
MSKPKYPFEKRLEVVNHYFTTDDGYRIISARFGVPRTQVRTWVALYEKHGEKGLIPKPKGVSADPELRIKVVKAVTEQQMSLNQAAAHFMLAGSGSVAKWLKVYEEHGEAGLRALKIGTKRNITMSVDPEKAALALELSKDRRIEDLERQVRFLEMRLTYLKKLKALAHPAKK

SEQ ID NO: 56308 - protein, 224 aa, Enterobacter cloacae
MKHIFLLLLLFTSLVRADEIGSQYKEQAEAGDARAQYYLADTYFSSGDSKQAALWAEKAAKGGDVDAMGLLSQILFTQGNYAQAKALAQQATIAGSKRGAIMLARVLVNTQAGKTDYPQAIKLLQTAAEDIDNDSAVDAQMLLGLIYANGVEVAQDDVQAASWFKRSSALSRTGYSEYWAGMLFRQGEKGFITPNKQKALYWLNLSCTEGFDTGCEEFDALSGE

SEQ ID NO: 56309 - protein, 671 aa, Enterobacter cloacae
  MISC_FEATURE (10)..(10): X=any amino acid
  MISC_FEATURE (15)..(15): X=any amino acid
CSPNNKQSLXSPYNXRFCDILLTSYKEKKSHEPIHKHDIPANIADRCLITPEQYHEKYQQSITAPDTFWGEQGHILDWIKPYQKVKNTSFAPGNVSIKWYEDGTLNLAANCLDRHLAERGNETAIIWEGDDASQSKHITYKELHRDVCRFANVLLEKGIKKGDVVAIYMPMVPEAAVAMLACARIGAIHSVIFGGFSPEAVAGRIVDSSSKLVITADEGVRAGRGIPLKKNVDEALKNPNVKTVSNVIVLKRTGGKIDWNEGRDLWWSDLIENASDQHQPEEMNAEDPLFILYTSGSTGKPKGVLHTTGGYLVYAATTFKYVFDYHPGDIYWCTADVGWVTGHSYLLYGPLACGATTLMFEGVPNWPTPARMCQVVDKHQVNILYTAPTAIRALMAEGDKAIEGTDRSSLRILGSVGEPINPEAWEWYWKKIGNEKCPVMDTWWQTETGGFMITPMPGATQLKAGSATRPFFGVQPALVDNEGNPLEGATEGNLVITDSWPGQARTLFGDHDRFEQTYFSTFKNMYFSGDGARRDEDGYYWITGRVDDVLNVSGHRLGTAEIESALVSHPKIAEAAVVGIPHNIKGQAIYAYVTLNHGEEPSPELYAEVRNWVRKEIGPLATPDVLHWTDSLPKTRSGKIMRRILRKIAAGDTSNLGDTSTLADPGVVEKL

SEQ ID NO: 56310 - protein, 104 aa, Enterobacter cloacae
MIRKAFVMQVNPDAHKEYAHRHNPIWPELEAVLKDHGAHRYAIYLDRERSLLFATVEIDSEERWNAVASTDVCQRWWKHMRDVMPSNPDNSPVSTGLEEVFYLD

SEQ ID NO: 56311 - protein, 232 aa, Enterobacter cloacae
MNKILLVDDDRELTSLLKELLDMEGFNVLVAHDGEQALSLLDDSIDLLLLDVMMPKKNGIDTLKELRQTHQTPVIMLTARGSELDRVLGLELGADDYLPKPFNDRELVARIRAILRRSHWSEQQQNTDNSSPTLEVDSLSLNPGRQEASFDGQTLELTGTEFTLLYLLAQDLGQVVSREHLSQEVLGKRLTPFDRAIDMHISNLRRKLPERKDGHPWFKTLRGRGYLMVSAS

SEQ ID NO: 56312 - protein, 105 aa, Enterobacter cloacae
MAEWSGEYISPYAEHGKKSEQVKKITVSIPLKVLKILTDERTRRQVNNLRHATNSELLCEAFLHAFTGQPLPNDEDLRKERSDEIPEEAKVIMRELGIDPDTWEY

SEQ ID NO: 56313 - protein, 281 aa, Enterobacter cloacae
MSQTSTLKGQCIAEFLGTGLLIFFGVGCVAALKVAGASFGQWEISIIWGLGVAMAIYLTAGVSGAHLNPAVTIALWLFACFDGRKVVPFILSQFAGAFCAAALVYGLYYNLFIDFEQTHHMVRGSVESLDLAGIFSTYPNPHINFVQAFAVEMVITAILMGVILALTDDGNGIPRGPLAPLLIGLLIAVIGASMGPLTGFAMNPARDIGPKAFAFIAGWGDVAFTGGKDIPYFLVPLFAPVVGAALGAFSYRKLIGRHLPCDTCVEEEKETTSTAQQKASL

SEQ ID NO: 56314 - protein, 502 aa, Enterobacter cloacae
MTEKKYIVALDQGTTSSRAVVMDHDANIVSVSQREFEQIYPRPGWVEHDPMEIWASQSSTLVEVLAKADISSDEIAAIGITNQRETTIVWERETGKPIYNAIVWQCRRTSEICEQLKRDGMEEYVRSATGLVVDPYFSGTKVKWILDHVEGSRERAKRGELLFGTVDTWLIWKMTQGRVHVTDYTNASRTMLFNINTLEWDDKMLDALDIPRAMLPEVRKSSEVYGQTNIGGKGGTRIPIAGIAGDQQAALFGQLCVKEGMAKNTYGTGCFMLMNTGEKAVKSENGLLTTIACGPRGEVNYALEGAVFMAGASIQWLRDEMKLISDAFDSEYFATKVKDTNGVYVVPAFTGLGAPYWDPYARGAIFGLTRGVNSNHIIRATLESIAYQTRDVLEAMQADSGIRLHALRVDGGAVANNFLMQFQSDILGTRVERPEVREVTALGAAYLAGLAVGFWQNLDELQEKAVIEREFRPGIETTERNFRYSGWKKAVKRALAWEEHEE

SEQ ID NO: 56315 - protein, 176 aa, Enterobacter cloacae
VTTIVSVRRNGHVVIAGDGQATLGNTVMKGNVKKVRRLYNDKVIAGFAGGTADAFTLFELFERKLEMHQGHLVKAAVELAKDWRTDRMLRKLEALLAVADETASLIITGNGDVIQPENDLIAIGSGGPYAQAAARALLENTDMNARDIAVKALDIAGDICIYTNHNHTIEELTSKA

SEQ ID NO: 56316 - protein, 336 aa, Enterobacter cloacae
MKRELAIEFSRVTEAAALAGYKWLGRGDKNTADGAAVHAMRIVLNQVNIDGTIVIGEGEIDEAPMLYIGEKVGTGKGDAVDIAVDPIEGTRMTAMGQANALAVLAVGDKGCFLNAPDMYMEKLIVGPGAKGAIDLSLPLEENLQNIAKALGKPLSELTVTILAKPRHDATIAQMQKLGVRVFAIPDGDVAASILTCMPDSEVDVLYGIGGAPEGVVSAAVIRALDGDMQARLLPRHEVKGDSEENRRIGENELARCEAMGIEANKVLALDEMARSDNVVFSATGITKGDLLDGITRKGNMATTETLLIRGKSRTIRRIQSIHYLDRKDPDVQTHIL

SEQ ID NO: 56317 - protein, 419 aa, Enterobacter cloacae
  MISC_FEATURE (416)..(416): X=any amino acid
LEQAWELAKQRFAAVGVDVETALRQLDRLPVSMHCWQGDDVAGFENPGGSLTGGIQATGNYPGKARNATELRADLELALSLIPGPKRLNLHAIYLESDAPVARNEIKPEHFKNWVEWAKTNNLGLDFNPSCFSHPLSADGFTLAHANDKIRQFWIDHVKASRRVSAYFGEQLGTPSVMNIWIPDGMKDITVDRLAPRQRLLAALDEAISEKLDPAHHIDAVESKLFGIGAESYTVGSNEFYMGYATSRQTALCLDAGHFHPTEAISDKISAAMLYVPRLLLHVSRPVRWDSDHVVLLDDETQAIASEIIRHDLFDRVHIGLDFFDASINRIAAWVIGTRNMKKALLRALLEPTAVLKQLEENGDYTARLALLEEQKSLPWQAVWEMYCQRNDAPAGSQWLENVRAYENNVLSKRGXFCP

SEQ ID NO: 56318 - protein, 491 aa, Enterobacter cloacae
MHSKPSRRPFSLALRLTFFISLSTILAFIAFTWFMLHSVEKHFAEQDVSDLQQISTTLSRILQSPADPDEKKVSKIKESIASYRNVALLLLNPRGEVLLSSAQGAALRPAVNSADFSEHSRARDVFLWTVEDPAGPMDTGSGMKMETYRIIASSGQAIFQGKQQNYVMLTGLSINFHLHYLDALKKNLIAIAVVISLLIVLIIRIAVRQGHLPLRNVSNAIKSITSENLDARLEPTRVPIELEQLVISFNHMIGKIEDVFTRQANFSADIAHEIRTPITNLVTQTEIALSQDRTQKELEDVLYSSLEEYNRMTKMVSDMLFLAQADNNQLIPDRVMFDLRAEVMKVFEFFEAWAEERNITLKFDGMPCLVEGDPQMFRRAINNLLSNALRYTPEGQAITVSIREQESFFDLVIENPGKPIPEEHLSRLFDRFYRVDPSRQRKGEGSGIGLAIVKSIVEAHHGRVQVESDVRSTRFILSVPRLEKMIPETQC

SEQ ID NO: 56319 - protein, 341 aa, Enterobacter cloacae
MMPRSLSQTGESKRRFSWPTGTPQIAALLVVLLVDSLVAPHFFQIIVQDGRLFGSPIDILNRAAPVALLAIGMTLVIATGGIDLSVGAVMAIAGATAASMTVSGHSLPVVLLAALGTGVLAGLWNGILVAVLKIQPFVATLILMVAGRGVAQLITSGQIVTFNSPSLAWIGSGNLLFFPTPVIVALVTLIVFWLFTRKTALGMFIEAVGINIRAARNAGVNTRLIVMLTYVLTRVCAAIAGVIVAADIRGADANNAGLWLELDAILAVVIGGGSLMGGRFNLLLSVIGALIIQGMNTGILLSGFQPELNQVVKAVVVLCVLIVQSPRFVSIIKGIRGHDKT

SEQ ID NO: 56320 - protein, 125 aa, Enterobacter cloacae; identical to SEQ ID NO: 56207

SEQ ID NO: 56321 - protein, 682 aa, Enterobacter cloacae
MALEPLVATASTGPSDELHDMTRRFWLGLLLAFPVLVLEMGSHLFPDLRNTVPPQYNTWLQLLLASPVVLWCGWPFFARAGMSLRNRSLNMFTLVAMGTGVAWVYSVIATVFPSWFPASFRNMDGLVAVYFEAAAVITVLVLLGQVLELRAREQTSGAITALLNLAPKTARRLDHDGHETDINAEDVLPGDKLRIRPGESIPVDGIVIEGKTTVDESMVTGESMPVTKTKGDPVIGGTINQTGSLIIRAEKVGDETMLSRIVQMVADAQRSRAPIQRMADSVSGWFVPLVILIAVVAFLIWSVWGPEPRMVHGLIAAVSVLIIACPCALGLATPMSIMVGVGKGAQAGVLIKNAEALERLEKVDTLVVDKTGTLTEGSPTVTGIISLSPGGEISLLRVTAAVEKGSQHPLGMAVVRAAHEKGIVIPAVSNFNAPSGKGVSGDVEGQRVVIGNELAMQENSIVIDNQKAVADTLRMEGATVIYVATDGNLAGLIAISDPVKATTPDALKALRQAGIRIVMLTGDNQLTAEAVARKLGIDEVEAGILPDGKKAVITRLKESGHVVAMAGDGVNDAPALAAADVGIAMGTGTDVAIESAGVTLLKGDLMILNRARHLSEITMKNIRQNLFFAFIYNALGVPVAAGLLYPVYGILLSPVIAAAAMALSSVSVIANALRLKSVRLGK

SEQ ID NO: 56322 - protein, 91 aa, Enterobacter cloacae
MTSVSISCPSCSATEGVVRNGKSTAGHQRYLCSHCRKTWQLQFTYTASQPGTHQKIIDMAMNGVGCRASARIMGVGLNTILRHLKNSDRSR

SEQ ID NO: 56323 - protein, 484 aa, Enterobacter cloacae
MYIGIDLGTSGVKAILLSEQGDVLATQTETLQVSRPHSLWSEQDPEQWWQATDRAIKALGEQHSLRDVKALGIAGQMHGATLLDSQHRVLRPAILWNDGRCAEECALLEERVPNSREITGNLMMPGFTAPKLLWVQRHEPEIFRQVAKVLLPKDYLRFRMTGDFASDMSDAAGTMWLDVAKRDWSEAMLDACHLTREHMPALYEGCEVTGALLPAVAERWNMPAVPVVAGGGDNAAGAVGVGMVEAGQAMLSLGTSGVYFAVSDGYRSNPESAVHSFCHALPGKWHLMSVMLSAASCLDWAAKLTGMADVPALISAAQQADDAAGTVWFLPYLSGERTPHNNPEAKGVFFGLTHQHGPAELARAVLEGVGYALADGMDVVHDCGLKPTSVTLIGGGARSPYWRQMLSDISGLQLDFRTGGDVGPALGAARLAQIAIHPEQPFSQLLPQLTLEQAHLPDAERHARYAERRDVFRKIYQQLLPLMS

SEQ ID NO: 56324 - protein, 303 aa, Enterobacter cloacae
MQKFDTKTFQGLILTLQDYWARQGCTIVQPLDMEVGAGTSHPMTSLRALGPEPMATAYVQPSRRPTDGRYGENPNRLQHYYQFQVVIKPSPDNIQELYLGSLKELGMDPTIHDIRFVEDNWENPTLGAWGLGWEVWLNGMEVTQFTYFQQVGGLECKPITGEITYGLERLAMYIQGVDSVYDLVWSDGPLGKTTYGDVFHQNEVEQSTYNFEYADVDFLFTCFEQYEKEAQQLLALETPLPLPAYERILKAAHSFNLLDARKAISVTERQRYILRIRTLTKAVAEAYYASREALGFPMCNRNK

SEQ ID NO: 56325 - protein, 688 aa, Enterobacter cloacae
MSEKTFLVEIGTEELPPKALRSLAESFAANVTAELDNAGLAHGKIEWFAAPRRLALKVANLAASQPDREVEKRGPAIAQAFDAEGKPSKAAEGWARGCGITVDQAERLTTDKGEWLLYRAHVKGESAEALLPDMIATSLAKLPIPKLMRWGASDVHFVRPVHTVTLLLGDTVIPATILGVASDRVIRGHRFMGEPEFTIDNADQYPQILLERGKVIADYEQRKAKIKADAEDAARKIGGNADLSDSLLEEVTSLVEWPVVLTAKFEEKFLAVPAEALVYTMKGDQKYFPVYANDGKLLPNFIFVANIESKDPIQIISGNEKVVRPRLADAEFFFNTDRKKRLEDNLPRLQTVLFQQQLGTLRDKTDRIAELSGWIAREIGADVNHATRAGLLSKCDLMTNMVFEFTDTQGVMGMHYARHDGEAEDVAVALNEQYQPRFAGDELPSNPVACAVAIADKMDTLAGIFGIGQHPKGDKDPFALRRAALGVLRIIVEKNLNLDLQTLTEEAVRLYGDKLTNANVVDDVIDFMLGRFRAWYQDEGYTVDTIQAVLARRPTRPADFDARMKAVSHFRTLEAASALAAANKRVSNILAKSDETLNERVNAATLKEPEEIALAMQVVVLRDKLEPYFAEGRYQEALVELAELRDVIDAFFEKVMVNVEDKELRINRLSMLEILRELFLRVADISLL

SEQ ID NO: 56326 - protein, 70 aa, Enterobacter cloacae
MSAKMTGLVKWFNADKGFGFITPDDGSKDVFVHFSAIQNDGYKSLDEGQKVSFTIESGAKGPAAGNVVSL

SEQ ID NO: 56327 - protein, 133 aa, Enterobacter cloacae
MFVIWSHEKGFIMSHQLTFADSEFSSKRRQTRKEIFLSRMEQILPWQNMVEVIEPFYPKAGNGRRPYPLETMLRIHCMQHWYNLSDGAMEDALYEIASMRLFARLSLDSALPDRTTIMNFRHLLEQHQLARQL

SEQ ID NO: 56328 - protein, 246 aa, Enterobacter cloacae
MTIKYNLLIAATLFATSSAMAGDFSLGAGAVFNESPYKGYNENTTAVPLISYEGDNFYVRQTTGGWILWKDAKNELSLTASWMPLHFDPDDNDDHQMKQLDERKASAFLGGAYYRHESWGSLKVAVSGDATDESGGMIGEVSYFRPIRMERLTLTPSVGIFYSDESYNDYYYGVSGSESRRSGLDEYTAGDSWTPYVGLAAKYQLTQKLYLNASAVYTVLPDDVKNSPMIDRDDSFALMTGLTWRF

SEQ ID NO: 56329 - protein, 202 aa, Enterobacter cloacae
MKLIGSYTSPFVRKISILLLEKGIEFEFINEQPYNAENGVAQYNPLGKVPALVTDEGEYWFDSPIIAEYIELLGVAPAMLPADPKAALAVKQIEALADGIMDAALTSVREQARPVAQQSETELLRQREKISRSLDRCEQLIREGKIQTDSLNLATIAIACAIGYLNFRRVSPGWCVDRPLLVKLADTLFSRESFARTEPPKA

SEQ ID NO: 56330 - protein, 399 aa, Enterobacter cloacae
MEDLNDGLRTPGAIMLGGGNPAQIPEMNTYFQTLLAQMLESGKATDALCNYDGPQGKTELLALLAEMLRDELGWDIEPQNIALTNGSQSAFFYLFNLFAGRRADGTTKKVLFPLAPEYIGYADSGLEEDLFVSARPNIELLPEGQFKYHVDFEHLHIGEETGMICVSRPTNPTGNVITDDELMKLDALANQHGIPLVIDNAYGVPFPGIIFSEARPLWNPNIVLCMSLSKLGLPGSRCGIIIANEKIITAITNMNGIISLSPGGIGPAMMCEMIKRNDLLRLSNDVIKPFYYQRVQETIAILRRYLPEERCLIHKPEGAIFLWLWFKDLPITTELLYQRLKKRGVLMVPGDYFFPGLDKPWPHTHQCMRMNYVPDPEKIEAGVKILAEEIEKAWREDGQ

SEQ ID NO: 56331 - protein, 534 aa, Enterobacter cloacae
PTGEKNASRNYPCCTTNSKETVMTNNPPSSRIQPGEYGFPLKLKPRYDNFIGGDWVAPVDGEYYSNLTPVTGQPLCEIASSGKRDIDLALDAAHKAKDKWGHTSVQDRAAILFKIADRMEQNLELLATAETWDNGKPIRETMAADVPLAIDHFRYFASCIRAQEGGISEVDSDTVAYHFHEPLGVVGQIIPWNFPLLMASWKMAPALAAGNCIVLKPARLTPLSVLLLMEIVGDLLPPGVINVVNGAGGEIGEYLATSKRIAKVAFTGSTEVGQQIMQYATQNIIPVTLELGGKSPNIFFADVMEEEDAFFDKALEGFALFAFNQGEVCTCPSRALVQESIYERFMERAIRRVESIRSGNPLDNVTQMGAQVSHGQLKTILNYIDIGKKEGADILTGGRRKVLGGDLQEGYYLEPTILFGQNNMRVFQEEIFGPVLAVTTFKTMEEALEIANDTPYGLGAGVWSRNGNLAYKMGRGIQAGRVWTNCYHAYPAHAAFGGYKQSGIGRETHKMMLEHYQQTKCLLVSYSDKPLGLF

SEQ ID NO: 56332 - protein, 330 aa, Enterobacter cloacae
MKIKNLTLTLCATLLLASFAGHAKEVKIGMAIDDLRLERWQKDRDIFVKKAESLGASVFVQSANGNEETQMSQIENMINRGVDVLVIIPYNGQVLSNVVKEAKQEGIKVLAYDRMINNADIDYYISFDNEKVGELQAQSLIDKVPQGNYFLMGGSPVDNNAKLFREGQMKVLKPYIDNGKIKVVGDQWADGWLPENALKIMENALTANNNKIDAVVASNDATAGGAIQALSAQGLAGKVAISGQDADLAGVKRIIAGTQTMTVYKPITQLANTAAEIAVELGNGKQPKADATLNNGLKDVPARLLTPIEVNKENIDATVVKDGFHKKSEL

SEQ ID NO: 56333 - protein, 461 aa, Enterobacter cloacae
MSIQYYSCINDSPHTLIMELNMQAYFDQLDRVRYEGPKTTNPLAFRHYNPDELVLGKRMEDHLRFAACYWHTFCWNGADMFGVGSFDRPWQQPGEAIELAKRKADVAFEFFHKLNVPYYCFHDVDVSPEGASLKEYLNNFAQMVDVLAAKQQQSGVKLLWGTANCFTNPRYGAGAATNPDPEVFSWAATQVVTAMNATHQLGGENYVLWGGREGYETLLNTDLRQEREQIGRFMQMVVDHKHKIGFRGTLLIEPKPQEPTKHQYDYDVATVYGFLKQFGLEKEIKVNIEANHATLAGHSFHHEIASAIALGIFGSVDANRGDAQLGWDTDQFPNSVEENALVMYEIVKAGGFTTGGLNFDAKVRRQSTDKYDLFYGHIGAMDTMALALKVAARMIEDGELDKRVAKRYSGWNSELGQQILKGQLSLAEIAKYAEQQQLAPQHQSGHQELLENLVNHYLFDK

SEQ ID NO: 56334 - protein, 172 aa, Enterobacter cloacae
VENLTIEMLSEGTDYDFEDFDCGEHSLNAFLAEHLVRQHNGRILRAYLLKERDRPRVLGYYTLSGSCFERAMLPSKTQQRRIPYINVPSVTLGRLAVDKTLQGNEWGTTLVAHAMRVVYLASQAVGVHGIFVDALNERAKRFYLKQGFIPLTGENSHSLFFPTKSIERLFEQ

SEQ ID NO: 56335 - protein, 50 aa, Enterobacter cloacae
  MISC_FEATURE (19)..(19): X=any amino acid
  MISC_FEATURE (25)..(25): X=any amino acid
MLSALIFSAFSYRAVPLAXQPEHQXCVHSGPLVLGAAPLNSPAPTADRDR

SEQ ID NO: 56336 - protein, 1630 aa, Enterobacter cloacae
  MISC_FEATURE (50)..(50): X=any amino acid
IIATAVSDEEEERATRLLKNEFALRDALQDSWAIRAVASTQYRGRFALVXAPFSFELLARRAGRAISGIARFLEMAIQICVPLRHMHLQNLIHGDIKPGSIFVHHDATCRLGSFGLSSSLSDAVTQTRLAVSGGTPAYMSPEHTTRTQRPVDGRSDLYSLGMVLYELLTGRLPFELGEDEQTNWAHYHIASAPLAPDAIRPDVPGMLSTIILKLLEKHPDNRYQTVDGLIADLRRCQATLTCEGEIVAFTPGQQDRTPAIHLADSLFATHPQANDVIAAFERVGQSLVPELVTIGGPSGIGKSSIIATALKTLQQRTVLLAVGKVDQFSPSLPYGVLSSAFRTLTLHLLGLPAEEVAKWKIRLSRALEGYEALAVSLVPELGLLLESKPRFSADTFSIDARARFSHMVLALVKTFASQGCPLVLVLDDLQWSDAASLHTLKYLLMNCGAVPLLVVAAHRDISAVSDAALQALLAGLPEAAQNASEIVPQALSVKAVARWLATVFRTRSAATTDLATLIHEKTGGNPLFVHEFFRRIVDDGLVVHNKYQDKWHYDLQAIRARHYTENVVTLVLEQLEELPDETRRLLGSIACLGGTGEMEMICRVVGMSMAEMRYALHPAVMAQLIVLAEKKYAFTHDRVQEAAFALLDRHERSHIHLTTASLLADAARQAAGNELLFRAVHHVTAALDSIQPAPQREMFRELSLLAARRAKRSGDYLSALGYIQTARALGNAGTVSDFMLDIEEAGCEFALGHLERTRELCDAILGCPGGLTEKALAANLLVEVYIRQSDSRLALEAALCWLGIFGIQISRYPEDADCDEAWALFCNRTADAPQNLFAQLSRLDNPETEAVMNLLYSASICASFICPRLHFLLLCRMMHLTLDHGITGASTTAMAWFGVLIGHRYAEYRLGFQYGTLARELVNRHGYDAFEAKNLLPLDQLSVWTQPLSFTIECAKACFTSAVTHGDMTMACFAACHQVINFLSRGDHLDGVLTSIERGLAFVRKTHFQDVETILMVQRGYVEFLRTPVIGTWTASQVLPEALLPASPEQAPEKNSTMLFWYWLYRGMAHFTCGEYADAQADLEMAGWYAWSAPGHIHLLDYHLYSALALSRQLTPETFSANHRRSIHAHYDKIALWARVNPGTFADKEALIYAEIVRLDGMNSIALEQYEKAVRLSREGGFNPINALAHELAGRFALACGYPTASDAHFRGAIAAWGRAGAQAKVRQLEQDFPHLLASGQASAYDTVAFAQNETIRDLQSVIKASRALSEEINLERLIENLMTILLERAGAQRGLLLRVSESLIPEIEASAWTSTEGVRVRILKDVPTATDLPLSVLAAVIRTGQEIRTGRPEEFHPFSQDPYLVTSGAAVMCVPMFKQARLVGVLYLENRLMPEVFTAEHSRVVSLLGAQAAVSLETARLYAELLAENIQRRRVEKELRSSQTSLMLGEQISHTGSWRWELEQDLMFVSEEYARILGLPERQKTISMAEFLTFVHEDDYARISAIVTQSVRDGLSMRAEFRVKRTDGSTRYILGIGDPVGVGSEVNEYYGIITDITSQRAAEDAMRVAQADLARVSRATTVGQLTSSIAHEINQPLMSIVSNAGASLRWLNREPARLDKVREGLEEIA

SEQ ID NO: 56337 - protein, 122 aa, Enterobacter cloacae
  MISC_FEATURE (19)..(19): X=any amino acid
  MISC_FEATURE (25)..(25): X=any amino acid
MLSALIFSAFSYRAVPLAXQPEHQXCVHSGPLVLGAAPLNSPAPTADRDRTVSRRSKPSSRTTLNGEQPYPWDLLQPQDVMSRHRGAKHRRRYELLGGISLLSPEYLLSVERWPFHSEPPDH

SEQ ID NO: 56338 - protein, 503 aa, Enterobacter cloacae
MKTARILINTPASQGGIGDLYNFKLAPSLTLGCGSWGGNSISENVGPKHLINKKTVAKRAENMLWHKLPKSIYFRRGSLPIALDEVITDGHKRALIVTDRFCSTTATLTRSPCTESGWVETEVFFEVEADPTLSVVRKGAELANSFKPDVIIALGGGSPWTPRKSCGSCTSILKPHFEELALRFMDIRKRIYKFPKMGVKAKMIAVTTTSGTGSEVTPFAVVTDDATGQKYPLADYALTPDMAIVDANLVMEMPKSLCAFGGLDAVTHALEAYVSVLASEFSDGQALQALKLLKENLPASYNEGSKNPVARERVHSAATIAGIAFANAFLGVCHSMAHKLGSQFHIPHGLANALLISNVIRYNANDNPTKQTAFSQYDRPQARRRYAEIADHLGLSAPGDRTAAKIEKLLAWLESLKAELGIPKSIREAGVQEADFLAHVDKLSEDAFDDQCTGANPRYPLISELKQILLDTFYGREFKEGDVAAVKTEAPVIKADKKAKKSA

SEQ ID NO: 56339 - protein, 63 aa, Enterobacter cloacae
MFVIWKPEKGFIVSHQLTFADSEFSSKRRQTRKEIFLSRMEQILPWQNMVEVIEPFYPKAGNG

SEQ ID NO: 56340 - protein, 329 aa, Enterobacter cloacae
  MISC_FEATURE (285)..(285): X=any amino acid
  MISC_FEATURE (309)..(309): X=any amino acid
GLFAITGATGAGKTTLLDAICLALYHETPRLQKVSQAQNDLMTRDTAECLAEVEFEVKGTAYRAFWSQNRARNQPDGNLQAPRVELARCEDGKILADKVTDKLEQTAALTGLDYGRFTRSMLLSQGQFAAFLNAKPSDRAELLEELTGTEIYGQISAMVFEKHKAARSVLEKCEAQAAGVVLLSEEQQQQLQQSLQALTDEEKTLLVQQQSQQKDFQWLTRHDELVLEQQRVTAMQQQAQQALTNAAPELAKLQLALPAAQLRPLWEHQQEQTARLEANPAANYXSKYSLTSQNRAARADPSYRPAESXAASDRTDGAGAVAWRSTNAI

SEQ ID NO: 56341 - protein, 368 aa, Enterobacter cloacae
YLGRMYYLNGQDNSMILISTLPLKDLSSGFKETTVGSIVDSRRAEMLQQANALDERESFSSLRRLAWQNGHYFTLRTTFNQPGHLATVVAFDLPINDLIPPDMPLDSFRLEPDSSTQNMRAASDKEAAESVSISFNGSKIEIASSLNSTGMRLVWQVPFGTLLLDTLQNILLPLLLNIGLLALALFGYSTFRFQTGRQSDASAVPAGTNNELRVLRALNEEIVSVLPLGVLVHDQEANRTVMSNKIADHLLPHLNLQNITTMADQHQGVIQATINNELYEIRQFRSQVAPRTQIFIIRDQDREVLVNKKLKQAQRLYEKNQQGRAAFMQNIGDAFKQPLKTLATQAAALNTSESHQLACQARFAGQNG

SEQ ID NO: 56342 - protein, 681 aa, Enterobacter cloacae
  MISC_FEATURE (39)..(39): X=any amino acid
VATRYRVACSPGSLIAGAPWLKGKPMVPALTQLARERAXSFQLLTDDRQAINSWRLPVVVAMNDGRIGVIEHFDGDDTLEVRFFADETYTNRLSMTAMLPAIRHVIALRPLAALKDSRVDAYISKYRPDWLYRLVMRDLRPYSWVMLAALFINVLSLSGIVFSMQVYDRVIPAQSYPTLYVLTIGVLIATLFGFRVRVASGHIMDLLGKRSDMRVSDRVLGHALRCANSAIPRSTGSFISQLRELEQIREMVTSSTISTIVDLPFFLLFVVVLAIIAPQLAWIAPVAAVIMVLPGLLLQKKLAELAKQSAHESTLRNAVLVESVQGLEDIKLMQAENRFLQQWNSYIQITAESGLRTRELTQNLISWGMTIQSLVYAGVIVVGAPMVIDGTLTTGSVVAASMLASRMIAPMATLCGVLARWQQVKAAKEGLDSIMQLPTENQREETPIRQDVLRGHYLFEQAQFRYQPDDPRMALRINRLEIRPGEKVAILGRNGAGKSTLLQAMAGGMDLAAGELRLDNFSLPHLDVADVRRNVGFMTQNARLFYGTLRENITLGMPRATDEEIFEALELTGAAGFVQKLPKGLDYPIMENGVGLSGGQRQSILLARMLLRDPNIVLMDEPTASLDEHTEREFIQRLGDWLGHRTLIVATHRVPVLELVERVVVLKEGMLVMDAPKAQAL

SEQ ID NO: 56343 - protein, 676 aa, Enterobacter cloacae
LEEDKVACEKHSGPQYLAEGSKSVFINGQPAVRAKDRTTCEGTVSDDVSPNVIIGGDTLTVRDIKSGKTPGLALGMIALSLLRGRPGKILKNMPCALAAAGGGMLADMAVNAVFGSSHPVHAATGVKVLNDDDELDFSLPGRFPLRWQRSYNSLTTREGLFGLGWATTFDSYLTLEDNNATWFDETGRELSFELPPVDRAFYSISEGIIIRRNENGDVAIADDDGSVWRLYKPTRANPSILRLASLSDEYGNALLTEWDEHGRLVGLHDEPRAIDVTLRYDDERFPQRVTAASHFDGSHTWPLMQWGYDARGQLASATDASGVVTREYRYNEHGLMVWHRMPGGLESEYRWKKFDHWRVVENRTSTGDGCRFSYDLAAGLATVEHYDGQTRRHYWNAQNLIVRYVDERGAKLAYEWDENELLTRRIDPLGNAVTFVYDDMGNRVQEIDVDGNTRTTTWLEHRALPAAIIEADGSATRFWYDEHHGLKRVVDPMGQTTQLRRDAFGQVVEEVDAAGNSRYQEYNEAGQIVRSTDCSGRITRYRYHPLGWLVAETGADGEETRYRYDAAGRPVQLDRPEGWTESLKWNERGLPVKHAGADGKESEFIYDEAGRLTATRNPQGEVVRRRWDSRGRLIALENENGERSQFRWGADSLLLEEVGLDAYSQYRYDACGRTIA

SEQ ID NO: 56344 - protein, 146 aa, Enterobacter cloacae
MKYTLQEGSFSLFPAAWQDNSMNIIRDDESGLSVVVSRGVIPDGSDYEQEFHRQWDVLRPQMGEIAQSEFRNVKAGPDGKINGLEVETTFERNGQRLWQKQLAVQTPGKPVLMIFTLSALRAFTEEDEVRWSALKQSLTLNDNRNV

SEQ ID NO: 56345 - protein, 329 aa, Enterobacter cloacae
MRQSNLCLEIALPTKPLEDVNDENGEIALCTLSAFNLGAIKSLDELEELAVLAVRALDALLDYQDYPIPAAKRGAMGRRTLGIGVINFAYWLAKNGKRYSDGSANNLTHQTFEAIQYYLMKASNELAKEQGACPWFNETTYAKGILPIDTYKKDLDAIVSEPLHLDWEGLRESIKTHGLRNSTLSALMPSETSSQISNATNGIEPPRGHVSIKASKDGVLRQVVPDYETLGNNYELLWEMPNNDGYLQLVGIMQKFIDQSISANTNYDPTRFPSGKVPMQQLLKDLLTAYKFGVKTLYYHNTRDGAEDAQDDMVPSIQDDGCESGACKI

SEQ ID NO: 56346 - protein, 60 aa, Enterobacter cloacae
MSTIDAQAVAQRIDTVLDILVAGDYHSAIRNLEILKSELLAQNGADNAPENGQPKAPWEV

SEQ ID NO: 56347 - protein, 713 aa, Enterobacter cloacae
  MISC_FEATURE (38)..(38): X=any amino acid
VSRTIMLIPTGTSVGLTSVSLWRYPCYGTQRRSSERLXANRPATCRWRCTRQTTTIVRKNSNLPAAEPLKMSHVESLLSSNQKDVLMEEIIANYHANAQDAEVVLVEGLVPTRKHQFAQSLNFEIAKTLNAEIVFVMSQGTDTPEQLNERIELTRSSFGGAKNTNITGVIVNKLNAPVDEQGRTRPDLSEIFDDSSKAKVIKVDPAKLQESSPLPVLGAVPWSFDLIATRAIDMARHLNATIVNEGDINTRRVKSVTFCARSISAHAGTFPRRSLLVTSADRPDVLVAACLAAMNGVEIGAILLTGAYEMDPRVSKLCERAFATGLPVFMVNTNTWQTSLSLQSFNLEVPVDDHERIEKVQEYVAGYINADWIESLTATSERSRRLSPPAFRYQLTELARKAGKRVVLPEGDEPRTVKAAAICAERGIATCVLLGNPDEITRVAASQGVELGAGIEIVDPEVVRESYVARLVELRKSKGMTEAVAREQLEDNVVLGTLMLEQDEVDGLVSGAVHTTANTIRPPLQLIKTAPGSSLVSSVFFMLLPEQVYVYGDCAINPDPTAEQLAEIAIQSADSAIAFGIEPRVAMLSYSTGTSGAGSDVEKVREATRLAQEKRPDLMIDGPLQYDAAVMADVAKSKAPNSPVAGRATVFIFPDLNTGNTTYKAVQRSADLISIGPMLQGMRKPVNDLSRGALVDDIVYTIALTAIQSSQQQ

SEQ ID NO: 56348 - protein, 477 aa, Enterobacter cloacae
MVRNLLCQPIRCQALFSLSPAGQTSQRTASLNPEEYEMTTTRTLFKGGIILTLDADIPNLSVGDVLVHGDRIAAVGPELQADDALVIDAAGHIVMPGLVDAHHHMWLGVMRRMMPNVDDLFDYIDVVAEKLGKHYRPLDMYLSTRLTALASLDAGITTIIDACHNSRSPEHTDAALDALKESGIRALHMVGAAMDKEASSAHLPADLERLSRSWNTSDSLVHVGLFGQLNLDWWKVARKLDMRILTEFIGDLANLGPEFATPGVLGTHNIFNHCSRVPQDTWKLLADSGVNITVNPRSDALFGFDDESFAYQQAVDRGLTPALGIDLDTAFGSDMFGEMHALFGQQRSAMRYRRFRGEDNVPSPITAEEVLKAATVNGARAAGLEDQIGTLTPGKQADIIMVRTSGAAVFPVTNVIGTVVQAIERSDVDTVMVAGQLRKRAGKLVDIELAALSTEITASRDYLLNASGYHIDLFKAS

SEQ ID NO: 56349 - protein, 338 aa, Enterobacter cloacae
MFVIWSHEKGFIMSHQLTFADSEFSSKRRQTRKEIFLSRMEQILPWQNMVEVIEPFYPKAGNGRRPYPLETMLRIHCMQHWYNLSDGAMEDALYEIASMRLFARLSLDSALPDRTTIMNFRHLLEQHQLARQLFKTINRWLAEAGVMMTQGTLVDATIIEAPSSTKNKQQQRDSEMHQTKKGNQWHFGMKAHIGVDAKSGLTHSLVTTAANEHDLNQLGNLLHGKEQFVSADAGYQGAPQREELAEVDVDWLIAERPGKVRTLKQHPRKNKTAINIEYMKASIRAKVEAPVSHHQATVRLRESQIQGVAEKDNQLAMLFTLANLFRADQMIRQWERSH

SEQ ID NO: 56350 - protein, 1085 aa, Enterobacter cloacae
MQSAAHQEKYFQQYIIDRFVEQGWKLGDSKFYDTERAVYPEDLENWIKSSGQQEKWDKLERLNGAKTLEVLMDRLDKALEKQGTMQVLRQGFSIAGCGLIEMTEAAPEDKRNAAVIERYQANILRVVPELKYHPAREFAIDLVLFINGLPVATVELKTDFTQSCEAAMDQYRNNRRPYDAKTKRREPLLTFKRGAVVHFAMSDSEIMMATKLDGENTFFLPFNKGRKDESGTVHAGNPPGEIKADGTQEYPVAYFWEEVCEPDAWLRIFHSFVYVEKKDVVDIQGNWSKKETLIFPRFHQWTAVNQMLADARENGAGMTYLCDHSAGSGKTSTISWTAHDLVKLREDNGDAVFNSVIIVTDRNVLDGQLQDAVKQIDHQFGVIAAIDRQKSSKSKSKQLSEALLSGTPIVVVTIQTFPYAMEAIITDKALKGKNFAVIIDEAHNSQTGSTAAKLQAALGMSGQGKMSTMTVDELLEQLQKSRARPENISYFAFTGTPKHSTLMLFGRPADTSQPASDDNPPQAFHLYTMRQAIEEKFILDVLNGYVPYKTAFNLSKQLEDSKRVSGKAAKRALAQWMSLHPTNVTQKVQFIVEHFTKNVAHRLDGKAKAMVVTSSRAAAIRYKKAFDRYIEQHSEYGFIHSLVAFSGKMTGKQVMHQDDGEFKDDVFIVDENEEFTEQSMNPDVHGQDLRFAFDRPEYRVMLVADKFQTGFDQPKLVAMYVDKKIANHVEIVQTFARLNRTAPGKDEVFIIDFVNDPENVRKAFATYDKGAHIGEVQDLNVVYEIKERLDEHGLYDEKDLAAFKEARFKTIRDITHTKSPQHKALYAATAGATALYNDKMKMLRDGMATWEAAFEKARAKGDEAGMKSADHHQDEYAEQIKALMGFKSDLGRFCRTYSYIAQLIDFGDPELENFAAFAKLLQKRLQHEAPETVDLTGLVLTGFDINARPDDVEDEGKTPVLQPAGAGGGGAVGDKPKFVKEIIERLNSLFGEATPIQDQVAFVNQISAITGESDVVMAQVESNTREQAMKGNLPGAVQQAVVRALSSHQKLATQVLKSDRQGMTALVDMVYDLLREGKDIDLDMD

SEQ ID NO: 56351 - protein, 952 aa, Enterobacter cloacae
  MISC_FEATURE (463)..(463): X=any amino acid
LLFQSGRRDEGFAVLQEMAKSTNGRSRSSDMWYDQIKGQPASSARFRPLQKYLSIFSSGDSVVAARAQLEEQQKQLADPAFARKPEGLAAVDAGQGSKAVAELQKAVSANHADSEAVGALGQAYSQKGDRARAVAQFEKAIALDPQSDNRGKWDSLLKVNRYWLLIQQGDAALKANNTAQAERYYQQARGIDNTDSYAVLGLGDAAAARKDNDAAERYYRQALRMDSGNSNAVRGLANIYRAQSPEKASQFIQSLSASQRRSIDDIERSLTNEQLSAQAEQLENQGKYAQAAEIQRRRLALSPGDVWITYRLSRDLYSAGQRSQADTLMRQLASQKPSDPDQVYASGLYLSGNDQDRAALAHLDTLPRSQWNGNIQELADRLQSNQVLETANRLRDSGKEQEAENLLRQQPTSTRIDLTLADWAQQRGDLASAKTTYSAVLQREPQNEDAILGLTEIYSAAGXQRCRARRAGETARRAKRPAAVAQHAAPDRDGAGRPGRFRRRRTDLQQNHPQAKSQPGSMENALVLRDAARFQAQNGQPQQALETYKDAMVSTGITTTRPADNDSFTRLTRNDEKDDWLKRGVRSDAGDLYRQQDVNVTLQHDYWGSSGTGGYSDLKAHTTMLQVDAPLSDGRMFFRSDLVNMDAGSFDNNNGTYDPKWGTCYETPCSGNTHQSDNGASVAVGWQNKTWAMDIGTTPMGFDVVDVVGGISYSSDLGPTRYTVNAHRRPISSSLLAFAGQKDTNTGTTWGGVRATGGGVSMSYDKGEANGVWSSLNAETLTGKNVEDNWRVRWMTGYYYKLINKNNERLTVGVSNMLWHYDKDLSGYTLGQGGYYSPQEYVSFALPVTWRKRTENWSWELGGSVSWSHSKTKDELRYPIQNLIPTDEPDRYTDRGAMETGSSSSGTGYTARAIIERRVTSNWFVGMGVDIQEAKDYTPSHALIYVRYSAAG

SEQ ID NO: 56352 - protein, 164 aa, Enterobacter cloacae
NLLTLSLGLALMPMAEAANSPQQKQLLEQVRLGESTQREDLVRQSLYRLELIDPNNPDVIAARFRYLLRQGDNAGAQKELDRLKGIAPGSSAYQSSRNTMLLSTPDGRQQLQQARLLATTGHTQEAIAAYDSCLTATRRAATWRRNTGMWSRKILLAGMRPLTS

SEQ ID NO: 56353 - protein, 557 aa, Enterobacter cloacae
  MISC_FEATURE (553)..(553): X=any amino acid
MHHATPLITTIVGGLVLAFILGMIANKLRISPLVGYLLAGVLAGPFTPGFVADTKLAPELAELGVILLMFGVGLHFSLKDLMAVKSIAIPGAIAQIGVATLLGMALSAVLGWSLMTGIVFGLCLSTASTVVLLRALEERQLIDSQRGQIAIGWLIVEDLVMVLTLVLLPAVAGMMEKDNVGLASLALDMSITIGKVVAFIAIMMLVGRRLVPWIMSRSAATGSRELFTLSVLALTLGIAFGAVELFDVSFALGAFFAGMVLNESELSHRAAHDTLPLRDAFAVLFFVSVGMLFDPMVLIHQPLAVLGTLAIIIFGKSLAAFFLVRMFGHSPRTALTIAASLAQIGEFAFILAGLGMALNLLPQAGQNLVLAGAILSIMLNPVLFALLEKYLDKTETLEEQTLEEAIEEEKQIPVDICNHALLVGFGRVGSLLGEKLMAQGIPLVVIETSRTRVDELRERGIRAVLGNAANEEIMNLAHLDCARWLLLTIPNGYEAGEIVASARAKCPTIEIIARANYDDEVEYITERGADKVVMGEREIANTMLMLLEETAGXRGCD

SEQ ID NO: 56354 - protein, 472 aa, Enterobacter cloacae
MSQNVYQFIDLQRVDPPKKPLKIRKIEFVEIYEPFSEGQAKAQADRCLSCGNPYCEWKCPVHNYIPNWLKLANEGRIFEAAELSHQTNTLPEVCGRVCPQDRLCEGSCTLNDEFGAVTIGNIERYINDKAFEMGWRPDMTGVKQTDKRVAIIGAGPAGMACADVLTRNGVKAVVFDRHPEIGGLLTFGIPAFKLEKEVMTRRREIFTGMGIEFKLNVEVGRDVQLDDLLKDYDAVFLGVGTYQSMRGGLENEDAPGVYDALPFLIANTKQIMGYGETADEPFVSMEGKRVVVLGGGDTAMDCVRTSIRQNAAHVICAYRRDEENMPGSKREVKNAREEGVEFQFNIQPLGIEVNANGKVSGVKMARTEMGAPDAKGRRRAEIVAGSEHVIPADAVVMAFGFRPHSMEWLAKHSVELDSQGRVIAPEGSDNAFQTSNPKIFAGGDIVRGSDLVVTAIAEGRKAADGILNYLEV

SEQ ID NO: 56355 - protein, 50 aa, Enterobacter cloacae
MTAQTQGAENEVSAVISQSWHRCSKFMQRETWQAPHQAQGLTFESICRRK

SEQ ID NO: 56356 - protein, 389 aa, Enterobacter cloacae
MSTPIKRLEIIKNAIELEDDDIIQSQLTRLKNEAFDDELQAIVVALEEKNYTSAMAAITAWLQGQRAVTQWRDPQVAASKLELKALEERLRDLIDRRNARVQQLDEFNDLYFSRLGPLMQQILALRKTLAELNLRRQQAEARRREEDYRRCQRYMAQAVEVLATLTQRWRDLPADSVQAAEARKHLEQQSNLIANLLAEALELESGLTREEEPARQARDDANEEYEKYREQHHDAEVRLRKGKDLSEEDRNELKRLWRQASKLCHPDLVADDLKEEANAMMVQLNQAKQRGDVKTIRSLVARLQQGFEPLMASDRLNDLERIRKKMAQVREQIDILVNELAELEKEESWLLVSSLNNMEAYFAQQEKALHEVRASLEHQVSEAQLDSAA

SEQ ID NO: 56357 - protein, 155 aa, Enterobacter cloacae
ARKETIHNNQMIQNELRFICFNSLSSEAKEVMRGIIQESTFLGKHRVPEEDVFAIVKNAPEFSEVMVFEHLKLFRQSKNQNYPDSKSSREKYKRIATLVSQAFEVLVKEGKSLNRMKQYKPKKTVTEEHVALVELLKDEGADLITLIERLVAMNK

SEQ ID NO: 56358 - protein, 170 aa, Enterobacter cloacae
MTLRIRQASGADSTLLSELGYRIYPAHFQHLWVSDAEMKDFLDGEYALSVLEQSLKEDAVSWYVAETDRPVGFMKVTWEALLPETDKKGVLLNKLYLDPAETGKNYGLVMFNSITDMARSRGKDYLWLEVLEQNAGAYRFYQKQGMLCVNNVLFETASQQSILRIMGMSL

SEQ ID NO: 56359 - protein, 382 aa, Enterobacter cloacae
MKITKLTTYRLPPRWMFLKIETDEGVVGWGEPVIEGRARTVEAAVHELGEYLIGQDPARINDLWQVMYRAGFYRGGPILMSAIAGIDQALWDIKGKVLNAPVWQLMGGLVRDKIKAYSWVGGDRPAEVIDGITQLRNIGFDTFKLNGCEEMGIIDNSRAVDRAVNTVAQIREAFGNEIEFGLDFHGRVSAPMAKVLIKELEPYRPLFIEEPVLAEQAEYYPKLAEQTHIPIAAGERMFSRFEFKRVLEAGGIAILQPDLSHAGGITECYKIAGMAEAYDVALAPHCPLGPIALAACLHVDFVSRNAVFQEQSMGIHYNKGAELLDFVKNKEDFCMEGGFFKPLTKPGLGVEIDEAKVIELSKNAPDWRNPLWRHEDGSVAEW

SEQ ID NO: 56360 - protein, 156 aa, Enterobacter cloacae
MNMNATILGQAIAFILFVWFCMKYVWPPLMAAIEKRQKEIADGLASAERAKKDLDLAQANATDQLKKAKAEAQVIIEQANKRRSQILDEAKAEAEQERTKIVTQAQAEIDAERKRAREELRKQVAILAVAGAEKIIERSVDEAANSDIVDKLVAEL

SEQ ID NO: 56361 - protein, 37 aa, Enterobacter cloacae
MRRIVNFLMNNIREHFMLYILLWALLAIIDFVYIVFY

SEQ ID NO: 56362 - protein, 45 aa, Enterobacter cloacae
MAAISTSRCEFTQFVTNHFVGNKDWNVLTTIMDSDGQTDHVRKDR

SEQ ID NO: 56363 - protein, 346 aa, Enterobacter cloacae
GAPLLLWLLPALRSMSAPAMDAGDKVYDERRSVLWFSPDGLAVLIIASFAALSFGRDAVGWHWATGDLLNELVQWRWPRIYRALIAGVMLAVAGCIIQRLTGNPMASPEVLGISSGAPFGVVLMLFFVPGNAFGWLILPGSIGAAVTLMIILIAAGRGGFSPHRMLLAGMALSTAFTMLLMMLQASGDPRMAKILTWISGSTYNATGSQVVWSGIAMLVLLAMVPLCRRWMTILPLGGETARAVGMALTPARVALLLLAACLTAVATLTIGPLSFVGLMAPHIARMMGFRRTMPHIVMSALTGGMMLVFADWCGRMVLFPYQIPAGLLSTFIGAPYFIYLLRKQSR

SEQ ID NO: 56364 - protein, 125 aa, Enterobacter cloacae
MQRRCNYPSDAYYGDYGGRGISVCERWGNFEAFLKDMGERPAGHTLDRIDVDKAYSPENCRWATPKDQARNRRSNHMLDTPAGRMCITKAAETYGVKVKTIAHRLSRGWSVEKALLTQPWQGNNE

SEQ ID NO: 56365 - protein, 383 aa, Enterobacter cloacae
MLVLLVAVGQMAQTIYIPAIADMAKELNVREGAVQSVMAAYLLTYGVSQLFYGPLSDRVGRRPVILVGMSIFMVATVIAITTHSLTVLIAASALQGVGTGVGGVMARTLPRDMYQGTQLRHANSLLNMGILVSPLLAPLIGGLLDTMWSWRACYAFLLVLCIIVTFSMARWMPETRPQDAPRTKLITSYKTLFGNGSFTCYLLMLIGGLAGIAVFEACSGVLLGAGLGLSSMVVSILFILPIPAAFFGAWFAGRPNKRFSTLMWQSVISCLLAGLMMWIPGLFGVMTVWTLLIPAALFFFGAGMLFPLATSGAMEPFPFLAGTAGALVGGLQNIGSGALAWLSAMMPQTGQASLGLLMTLMGLLILLCWLPLASRVPHHEQPV

SEQ ID NO: 56366 - protein, 465 aa, Enterobacter cloacae
MPDNKKQGRTSNKAMTFFVCFLAALAGLLFGLDIGVIAGALPFITDEFQISAHTQEWVVSSMMFGAAVGAVGSGWLSFKLGRKKSLMIGAILFVAGSLFSAAAPNVEVLLVSRVLLGLAVGVASYTAPLYLSEIAPEKIRGSMISMYQLMITIGILGAYLSDTAFSYSGAWRWMLGVIIIPAILLLIGVFFLPDSPRWFAAKRRFHDAERVLMRLRDTSAEAKNELEEIRESLKVKQSGWALFKENSNFRRAVFLGVLLQVMQQFTGMNVIMYYAPKIFELAGYTNTTEQMWGTVIVGLTNVLATFIAIGLVDRWGRKPTLTLGFLVMAAGMGVLGTMMHVGIHSPTAQYFAVGMLLMFIVGFAMSAGPLIWVLCSEIQPLKGRDFGITCSTATNWIANMIVGATFLTMLNTLGNANTFWVYAGLNIFFIVLTIWLVPETKHVSLEHIERNLMKGRPLREIGAHD

SEQ ID NO: 56367 - protein, 377 aa, Enterobacter cloacae
MAKHLFTSESVSEGHPDKIADQISDAVLDAILAQDPKARVACDTYVKTGMVLVGGEITTSAWVDIEEITRNTVREIGYVHSDMGFDANSCAVLSAIGKQSPDINQGVDRADPLEQGAGDQGLMFGYATNETDVLMPAPVTYAHRLVQRQAEVRKNGTLPWLRPDAKSQVTFQYDDGKIVGIDAVVLSTQHAEDIDQKSLQEAVMEEIIKPVLPTEWLSSATKFFINPTGRFVIGGPMGDCGLTGRKIIVDTYGGMARHGGGAFSGKDPSKVDRSAAYAARYVAKNIVAAGLADRCEIQVSYAIGVAEPTSIMVETFGTEKVPSEQLTLLVREFFDLRPYGLIQMLDLLHPIYKETAAYGHFGREHFPWEKTDKAALL

SEQ ID NO: 56368 - protein, 164 aa, Enterobacter cloacae
VMRKVTAAVMASTLAFSAFSQAAEAIISDNSPLQEGATQNSSQSHMFDGISLTEHQRQQMRDLMQRARHDQPPVNVSEMETMHRLVTAENFDESAVRAQAEKMAQEQVARQVEMAKVRNQMFHLLTPEQQAVLNTKHQQRMDQLREVARMQRSSETSFFSSNSS

SEQ ID NO: 56369 - protein, 121 aa, Enterobacter cloacae
MQEWAAADCSVFMPEQTSGILPEQYLPANLANGRELRNQPHIRFFKHFLQHAVQFFPIAFAGVAIQAVCLHRLHLHFGIRENLVHPLRQLGQNDLSGPFEPLNITLVINQLNKHHDPSLQT

SEQ ID NO: 56370 - protein, 174 aa, Enterobacter cloacae
MAFGAGCIAGRRLRLTRPTQLFKESCPVLDPRVRFAFGFRMLPGINQQHLADALGALFLQERIELLAAAAEVSVRAVAQSNDAVVHVRLIAKLVFNSLEKRHDAVRQIALPGGGGHHQNVFIFILFPVCQFRIFIDRGFMALAGEYCLSLFRYQQRVAVHCPDKNAYFSHDVFP

SEQ ID NO: 56371 - protein, 61 aa, Enterobacter cloacae
MSLENAPDEVKLAVDLIMLLENHEIPAETVLKALEIVRRDFEAKVKACCPHPNPLPQGEGK

SEQ ID NO: 56372 - protein, 199 aa, Enterobacter cloacae
LGIAEEITVQREDVLGQALQLLEIQGIASTTLEMVADRIDYPLDELKRFWPDKEALLYDALRYLSQQVDIWRRQLMLNEELTAEQKLLARYTALTECVSNNRYPGCLFIAACTYFPDPGHPIHQLAEQQKRAAHDFTHELLTTLEVDDPAMVAKQMELVLEGCLSRMLVNRSQADVDTAHRLAEDILRFAQCRMGGALT

SEQ ID NO: 56373 - protein, 714 aa, Enterobacter cloacae
KAGNVYAKQVMQSWADAEWFLNRPALAEKITVTVFKVTGETNTDDLSPAPDAWSRPDIPLHALAMLKNAREGIEPDQPGSVGPIKQIEALQKKGFPLAYVGDVVGTGSSRKSATNSVLWFMGDDIPHVPNKRGGGLCLGGKIAPIFFNTMEDAGALPIEVDVSNLNMGDVIDVYPYKGEVRNHETNELLASFELKTDVLIDEVRAGGRIPLIIGRGLTTKAARSWSLPHSDVFRQAKDVAENNRGYSLAQKMVGRACGVAGIRPGAYCEPKMTSVGSQDTTGPMTRDELKDLACLGFSSDLVMQSFCHTAAYPKPVDVTTHHTLPDFIMNRGGVSLRPGDGVIHSWLNRMLLPDTVGTGGDSHTRFPIGISFPAGSGLVAFAAATGVMPLDMPESVLVRFKGKMQPGITLRDLVHAIPLYAIKQGLLTVEKKGKKNIFSGRILEIEGLPDLKVEQAFELTDASAERSAAGCTIKLNKEPIIEYLNSNIVLLKWMIAEGYGDRRTLERRIQGMEKWLADPQLLEADADAEYAAVIDIDLADIKEPILCAPNDPDDARPLSEVQGEKIDEVFIGSCMTNIGHFRAAGKLLDTHKGQLPTRLVGAPPTRMDAAQLTEEGYYSVFGKSGARIEIPGCSLCMGNQARVADGATVVSTSTRNFPNRLGTGANVFLASAELAAVAALIGKLPTPEEYQTFVAQVDKTAVDTYRYLNFDQLS

SEQ ID NO: 56374 - protein, 183 aa, Enterobacter cloacae
MTKQPEDWLDDVPGDDIEDEDDEIIWVSKSEIKRDAEELKQLGAEMVELGKNALDKIPLDQDLRDAIELAQKIKKEGRRRQLQLIGKMLRQRDVDPIRQALDKLKNRHNQQVALFHKLEQIRDRLIEQGDDAVPEVLNLWPDADRQQLRSLIRNAKKEKEGNKPPKSARLIFQYLRELSENEE

SEQ ID NO: 56375 - protein, 56 aa, Enterobacter cloacae
MAVTVRTETVKQMCQHRDNGHRGRKAPATVVPASWKLTPQQQAFIDVFAEDEPKKQ

SEQ ID NO: 56376 - protein, 331 aa, Enterobacter cloacae
MQSKINWIDNLRGIACLMVVMIHTTTWYVTNAHSISPVNWDIANILNSASRVSVPLFFMISGFLFFGERSAQPRHFIRIAACLGFYSAVALLYITLCTSINAGLSLKYVLQKPVFYHLWFFFAIIVIYLVSPLIQVKNVSGKMLLALMVVIGIVANPNTVSQKIDGFEWLPVNLYINGDTFYYVLYGMLGRAIGMMDTQKRGLNWLCGTLFIAGVAVISRGTLHELEWRGNFADTWYLYCGPMVFICAVSLLTLAKNTLNARALPVLSLISRHSLGIYGFHALVIHALRTRGVELKSWPVLDIVWIFAATLAISLLLSMLLQKIDVRRFVS

SEQ ID NO: 56377 - protein, 549 aa, Enterobacter cloacae
MKKMTAMLFSLAVGLNTVSMAAKADAPKEQETDVLLIGGGIMSATLGTYLQELQPDWSMTMVERLDGVAQESSNGWNNAGTGHSALMELNYTPQKKDGSISIEKAVEINEAFQVSRQFWSHQVNSGVMHDPHSFINTVPHMSFVWGEQNVNFLRARYAALQQSTLFRGMKYSEDHAQIKEWAPLVMEGRDPNQKVAATRTEIGTDVNYGEITRQLVTSLKKKENFNLQLSTEVRGFKRNADNSWSVTVADLKNNEAEHVIKAKFVFIGAGGAALKLLQESGIPEADDYAGFPVGGQFLVSENPEVVNRHLAKVYGQASVGAPPMSVPHIDTRVLDGKRVVLFGPFATFSTKFLKNGSLWDLLSATTTSNVKPMMDVGLDNFDLVKYLISQVMLSDDDRFEALKEYYPQAKKEDWRLWQAGQRVQIIKRDPKEGGVLRLGTEVVSDKDGTIAALLGASPGASTAAPIMLHLMEKVFKDKVASPEWQAKLKTIIPSYGTKLNGNVSATEQELEYTSRVLQLQYIKPQAADAAPKAELKPQPENKPVADIAL

SEQ ID NO: 56378 - protein, 135 aa, Enterobacter cloacae
MQLMQLISELPVTSIVAIHDLNHASMFCDSLIVMQKGQIVATGTPQDILSESLLWDVFRVKTKIEISPQSLVAQTGAPEYAPHVINTPLSFLIKSALNTNIFGEPGWQGTGWRAGRDLQRHDIGGKTGTTNSSKD

SEQ ID NO: 56379 - protein, 235 aa, Enterobacter cloacae
MSRNFSLAVAFLTTALSGHALADGINSFSQAKAAGVKVNADVPGDFYCGCKINWQGKKGVVDLESCGYKVRKNENRASRIEWEHVVPAWQFGHQRQCWQDGGRKNCAKDPVYRQMESDMHNLQPAVGEVNGDRGNFMYSQWNGGEGQYGQCGMKVDFKEKVAEPPARARGSIARTYFYMRDRYDLNLSRQQTQLFNAWDKQYPVTEWECQRDERIARVQGNHNPYVQRACQAQKS

SEQ ID NO: 56380 - protein, 320 aa, Enterobacter cloacae
MIKKIGVLTSGGDAPGMNAAIRGVVRAALTEGLEVFGVYDGYLGLYEDRMVQLDRYSVSDMINRGGTFLGSARFPEFRDEHVREVAIENMKKRGLDALVVIGGDGSYMGAKRLTEMGFPCIGLPGTIDNDIKGTDYTIGFFTALGTVVEAIDRLRDTSSSHQRISIVEVMGRYCGDLTLAAAIAGGCEFIVVPEVEFSREDLVAEIKAGIAKGKKHAIVAITEHICDVDELAKYIEAETKRETRATVLGHIQRGGSPGPYDRILASRMGAYAIDLLLQGHGGRCVGIQNEKLVHHDIIDAIENMKRPFKGDWLDCAKKLY

SEQ ID NO: 56381 - protein, 105 aa, Enterobacter cloacae
MNICAQRAAREFWGVTYHDHQLNTLLFLLLFLLLFLLLFLLLFLLLFLLLFLLLFLLLFLLGRIFISGLLICKLSPLHAARAALLLIRPSGLLNNKGAEAPWVNP

SEQ ID NO: 56382 - protein, 331 aa, Enterobacter cloacae
MKHEIAVSVIIPVYNAEKTIKSLIEDILIEDRINIEVIIVNDGSSDNTSTIINSIKDGRVQVIEQNNKGVYAARNNGLDKHKGQWVMFLDADDDVSEGFIYNRYIQASSHNADVLLSNAWKLWHEGDNKKPVHTNQPYDEVLSGNAWMSHAVKVREWPHYLWLQIVRSDYIRNNNLSFHDGRSHKDILWTMELALANGRFYISKDMDYTYKYNNESITNRGDYFDVRAECYIDVISKTIGHAKSIKNNDLSVSLFRHALYEARHFLGLYRKKVRDKEKIRRLFVREIAYKDLIKGVYSLSDIFFLLKVFVKTKKFTGASPKLKWIIILLLA

SEQ ID NO: 56383 - protein, 164 aa, Enterobacter cloacae
MFTALRHTPGMKKENGFTLIETLVAISLVVILSASGLYGWDSWQRQQRLWQTASQVRDYLLFLRNHANRYNRDHQITRLRVGGMDCLVSSAVQGCEKGSPFVLIPLWPEVAIGEVTPSLAFYGLKDTAWAGRIRVQSRAGEWLIIVSNGGRIRMCKVSAGGSCR

SEQ ID NO: 56384 - protein, 138 aa, Enterobacter cloacae
MRYSKVIHSCTLSCYPRPRRPVGSYLEPECDGAIVHQRNLHICSESSGLRIHFLLATTLNKVLVKCFCTIRRGAFREARAHAALGIRCQCKLGNHQHAAARLLDVQVHLAFRIAENTVAQHALTQAVGFLFVIILFDT

SEQ ID NO: 56385 - protein, 399 aa, Enterobacter cloacae
MLIKLLTKVFGSRNDRTLRRMRKAVAVINGMEPAMEKLSDDELKAKTAEFRARLEKGETLESLIPEAFAVVREEAKRVFGMRHFDVQLLGGMVLNERCIAEMRTGEGKTLTATLPAYLNALTGKGVHVVTVNDYLAQRDAENNRPLFEFLGMTVGINMSGLPAPAKREAYNADITYGTNNEYGFDYLRDNMAFSPEERVQRKLHYALVDEVDSILIDEARTPLIISGPAEDSSEMYRKVDKIIPHLLRQEKEDSDTFQGEGHFSVDEKARQVNLTERGLVKIEELLVAEGIMEEGESLYSPSNIMLMHHVTAALRAHALFTRDVDYIVKDGEVIIVDEHTGRTMQGRRWSDGLHQAVEAKEGVDIQNENQTLASITFQNYFRLYEKLAGMTGTADTEAF

SEQ ID NO: 56386 - protein, 607 aa, Enterobacter cloacae
MRRILSRPEVLHCNFAEFRQAWPKLAESDLYQPFGHYCMVPLAAEGQIFGGCEFIRTTDQPWSEAEYERLHTFTQIVAVVAEQIQSRVTNNVDYDLLSRERDNFRILVAITNAVLSRLDMDELVSEVSKEIHHYFKIDAISIALRGHRKGKLNIYSTHYLDEANPAHEQSEVDEAGTLSERVFKSKEILLLNLNEQDPVAPYERMLFNTWGNKIQTLCLLPLMSGNTMLGVLKLAQCEEGVFTTANLKLLRQIAERISIALDNALAYQEIHRLKERLVDENLALTEQLNNVDSEFGEIIGRSDAMYSVLKQVEMVAQSDSTVLILGETGTGKELIARAIHNLSNRNSRRMVKMNCAAMPAGLLESDLFGHERGAFTGASSQRLGRFELADKSSLFLDEVGDMPLELQPKLLRVLQEQEFERLGSNKLIQTDVRLIAATNRDLKKMVADREFRSDLYYRLNVFPIFLPPLRERPEDIPLLVKAFTAKIARRMGRNIDSIPAETLRTLSSMEWPGNVRELENVIERAVLLTRGNVLQLSLPEVTLPDVTAPAAETAKEGEDEYQLIMRVLKETNGVVAGPKGAAQRLGLKRTTLLSRMKRLGIDKESLV

SEQ ID NO: 56387 - protein, 63 aa, Enterobacter cloacae
MFVIWSHEKGFIMSHQLTFADSEFSSKRRQTRKEIFLSRMEQILPWQNMVEVIEPFYPRGGNG

SEQ ID NO: 56388 - protein, 56 aa, Enterobacter cloacae
ESGIFRYCSGKYQWHGSVCHYTGRDVPDIAGVLAVYAERRQDRNGPYACLMSITLN

SEQ ID NO: 56389 - protein, 654 aa, Enterobacter cloacae
MRLQSHHLELLSPARDAAIAREAILHGADAVYIGGPGFGARHNASNSLSDIAELVPFAHRFGAKVFVTLNTILHDDELEPAQRLITDLYQAGVDALIVHDMGVLELDIPPIELHASTQCDIRTVEKAKFLSDVGFSQIVLARELNLNQIRDIHQATDATIEFFIHGALCVAYSGQCNISHAQTGRSANRGDCSQACRLPYTLKDDRGRVVAFEKHLLSMKDNDQTANLGALIDAGVRSFKIEGRYKDMSYVKNITAHYRQMLDAIIEDRGDLARASAGRTEHFFIPSTDKTFHRGSTDYFVNARKGDIGAFDSPKFIGLPVGEVLKVAKDHLDVEVTEPLANGDGLNVMIKREVVGFRANTVEKTGENRYRVWPNEMPADLYKARPNAALNRNLDHNWQQALLKTSSERRIAVDIELGGWEEQLILTMTCEDGISVTHTLDGLFEVANNAEKALNSLKDGVAKLGQTIYYARAIDVNLPDALFVPNSLLNQFRRETAEMLDAARLAQYPRASRKAEAVPAPVYPETHLSFLANVYNHKAREFYHRHGVQLIDAAYEAHEEKGDVPVMITKHCLRFAFNLCPKQAKGNIKSWKATPMQLVNGDEVLTLKFDCRPCEMHVIGKMKNHIFKMPQPGSIVASVSPDDLMKTLPKRKGS

SEQ ID NO: 56390 - protein, 660 aa, Enterobacter cloacae
MKAVVFAYHDMGCTGTLALLEAGYDIAAIFTHPDTTGENNFFGSVARIAAERGIPVYAPDDVNHPLWVERIRALAPDVIFSFYYRSLLSDEILGLAAKGAFNLHGSLLPAYRGRAPLNWVLVNGETETGVTLHRMVRRADAGAIVAQQKVAIDADETALQLHQKLNATAQTLLRDALPGILNGIFSETAQDESKASCFGRRAPEDGRLDWNKPARQLHNLVRAVTDPWPGAYSFAGVSKFIVWKSRVRDDIPAAKPGTVVSVSPLIVSCGEQALEIVTGQTDNGLYVQGTQLAQSLGLVAGALITSAPVVAIKRRTRVLILGVNGFIGNHLTERLLKDDNYEIYGLDIGADAISRFLDNPRFHFVEGDISIHSEWIEYHIKKCDVVLPLVAIATPIEYTRNPLRVFELDFEENLKIIRDCVKYDKRIIFPSTSEVYGMCTDKNFDEDTSNLVVGPINKQRWIYSVSKQLLDRVIWAYGEKEGLRFTLFRPFNWMGPRLDNLNAARIGSSRAITQLILNLVEGSPIKLIEGGKQKRCFTDISDGIEALFRIIENKDNRCNGEIINIGNPDNEASIRELAEMLLASFERHPLRDKFPPFAGFREVESSSYYGKGYQDVEHRKPSIRNAKRCLNWTPTVKMEQTIDETLDFFLRTVELSEQAS

SEQ ID NO: 56391 - protein, 140 aa, Enterobacter cloacae
MREERDDNPFSWYRWQYDSAGRLLVQDGTLPGQEQWRWDAAGNPLEGAAEKVTHNRLTQLNGIRWRYDIHGRTVEKDNGQTRWHYRYDGEHRLTEVISQPRDGNKPQTQVSFRYDPLGRRISKTRRQILGGQPTGKPVTT

SEQ ID NO: 56392 - protein, 154 aa, Enterobacter cloacae
MNKVLALVVAAAMGLSSAAFAADTTATAAPAAAPAATTTAAPAKAVHHKKHHKAAAKKEAAAPATAAPTEQGAQAAKKHHKKAAKPAVEQKAQAAKKHHKKATKPAVEQKAQAAKKHHKKATKPAVEQKAQAAKKHHKKAVKHEAAKPAAQPAA

SEQ ID NO: 56393 - protein, 743 aa, Enterobacter cloacae
DSLTILWVLEGQAELQTAAGRETVSNNGLAVINRYQRWRFSSQSANVTLRVVLSGRWVIKLYNDFFAHDYAVQTESGGNWPQCDELRHLLRQLLVVTLVNDPHRFRLEANRWLSEILLLLIGRFQQPARQKPRDQHADVSKRIARVLERINASYTRRITLAEIAASEFVSEAWLSRLFRKEMGVSFMQYITALRLEKAADALRLTSRPLHQIALEHGFASTRMMTDRFRRYHNMSPGEFRKARRHRSDASPLRAGTGEQRFPIAVDRLFSLLRGAENRGWEPAPLTHSPRQERIVDLQQLYPLSSAVRRARLVVTLRELDDLLREDVRQHLEALHEAIPIEGIDIAEPFLSSRLFATGWDDPHMAGYACWYNLQQLFTWVAKKGWTILLHTGVTNRCDLLKRFLQLSVNRFLPDITAGWHVVMHWSPQASAETQEHAWQAQRATVGAYLPQAKFGVWHRFSPVGTELGDDALFHSGILDQADFLACQADANELLDLARLDPAHLSSAENYPVLKIRQILAALRQRQRTLPVWLLSWNTLTGNTRATNGWFFRGALLMQNLLGLSEQVWLAGFWLNSGLQGEARTNNTLDTSSLALQYNHGLPRPIYWVLWLWQRLRGEVLVNDKSVLLLRHQGGYQLLLRNVVVFNPLLSSEEAFIQRFQQQYHLQLQGMRGEWRIRRHLFDRHNGALYPLLEGVRSDSGPDEEMWRWIAHKARPTLSLRDERLNDGWQMTESLESNALVLYE

SEQ ID NO: 56394 - protein, 298 aa, Enterobacter cloacae
MFAAIIIGIFIISVIYAHSRGKEKQTLSRQLFDHSTLMAPINMFMTAFSSLPARQPFFETERFPELNKLTENWLVIREEALRLQHHIKAAQNNNDAGFNTFFKRGWKRFYLKWYADAHPSAQSLCPVTTRLVSEIPSVKAAMFAELPAGAKLGKHRDPYAGSVRYHLGLFTPNDDRCFIEVDGQRHSWRDGEAVIFDETYVHWAENKSDQTRIILFCDIERPMKWRWAQAVNHWVGTTLMSAASSPNDENDSTGGINRIFKYVHAARERGQRLKKRNRKAYYALKYLCIVAIFAAIIV

SEQ ID NO: 56395 - protein, 83 aa, Enterobacter cloacae
MTEQETIYQEVCGLLTRLFEIDPQDITPEARLYEDLELDSIDAVDMIVHLQKKTGKKIKPETFKSVRTVQDVVDAVEQLLREE

SEQ ID NO: 56396 - protein, 44 aa, Enterobacter cloacae
MENLNMDLLYMAAAVMMGLAAIGAAIGIGILGGKFLEGAGVNLI

SEQ ID NO: 56397 - protein, 310 aa, Escherichia coli
MVKVYAPASSANMSVGFDVLGAAVTPVDGALLGDVVTVEAAETFSLNNLGRFADKLPSEPRENIVYQCWERFCQELGKQIPVAMTLEKNMPIGSGLGSSACSVVAALMAMNEHCGKPLNDTRLLALMGELEGRISGSIHYDNVAPCFLGGMQLMIEENDIISQQVPGFDEWLWVLAYPGIKVSTAEARAILPAQYRRQDCIAHGRHLAGFIHACYSRQPELAAKLMKDVIAEPYRERLLPGFRQARQAVAEIGAVASGISGSGPTLFALCDKPETAQRVADWLGKNYLQNQEGFVHICRLDTAGARVLEN

SEQ ID NO: 56398 - protein, 638 aa, Escherichia coli
MGKIIGIDLGTTNSCVAIMDGTTPRVLENAEGDRTTPSIIAYTQDGETLVGQPAKRQAVTNPQNTLFAIKRLIGRRFQDEEVQRDVSIMPFKIIAADNGDAWVEVKGQKMAPPQISAEVLKKMKKTAEDYLGEPVTEAVITVPAYFNDAQRQATKDAGRIAGLEVKRIINEPTAAALAYGLDKGTGNRTIAVYDLGGGTFDISIIEIDEVDGEKTFEVLATNGDTHLGGEDFDSRLINYLVEEFKKDQGIDLRNDPLAMQRLKEAAEKAKIELSSAQQTDVNLPYITADATGPKHMNIKVTRAKLESLVEDLVNRSIEPLKVALQDAGLSVSDIDDVILVGGQTRMPMVQKKVAEFFGKEPRKDVNPDEAVAIGAAVQGGVLTGDVKDVLLLDVTPLSLGIETMGGVMTTLIAKNTTIPTKHSQVFSTAEDNQSAVTIHVLQGERKRAADNKSLGQFNLDGINPAPRGMPQIEVTFDIDADGILHVSAKDKNSGKEQKITIKASSGLNEDEIQKMVRDAEANAEADRKFEELVQTRNQGDHLLHSTRKQVEEAGDKLPADDKTAIESALTALETALKGEDKAAIEAKMQELAQVSQKLMEIAQQQHAQQQTAGADASANNAKDDDVVDAEFEEVKDKK

SEQ ID NO: 56399 - protein, 370 aa, Escherichia coli; identical to SEQ ID NO: 43387

SEQ ID NO: 56400 - protein, 91 aa, Escherichia coli; identical to SEQ ID NO: 43001

SEQ ID NO: 56401 - protein, 273 aa, Escherichia coli
MHDANIRVAIAGAGGRMGRQLIQAALALEGVQLGAALEREGSSLLGSDAGELAGAGKTGVTVQSSLDAVKDDFDVFIDFTRPEGTLNHLAFCRQHGKGMVIGTTGFDEAGKQAIRDAAADIAIVFAANFSVGVNVMLKLLEKAAKVMGDYTDIEIIEAHHRHKVDAPSGTALAMGEAIAHALDKDLKDCAVYSREGHTGERVPGTIGFATVRAGDIVGEHTAMFADIGERLEITHKASSRMTFANGAVRSALWLSGKESGLFDMRDVLDLNNL

SEQ ID NO: 56402 - protein, 159 aa, Escherichia coli [sequence omitted]

SEQ ID NO: 56403 - protein, 273 aa, Escherichia coli
MNNRVHQGHLARKRFGQNFLNDQFVIDSIVSAINPQKGQAMVEIGPGLAALTEPVGERLDQLTVIELDRDLAARLQTHPFLGPKLTIYQQDAMTFNFGELAEKMGQPLRVFGNLPYNISTPLMFHLFSYTDAIADMHFMLQKEVVNRLVAGPNSKAYGRLSVMAQYYCNVIPVLEVPPSAFTPPPKVDSAVVRLVPHATMPHPVKDVRVLSRITTEAFNQRRKTIRNSLGNLFSVEVLTGMGIDPAMRAENISVAQYCQMANYLAENAPLQES

SEQ ID NO: 56404 - protein, 292 aa, Escherichia coli
MAEAQNDPLLPGYSFNAHLVAGLTPIEANGYLDFFIDRPLGMKGYILNLTIRGQGVVKNQGREFVCRPGDILLFPPGEIHHYGRHPEAREWYHQWVYFRPRAYWHEWLNWPSIFANTGFFRPDEAHQPHFSDLFGQIINAGQGEGRYSELLAINLLEQLLLRRMEAINESLHPPMDNRVREACQYISDHLADSNFDIASVAQHVCLSPSRLSHLFRQQLGISVLSWREDQRISQAKLLLSTTRMPIATVGRNVGFDDQLYFSRVFKKCTGASPSEFRAGCEEKVNDVAVKLS

SEQ ID NO: 56405 - protein, 466 aa, Escherichia coli
MAKTLYEKLFDAHVVYEAENETPLLYIDRHLVHEVTSPQAFDGLRAHGRPVRQPGKTFATMDHNVSTQTKDINACGEMARIQMQELIKNCKEFGVELYDLNHPYQGIVHVMGPEQGVTLPGMTIVCGDSHTATHGAFGALAFGIGTSEVEHVLATQTLKQGRAKTMKIEVQGKAAPGITAKDIVLAIIGKTGSAGGTGHVVEFCGEAIRDLSMEGRMTLCNMAIEMGAKAGLVAPDETTFNYVKGRLHAPKGKDFDDAVAYWKTLQTDEGATFDTVVTLQAEEISPQVTWGTNPGQVISVNDNIPDPASFADPVERASAEKALAYMGLKPGIPLTEVAIDKVFIGSCTNSRIEDLRAAAEIAKGRKVAPGVQALVVPGSGPVKAQAEAEGLDKIFIEAGFEWRLPGCSMCLAMNNDRLNPGERCASTSNRNFEGRQGRGGRTHLVSPAMAAAAAVTGHFADIRNIK

SEQ ID NO: 56406 - protein, 604 aa, Escherichia coli
MFMSLAANCLSKIGRLMCFTHFFRQTVRQAMEMLSGAEMVVRSLIDQGVKQVFGYPGGAVLDIYDALHTVGGIDHVLVRHEQAAVHMADGLARATGEVGVVLVTSGPGATNAITGIATAYMDSIPLVVLSGQVATSLIGYDAFQECDMVGISRPVVKHSFLVKQTEDIPQVLKKAFWLAASGRPGPVVVDLPKDILNPANKLPYVWPESVSMRSYNPTTTGHKGQIKRALQTLVAAKKPVVYVGGGAITAGCHQQLKETVEALNLPVVCSLMGLGAFPATHRQALGMLGMHGTYEANMTMHNADVIFAVGVRFDDRTTNNLAKYCPNATVLHIDIDPTSISKTVTADIPIVGDARQVLEQMLELLSQESAHQPLDEIRDWWQQIEQWRARQCLKYDTHSEKIKPQAVIETLWRLTKGDAYVTSDVGQHQMFAALYYPFDKPRRWINSGGLGTMGFGLPAALGVKMALPEETVVCVTGDGSIQMNIQELSTALQYELPVLVVNLNNRYLGMVKQWQDMIYSGRHSQSYMQSLPDFVRLAEAYGHVGIQISHPHELESKLSEALEQVRNNRLVFVDVTVDGSEHVYPMQIRGGGMDEMWLSKTERT

SEQ ID NO: 56407 - protein, 163 aa, Escherichia coli
MRRILSVLLENESGALSRVIGLFSQRGYNIESLTVAPTDDPTLSRMTIQTVGDEKVLEQIEKQLHKLVDVLRVSELGQGAHVEREIMLVKIQASGYGRDEVKRNTEIFRGQIIDVTPSLYTVQLAGTSGKLDAFLASIRDVAKIVEVARSGVVGLSRGDKIMR

SEQ ID NO: 56408 - protein, 313 aa, Escherichia coli
MMENYKHTTVLLDEAVNGLNIRPDGIYIDGTFGRGGHSRLILSQLGEEGRLLAIDRDPQAIAVAKTIDDPRFSIIHGPFSALGEYVAERDLIGKIDGILLDLGVSSPQLDDAERGFSFMRDGPLDMRMDPTRGQSAAEWLQTAEEADIAWVLKTYGEERFAKRIARAIVERNREQPMTRTKELAEVVAAATPVKDKFKHPATRTFQAVRIWVNSELEEIEQALKSSLNVLAPGGRLSIISFHSLEDRIVKRFMRENSRGPQVPAGLPMTEEQLKKLGGRQLRALGKLMPGEEEVAENPRARSSVLRIAERTNA

SEQ ID NO: 56409 - protein, 588 aa, Escherichia coli
MKAAAKTQKPKRQEEHANFISWRFALLCGCILLALAFLLGRVAWLQVISPDMLVKEGDMRSLRVQQVSTSRGMITDRSGRPLAVSVPVKAIWADPKEVHDAGGISVGDRWKALANALNIPLDQLSARINANPKGRFIYLARQVNPDMADYIKKLKLPGIHLREESRRYYPSGEVTAHLIGFTNVDSQGIEGVEKSFDKWLTGQPGERIVRKDRYGRVIEDISSTDSQAAHNLALSIDERLQALVYRELNNAVAFNKAESGSAVLVDVNTGEVLAMANSPSYNPNNLSGTPKEAMRNRTITDVFEPGSTVKPMVVMTALQRGVVRENSVLNTIPYRINGHEIKDVARYSELTLTGVLQKSSNVGVSKLALAMPSSALVDTYSRFGLGKATNLGLVGERSGLYPQKQRWSDIERATFSFGYGLMVTPLQLARVYATIGSYGIYRPLSITKVDPPVPGERVFPESIVRTVVHMMESVALPGGGGVKAAIKGYRIAIKTGTAKKVGPDGRYINKYIAYTAGVAPASQPRFALVVVINDPQAGKYYGGAVSAPVFGAIMGGVLRTMNIEPDALTTGDKNEFVINQGEGTGGRS

SEQ ID NO: 56410 - protein, 495 aa, Escherichia coli
MADRNLRDLLAPWVPDAPSRALREMTLDSRVAAAGDLFVAVVGHQADGRRYIPQAIAQGVAAIIAEAKDEATDGEIREMHGVPVIYLSQLNERLSALAGRFYHEPSDNLRLVGVTGTNGKTTTTQLLAQWSQLLGEISAVMGTVGNGLLGKVIPTENTTGSAVDVQHELAGLVDQGATFCAMEVSSHGLVQHRVAALKFAASVFTNLSRDHLDYHGDMEHYEAAKWLLYSEHHCGQAIINADDEVGRRWLAKLPDAVAVSMEDHINPNCHGRWLKATEVNYHDSGATIRFSSSWGDGEIESHLMGAFNVSNLLLALATLLALGYPLADLLKTAARLQPVCGRMEVFTAPGKPTVVVDYAHTPDALEKALQAARLHCAGKLWCVFGCGGDRDKGKRPLMGAIAEEFADVAVVTDDNPRTEEPRAIINDILAGMLDAGHAKVMEGRAEAVTCAVMQAKENDVVLVAGKGHEDYQIVGNQRLDYSDRVTVARLLGVIA

SEQ ID NO: 56411 - protein, 452 aa, Escherichia coli
MISVTLSQLTDILNGELQGADITLDAVTTDTRKLTPGCLFVALKGERFDAHDFADQAKAGGAGALLVSRPLDIDLPQLIVKDTRLAFGELAAWVRQQVPARVVALTGSSGKTSVKEMTAAILSQCGNTLYTAGNLNNDIGVPMTLLRLTPEYDYAVIELGANHQGEIAWTVSLTRPEAALVNNLAAAHLEGFGSLAGVAKAKGEIFSGLPENGIAIMNADNNDWLNWQSVIGSRKVWRFSPNAANSDFTATNIHVTSHGTEFTLQTPTGSVDVLLPLPGRHNIANALAAAALSMSVGATLDAIKAGLANLKAVPGRLFPIQLAENQLLLDDSYNANVGSMTAAVQVLAEMPGYRVLVVGDMAELGAESEACHVQVGEAAKAAGIDRVLSVGKQSHAISTASGVGEHFADKTALITRLKLLIAEQQVITILVKGSRSAAMEEVVRALQENGTC

SEQ ID NO: 56412 - protein, 360 aa, Escherichia coli
MLVWLAEHLVKYYSGFNVFSYLTFRAIVSLLTALFISLWMGPRMIAHLQKLSFGQVVRNDGPESHFSKRGTPTMGGIMILTAIVISVLLWAYPSNPYVWCVLVVLVGYGVIGFVDDYRKVVRKDTKGLIARWKYFWMSVIALGVAFALYLAGKDTPATQLVVPFFKDVMPQLGLFYILLAYFVIVGTGNAVNLTDGLDGLAIMPTVFVAGGFALVAWATGNMNFASYLHIPYLRHAGELVIVCTAIVGAGLGFLWFNTYPAQVFMGDVGSLALGGALGIIAVLLRQEFLLVIMGGVFVVETLSVILQVGSFKLRGQRIFRMAPIHHHYELKGWPEPRVIVRFWIISLMLVLIGLATLKVR

SEQ ID NO: 56413 - protein, 438 aa, Escherichia coli
MADYQGKNVVIIGLGLTGLSCVDFFLARGVTPRVMDTRMTPPGLDKLPEAVERHTGSLNDEWLMAADLIVASPGIALAHPSLSAAADAGIEIVGDIELFCREAQAPIVAITGSNGKSTVTTLVGEMAKAAGVNVGVGGNIGLPALMLLDDECELYVLELSSFQLETTSSLQAVAATILNVTEDHMDRYPFGLQQYRAAKLRIYENAKVCVVNADDALTMPIRGADERCVSFGVNMGDYHLNHQQGETWLRVKGEKVLNVKEMKLSGQHNYTNALAALALADAAGLPRASSLKALTTFTGLPHRFEVVLEHNGVRWINDSKATNVGSTEAALNGLHVDGTLHLLLGGDGKSADFSPLARYLNGDNVRLYCFGRDGAQLAALRPEVAEQTETMEQAMRLLAPRVQPGDMVLLSPACASLDQFKNFEQRGNEFARLAKELG

SEQ ID NO: 56414 - protein, 414 aa, Escherichia coli
MRLSLPRLKMPRLPGFSILVWISTALKGWVMGSREKDTDSLIMYDRTLLWLTFGLAAIGFIMVTSASMPIGQRLTNDPFFFAKRDGVYLILAFILAIITLRLPMEFWQRYSATMLLGSIILLMIVLVVGSSVKGASRWIDLGLLRIQPAELTKLSLFCYIANYLVRKGDEVRNNLRGFLKPMGVILVLAVLLLAQPDLGTVVVLFVTTLAMLFLAGAKLWQFIAIIGMGISAVVLLILAEPYRIRRVTAFWNPWEDPFGSGYQLTQSLMAFGRGELWGQGLGNSVQKLEYLPEAHTDFIFAIIGEELGYVGVVLALLMVFFVAFRAMSIGRKALEIDHRFSGFLACSIGIWFSFQALVNVGAAAGMLPTKGLTLPLISYGGSSLLIMSTAIMMLLRIDYETRLEKAQAFVRGSR

SEQ ID NO: 56415 - protein, 355 aa, Escherichia coli
MSGQGKRLMVMAGGTGGHVFPGLAVAHHLMAQGWQVRWLGTADRMEADLVPKHGIEIDFIRISGLRGKGIKALIAAPLRIFNAWRQARAIMKAYKPDVVLGMGGYVSGPGGLAAWSLGIPVVLHEQNGIAGLTNKWLAKIATKVMQAFPGAFPNAEVVGNPVRTDVLALPLPQQRLAGREGPVRVLVVGGSQGARILNQTMPQVAAKLGDSVTIWHQSGKGSQQSVEQAYAEAGQPQHKVTEFIDDMAAAYAWADVVVCRSGALTVSEIAAAGLPALFVPFQHKDRQQYWNALPLEKAGAAKIIEQPQLSVDAVANTLAGWSRETLLTMAERARAASIPDATERVANEVSRVARA

SEQ ID NO: 56416 - protein, 491 aa, Escherichia coli
MNTQQLAKLRSIVPEMRRVRHIHFVGIGGAGMGGIAEVLANEGYQISGSDLAPNPVTQQLMNLGATIYFNHRPENVRDASVVVVSSAISADNPEIVAAHEARIPVIRRAEMLAELMRFRHGIAIAGTHGKTTTTAMVSSIYAEAGLDPTFVNGGLVKAAGVHARLGHGRYLIAEADESDASFLHLQPMVAIVTNIEADHMDTYQGDFENLKQTFINFLHNLPFYGRAVMCVDDPVIRELLPRVGRQTTTYGFSEDADVRVEDYQQIGPQGHFTLLRQDKEPMRVTLNAPGRHNALNAAAAVAVATEEGIDDEAILRALESFQGTGRRFDFLGEFPLEPVNGKSGTAMLVDDYGHHPTEVDATIKAARAGWPDKNLVMLFQPHRFTRTRDLYDDFANVLTQVDTLLMLEVYPAGEAPIPGADSRSLCRTIRGRGKIDPILVPDPARVAEMLAPVLTGNDLILVQGAGNIGKIARSLAEIKLKPQTPEEEQHD

SEQ ID NO: 56417 - protein, 901 aa, Escherichia coli
MLIKLLTKVFGSRNDRTLRRMRKVVNIINAMEPEMEKLSDEELKGKTAEFRARLEKGEVLENLIPEAFAVVREASKRVFGMRHFDVQLLGGMVLNERCIAEMRTGEGKTLTATLPAYLNALTGKGVHVVTVNDYLAQRDAENNRPLFEFLGLTVGINLPGMPAPAKREAYAADITYGTNNEYGFDYLRDNMAFSPEERVQRKLHYALVDEVDSILIDEARTPLIISGPAEDSSEMYKRVNKIIPHLIRQEKEDSETFQGEGHFSVDEKSRQVNLTERGLVLIEELLVKEGIMDEGESLYSPANIMLMHHVTAALRAHALFTRDVDYIVKDGEVIIVDEHTGRTMQGRRWSDGLHQAVEAKEGVQIQNENQTLASITFQNYFRLYEKLAGMTGTADTEAFEFSSIYKLDTVVVPTNRPMIRKDLPDLVYMTEAEKIQAIIEDIKERTAKGQPVLVGTISIEKSELVSNELTKAGIKHNVLNAKFHANEAAIVAQAGYPAAVTIATNMAGRGTDIVLGGSWQAEVAALENPTAEQIEKIKADWQVRHDAVLEAGGLHIIGTERHESRRIDNQLRGRSGRQGDAGSSRFYLSMEDALMRIFASDRVSGMMRKLGMKPGEAIEHPWVTKAIANAQRKVESRNFDIRKQLLEYDDVANDQRRAIYSQRNELLDVSDVSETINSIREDVFKATIDAYIPPQSLEEMWDIPGLQERLKNDFDLDLPIAEWLDKEPELHEETLRERILAQSIEVYQRKEEVVGAEMMRHFEKGVMLQTLDSLWKEHLAAMDYLRQGIHLRGYAQKDPKQEYKRESFSMFAAMLESLKYEVISTLSKVQVRMPEEVEELEQQRRMEAERLAQMQQLSHQDDDSAAAAALAAQTGERKVGRNDPCPCGSGKKYKQCHGRLQ

SEQ ID NO: 56418 - protein, 264 aa, Escherichia coli
MKPTTISLLQKYKQEKKRFATITAYDYSFAKLFADEGLNVMLVGDSLGMTVQGHDSTLPVTVADIAYHTAAVRRGAPNCLLLADLPFMAYATPEQAFENAATVMRAGANMVKIEGGEWLVETVQMLTERAVPVCGHLGLTPQSVNIFGGYKVQGRGDEAGDQLLSDALALEAAGAQLLVLECVPVELAKRITEALAIPVIGIGAGNVTDGQILVMHDAFGITGGHIPKFAKNFLAETGDIRAAVRQYMAEVESGVYPGEEHSFH

SEQ ID NO: 56419 - protein, 454 aa, Escherichia coli
MLSREESEAEQAVARPQVTVIPREQHAISRKDISENALKVMYRLNKAGYEAWLVGGGVRDLLLGKKPKDFDVTTNATPEQVRKLFRNCRLVGRRFRLAHVMFGPEIIEVATFRGHHEGNVSDRTTSQRGQNGMLLRDNIFGSIEEDAQRRDFTINSLYYSVADFTVRDYVGGMKDLKDGVIRLIGNPETRYREDPVRMLRAVRFAAKLGMRISPETAEPIPRLATLLNDIPPARLFEESLKLLQAGYGYETYKLLCEYHLFQPLFPTITRYFTENGDSPMERIIEQVLKNTDTRIHNDMRVNPAFLFAAMFWYPLLETAQKIAQESGLTYHDAFALAMNDVLDEACRSLAIPKRLTTLTRDIWQLQLRMSRRQGKRAWKLLEHPKFRAAYDLLALRAEVERNAELQRLVKWWGEFQVSAPPDQKGMLNELDEEPSPRRRTRRPRKRAPRREGTA

SEQ ID NO: 56420 - protein, 844 aa, Escherichia coli
MAGNDREPIGRKGKPTRPVKQKVSRRRYEDDDDYDDYDDYEDEEPMPRKGKGKGKGRKPRGKRGWLWLLLKLAIVFAVLIAIYGVYLDQKIRSRIDGKVWQLPAAVYGRMVNLEPDMTISKNEMVKLLEATQYRQVSKMTRPGEFTVQANSIEMIRRPFDFPDSKEGQVRARLTFDGDHLATIVNMENNRQFGFFRLDPRLITMISSPNGEQRLFVPRSGFPDLLVDTLLATEDRHFYEHDGISLYSIGRAVLANLTAGRTVQGASTLTQQLVKNLFLSSERSYWRKANEAYMALIMDARYSKDRILELYMNEVYLGQSGDNEIRGFPLASLYYFGRPVEELSLDQQALLVGMVKGASIYNPWRNPKLALERRNLVLRLLQQQQIIDQELYDMLSARPLGVQPRGGVISPQPAFMQLVRQELQAKLGDKVKDLSGVKIFTTFDSVAQDAAEKAAVEGIPALKKQRKLSDLETAIVVVDRFSGEVRAMVGGSEPQFAGYNRAMQARRSIGSLAKPATYLTALSQPKIYRLNTWIADAPIALRQPNGQVWSPQNDDRRYSESGRVMLVDALTRSMNVPTVNLGMALGLPAVTETWIKLGVPKDQLHPVPAMLLGALNLTPIEVAQAFQTIASGGNRAPLSALRSVIAEDGKVLYQSFPQAERAVPAQAAYLTLWTMQQVVQRGTGRQLGAKYPNLHLAGKTGTTNNNVDTWFAGIDGSTVTITWVGRDNNQPTKLYGASGAMSIYQRYLANQTPTPLNLVPPEDIADMGVDYDGNFVCSGGMRILPVWTSDPQSLCQQSEMQQQPSGNPFDQSSQPQQQPQQQPAQQEQKDSDGVAGWIKDMFGSN

SEQ ID NO: 56421 - protein, 232 aa, Escherichia coli
MKIGIIGAMEEEVTLLRDKIENRQTISLGGCEIYTGQLNGTEVALLKSGIGKVAAALGATLLLEHCKPDVIINTGSAGGLAPTLKVGDIVVSDEARYHDADVTAFGYEYGQLPGCPAGFKADDKLIAAAEACIAELNLNAVRGLIVSGDAFINGSVGLAKIRHNFPQAIAVEMEATAIAHVCHNFNVPFVVVRAISDVADQQSHLSFDEFLAVAAKQSSLMVESLVQKLAHG

SEQ ID NO: 56422 - protein, 391 aa, Escherichia coli
MHNGGLMAGWHLDTKMAQDIVARTMRIIDTNINVMDARGRIIGSGDRERIGELHEGALLVLSQGRVVDIDDAVARHLHGVRQGINLPLRLEGEIVGVIGLTGEPENLRKYGELVCMTAEMMLEQSRLMHLLAQDSRLREELVMNLIQAEENTPALTEWAQRLGIDLNQPRVVAIVEVDSGQLGVDSAMAELQQLQNALTTPERNNLVAIVSLTEMVVLKPALNSFGRWDAEDHRKRVEQLITRMKEYGQLRFRVSLGNYFTGPGSIARSYRTAKTTMVVGKQRMPESRCYFYQDLMLPVLLDSLRGDWQANELARPLARLKTMDNNGLLRRTLAAWFRHNVQPLATSKALFIHRNTLEYRLNRISELTGLDLGNFDDRLLLYVALQLDEER

SEQ ID NO: 56423 - protein, 274 aa, Escherichia coli
MQQLQNIIETAFERRAEITPANADTVTREAVNQVIALLDSGALRVAEKIDGQWVTHQWLKKAVLLSFRINDNQVIEGAESRYFDKVPMKFADYDEARFQKEGFRVVPPAAVRQGAFIARNTVLMPSYVNIGAYVDEGTMVDTWATVGSCAQIGKNVHLSGGVGIGGVLEPLQANPTIIEDNCFIGARSEVVEGVIVEEGSVISMGVYIGQSTRIYDRETGEIHYGRVPAGSVVVSGNLPSKDGKYSLYCAVIVKKVDAKTRGKVGINELLRTID

SEQ ID NO: 56424 - protein, 185 aa, Escherichia coli [sequence omitted]

SEQ ID NO: 56425 - protein, 253 aa, Escherichia coli
MMLSATQPLSEKLPAHGCRHVAIIMDGNGRWAKKQGKIRAFGHKAGAKSVRRAVSFAANNGIEALTLYAFSSENWNRPAQEVSALMELFVWALDSEVKSLHRHNVRLRIIGDTSRFNSRLQERIRKSEALTAGNTGLTLNIAANYGGRWDIVQGVRQLAEKVQQGNLQPDQIDEEMLNQHVCMHELAPVDLVIRTGGEHRISNFLLWQIAYAELYFTDVLWPDFDEQDFEGALNAFANRERRFGGTEPGDETA

SEQ ID NO: 56426 - protein, 249 aa, Escherichia coli
MLAAWEWGQLSGFTTRSQRVWLAVLCGLLLALMLFLLPEYHRNIHQPLVEISLWASLGWWIVALLLVLFYPGSAAIWRNSKTLRLIFGVLTIVPFFWGMLALRAWHYDENHYSGAIWLLYVMILVWGADSGAYMFGKLFGKHKLAPKVSPGKTWQGFIGGLATAAVISWGYGMWANLDVAPVTLLICSIVAALASVLGDLTESMFKREAGIKDSGHLIPGHGGILDRIDSLTAAVPVFACLLLLVFRTL

SEQ ID NO: 56427 - protein, 382 aa, Escherichia coli [sequence omitted]

SEQ ID NO: 56428 - protein, 138 aa, Escherichia coli
MLLTNKGDVMLGLKQVHHIAIIATDYAVSKAFYCDILGFTLQSEVYREARDSWKGDLALNGQYVIELFSFPFPPERPSRPEACGLRHLAFSVDDIDAAVAHLESHNVKCETIRVDPYTQKRFTFFNDPDGLPLELYEQ

SEQ ID NO: 56429 - protein, 432 aa, Escherichia coli
MTLTLNRQLLTSRQILVAFSGGLDSTVLLHQLVQWRTENPGVALRAIHVHHGLSANADAWVTHCENVCQQWQVPLVVERVQLAQEGLGIEAQARQARYQAFARTLLPGEVLVTAQHLDDQCETFLLALKRGSGPAGLSAMAEVSEFAGTRLIRPLLARTRGELVQWARQYDLRWIEDESNQDDSYDRNFLRLRVVPLLQQRWPHFAEATARSAALCAEQESLLDELLADDLAHCQSPQGTLQIVPMLAMSDARRAAIIRRWLAGQNAPMPSRDALVRIWQEVALAREDASPCLRLGAFEIRRYQSQLWWIKSVTGQSENIVPWQTWLQPLELPAGLGSVQLNAGGDIRPPRADEAVSVRFKAPGLLHIVGRNGGRKLKKIWQELGVPPWLRDTTPLLFYGETLIAAAGVFVTQEGVAEGENGVSFVWQKTLS

SEQ ID NO: 56430 - protein, 338 aa, Escherichia coli; identical to SEQ ID NO: 43054

SEQ ID NO: 56431 - protein, 475 aa, Escherichia coli
MSIRLEGYMQTTQQNAPLKRTMKTRHLIMLSLGGVIGTGLFFNTGYIISTTGAAGTLLAYLIGALVVWLVMQCLGELSVAMPETGAFHVYAARYLGPATGYTVAWLYWLTWTVALGSSFTAAGFCMQYWFPQVPVWVWCVVFCAIIFGLNVISTRFFAEGEFWFSLVKVVTIIAFIILGGAAIFGFIPMQDGSPAPGLSNITAEGWFPHGGLPILMTMVAVNFAFSGTELIGIAAGETENPRKVIPVAIRTTIARLIIFFIGTVFVLAALIPMQQVGVEKSPFVLVFEKVGIPYAADIFNFVILTAILSAANSGLYASGRMLWSLSNERTLPACFARVTKNGVPLTALSVSMLGGVLALFSSVVAPDTVFVALSAISGFAVVAVWLSICASHFVFRRRHLQQGKALSELHYRAPWYPLVPVLGFVLCLVACVGLAFDPAQRIALWCGLPFVALCYGAYFLTQPRNAKQEPEHVAE

SEQ ID NO: 56432 - protein, 309 aa, Escherichia coli
MIQQGDLMPQSALFTGIIPPVSTIFTADGQLDKPGTAALIDDLIKAGVDGLFFLGSGGEFSQLGAEERKAIARFAIDHVDRRVPVLIGTGGTNARETIELSQHAQQAGADGIVVINPYYWKVSEANLIRYFEQVADSVTLPVMLYNFPALTGQDLTPALVKTLADSRSNIIGIKDTIDSVAHLRSMIHTVKGAHPHFTVLCGYDDHLFNTLLLGGDGAISASGNFAPQVSVNLLKAWRDGDVAKAAGYHQTLLQIPQMYQLDTPFVNVIKEAIVLCGRPVSTHVLPPASPLDEPRKAQLKTLLQQLKLC

SEQ ID NO: 56433 - protein, 167 aa, Escherichia coli; identical to SEQ ID NO: 42730

SEQ ID NO: 56434 - protein, 91 aa, Escherichia coli; identical to SEQ ID NO: 43000

SEQ ID NO: 56435 - protein, 87 aa, Escherichia coli
MKPNIHPEYRTVVFHDTSVDEYFKIGSTIKTDREIELDGVTYPYVTIDVSSKSHPFYTGKLRTVASEGNVARFTQRFGRFVSTKKGA

SEQ ID NO: 56436 - protein, 295 aa, Escherichia coli
MSHYKTGHKQPRFRYSVLARCVAWANISVQVLFPLAVTFTPVMAARAQHAVQPRLSMGNTTVTADNNVEKNVASFAANAGTFLSSQPDSDATRNFITGMATAKANQEIQEWLGKYGTARVKLNVDKDFSLKDSSLEMLYPIYDTPTNMLFTQGAIHRTDDRTQSNIGFGWRHFSGNDWMAGVNTFIDHDLSRSHTRIGVGAEYWRDYLKLSANGYIRASGWKKSPDIEDYQERPANGWDIRAEGYLPAWPQLGASLMYEQYYGDEVGLFGKDKRQKDPHAISAEVTYTPVPLTQQ

SEQ ID NO: 56437 - protein, 556 aa, Escherichia coli
MQFDYIIIGAGSAGNVLATRLTEDPNTSVLLLEAGGPDYRFDFRTQMPAALAFPLQGKRYNWAYETEPEPFMNNRRMECGRGKGLGGSSLINGMCYIRGNALDLDNWAQEPGLENWSYLDCLPYYRKAETRDMGENDYHGGDGPVSVTTSKPGVNPLFEAMIEAGVQAGYPRTDDLNGYQQEGFGPMDRTVTPQGRRASTARGYLDQAKSRPNLTIRTHAMTDHIIFDGKRAVGVEWLEGDSTIPTRATANKEVLLCAGAIASPQILQRSGVGNAELLAEFDIPLVHELPGVGENLQDHLEMYLQYECKEPVSLYPALQWWNQPKIGAEWLFGGTGVGASNHFEAGGFIRSREEFAWPNIQYHFLPVAINYNGSNAVKEHGFQCHVGSMRSPSRGHVRIKSRDPHQHPAILFNYMSHEQDWQEFRDAIRITREIMHQPALDQYRGREISPGVECQTDEQLDEFVRNHAETAFHPCGTCKMGYDEMSVVDGEGRVHGLEGLRVVDASIMPQIITGNLNATTIMIGEKIADMIRGQEALPRSTAGYFVANGMPVRAKK

SEQ ID NO: 56438 - protein, 490 aa, Escherichia coli
MSRMAEQQLYIHGGYTSATSGRTFETINPANGNVLATVQAAGREDVDRAVKSAQQGQKIWASMTAMERSRILRRAVDILRERNDELAKLETLDTGKAYSETSTVDIVTGADVLEYYAGLIPALEGSQIPLRETSFVYTRREPLGVVAGIGAWNYPIQIALWKSAPALAAGNAMIFKPSEVTPLTALKLAEIYSEAGLPDGVFNVLPGVGAETGQYLTEHPGIAKVSFTGGVASGKKVMANSAASSLKEVTMELGGKSPLIVFDDADLDLAADIAMMANFFSSGQVCTNGTRVFVPAKCKAAFEQKILARVERIRAGDVFDPQTNFGPLVSFPHRDNVLRYIAKGKEEGARVLCGGDVLKGDGFDNGAWVAPTVFTDCSDDMTIVREEIFGPVMSILTYESEDEVIRRANDTDYGLAAGIVTADLNRAHRVIHQLEAGICWINTWGESPAEMPVGGYKHSGIGRENGVMTLQSYTQVKSIQVEMAKFQSIF

SEQ ID NO: 56439 - protein, 389 aa, Escherichia coli
MSDTTILQNSTHVIKPKKSVALSGVPAGNTALCTVGKSGNDLHYRGYDILDLAKHCEFEEVAHLLIHGKLPTRDELAAYKTKLKALRGLPANVRTVLEALPAASHPMDVMRTGVSALGCTLPEKEGHTVSGARDIADKLLASLSSILLYWYHYSHNGERIQPETDDDSIGGHFLHLLHGEKPSQSWEKAMHISLVLYAEHEFNASTFTSRVIAGTGSDMYSAIIGAIGALRGPKHGGANEVSLEIQQRYETPDEAEADIRKRVENKEVVIGFGHPVYTIADPRHQVIKRVAKQLSQEGGSLKMYNIADRLETVMWESKKMFPNLDWFSAVSYNMMGVPTEMFTPLFVIARVTGWAAHIIEQRQDNKIIRPSANYVGPEDRPFVALDKRQ

SEQ ID NO: 56440 - protein, 203 aa, Escherichia coli
MNMPMTERIRAGKLFTDMCEGLPEKRLRGKTLMYEFNHSHPSEVEKRESLIKEMFATVGENAWVEPPVYFSYGSNIHIGRNFYANFNLTIVDDYTVTIGDNVLIAPNVTLSVTGHPVHHELRKNGEMYSFPITIGNNVWIGSHVVINPGVTIGDNSVIGAGSIVTKDIPPNVVAAGVPCRVIREINDRDKHYYFKDYKVESSV

SEQ ID NO: 56441 - protein, 364 aa, Escherichia coli
MEKLRVGIVFGGKSAEHEVSLQSAKNIVDAIDKSRFDVVLLGIDKQGQWHVSDASNYLLNADDPAHIALRPSATSLAQVPGKHEHQLIDAQNGQPLPTVDVIFPIVHGTLGEDGSLQGMLRVANLPFVGSDVLASAACMDKDVTKRLLRDAGLNIAPFITLTRANRHNISFAEVESKLGLPLFVKPANQGSSVGVSKVTSEEQYAIAVDLAFEFDHKVIVEQGIKGREIECAVLGNDNPQASTCGEIVLTSDFYAYDTKYIDEDGAKVVVPAAIAPEINDKIRAIAVQAYQTLGCAGMARVDVFLTPENEVVINEINTLPGFTNISMYPKLWQASGLGYTDLITRLIELALERHAADNALKTTM

SEQ ID NO: 56442 - protein, 494 aa, Escherichia coli
MSRPRLIVALFLFFNVFVHGENKVKQSTIALALLPLLFTPVTKARTPEMPVLENRAAQGDITAPGGARRLTGDQTAALRDSLSDKPAKNIILLIGDGMGDSEITAARNYAEGAGGFFKGIDALPLTGQYTHYALNKKTGKPDYVTDSAASATAWSTGVKTYNGALGVDIHEKDHPTILEMAKAAGLATGNVSTAELQDATPAALVAHVTSRKCYGPSATSEKCPGNALEKGGKGSITEQLLNARADVTLGGGAKTFAETATAGEWQGKTLREQAQARGYQLVSDAASLNSVTEANQQKPLLGLFADGNMPVRWLGPKATYHGNIDKPAVTCTPNPQRNDSVPTLAQMTDKAIELLSKNEKGFFLQVEGASIDKQDHAANPCGQIGETVDLDEAVQRALEFAKKEGNTLVIVTADHAHASQIVAPDTKAPGLTQALNTKDGAVMVMSYGNSEEDSQEHTGSQLRIAAYGPHAANVVGLTDQTDLFYTMKAALGLK

SEQ ID NO: 56443 - protein, 93 aa, Escherichia coli
MLQSRNDHLRQTALRNAHTPALLLTTLTEPQDRSLAINNPQLAADVKTAWLKEDPSLLLFVEQPDLSLLRDLVKTGATRKIRSEARHRLEEKQ

SEQ ID NO: 56444 - protein, 1048 aa, Escherichia coli
MKILSLRLKNLNSLKGEWKIDFTREPFASNGLFAITGPTGAGKTTLLDAICLALYHETPRLSNVSQSQNDLMTRDTAECLAEVEFEVKGEAYRAFWSQNRARNQPDGNLQVPRVELARCADGKILADKVKDKLELTATLTGLDYGRFTRSMLLSQGQFAAFLNAKPKERAELLEELTGTEIYGQISAMVFEQHKSARTELEKLQAQASGVTLLTPEQVQSLTASLQVLTDEEKQLITAQQQEQQSLNWLTRQDELQQEASRRQQALQQALAEEEKAQPQLAALSLAQPARNLRPHWERIAEHSAALAHIRQQIEEVNTRLQSTMALRASIRHHAAKQSAELQQQQQSLNTWLQEHDRFRQWNNEPAGWRAQFSQQTSDREHLRQWQQQLTHAEQKLNALAAITLTLTADEVATALAQHAEQRPLRQHLVALHGQIVPQQKRLAQLQVAIQNVTQEQTQRNAALNEMRQRYKEKTQQLADVKTICEQEARIKTLEAQRAQLQAGQPCPLCGSTSHPAVEAYQALEPGVNQSRLLALENEVKKLGEEGATLRGQLDAITKQLQRDENEAQSLRQDEQALTQQWQAVTASLNITLQPLDDIQPWLDAQDEHERQLRLLSQRHELQGQIAAHNQQIIQYQQQIEQRQQLLLTTLTGYALTLPQEDEEESWLATRQQEAQSWQQRQNELTALQNRIQQLTPILETLPQSDELPHCEETVVLENWRQVHEQCLALHSQQQTLQQQDVLAAQSLQKAQAQFDTALQASVFDDQQAFLAALMDEQTLTQLEQLKQNLENQRRQAQTLVTQTAETLAQHQQHRPDDGLALTVTVEQIQQELAQTHQKLRENTTSQGEIRQQLKQDADNRQQQQTLMQQIAQMTQQVEDWGYLNSLIGSKEGDKFRKFAQGLTLDNLVHLANQQLTRLHGRYLLQRKASEALEVEVVDTWQADAVRDTRTLSGGESFLVSLALALALSDLVSHKTRIDSLFLDEGFGTLDSETLDTALDALDALNASGKTIGVISHVEAMKERIPVQIKVKKINGLGYSKLESTFAVK

SEQ ID NO: 56445 - protein, 431 aa, Escherichia coli
MLERLSWKRLVLELLLCCLPAFILGAFFGYLPWFLLASVTGLLIWHFWNLLRLSWWLWVDRSMTPPPGRGSWEPLLYGLHQMQLRNKKRRRELGNLIKRFRSGAESLPDAVVLTTEEGGIFWCNGLAQQILGLRWPEDNGQNILNLLRYPEFTQYLKTRDFSRPLNLVLNTGRHLEIRVMPYTHKQLLMVARDVTQMHQLEGARRNFFANVSHELRTPLTVLQGYLEMMNEQPLEGAVREKALHTMREQTQRMEGLVKQLLTLSKIEAAPTHLLNEKVDVPMMLRVVEREAQTLSQKKQTFTFEIDNGLKVSGNEDQLRSAISNLVYNAVNHTPEGTHITVRWQRVPHGAEFSVEDNGPGIAPEHIPRLTERFYRVDKARSRQTGGSGLGLAIVKHAVNHHESRLNIESTVGKGTRFSFVIPERLIAKNSD

SEQ ID NO: 56446 - protein, 439 aa, Escherichia coli
MTHQLRSRDIIALGFMTFALFVGAGNIIFPPMVGLQAGEHVWTAAFGFLITAVGLPVLTVVALAKVGGGVDSLSTPIGKVAGVLLATVCYLAVGPLFATPRTATVSFEVGIAPLTGDSALPLFIYSLVYFAIVILVSLYPGKLLDTVGNFLAPLKIIALVILSVAAIVWPAGSISTATEAYQNAAFSNGFVNGYLTMDTLGAMVFGIVIVNAARSRGVTEARLLTRYTVWAGLMAGVGLTLLYLALFRLGSDSASLVDQSANGAAILHAYVQHTFGGGGSFLLAALIFIACLVTAVGLTCACAEFFAQYVPLSYRTLVFILGGFSMVVSNLGLSQLIQISVPVLTAIYPPCIALVVLSFTRSWWHNSSRVIAPPMFISLLFGILDGIKASAFSDILPSWAQRLPLAEQGLAWLMPTVVMVVLAIIWDRAAGRQVTSSAH

SEQ ID NO: 56447 - protein, 356 aa, Escherichia coli
MRVTDFSFELPESLIAHYPMPERSSCRLLSLDGPTGALTHGTFTDLLDKLNPGDLLVFNNTRVIPARLFGRKASGGKIEVLVERMLDDKRILAHIRASKAPKPGAELLLGDDESINATMTARHGALFEVEFNDERSVLDILNSIGHMPLPPYIDRPDEDADRELYQTVYSEKPGAVAAPTAGLHFDEPLLEKLRAKGVEMAFVTLHVGAGTFQPVRVDTIEDHIMHSEYAEVPQDVVDAVLAAKARGNRVIAVGTTSVRSLESAAQAAKNDLIEPFFDDTQIFIYPGFQYKVVDALVTNFHLPESTLIMLVSAFAGYQHTMNAYKAAVEEKYRFFSYGDAMFITYNPQAINERVGE

SEQ ID NO: 56448 - protein, 375 aa, Escherichia coli
MKFELDTTDGRARRGRLVFDRGVVETPCFMPVGTYGTVKGMTPEEVEATGAQIILGNTFHLWLRPGQEIMKLHGDLHDFMQWKGPILTDSGGFQVFSLGDIRKITEQGVHFRNPINGDPIFLDPEKSMEIQYDLGSDIVMIFDECTPYPADWDYAKRSMEMSLRWAKRSRERFDSLGNKNALFGIIQGSVYEDLRDISVKGLVDIGFDGYAVGGLAVGEPKADMHRILEHVCPQIPADKPRYLMGVGKPEDLVEGVRRGIDMFDCVMPTRNARNGHLFVTDGVVKIRNAKYKSDTGPLDPECDCYTCRNYSRAYLHHLDRCNEILGARLNTIHNLRYYQRLMAGLRKAIEEGKLESFVTDFYQRQGREVPPLNVD

SEQ ID NO: 56449 - protein, 367 aa, Escherichia coli
MQDEYYMARALKLAQRGRFTTHPNPNVGCVIVKDGEIVGEGYHQRAGEPHAEVHALRMAGEKAKGATAYVTLEPCSHHGRTPPCCDALIAAGVARVVASMQDPNPQVAGRGLYRLQQAGIDVSHGLMMSEAEQLNKGFLKRMRTGFPYIQLKLGASLDGRTAMASGESQWITSPQARRDVQLLRAQSHAILTSSATVLADDPALTVRWSELDEQTQALYPQQNLRQPIRIVIDSQNRVTPVHRIVQQPGETWFARTQEDSREWPETVRTLLIPEHKGHLDLVVLMMQLGKQQINSIWVEAGPTLAGALLQAGLVDELIVYIAPKLLGSDARGLCTLPGLEKLADAPQFKFKEIRHVGPDVCLHLVGA

SEQ ID NO: 56450 - protein, 620 aa, Escherichia coli
MSFDIAKYPTLALVDSTQELRLLPKESLPKLCDELRRYLLDSVSRSSGHFASGLGTVELTVALHYVYNTPFDQLIWDVGHQAYPHKILTGRRDKIGTIRQKGGLHPFPWRGESEYDVLSVGHSSTSISAGIGIAVAAEKEGKNRRTVCVIGDGAITAGMAFEAMNHAGDIRPDMLVILNDNEMSISENVGALNNHLAQLLSGKLYSSLREGGKKVFSGVPPIKELLKRTEEHIKGMVVPGTLFEELGFNYIGPVDGHDVLGLITTLKNMRDLKGPQFLHIMTKKGRGYEPAEKDPITFHAVPKFDPSSGCLPKSSGGLPSYSKIFGDWLCETAAKDNKLMAITPAMREGSGMVEFSRKFPDRYFDVAIAEQHAVTFAAGLAIGGYKPIVAIYSTFLQRAYDQVLHDVAIQKLPVLFAIDRAGIVGADGQTHQGAFDLSYLRCIPEMVIMTPSDENECRQMLYTGYHYNDGPSAVRYPRGNAVGVELTPLEKLPIGKGIVKRRGEKLAILNFGTLMPEAAKVAESLNATLVDMRFVKPLDEALILEMAASHEALVTVEENAIMGGAGSGVNEVLMAHRKPVPVLNIGLPDFFIPQGTQEEMRAELGLDAAGMEAKIKAWLA

SEQ ID NO: 56451 - protein, 299 aa, Escherichia coli
MDFPQQLEACVKQANQALSRFIAPLPFQNTPVVETMQYGALLGGKRLRPFLVYATGHMFGVSTNTLDAPAAAVECIHAYSLIHDDLPAMDDDDLRRGLPTCHVKFGEANAILAGDALQTLAFSILSDADMPEVSDRDRISMISELASASGIAGMCGGQALDLDAEGKHVPLDALERIHRHKTGALIRAAVRLGALSAGDKGRRALPVLDKYAESIGLAFQVQDDILDVVGDTATLGKRQGADQQLGKSTYPALLGLEQARKKARDLIDDARQSLKQLAEQSLDTSALEALADYIIQRNK

SEQ ID NO: 56452 - protein, 663 aa, Escherichia coli
MFGKLSLDAVPFHEPIVMVTIAGIILGGLALVGLITYFGKWTYLWKEWLTSVDHKRLGIMYIIVAIVMLLRGFADAIMMRSQQALASAGEAGFLPPHHYDQIFTAHGVIMIFFVAMPFVIGLMNLVVPLQIGARDVAFPFLNNLSFWFTVVGVILVNVSLGVGEFAQTGWLAYPPLSGIEYSPGVGVDYWIWSLQLSGIGTTLTGINFFVTILKMRAPGMTMFKMPVFTWASLCANVLIIASFPILTVTVALLTLDRYLGTHFFTNDMGGNMMMYINLIWAWGHPEVYILILPVFGVFSEIAATFSRKRLFGYTSLVWATVCITVLSFIVWLHHFFTMGAGANVNAFFGITTMIIAIPTGVKIFNWLFTMYQGRIVFHSAMLWTIGFIVTFSVGGMTGVLLAVPGADFVLHNSLFLIAHFHNVIIGGVVFGCFAGMTYWWPKAFGFKLNETWGKRAFWFWIIGFFVAFMPLYALGFMGMTRRLSQQIDPQFHTMLMIAASGAVLIALGILCLVIQMYVSIRDRDQNRDLTGDPWGGRTLEWATSSPPPFYNFAVVPHVHERDAFWEMKEKGEAYKKPDHYEEIHMPKNSGAGIVIAAFSTIFGFAMIWHIWWLAIVGFAGMIITWIVKSFDEDVDYYVPVAEIEKLENQHFDEITKAGLKNGN

SEQ ID NO: 56453 - protein, 90 aa, Escherichia coli
MNKSQLIDKIAAGADISKAAAGRALDAIIASVTESLKEGDDVALVGFGTFAVKERAARTGRNPQTGKEITIAAAKVPSFRAGKALKDAVN

SEQ ID NO: 56454 - protein, 643 aa, Escherichia coli
MSYQVLARKWRPQTFADVVGQEHVLTALANGLSLGRIHHAYLFSGTRGVGKTSIARLLAKGLNCETGITATPCGVCDNCREIEQGRFVDLIEIDAASRTKVEDTRDLLDNVQYAPARGRFKVYLIDEVHMLSRHSFNALLKTLEEPPEHVKFLLATTDPQKLPVTILSRCLQFHLKALDVEQIRHQLEHILNEEHIAHEPRALQLLARAAEGSLRDALSLTDQAIASGDGQVSTQAVSAMLGTLDDDQALSLVEAMVEANGERVMALINEAAARGIEWEALLVEMLGLLHRIAMVQLSPAALGNDMAAIELRMRELARTIPPTDIQLYYQTLLIGRKELPYAPDRRMGVEMTLLRALAFHPRMPLPEPEVPRQSFAPVAPTAVMTPTQVPPQPQSAPQQAPTVPLPETTSQVLAARQQLQRVQGATKAKKSEPAAATRARPVNNAALERLASVTDRVQARPVPSALEKAPAKKEAYRWKATTPVMQQKEVVATPKALKKALEHEKTPELAAKLAAEAIERDPWAAQVSQLSLPKLVEQVALNAWKEESDNAVCLHLRSSQRHLNNRGAQQKLAEALSMLKGSTVELTIVEDDNPAVRTPLEWRQAIYEEKLAQARESIIADNNIQTLRRFFDAELDEESIRPI

SEQ ID NO: 56455 - protein, 109 aa, Escherichia coli
MFGKGGLGNLMKQAQQMQEKMQKMQEEIAQLEVTGESGAGLVKVTINGAHNCRRVEIDPSLLEDDKEMLEDLVAAAFNDAARRIEETQKEKMASVSSGMQLPPGFKMPF

SEQ ID NO: 56456 - protein, 201 aa, Escherichia coli
MQTSPLLTQLMEALRCLPGVGPKSAQRMAFTLLQRDRSGGMRLAQALTRAMSEIGHCADCRTFTEQEVCNICSNPRRQENGQICVVESPADIYAIEQTGQFSGRYFVLMGHLSPLDGIGPDDIGLDRLEQRLAEEKITEVILATNPTVEGEATANYIAELCAQYDVEASRIAHGVPVGGELEMVDGTTLSHSLAGRHKIRF

SEQ ID NO: 56457 - protein, 550 aa, Escherichia coli
MKLLQRGVALALLTTFTLASETALAYEQDKTYKITVLHTNDHHGHFWRNEYGEYGLAAQKTLVDGIRKEVAAEGGSVLLLSGGDINTGVPESDLQDAEPDFRGMNLVGYDAMAIGNHEFDNPLTVLRQQEKWAKFPLLSANIYQKSTGERLFKPWALFKRQDLKIAVIGLTTDDTAKIGNPEYFTDIEFRKPADEAKLVIQELQQTEKPDIIIAATHMGHYDNGEHGSNAPGDVEMARALPAGSLAMIVGGHSQDPVCMAAENKKQVDYVPGTPCKPDQQNGIWIVQAHEWGKYVGRADFEFRNGEMKMVNYQLIPVNLKKKVTWEDGKSERVLYTPEIAENQQMISLLSPFQNKGKAQLEVKIGETNGRLEGDRDKVRFVQTNMGRLILAAQMDRTGADFAVMSGGGIRDSIEAGDISYKNVLKVQPFGNVVVYADMTGKEVIDYLTAVAQMKPDSGAYPQFANVSFVAKDGKLNDLKIKGEPVDPAKTYRMATLNFNATGGDGYPRLDNKPGYVNTGFIDAEVLKAYIQKSSPLDVSVYEPKGEVSWQ

SEQ ID NO: 56458 - protein, 228 aa, Escherichia coli
MPAENIVEVHHLKKSVGQGEHELSILTGVELVVKRGETIALVGESGSGKSTLLAILAGLDDGSSGEVSLVGQPLHNMDEEARAKLRAKHVGFVFQSFMLIPTLNALENVELPALLRGESSAESRNGAKALLEQLGLGKRLDHLPAQLSGGEQQRVALARAFNGRPDVLFADEPTGNLDRQTGDKIADLLFSLNREHGTTLIMVTHDLQLAARCDRCLRLVNGQLQEEA

SEQ ID NO: 56459 - protein, 453 aa, Escherichia coli
MSFDLIIKNGTVILENEARVVDIAVKGGKIAAIGQDLGDAKEVMDASGLVVSPGMVDAHTHISEPGRSHWEGYETGTRAAAKGGITTMIEMPLNQLPATVDRASIELKFDAAKGKLTIDAAQLGGLVSYNIDRLHELDEVGVVGFKCFVATCGDRGIDNDFRDVNDWQFFKGAQKLGELGQPVLVHCENALICDELGEEAKREGRVTAHDYVASRPVFTEVEAIRRVLYLAKVAGCRLHVCHVSSPEGVEEVTRARQEGQDVTCESCPHYFVLDTDQFEEIGTLAKCSPPIRDLENQKGMWEKLFNGEIDCLVSDHSPCPPEMKAGNIMKAWGGIAGLQSCMDVMFDEAVQKRGMSLPMFGKLMATNAADIFGLQQKGRIAPGKDADFVFIQPNSSYVLTNDDLEYRHKVSPYVGRTIGARITKTILRGDVIYDIEQGFPVAPKGQFILKHQQ

SEQ ID NO: 56460 - protein, 461 aa, Escherichia coli [sequence omitted]

SEQ ID NO: 56461 - protein, 338 aa, Escherichia coli; identical to SEQ ID NO: 43054

SEQ ID NO: 56462 - protein, 153 aa, Escherichia coli
MSRVTAIISALIICIIVSLSWAVNHYRDNAIAYKVQRDKNARELKLANAAITDMQMRQRDVAALDAKYTKELADAKAENDALRDDVAAGRRRLHIKAVCQSVREATTASGVDNAASPRLADTAERDYFTLRERLITMQKQLEGTQKYINEQCR

SEQ ID NO: 56463 - protein, 150 aa, Escherichia coli
MQTTRPRITWKVLPMAQVAIFKEIFDQVRKDLNCELFYSELKRHNVSHYIYYLATDNIHIVLENDNTVLIKGLKKVVNVKFSRNTHLIETSYDRLKSREITFQQYRENLAKAGVFRWITNIHEHKRYYYTFDNSLLFTESIQNTTQIFPR

SEQ ID NO: 56464 - protein, 372 aa, Escherichia coli
MPLPDFHVSEPFTLGIELEMQVVNPPGYDLSQDSSMLIDAVKNKITAGEVKHDITESMLELATDVCRDINQAAGQFSAMQKVVLQAATDHHLEICGGGTHPFQKWQRQEVCDNERYQRTLENFGYLIQQATVFGQHVHVGCASGDDAIYLLHGLSRFVPHFIALSAASPYMQGTDTRFASSRPNIFSAFPDNGPMPWVSNWQQFEALFRCLSYTTMIDSIKDLHWDIRPSPHFGTVEVRVMDTPLTLSHAVNMAGLIQATAHWLLTERPFKHQEKDYLLYKFNRFQACRYGLEGVITDPHTGDRRPLTEDTLRLLEKIAPSAHKIGASSAIEALHRQVVSGLNEAQLMRDFVADGGSLIGLVKKHCEIWAGD

SEQ ID NO: 56465 - protein, 1293 aa, Escherichia coli
MSQHLPLVAAQPGIWMAEKLSELPSAWSVAHYVELTGEVDSPLLARAVVAGLAQADTLRMRFTEDNGEVWQWVDDALTFELPEIIDLRTNIDPHGTAQALMQADLQQDLRVDSGKPLVFHQLIQVADNRWYWYQRYHHLLVDGFSFPAITRQIANIYCTWLRGEPTPASPFTPFADVVEEYQQYRESEAWQRDAAFWAEQRRQLPPPASLSPAPLPGRSASADILRLKLEFTDGEFRQLATQLSGVQRTDLALALAALWLGRLCNRMDYAAGFIFMRRLGSAALTATGPVLNVLPLGIHIAAQETLPELATRLAAQLKKMRRHQRYDAEQIVRDSGRAAGDEPLFGPVLNIKVFDYQLDIPDVQAQTHTLATGPVNDLELALFPDVHGDLSIEILANKQRYDEPTLIQHAERLKMLIAQFAADPALLCGDVDIMLPGEYAQLAQLNATQVEIPETTLSALVAEQAAKTPDAPALADARYLFSYREMREQVVALANLLRERGVKPGDSVAVALPRSVFLTLALHAIVEAGAAWLPLDTGYPDDRLKMMLEDARPSLLITTDDQLPRFSDVPNLTSLCYNAPLTPQGSAPLQLSQPHHTAYIIFTSGSTGRPKGVMVGQTAIVNRLLWMQNHYPLTGEDVVAQKTPCSFDVSVWEFFWPFIAGAKLVMAEPEAHRDPLAMQQFFAEYGVTTTHFVPSMLAAFVASLTPQTARQSCATLKQVFCSGEALPADLCREWQQLTGAPLHNLYGPTEAAVDVSWYPAFGEELAQVRGSSVPIGYPVWNTGLRILDAMMHPVPPGVAGDLYLTGIQLAQGYLGRPDLTASRFIADPFAPGERMYRTGDVARWLDNGAVEYLGRSDDQLKIRGQRIELGEIDRVMQALPDVEQAVTHACVINQAAATGGDARQLVGYLVSQSGLPLDTSALQAQLRETLPPHMVPVVLLQLPQLPLSANGKLDRKALPLPELKAQAPGRAPKAGSETIIAAAFSSLLGCDVQDADADFFALGGHSLLAMKLAAQLSRQVARQVTPGQVMVASTVAKLATIIDAEEDSTRRMGFETILPLREGNGPTLFCFHPASGFAWQFSVLSRYLDPQWSIIGIQSPRPNGPMQTAANLDEVCEAHLATLLEQQPHGPYYLLGYSLGGTLAQGIAARLRARGEQVAFLGLLDTWPPETQNWQEKEANGLDPEVLAEINREREAFLAAQQGSTSTELFTTIEGNYADAVRLLTTAHSVPFDGKATLFVAERTLQEGMSPERAWSPWIAELDIYRQDCAHVDIISPGTFEKIGPIIRATLNR

SEQ ID NO: 56466 - protein, 271 aa, Escherichia coli
MTESVARLRGEQLTLGYGKYTVAENLTVEIPDGHFTAIIGPNGCGKSTLLRTLSRLMTPAHGHVWLDGEHIQHYASKEVARRIGLLAQNATTPGDITVQELVARGRYPHQPLFTRWRKEDEEAVTKAMQATGITHLADQSVDTLSGGQRQRAWIAMVLAQETAIMLLDEPTTWLDISHQIDLLELLSELNREKGYTLAAVLHDLNQACRYASHLIALREGKIVAQGAPKEIVTAELIERIYGLRCMIIDDPVAGTPLVVPLGRTAPSTANS

SEQ ID NO: 56467 - protein, 187 aa, Escherichia coli
MSLINTKIKPFKNQAFKNGEFIEITEKDTEGRWSVFFFYPADFTFVCPTELGDVADHYEELQKLGVDVYAVSTDTHFTHKAWHSSSETIAKIKYAMIGDPTGALTRNFDNMREDEGLADRATFVVDPQGIIQAIEVTAEGIGRDASDLLRKIKAAQYVASHPGEVCPAKWKEGEATLAPSLDLVGKI

SEQ ID NO: 56468 - protein, 510 aa, Escherichia coli
MTQKIEQSQRQERVAAWNRRAECDLAAFQNSPKQTYQAEKARDRKLCANLEEAIRRSGLQDGMTVSFHHAFRGGDLTVNMVMDVIAKMGFKNLTLASSSLSDCHAPLVEHIRQGVVTRIYTSGLRGPLAEEISRGLLAEPVQIHSHGGRVHLVQSGELNIDVAFLGVPSCDEFGNANGYTGKACCGSLGYAIVDADNAKQVVMLTEELLPYPHNPASIEQDQVDLIVKVDRVGDAAKIGAGATRMTTNPRELLIARSAADVIVNSGYFKEGFSMQTGTGGASLAVTRFLEDKMRSRDIRADFALGGITATMVDLHEKGLIRKLLDVQSFDSHAAQSLARNPNHIEISANQYANWGSKGASVDRLDVVVLSALEIDTQFNVNVLTGSDGVLRGASGGHCDTAIASALSIIVAPLVRGRIPTLVDNVLTCITPGSSVDILVTDHGIAVNPARPELAERLQEAGIKVVSIEWLRERARLLTGEPQPIEFTDRVVAVVRYRDGSVIDVVHQVKE

SEQ ID NO: 56469 - protein, 307 aa, Escherichia coli
MGGLPMISASLQQRKTRTRRSMLFVPGANAAMVSNSFIYPADALMFDLEDSVALREKDTARRMVYHALQHPLYRDIETIVRVNALDSEWGVNDLEAVVRGGADVVRLPKTDTAQDVLDIEKEILRIEKACGREPGSTGLLAAIESPLGITRAVEIAHASERLIGIALGAEDYVRNLRTERSPEGTELLFARCSILQAARSAGIQAFDTVYSDANNEAGFLQEAAHIKQLGFDGKSLINPRQIDLLHNLYAPTQKEVDHARRVVEAAEAAAREGLGVVSLNGKMVDGPVIDRARLVLSRAELSGIREE

SEQ ID NO: 56470 - protein, 321 aa, Escherichia coli
MSKPIVMERGVKYRDADKMALIPVKNVATEREALLRKPEWMKIKLPADSTRIQGIKAAMRKNGLHSVCEEASCPNLAECFNHGTATFMILGAICTRRCPFCDVAHGRPVAPDANEPVKLAQTIADMALRYVVITSVDRDDLRDGGAQHFADCITAIREKSPQIKIETLVPDFRGRMDRALDILTATPPDVFNHNLENVPRIYRQVRPGADYNWSLKLLERFKEAHPEIPTKSGLMVGLGETNEEIIEVMRDLRRHGVTMLTLGQYLQPSRHHLPVQRYVSPDEFDEMKAEALAMGFTHAACGPFVRSSYHADLQAKGMEVK

SEQ ID NO: 56471 - protein, 155 aa, Escherichia coli
MKLQLVAVGTKMPDWVQTGFTEYLRRFPKDMPFELIEIPAGKRGKNADIKRILDKEGEQMLAAAGKNRIVTLDIPGKPWDTPQLAAELERWKLDGRDVSLLIGGPEGLSPACKAAAEQSWSLSALTLPHPLVRVLVAESLYRAWSITTNHPYHRE

SEQ ID NO: 56472 - protein, 203 aa, Escherichia coli
MRLWLIRHGETQANIDGLYSGHAPTPLTARGIEQAQNLHTLLHGVSFDLVLCSELERAQHTARLVLSDRQLPVQIIPELNEMFFGDWEMRHHRDLMQEDAENYSAWCNDWQHAIPTNGEGFQAFSQRVERFIARLSEFQHYQNILVVSHQGVLSLLIARLIGMPAEAMWHFRVDQGCWSAIDINQKFATLRVLNSRAIGVENA

SEQ ID NO: 56473 - protein, 311 aa, Escherichia coli
MALPILLDCDPGHDDAIAIVLALASPELDVKAITSSAGNQTPEKTLRNVLRMLTLLNRTDIPVAGGAVKPLMRELIIADNVHGESGLDGPALPEPTFAPQNCTAVELMAKTLRESAEPVTIVSTGPQTNVALLLNSHPELHSKIARIVIMGGAMGLGNWTPAAEFNIYVDPEAAEIVFQSGIPVVMAGLDVTHKAQIHVEDTERFRAIGNPVSTIVAELLDFFLEYHKDEKWGFVGAPLHDPCTIAWLLKPELFTSVERWVGVETQGKYTQGMTVVDYYYLTGNKPNATVMVDVDRQGFVDLLADRLKFYA

SEQ ID NO: 56474 - protein, 338 aa, Escherichia coli; identical to SEQ ID NO: 43054

SEQ ID NO: 56475 - protein, 554 aa, Escherichia coli
MCSIFGVFDIKTDAVELRKKALELSRLMRHRGPDWSGIYASDNAILAHERLSIVDVNAGAQPLYNQQKTHVLAVNGEIYNHQALRAEYGDRYQFQTGSDCEVILALYQEKGPEFLDDLQGMFAFALYDSEKDAYLIGRDHLGIIPLYMGYDEHGQLYVASEMKALVPVCRTIKEFPAGSYLWSQDGEIRSYYHRDWFDYDAVKDNVTDKNELRQALEDSVKSHLMSDVPYGVLLSGGLDSSIISAITKKYAARRVEDQERSEAWWPQLHSFAVGLPGSPDLKAAQEVANHLGTVHHEIHFTVQEGLDAIRDVIYHIETYDVTTIRASTPMYLMSRKIKAMGIKMVLSGEGSDEVFGGYLYFHKAPNAKELHEETVRKLLALHMYDCARANKAMSAWGVEARVPFLDKKFLDVAMRINPQDKMCGNGKMEKHILRECFEAYLPASVAWRQKEQFSDGVGYSWIDTLKEVAAQQVSDQQLETARFRFPYNTPTSKEAYLYREIFEELFPLPSAAECVPGGPSVACSSAKAIEWDEAFKKMDDPSGRAVGVHQSAYK

SEQ ID NO: 56476 - protein, 382 aa, Escherichia coli
MYALTQGRIFTGHEFLDDHAVVIADGLIKSVCPVAELPPEIEQRSLNGAILSPGFIDVQLNGCGGVQFNDTAEAVSVETLEIMQKANEKSGCTNYLPTLITTSDELMKQGVRVMREYLAKHPNQALGLHLEGPWLNLVKKGTHNPNFVRKPDAALVDFLCENADVITKVTLAPEMVPAEVISKLANAGIVVSAGHSNATLKEAKAGFRAGITFATHLYNAMPYITGREPGLAGAILDEADIYCGIIADGLHVDYANIRNAKRLKGDKLCLVTDATAPAGANIEQFIFAGKTIYYRNGLCVDENGTLSGSSLTMIEGVRNLVEHCGIALDEVLRMATLYPARAIGVEKRLGTLAAGKVANLTAFTPDFKITKTIVNGNEVVTQ

SEQ ID NO: 56477 - protein, 894 aa, Escherichia coli
MNNEPLRPDPDRLLEQTAAPHRGKLKVFFGACAGVGKTWAMLAEAQRLRAQGLDIVVGVVETHGRKDTAAMLEGLAVLPLKRQAYRGRHISEFDLDAALARRPALILMDELAHSNAPGSRHPKRWQDIEELLEAGIDVFTTVNVQHLESLNDVVSGVTGIQVRETVPDPFFDAADDVVLVDLPPDDLRQRLKEGKVYIAGQAERAIEHFFRKGNLIALRELALRRTADRVDEQMRAWRGHPGEEKVWHTRDAILLCIGHNTGSEKLVRAAARLASRLGSVWHAVYVETPALHRLPEKKRRAILSALRLAQELGAETATLSDPAEEKAVVRYAREHNLGKIILGRPASRRWWRRETFADRLARIAPDLDQVLVALDEPPARTINNAPDNRSFKDKWRVQIQGCVVAAALCAVITLIAMQWLMAFDAANLVMLYLLGVVVVALFYGRWPSVVATVINVVSFDLFFIAPRGTLAVSDVQYLLTFAVMLTVGLVIGNLTAGVRYQARVARYREQRTRHLYEMSKALAVGRSPQDIAATSEQFIASTFHARSQVLLPDDNGKLQPLTHPQGMTPWDDAIAQWSFDKGLPAGAGTDTLPGVPYQILPLKSGEKTYGLVVVEPGNLRQLMIPEQQRLLETFTLLVANALERLTLTASEEQARMASEREQIRNALLAALSHDLRTPLTVLFGQAEILTLDLASEGSPHARQASEIRQHVLNTTRLVNNLLDMARIQSGGFNLKKEWLTLEEVVGSALQMLEPGLSSPINLSLPEPLTLIHVDGPLFERVLINLLENAVKYAGAQAEIGIDAHVEGENLQLDVWDNGPGLPPGQEQTIFDKFARGNKESAVPGVGLGLAICRAIVDVHGGTITAFNRPEGGACFRVTLPQQTAPELEEFHEDM

SEQ ID NO: 56478 - protein, 190 aa, Escherichia coli
MSGLRPALSTFIFLLLITGGVYPLLTTVLGQWWFPWQANGSLIREGDTVRGSALIGQNFTGNGYFHGRPSATAEMPYNPQASGGSNLAVSNPELDKLIAARVAALRAANPDASASVPVELVTASASGLDNNITPQAAAWQIPRVAKARNLSVEQLTQLIAKYSQQPLVKYIGQPVVNIVELNLALDKLDE

SEQ ID NO: 56479 - protein, 682 aa, Escherichia coli
MSRKQLALFEPTLVVQALKEAVKKLNPQAQWRNPVMFIVWIGSLLTTCISIAMASGAMPGNALFSAAISGWLWITVLFANFAEALAEGRSKAQANSLKGVKKTAFARKLREPKYGAAADKVPADQLRKGDIVLVEAGDIIPCDGEVIEGGASVDESAITGESAPVIRESGGDFASVTGGTRILSDWLVIECSVNPGETFLDRMIAMVEGAQRRKTPNEIALTILLIALTIVFLLATATLWPFSAWGGNAVSVTVLVALLVCLIPTTIGGLLSAIGVAGMSRMLGANVIATSGRAVEAAGDVDVLLLDKTGTITLGNRQASEFIPAQGVDEKTLADAAQLASLADETPEGRSIVILAKQRFNLRERDVQSLHATFVPFTAQSRMSGINIDNRMIRKGSVDAIRRHVEANGGHFPTDVDQKVDQVARQGATPLVVVEGSRVLGVIALKDIVKGGIKERFAQLRKMGIKTVMITGDNRLTAAAIAAEAGVDDFLAEATPEAKLALIRQYQAEGRLVAMTGDGTNDAPALAQADVAVAMNSGTQAAKEAGNMVDLDSNPTKLIEVVHIGKQMLMTRGSLTTFSIANDVAKYFAIIPAAFAATYPQLNALNIMCLHSPDSAILSAVIFNALIIVFLIPLALKGVSYKPLTASAMLRRNLWIYGLGGLLVPFIGIKVIDLLLTVCGLV

SEQ ID NO: 56480 - protein, 477 aa, Escherichia coli
MWPDNRIARDAHYLYRYDRHGRLTEKTDLIPEGVIRTDDERTHRYHYDSQHRLVHYTRTQYAEPLVESRYLYDPLGRRVAKRVWRRERDLTGWMSLSRKPQVTWYGWDGDRLTTIQNDRTRIQTIYQPGSFTPLIRVETATGELAKTQRRSLADTLQQSGGEDGGSVVFPPVLVQMLDRLESEILADRVSEESRRWLASCGLTVEQMQNQMDPVYTPARKIHLYHCDHRGLPLALVSTEGATEWCAEYDEWGNLLNEENPHQLQQLIRLPGQQYDEESGLYYNRHRYYDPLQGRYITQDPIGLKGGWNFYQYPLNPVQYIDSMGLASKYGHLNNGGYGARPNKPPTPDPSKLPDIAKQLRLPYPIDQASSAPNVFKTFFRALSPYDYTLYCRKWVKPNLTCTPQDDSQYPGMDTKTASDYLPQTNWPTTQLPPGYTCAEPYLFPDINKPDGPATAGIDDLGEILAKMKQRTSRGIRK

SEQ ID NO: 56481 - protein, 244 aa, Escherichia coli
MKIDLNADLGEGCASDAELLTLVSSANIACGFHAGDAQIMQACVREAIKNGVAIGAHPSFPDRENFGRSAMQLPPETVYAQTLYQIGALATIARAQGGVMRHVKPHGMLYNQAAKEAQLADAIARAVYACDPALILVGLAGSELIRAGKQYGLTTREEVFADRGYQADGSLVPRSQSGALIENEEQALAQTLEMVQHGRVKSITGEWATVAAQTVCLHGDGEHALAFARRLRSAFAEKGIVVAA

SEQ ID NO: 56482 - protein, 933 aa, Escherichia coli
MQNSALKAWLDSSYLSGANQSWIEQLYEDFLTDPDSVDANWRSTFQQLPGTGVKPDQFHSQTREYFRRLAKDASRYSSTISDPDTNVKQVKVLQLINAYRFRGHQHANLDPLGLWQQDKVADLDPSFHDLTEADFQETFNVGSFASGKETMKLGELLEALKQTYCGPIGAEYMHITSTEEKRWIQQRIESGRATFNSEEKKRFLSELTAAEGLERYLGAKFPGAKRFSLEGGDALIPMLKEMIRHAGNSGTREVVLGMAHRGRLNVLVNVLGKKPQDLFDEFAGKHKEHLGTGDVKYHMGFSSDFQTDGGLVHLALAFNPSHLEIVSPVVIGSVRARLDRLDEPSSNKVLPITIHGDAAVTGQGVVQETLNMSKARGYEVGGTVRIVINNQVGFTTSNPLDARSTPYCTDIGKMVQAPIFHVNADDPEAVAFVTRLALDFRNTFKRDVFIDLVCYRRHGHNEADEPSATQPLMYQKIKKHPTPRKIYADKLEQEKVATLEDATEMVNLYRDALDAGDCVVAEWRPMNMHSFTWSPYLNHEWDEEYPNKVEMKRLQELAKRISTVPEAVEMQSRVAKIYGDRQAMAAGEKLFDWGGAENLAYATLVDEGIPVRLSGEDSGRGTFFHRHAVIHNQSNGSTYTPLQHIHNGQGAFRVWDSVLSEEAVLAFEYGYATAEPRTLTIWEAQFGDFANGAQVVIDQFISSGEQKWGRMCGLVMLLPHGYEGQGPEHSSARLERYLQLCAEQNMQVCVPSTPAQVYHMLRRQALRGMRRPLVVMSPKSLLRHPLAVSSLEELANGTFLPAIGEIDELDPKGVKRVVMCSGKVYYDLLEQRRKNNQHDVAIVRIEQLYPFPHKAMQEVLQQFAHVKDFVWCQEEPLNQGAWYCSQHHFREVIPFGASLRYAGRPASASPAVGYMSVHQKQQQDLVNDALNVE

SEQ ID NO: 56483 - protein, 421 aa, Escherichia coli
MSKATEQNDKLKRAIIISAVLHVILFAALIWSSFDENIEASAGGGGGSSIDAVMVDSGAVVEQYKRMQSQESSAKRSDEQRKMKEQQAAEELREKQAAEQERLKQLEKERLAAQEQKKQAEEAAKQAELKQKQAEEAAAKAAADAKAKAEADAKAAEEAAKKAAADAKKKAEAEAAKAAAEAQKKAEAAAAALKKKAEAAEAAAAEARKKAATEAAEKAKAEAEKKAAAEKAAADKKAAAEKAAADKKAAEKAAAEKAAADKKAAAEKAAADKKAAAAKAAAEKAAAAKAAAEADDIFGELSSGKNAPKTGGGAKGNNASPAGSGNTKNNGASGADINNYAGQIKSAIESKFYDASSYAGKTCTLRIKLAPDGMLLDIKPEGGDPALCQAALAAAKLAKIPKPPSQAVYEVFKNAPLDFKP

SEQ ID NO: 56484 - protein, 257 aa, Escherichia coli
MARKWLNLFAGAALSFAVAGNALADEGKITVFAAASLTNAMQDIATQFKKEKGVDVVSSFASSSTLARQIEAGAPADLFISADQKWMDYAVDKKAIDTATRQTLLGNSLVVVAPKASVQKDFTIDSKTNWTSLLNGGRLAVGDPEHVPAGIYAKEALQKLGAWDTLSPKLAPAEDVRGALALVERNEAPLGIVYGSDAVASKGVKVVATFPEDSHKKVEYPVAVVEGHNNATVKAFYDYLKGPQAAEIFKRYGFTIK

SEQ ID NO: 56485 - protein, 429 aa, Escherichia coli
MTTDDLAFDQRHIWHPYTSMTSPLPVYPVVSAEGCELILSDGRRLVDGMSSWWAAIHGYNHPQLNAAMKSQIDAMSHVMFGGITHAPAIELCRKLVAMTPQPLECVFLADSGSVAVEVAMKMALQYWQAKGEARQRFLTFRNGYHGDTFGAMSVCDPDNSMHSLWKGYLPENLFAPAPQSRMDGEWDERDMVGFARLMAAHRHEIAAVIIEPIVQGAGGMRMYHPEWLKRIRKICDREGILLIADEIATGFGRTGKLFACEHAEIAPDILCLGKALTGGTMTLSATLTTREVAETISNGEAGCFMHGPTFMGNPLACAAANASLAILESGDWQQQVADIEVQLREQLAPARDAEMVADVRVLGAIGVVETTHPVNMAALQKFFVEQGVWIRPFGKLIYLMPPYIILPQQLQRLTAAVNRAVQDETFFCQ

SEQ ID NO: 56486 - protein, 346 aa, Escherichia coli
MAHRPRWTLSQVTELFEKPLLDLLFEAQQVHRQHFDPRQVQVSTLLSIKTGACPEDCKYCPQSSRYKTGLEAERLMEVEQVLESARKAKAAGSTRFCMGAAWKNPHERDMPYLEQMVQGVKAMGLEACMTLGTLSESQAQRLANAGLDYYNHNLDTSPEFYGNIITTRTYQERLDTLEKVRDAGIKVCSGGIVGLGETVKDRAGLLLQLANLPTPPESVPINMLVKVKGTPLADNDDVDAFDFIRTIAVARIMMPTSYVRLSAGREQMNEQTQAMCFMAGANSIFYGCKLLTTPNPEEDKDLQLFRKLGLNPQQTAVLAGDNEQQQRLEQALMTPDTDEYYNAAAL

SEQ ID NO: 56487 - protein, 302 aa, Escherichia coli
MRNRTLADLDRVVALGGGHGLGRVLSSLSSLGSRLTGIVTTTDNGGSTGRIRRSEGGIAWGDMRNCLNQLITEPSVASAMFEYRFGGNGELSGHNLGNLMLKALDHLSVRPLEAINLIRNLLKVDTHLIPMSEHPVDLMAIDDQGHEVYGEVNIDQLTTPIQELLLTPNVPATREAVHAINEADLIIIGPGSFYTSLMPILLLKEIAQALRRTPAPMVYIGNLGRELSLPAANLKLESKLAIMEQYVGKKVIDAVIVGPKVDVSAVKERIVIQEVLEASDIPYRHDRQLLHNALEKALQALG

SEQ ID NO: 56488 - protein, 170 aa, Escherichia coli
MSQVSTEFIPTRIAILTVSNRRGEEDDTSGHYLRDSAQEAGHHVVDKAIVKENRYAIRAQVSAWIASDDVQVVLITGGTGLTEGDQAPEALLPLFDREVEGFGEVFRMLSFEEIGTSTLQSRAVAGVANKTLIFAMPGSTKACRTAWENIIAPQLDARTRPCNFHPHLKK

SEQ ID NO: 56489 - protein, 583 aa, Escherichia coli
MTRQDMNDAVITLNGLEKRFPGMDKPAVAPLDCTIHAGYVTGLVGPDGAGKTTLMRMLAGLLKPDSGSATVIGFDPIKNDGALHAVLGYMPQKFGLYEDLTVMENLNLYADLRSVTGEARKQTFARLLEFTSLGPFTGRLAGKLSGGMKQKLGLACTLVGEPKVLLLDEPGVGVDPISRRELWQMVHELAGEGMLILWSTSYLDEAEQCRDVLLMNEGELLYQGEPKALTQTMAGRSFLMTSPHEGNRKLLQRALKLPQVSDGMIQGKSVRLILKKEATPDDIRHADGMPEININETTPRFEDAFIDLLGGAGTSESPLGAILHTVEGTPGETVIEAKELTKKFGDFAATDHVNFAVKRGEIFGLLGPNGAGKSTTFKMMCGLLVPTSGQALVLGMDLKESSGKARQHLGYMAQKFSLYGNLTVEQNLRFFSGVYGLRGRAQNEKISRMSEAFGLKSIASHATDELPLGFKQRLALACSLMHEPDILFLDEPTSGVDPLTRREFWLHINSMVEKGVTVMVTTHFMDEAEYCDRIGLVYRGKLIASGTPDDLKAQSANDEQPDPTMEQAFIQLIHDWDKEHSNE

SEQ ID NO: 56490 - protein, 167 aa, Escherichia coli [sequence omitted]

SEQ ID NO: 56491 - protein, 295 aa, Escherichia coli
MPGSLRKMPVWLPIVILLVAMASIQGGASLAKSLFPLVGAPGVTALRLALGTLILIAFFKPWRLRFAKEQRLPLLFYGVSLGGMNYLFYLSIQTVPLGIAVALEFTGPLAVALFSSRRPVDFVWVVLAVLGLWFLLPLGQDVSHVDLTGCALALGAGACWAIYILSGQRAGAEHGPATVAIGSLIAALIFVPIGALQAGEALWHWSVIPLGLAVAILSTALPYSLEMIALTRLPTRTFGTLMSMEPALAAVSGMIFLGETLTPIQLLALGAIIAASMGSTLTVRKESKIKELDIN

SEQ ID NO: 56492 - protein, 530 aa, Escherichia coli
MLVSSNVTMQFGSKPLFENISVKFGGGNRYGLIGANGSGKSTFMKILGGDLEPTLGNVSLDPNERIGKLRQDQFAFEEFTVLDTVIMGHKELWEVKQERDRIYALPEMSEEDGYKVADLEVKYGEMDGYSAEARAGELLLGVGIPVEQHYGPMSEVAPGWKLRVLLAQALFADPDILLLDEPTNNLDIDTIRWLEQVLNERDSTMIIISHDRHFLNMVCTHMADLDYGELRVYPGNYDEYMTAATQARERLLADNAKKKAQIAELQSFVSRFSANASKSRQATSRARQIDKIKLEEVKASSRQNPFIRFEQDKKLFRNALEVEGLTKGFDNGPLFKNLNLLLEVGEKLAVLGTNGVGKSTLLKTLVGDLQPDSGTVKWSENARIGYYAQDHEYEFENDLTVFEWMSQWKQEGDDEQAVRSILGRLLFSQDDIKKPAKVLSGGEKGRMLFGKLMMQKPNILIMDEPTNHLDMESIESLNMALELYQGTLIFVSHDREFVSSLATRILEITPERVIDFSGNYEDYLRSKGIE

SEQ ID NO: 56493 - protein, 411 aa, Escherichia coli
MEFTTGLMSLDTALNEMLSRVTPLTAQETLPLVQCFGRILASDVVSPLDVPGFDNSAMDGYAVRLADIASGQPLPVAGKSFAGQPYHGEWPAGTCIRIMTGAPVPEGCEAVVMQEQTEQMDNGVRFTAEVRSGQNIRRRGEDISAGAVVFPAGTRLTTAELPVIASLGIAEVPVIRKVRVALFSTGDELQLPGQPLGDGQIYDTNRLAVHLMLEQLGCEVINLGIIRDDPHALRAAFIEADSQADVVISSGGVSVGEADYTKTILEELGEIAFWKLAIKPGKPFAFGKLSNSWFCGLPGNPVSATLTFYQLVQPLLAKLSGNTASGLPARQRVRTASRLKKTPGRLDFQRGVLQRNADGELEVTTTGHQGSHIFSSFSLGNCFIVLERDRGNVEVGEWVEVEPFNALFGGL

SEQ ID NO: 56494 - protein, 612 aa, Escherichia coli
MLAVENLNIAFMQDQQKIAAVRNLSFSLQRGETLAIVGESGSGKSVTALALMRLLEQAGGLVQCDKMLLQRRSREVIELSEQNAAQMRHVRGADMAMIFQEPMTSLNPVFTVGEQIAESIRLHQNASREEAMVEAKRMLDQVRIPEAQTILSRYPHQLSGGMRQRVMIAMALSCRPAVLIADEPTTALDVTIQAQILQLIKVLQKEMSMGVIFITHDMGVVAEIADRVLVMYQGEAVETGTVEQIFHAPQHPYTRALLAAVPQLGAMKGLDYPRRFPLISLEHPAKQAPPIEQKTVVDGEPVLRVRNLVTRFPLRSGLLNRVTREVHAVEKVSFDLWPGETLSLVGESGSGKSTTGRALLRLVESQGGEIIFNGQRIDTLSPGKLQALRRDIQFIFQDPYASLDPRQTIGDSIIEPLRVHGLLPGKDAAARVAWLLERVGLLPEHAWRYPHEFSGGQRQRICIARALALNPKVIIADEAVSALDVSIRGQIINLLLDLQRDFGIAYLFISHDMAVVERISHRVAVMYLGQIVEIGPRRAVFENPQHPYTRKLLAAVPVAEPSRQRPQRVLLSDDLPSNIHLRGEEVAAVSLQCVGPGHYVAQPQSEYAFMRR

SEQ ID NO: 56495 - protein, 198 aa, Escherichia coli
MLENLNLSLFSLINATPDSAPWMISLAIFIAKDLITVVPLLAVVLWLWGLTAQRQLVIKIAIALAVSLFVSWTMGHLFPHDRPFVENIGYNFLHHAADDSFPSDHGTVIFTFALAFLCWHRLWSGSLLMVLAVVIAWSRVYLGVHWPLDMLGGLLAGMIGCLSAQIIWQAMGHKLYQRLQSWYRVCFALPIRKGWVRD

SEQ ID NO: 56496 - protein, 281 aa, Escherichia coli
MNNLPVVRSPWRIVILLLGFTFLYAPMLMLVIYSFNSSKLVTVWAGWSTRWYGELLRDDAMMSAVGLSLTIAACAATAAAILGTIAAVVLVRFGRFRGSNGFAFMITAPLVMPDVITGLSLLLLFVALAHAIGWPADRGMLTIWLAHVTFCTAYVAVVISSRLRELDRSIEEAAMDLGATPLKVFFVITLPMIMPAIISGWLLAFTLSLDDLVIASFVSGPGATTLPMLVFSSVRMGVNPEINALATLILGAVGIVGFIAWYLMARAEKQRIRDIQRARRG

SEQ ID NO: 56497 - protein, 572 aa, Escherichia coli
MKQTVAAYIAKTLESAGVKRIWGVTGDSLNGLSDSLNRMGTIEWMSTRHEEVAAFAAGAEAQLSGELAVCAGSCGPGNLHLINGLFDCHRNHVPVLAIAAHIPSSEIGSGYFQETHPQELFRECSHYCELVSSPEQIPQVLAIAMRKAVLNRGVSVVVLPGDVALKPAPEGATMHWYHAPQPVVTPEEEELRKLAQLLRYSSNIALMCGSGCAGAHKELVEFAGKIKAPIVHALRGKEHVEYDNPYDVGMTGLIGFSSGFHTMMNADTLVLLGTQFPYRAFYPTDAKIIQIDINPASIGAHSKVDMALVGDIKSTLRALLPLVEEKADRKFLDKALEDYRDARKGLDDLAKPSEKAIHPQYLAQQISHFAADDAIFTCDVGTPTVWAARYLKMNGKRRLLGSFNHGSMANAMPQALGAQATEPERQVVAMCGDGGFSMLMGDFLSVVQMKLPVKIVVFNNSVLGFVAMEMKAGGYLTDGTELHDTNFARIAEACGITGIRVEKASEVDEALQRAFSIDGPVLVDVVVAKEELAIPPQIKLEQAKGFSLYMLRAIISGRGDEVIELAKTNWLR

SEQ ID NO: 56498 - protein, 72 aa, Escherichia coli
MAKEDNIEMQGTVLETLPNTMFRVELENGHVVTAHISGKMRKNYIRILTGDKVTVELTPYDLSKGRIVFRSR

SEQ ID NO: 56499 - protein, 1329 aa, Escherichia coli
MSQEYIEDKEVTLTKLSSGRRLLEALLILIVLFAVWLMAALLSFNPSDPSWSQTAWHEPIHNLGGMPGAWLADTLFFIFGVMAYTIPVIIVGGCWFAWRHQSSDEYIDYFAVSLRIIGVLALILTSCGLAAINADDIWYFASGGVIGSLLSTTLQPLLHSSGGTIALLCVWAAGLTLFTGWSWVTIAEKLGGWILNILTFASNRTRRDDTWVDEDEYEDDEEYEDENHGKQHESRRARILRGALARRKRLAEKFINPMGRQTDAALFSGKRMDDDEEITYTARGVAADPDDVLFSGNRATQPEYDEYDPLLNGAPITEPVAVAAAATTATQSWAAPVEPVTQTPPVASVDVPPAQPTVAWQPVPGPQTGEPVIAPAPEGYPQQSQYAQPAVQYNEPLQQPVQPQQPYYAPAAEQPAQQPYYAPAPEQPVAGNAWQAEEQQSTFAPQSTYQTEQTYQQPAAQEPLYQQPQPVEQQPVVEPEPVVEETKPARPPLYYFEEVEEKRAREREQLAAWYQPIPEPVKEPEPIKSSLKAPSVAAVPPVEAAAAVSPLASGVKKATLATGAAATVAAPVFSLANSGGPRPQVKEGIGPQLPRPKRIRVPTRRELASYGIKLPSQRAAEEKAREAQRNQYDSGDQYNDDEIDAMQQDELARQFAQTQQQRYGEQYQHDVPVNAEDADAAAEAELARQFAQTQQQRYSGEQPAGANPFSLDDFEFSPMKALLDDGPHEPLFTPIVEPVQQPQQPVAPQQQYQQPQQPVPPQPQYQQPQQPVAPQPQYQQPQQPVAPQQQYQQPQQPVAPQQQYQQPQQPVAPQPQDTLLHPLLMRNGDSRPLHKPTTPLPSLDLLTPPPSEVEPVDTFALEQMARLVEARLADFRIKADVVNYSPGPVITRFELNLAPGVKAARISNLSRDLARSLSTVAVRVVEVIPGKPYVGLELPNKKRQTVYLREVLDNAKFRDNPSPLTVVLGKDIAGEPVVADLAKMPHLLVAGTTGSGKSVGVNAMILSMLYKAQPEDVRFIMIDPKMLELSVYEGIPHLLTEVVTDMKDAANALRWCVNEMERRYKLMSALGVRNLAGYNEKIAEADRMMRPIPDPYWKPGDSMDAQHPVLKKEPYIVVLVDEFADLMMTVGKKVEELIARLAQKARAAGIHLVLATQRPSVDVITGLIKANIPTRIAFTVSSKIDSRTILDQAGAESLLGMGDMLYSGPNSTLPVRVHGAFVRDQEVHAVVQDWKARGRPQYVDGITSDSESEGGAGGFDGAEELDPLFDQAVQFVTEKRKASISGVQRQFRIGYNRAARIIEQMEAQGIVSEQGHNGNREVLAPPPFD

SEQ ID NO: 56500 - protein, 285 aa, Escherichia coli
MKADNPFDLLLPAAMAKVAEEAGVYKATKHPLKTFYLAITAGVFISIAFVFYITATTGTGTMPFGMAKLVGGICFSLGLILCVVCGADLFTSTVLIVVAKASGRITWGQLAKNWLNVYFGNLVGALLFVLLMWLSGEYMTANGQWGLNVLQTADHKVHHTFIEAVCLGILANLMVCLAVWMSYSGRSLMDKAFIMVLPVAMFVASGFEHSIANMFMIPMGIVIRDFASPEFWTAVGSAPENFSHLTVMNFITDNLIPVTIGNIIGGGLLVGLTYWVIYLRENDHH

SEQ ID NO: 56501 - protein, 362 aa, Escherichia coli
MAQIFNFSSGPAMLPAEVLKQAQQELRDWNGLGTSVMEVSHRGKEFIQVAEEAEKDFRDLLNVPSNYKVLFCHGGGRGQFAAVPLNILGDKTTADYVDAGYWAASAIKEAKKYCTPNVFDAKVTVDGLRAVKPMREWQLSDNAAYMHYCPNETIDGIAIDETPDFGADVVVAADFSSTILSRPIDVSRYGVIYAGAQKNIGPAGLTIVIVREDLLGKANIACPSILDYSILNDNGSMFNTPPTFAWYLSGLVFKWLKANGGVAEMDKINQQKAELLYGVIDNSDFYRNDVAKANRSRMNVPFQLADSALDKLFLEESFAAGLHALKGHRVVGGMRASIYNAMPLEGVKALTDFMVEFERRHG

SEQ ID NO: 56502 - protein, 582 aa, Escherichia coli
MHNDKDLSTWQTFRRLWPTIAPFKAGLIVAGVALILNAASDTFMLSLLKPLLDDGFGKTDRSVLVWMPLVVIGLMILRGITSYVSSYCISWVSGKVVMTMRRRLFGHMMGMPVSFFDKQSTGTLLSRITYDSEQVASSSSGALITVVREGASIIGLFIMMFYYSWQLSIILIVLAPIVSIAIRVVSKRFRNISKNMQNTMGQVTTSAEQMLKGHKEVLIFGGQEVETKRFDKVSNRMRLQGMKMVSASSISDPIIQLIASLALAFVLYAASFPSVMDSLTAGTITVVFSSMIALMRPLKSLTNVNAQFQRGMAACQTLFTILDSEQEKDEGKRVIERATGDVEFRNVTFTYPGRDVPALRNINLKIPAGKTVALVGRSGSGKSTIASLITRFYDIDEGEILMDGHDLREYTLASLRNQVALVSQNVHLFNDTVANNIAYARTEQYSREQIEEAARMAYAMDFINKMDNGLDTVIGENGVLLSGGQRQRIAIARALLRDSPILILDEATSALDTESERAIQAALDELQKNRTSLVIAHRLSTIEKADEIVVVEDGVIVERGTHNDLLEHRGVYAQLHKMQFGQ

SEQ ID NO: 56503 - protein, 333 aa, Escherichia coli
MFRFLTFCLCEVMPMRNIIKLALAGLLSVSTFAVAAESSPEALRIGYQKGSIGMVLAKSHQLLEKRYPESKISWVEFPAGPQMLEALNVGSIDLGSTGDIPPIFAQAAGADLVYVGVEPPKPKAEVILVAENSPIKTVADLKGHKVAFQKGSSSHNLLLRALRQAGLKFTDIQPTYLTPADARAAFQQGNVDAWAIWDPYYSAALLQGGVRVLKDGTDLNQTGSFYLAARPYAEKNGAFIQGVLATFSEADALTRSQREQSIALLAKTMGLPAPVIASYLDHRPPTTIKPVNAEVAALQQQTADLFYENRLVPKKVDIRQRIWQPTQLEGKQL

SEQ ID NO: 56504 - protein, 187 aa, Escherichia coli
MRRRFSILIWFTSEGVMLKRIIWILFLLGLTWGCELFAHDGTVNISGSFRRNTCVLAQDSKQINVQLGDVSLTRFSHGNYGPEKSFIINLQDCGTDVSTVDVTFSGTPDGVQSEMLSIESGTDAASGLAIAILDDAKILIPLNQASKDYSLHSGKVPLTFYAQLRPVNSDVQSGKVNASATFVLHYD

SEQ ID NO: 56505 - protein, 635 aa, Escherichia coli
MSLISMHGAWLSFSDAPLLDNAELHIEDNERVCLVGRNGAGKSTLMKILNREQGLDDGRIIYEQDLIVARLQQDPPRNVEGSVYDFVAEGIEEQAEYLKRYHDISRLVMNDPSEKNLNELAKVQEQLDHHNLWQLENRINEVLAQLGLDPNVALSSLSGGWLRKAALGRALVSNPRVLLLDEPTNHLDIETIDWLEGFLKTFNGTIIFISHDRSFIRNMATRIVDLDRGKLVTYPGNYDQYLLEKEEALRVEELQNAEFDRKLAQEEVWIRQGIKARRTRNEGRVRALKAMRRERGERREVMGTAKMQVEEASRSGKIVFEMEDVCYQVNGKQLVKDFSAQVLRGDKIALIGPNGCGKTTLLKLMLGQLQADSGRIHVGTKLEVAYFDQHRAELDPDKTVMDNLAEGKQEVMVNGKPRHVLGYLQDFLFHPKRAMTPVRALSGGERNRLLLARLFLKPSNLLILDEPTNDLDVETLELLEELIDSYQGTVLLVSHDRQFVDNTVTECWIFEGGGKIGRYVGGYHDARGQQEQYVALKQPAVKKTEEAAAAKAETVKRSSSKLSYKLQRELEQLPQLLEDLEAKLEALQTQVADASFFSQPHEQTQKVLADMAAAEQELEQAFERWEYLEALKNGG

SEQ ID NO: 56506 - protein, 586 aa, Escherichia coli
MTITKLAWRDLVPDTDSYQEIFAQPHLIDENDPLFSDTQPRLQFALEQLLHTRASSSFMLAKAPEESEYLNLIANAARTLQSDAGQLVGGHYEVSGHSIRLRHAVSADDNFATLTQVVAADWVEAEQLFGCLRQFNGDITLQPGLVHQANGGILIISLRTLLAQPLLWMRLKNIVNRERFDWVAFDESRPLPVSVPSMPLKLKVILVGERESLADFQEMEPELSEQAIYSEFEDTLQIVDAESVTQWCRWVTFTARHNHLPAPGADAWPILIREAARYTGEQETLPLSPQWILRQCKEVASLCDGDTFSGEQLNLMLQQREWREGFLAERMQDEILQEQILIETEGERIGQINALSVIEFPGHPRAFGEPSRISCVVHIGDGEFTDIERKAELGGNIHAKGMMIMQAFLMSELQLEQQIPFSASLTFEQSYSEVDGDSASMAELCALISALADVPVNQSIAITGSVDQFGRAQPVGGLNEKIEGFFAICQQRELTGKQGVIIPTANVRHLSLHSELVKAVEEGKFTIWAVDDVTDALPLLLNLVWDGEGQTTLMQTIQERIAQASQQEGRHRFPWPLRWLNWFIPN

SEQ ID NO: 56507 - protein, 367 aa, Escherichia coli
MEGKASLGETIDIVDHQGKWLARGAYSPASQIRARVWTFDPSESIDIAFFSRRLQQAQKWRDWLAQKDGLDSYRLIAGESDGLPGITIDRFGNFLVLQLLSAGAEYQRAALISALQTLYPECSIYDRSDVAVRKKEGMELTQGPVTGELPPALLPIEEHGMKLLVDIQHGHKTGYYLDQRDSRLATRRYVENKRVLNCFSYTGGFAVSALMGGCSQVVSVDTSQEALDIARQNVELNKLDLSKAEFVRDDVFKLLRTYRDRGEKFDVIVMDPPKFVENKSQLMGACRGYKDINMLAIQLLNEGGILLTFSCSGLMTSDLFQKIIADAAIDAGRDVQFIEQFRQAADHPVIATYPEGLYLKGFACRVM

SEQ ID NO: 56508 - protein, 726 aa, Escherichia coli
MTTKNMNTPPGSTQENEIDLLRLVGELWDHRKFIISVTALFTLIAVAYSLLSTPIYQADTLVQVEQKQGNAILSGLSDMIPNSSPESAPEIQLLQSRMILGKTIAELNLRDIVEQKYFPIVGRGWARLTKEKPGELAISWMHIPQLNGQDQQLTLTVGENGHYTLEGEEFTVNGMVGQRLEKDGVALTIADIKAKPGTQFVLSQRTELEAINALQETFTVSERSKESGMLELTMTGDDPQLITRILNSIANNYLQQNIARQAAQDSQSLEFLQRQLPEVRSELDQAEEKLNVYRQQRDSVDLNLEAKAVLEQIVNVDNQLNELTFREAEISQLYKKDHPTYRALLEKRQTLEQERKRLNKRVSAMPSTQQEVLRLSRDVEAGRAVYLQLLNRQQELSISKSSAIGNVRIIDPAVTQPQPVKPKKALNVVLGFILGLFISVGAVLARAMLRRGVEAPEQLEEHGISVYATIPMSEWLDKRTRLRKKNLFSNQQRHRTKNIPFLAVDNPADSAVEAVRALRTSLHFAMMETENNILMITGATPDSGKTFVSSTLAAVIAQSDQKVLFIDADLRRGYSHNLFTVSNEHGLSEYLAGKDELNKVIQHFGKGGFDVITRGQVPPNPSELLMRDRMRQLLEWANDHYDLVIVDTPPMLAVSDAAVVGRSVGTSLLVARFGLNTAKEVSLSMQRLEQAGVNIKGAILNGVIKRASTAYSYGYNYYGYSYSEKE

SEQ ID NO: 56509 - protein, 244 aa, Escherichia coli
MPRPSTCADSGGGMMTTLTARPEAITFDPQQSALIVVDMQNAYATPGGYLDLAGFDVSTTRPVIANIQTAVTAARAAGMLIIWFQNGWDEQYVEAGGPGSPNFHKSNALKTMRKQPQLQGKLLAKGSWDYQLVDELVPQPGDIVLPKPRYSGFFNTPLDSILRSRGIRHLVFTGIATNVCVESTLRDGFFLEYFGVVLEDATHQAGPKFAQKAALFNIETFFGWVSDVETFCDALSPTSFAHIA

SEQ ID NO: 56510 - protein, 243 aa, Escherichia coli
MDCVMWIGVLLAAALCLGLGIFINETTGEFPQKEQELFEGIVAVIAVVILTWMVFWMRKVSRNVKVQLEQAVDSALQRGNHHGWALVMMVFFAVAREGLESVFFLLAAFQQDVGIWPPLGAMLGLATAVVLGFLLYWGGIRLNLGAFFKWTSLFILFVAAGLAAGAIRAFHEAGLWNHFQEIAFDMSAVLSTHSLFGTLMEGIFGYQEAPSVSEVAVWFIYLIPALVAFALPPRAGATASRSA

SEQ ID NO: 56511 - protein, 423 aa, Escherichia coli
MQYKDENGVNEPSRRRLLKVIGALALAGSCPVAHAQKTQSAPGTLSPDARNEKQPFYGEHQAGILTPQQAAMMLVAFDVLASDKADLERLFRLLTQRFAFLTQGGAAPETPNPRLPPLDSGILGGYIAPDNLTITLSVGHSLFDERFGLAPQMPKKLQKMTRFPNDSLDAALCHGDVLLQICANTQDTVIHALRDIIKHTPDLLSVRWKREGFISDHAARSKGKETPINLLGFKDGTANPDSQNDKLMQKVVWVTADQQEPAWTIGGSYQAVRLIQFRVEFWDRTPLKEQQTIFGRDKQTGAPLGMQHEHDVPDYASDPEGKVIALDSHIRLANPRTAESESSLMLRRGYSYSLGVTNSGQLDMGLLFVCYQHDLEKGFLTVQKRLNGEALEEYVKPIGGGYFFALPGVKDANDYFGSALLRV

SEQ ID NO: 56512 - protein, 452 aa, Escherichia coli
MEKDYLRISSTVLVSLLFGLALVLVNSWFNQPGVEEVVPRSTYLMVMIALFFIDTVAFIFMQLYFIYDRRQFSNCVLSLAFLSCLIYFVITVIIIQQIIEERLTSSVVQNDIAIYYLFRQMSLCILIFLALVNKVSENTKQRNLFSKKMTLCISLFFVFGGPIVAHILSSHYESYNLHIAELTNENGQVVWKASYVTIMIFMWLTLLSVNLYFNGLRYDIWNGVTVIAFCAVLYNISLLFMSRYSVSTWYISRTIEVVSKLTVMVIFMCHIFSALRVTKNIAHRDPLTNIFNRNYFFNELTVQSASAQKTPYCVMIMDIDHFKKVNDTWGHPVGDQVIKTVVNIIGKSIRPDDLLARVGGEEFGVLLTDIDTERAKALAERIRENVERLTGDNPEYAIPQKVTISIGAVVTQENALNPNEIYRLADNALYEAKETGRNKVVVRDVVNFCESP

SEQ ID NO: 56513 - protein, 177 aa, Escherichia coli
MKTRIHVVQGDITKLAVDVIVNAANPSLMGGGGVDGAIHRAAGPALLDACLKVRQQQGDCPTGHAVITLAGDLPAKAVVHTVGPVWRGGEQNEDQLLQDAYLNSLRLVAANSYTSVAFPAISTGVYGYPRAAAAEIAVKTVSEFITRHALPEQVYFVCYDEENAHLYERLLTQQGDE

SEQ ID NO: 56514 - protein, 847 aa, Escherichia coli
MNKTTEYIDAMPIAASEKAALPKTDIRAVHQALDAEHRTWAREDDSPQGSVKARLEQAWPDSLADGQLIKDDEGRDQLKAMPEAKRSSMFPDPWRTNPVGRFWDRLRGRDVTPRYLARLTKEEQESEQKWRTVGTIRRYILLILTLAQTVVATWYMKTILPYQGWALINPMDMVGQDLWVSFMQLLPYMLQTGILILFAVLFCWVSAGFWTALMGFLQLLIGRDKYSISASTVGDEPLNPEHRTALIMPICNEDVNRVFAGLRATWESVKATGNAKHFDVYILSDSYNPDICVAEQKAWMELIAEVGGEGQIFYRRRRRRVKRKSGNIDDFCRRWGSQYSYMVVLDADSVMTGDCLCGLVRLMEANPNAGIIQSSPKASGMDTLYARCQQFATRVYGPLFTAGLHFWQLGESHYWGHNAIIRVKPFIEHCALAPLPGEGSFAGSILSHDFVEAALMRRAGWGVWIAYDLPGSYEELPPNLLDELKRDRRWCHGNLMNFRLFLVKGMHPVHRAVFLTGVMSYLSAPLWFMFLALSTALQVVHALTEPQYFLQPRQLFPVWPQWRPELAIALFASTMVLLFLPKLLSILLIWCKGTKEYGGFWRVTLSLLLEVLFSVLLAPVRMLFHTVFVVSAFLGWEVVWNSPQRDDDSTSWGEAFKRHGSQLLLGLVWAVGMAWLDLRFLFWLAPIVFSLILSPFVSVISSRATVGLRTKRWKLFLIPEEYSPPQVLVDTDRFLEMNRQRSLDDGFMHAVFNPSFNALATAMATARHRASKVLEIARDRHVEQALNETPEKLNRDRRLVLLSDPVTMARLHFRVWNSPERYSSWVSYYEGIKLNPLALRKPDAASQ

SEQ ID NO: 56515 - protein, 350 aa, Escherichia coli
MPVLHNRISNDALKAKMLAESEPRTTISFYKYFHIADPKATRDALYQLFTALNVFGRVYLAHEGINAQISVPASNVETFRAQLYAFDPALEGLRLNIALDDDGKSFWVLRMKVRDRIVADGIDDPHFDASNVGEYLQAAEVNAMLDDPDALFIDMRNHYEYEVGHFENALEIPADTFREQLPKAVEMMQAHKDKKIVMYCTGGIRCEKASAWMKHNGFNKVWHIEGGIIEYARKAREQGLPVRFIGKNFVFDERMGERISDEIIAHCHQCGAPCDSHTNCKNDGCHLLFIQCPVCAEKYKGCCSEICCEESALPPEEQRRRRAGRENGNKIFNKSRGRLNTTLCIPDPTE

SEQ ID NO: 56516 - protein, 191 aa, Escherichia coli
MKKSLLGLTFASLMFSAGSAVAADYKIDKEGQHAFVNFRIQHLGYSWLYGTFKDFDGTFTFDEKNPAADKVNVTINTTSVDTNHAERDKHLRSADFLNTAKYPQATFTSTSVKKDGDELDITGDLTLNGVTKPVTLEAKLIGQGDDPWGGKRAGFEAEGKIKLKDFNIKTDLGPASQEVDLIISVEGVQQK

SEQ ID NO: 56517 - protein, 511 aa, Escherichia coli
MNLLKSLAAVSSMTMFSRVLGFARDAIVARIFGAGMATDAFFVAFKLPNLLRRIFAEGAFSQAFVPILAEYKSKQGEDATRVFVSYVSGLLTLALAVVTVAGMLAAPWVIMVTAPGFADTADKFALTSQLLKITFPYILLISLASLVGAILNTWNRFSIPAFAPTLLNISMIGFALFAAPYFNPPVLALAWAVTVGGVLQLVYQLPHLKKIGMLVLPRINFHDAGAMRVVKQMGPAILGVSVSQISLIINTIFASFLASGSVSWMYYADRLMEFPSGVLGVALGTILLPSLSKSFASGNHDEYNRLMDWGLRLCFLLALPSAVALGILSGPLTVSLFQYGKFTAFDALMTQRALIAYSVGLIGLIVVKVLAPGFYSRQDIKTPVKIAIVTLILTQLMNLAFIGPLKHAGLSLSIGLAACLNASLLYWQLRKQKIFTPQPGWMAFLLRLVVAVLVMSGVLLGMLHIMPEWSLGTMPWRLLRLMAVVLAGIAAYFAALAVLGFKVKEFARRTV

SEQ ID NO: 56518 - protein, 317 aa, Escherichia coli
MYTKIIGTGSYLPEQVRTNADLEKMVDTSDEWIVTRTGIRERHIAAPNETVSTMGFEAATRAIEMAGIEKDQIGLIVVATTSATHAFPSAACQIQSMLGIKGCPAFDVAAACAGFTYALSVADQYVKSGAVKYALVVGSDVLARTCDPTDRGTIIIFGDGAGAAVLAASEEPGIISTHLHADGSYGELLTLPNADRVNPENSIHLTMAGNEVFKVAVTELAHIVDETLAANNLDRSQLDWLVPHQANLRIISATAKKLGMSMDNVVVTLDRHGNTSAASVPCALDEAVRDGRIKPGQLVLLEAFGGGFTWGSALVRF

SEQ ID NO: 56519 - protein, 309 aa, Escherichia coli [sequence omitted]

SEQ ID NO: 56520 - protein, 213 aa, Escherichia coli
MRSKYIVIEGLEGAGKTTARNVVVETLEQLGIRDMVFTREPGGTQLAEKLRSLVLDIKSVGDEVITDKAEVLMFYAARVQLVETVIKPALANGTWVIGDRHDLSTQAYQGGGRGIDQHMLATLRDAVLGDFRPDLTLYLDVTPEVGLKRARARGELDRIEQESFDFFNRTRARYLELAAQDKSIHTIDATQPLEAVMDAIRTTVTHWVKELDA

SEQ ID NO: 56521 - protein, 265 aa, Escherichia coli
MFLVDSHCHLDGLDYESLHKDVDDVLAKAAARDVKFCLAVATTLPGYLHMRDLVGERDNVVFSCGVHPLNQNDPYDVEDLRRLAAEEGVVALGETGLDYYYTPETKVRQQESFIHHIQIGRELNKPVIVHTRDARADTLAILREEKVTDCGGVLHCFTEDRETAGKLLDLGFYISFSGIVTFRNAEQLRDAARYVPLDRLLVETDSPYLAPVPHRGKENQPAMVRDVAEYMAVLKGVAVEELAQVTTDNFARLFHIDASRLQSIR

SEQ ID NO: 56522 - protein, 729 aa, Escherichia coli
MLSTQFNRDNQYQAITKPSLLAGCIALALLPSAAFAAPATEETVIVEGSATAPDDGENDYSVTSTSAGTKMQMTQRDIPQSVTIVSQQRMEDQQLQTLGEVMENTLGISKSQADSDRALYYSRGFQIDNYMVDGIPTYFESRWNLGDALSDMALFERVEVVRGATGLMTGTGNPSAAINMVRKHATSREFKGDVSAEYGSWNKERYVADLQSPLTEDGKIRARIVGGYQNNDSWLDRYNSEKTFFSGIVDADLGDLTTLSAGYEYQRIDVNSPTWGGLPRWNTDGSSNSYDRARSTAPDWAYNDKEINKVFMTLKQQFADTWQATLNATHSEVEFDSKMMYVDAYVNKADGMLVGPYSNYGPGFDYVGGTGWNSGKRKVDALDLFADGSYELFGRQHNLMFGGSYSKQNNRYFSSWANIFPDEIGSFYNFNGNFPQTDWSPQSLAQDDTTHMKSLYAATRVTLADPLHLILGARYTNWRVDTLTYSMEKNHTTPYAGLVFDINDNWSTYASYTSIFQPQNDRDSSGKYLAPITGNNYELGLKSDWMNSRLTTTLAIFRIEQDNVAQSTGTPIPGSNGETAYKAVDGTVSKGVEFELNGAITDNWQLTFGATRYIAEDNEGNAVNPNLPRTTVKMFTSYRLPVMPELTVGGGVNWQNRVYTDTVTPYGTFRAEQGSYALVDLFTRYQVTKNFSLQGNVNNLFDKTYDTNVEGSIVYGTPRNFSITGTYQF

SEQ ID NO: 56523 - protein, 341 aa, Escherichia coli
MGPVMLDVEGYELDAEEREILAHPLVGGLILFTRNYHDPAQLRELVRQIRAASRNRLVVAVDQEGGRVQRFREGFTRLPAAQSFAALSGMEEGGKLAQEAGWLMASEMIAMDIDISFAPVLDVGHISAAIGERSYHADPQKALAIASRFIDGMHEAGMKTTGKHFPGHGAVTADSHKETPCDPRPQAEIRAKDMSVFSSLIRENKLDAIMPAHVIYSDVDPRPASGSPYWLKTVLRQELGFDGVIFSDDLSMEGAAIMGSYAERGQASLDAGCDMILVCNNRKGAVSVLDNLSPIKAERVTRLYHKGSFSRQELMDSARWKAISTRLNQLHERWQEEKAGH

SEQ ID NO: 56524 - protein, 434 aa, Escherichia coli
MTTPLKKIVIVGGGAGGLEMATQLGHKLGRKKKAKITLVDRNHSHLWKPLLHEVATGSLDEGVDALSYLAHARNHGFQFQLGSVIDIDREAKTITIAELRDEKGELLVPERKIAYDTLVMALGSTSNDFNTPGVKENCIFLDNPHQARRFHQEMLNLFLKYSANLGANGKVNIAIVGGGATGVELSAELHNAVKQLHSYGYKGLTNEALNVTLVEAGERILPALPPRISAAAHNELTKLGVRVLTQTMVTSADEGGLHTKDGEYIEADLMVWAAGIKAPDFLKDIGGLETNRINQLVVEPTLQTTRDPDIYAIGDCASCPRPEGGFVPPRAQAAHQMATCAMNNILAQMNGKPLKNYQYKDHGSLVSLSNFSTVGSLMGNLTRGSMMIEGRIARFVYISLYRMHQIALHGYFKTGLMMLVGSINRVIRPRLKLH

SEQ ID NO: 56525 - protein, 1148 aa, Escherichia coli
MPEQYRYTLPVKAGEQRLLGELTGAACATLVAEIAERHAGPVVLIAPDMQNALRLHDEISQFTDQMVMNLADWETLPYDSFSPHQDIISSRLSTLYQLPTMQRGVLIVPVNTLMQRVCPHSFLHGHALVMKKGQRLSRDALRTQLDSAGYRHVDQVMEHGEYATRGALLDLFPMGSELPYRLDFFDDEIDSLRVFDVDSQRTLEEVEAINLLPAHEFPTDKAAIELFRSQWRDTFEVKRDPEHIYQQVSKGTLPAGIEYWQPLFFSEPLPPLFSYFPANTLLVNTGDLETSAERFQADTLARFENRGVDPMRPLLPPQSLWLRVDELFSELKNWPRVQLKTEHLPTKAANANLGFQKLPDLAVQAQQKAPLDALRKFLETFDGPVVFSVESEGRREALGELLARIKIAPQRIMRLDEASDRGRYLMIGAAEHGFVDTVRNLALICESDLLGERVARRRQDSRRTINPDTLIRNLAELHIGQPVVHLEHGVGRYAGMTTLEAGGITGEYLMLTYANDAKLYVPVSSLHLISRYAGGAEENAPLHKLGGDAWSRARQKAAEKVRDVAAELLDIYAQRAAKEGFAFKHDREQYQLFCDSFPFETTPDQAQAINAVLSDMCQPLAMDRLVCGDVGFGKTEVAMRAAFLAVDNHKQVAVLVPTTLLAQQHYDNFRDRFANWPVRIEMISRFRSAKEQTQILAEVAEGKIDILIGTHKLLQSDVKFKDLGLLIVDEEHRFGVRHKERIKAMRANVDILTLTATPIPRTLNMAMSGMRDLSIIATPPARRLAVKTFVREYDSMVVREAILREILRGGQVYYLYNDVENIQKAAERLAELVPEARIAIGHGQMRERELERVMNDFHHQRFNVLVCTTIIETGIDIPTANTIIIERADHFGLAQLHQLRGRVGRSHHQAYAWLLTPHPKAMTTDAQKRLEAIASLEDLGAGFALATHDLEIRGAGELLGEEQSGSMETIGFSLYMELLENAVDALKAGREPSLEDLTSQQTEVELRMPSLLPDDFIPDVNTRLSFYKRIASAKTENELEEIKVELIDRFGLLPDPARTLLDIARLRQQAQKLGIRKLEGNEKGGVIEFAEKNHVNPAWLIGLLQKQPQHYRLDGPTRLKFIQDLSERKTRIEWVRQFMRELEENAIA

SEQ ID NO: 56526 - protein, 408 aa, Escherichia coli
MDKLLERFLNYVSLDTQSKAGVRQVPSTEGQWKLLHLLKEQLEEMGLINVTLSEKGTLMATLPANVPGDIPAIGFISHVDTSPDCSGKNVNPQIVENYRGGDIALGIGDEVLSPVMFPVLHQLLGQTLITTDGKTLLGADDKAGIAEIMTALAVLQQKKIPHGDIRVAFTPDEEVGKGAKHFDVDAFDARWAYTVDGGGVGELEFENFNAASVNIKIVGNNVHPGTAKGVMVNALSLAARIHAEVPADESPEMTEGYEGFYHLASMKGTVERADMHYIIRDFDRKQFEARKRKMMEIAKKVGKGLHPDCYIELVIEDSYYNMREKVVEHPHILDIAQQAMRDCDIEPELKPIRGGTDGAQLSFMGLPCPNLFTGGYNYHGKHEFVTLEGMEKAVQVIVRIAELTAQRK

SEQ ID NO: 56527 - protein, 383 aa, Escherichia coli
MIEYAALKFNVVSDPMSETAKKVIVGMSGGVDSSVSAWLLQQQGYQVEGLFMKNWEEDDGEEYCTAAADLADAQAVCDKLGIELHTVNFAAEYWDNVFELFLAEYKAGRTPNPDILCNKEIKFKAFLEFAAEDLGADYIATGHYVRRADVDGKSRLLRGLDSNKDQSYFLYTLSHEQIAQSLFPVGELEKPQVRKIAEDLGLVTAKKKDSTGICFIGERKFREFLGRYLPAQPGKIITVDGDEIGEHQGLMYHTLGQRKGLGIGGTKEGTEEPWYVVDKDVENNILVVAQGHEHPRLMSVGLIAQQLHWVDREPFTGTMRCTVKTRYRQTDIPCTVKALDDDRIEVIFDEPVAAVTPGQSAVFYNGEVCLGGGIIEQRLPLPV

SEQ ID NO: 56528 - protein, 416 aa, Escherichia coli
MESKVVVPAQGKKITLQNGKLNVPENPIIPYIEGDGIGVDVTPAMLKVVDAAVEKAYKGERKISWMEIYTGEKSTQVYGQDVWLPAETLDLIREYRVAIKGPLTTPVGGGIRSLNVALRQELDLYICLRPVRYYQGTPSPVKHPELTDMVIFRENSEDIYAGIEWKADSADAEKVIKFLREEMGVKKIRFPEHCGIGIKPCSEEGTKRLVRAAIEYAIANDRDSVTLVHKGNIMKFTEGAFKDWGYQLAREEFGGELIDGGPWLKVKNPNTGKEIVIKDVIADAFLQQILLRPAEYDVIACMNLNGDYISDALAAQVGGIGIAPGANIGDECALFEATHGTAPKYAGQDKVNPGSIILSAEMMLRHMGWTEAADLIVKGMEGAINAKTVTYDFERLMDGAKLLKCSEFGDAIIENM

SEQ ID NO: 56529 - protein, 200 aa, Escherichia coli
MHKAILNSDLIATKAGDVTVYNYDGETREYISTSNEYLAVGVGIPACSCLDAPGTHKAGYAICRSADFNSWEYVPDHRGETVYSTKTGESKEIKAPGDYPENTTTIAPLSPYDKWDGEKWVTDTEAQHSAAVDAAEAQRQSLIDAAMASISLIQLKLQAGRKLTQAETTRLNAVLDYIDAVTATDTSTAPDVIWPELPEA

SEQ ID NO: 56530 - protein, 363 aa, Escherichia coli
MGFKCGIVGLPNVGKSTLFNALTKAGIEAANFPFCTIEPNTGVVPMPDPRLDQLAEIVKPQRTLPTTMEFVDIAGLVKGASKGEGLGNQFLTNIRETEAIGHVVRCFENDNIIHVSGKVNPADDIEVINTELALADLDTCERAIHRVQKKAKGGDKDAKAELAVLEKCLPQLENAGMLRALDLSAEEKAAIRYLSFLTLKPTMYIANVNEDGFENNPYLDQVREIAAKEGSVVVPVCAAVEADIAELDDEERDEFMQELGLEEPGLNRVIRAGYKLLNLQTYFTAGVKEVRAWTIPVGATAPQAAGKIHTDFEKGFIRAQTISFEDFITYKGEQGAKEAGKMRAEGKDYIVKDGDVMNFLFNV

SEQ ID NO: 56531 - protein, 205 aa, Escherichia coli
MAQLYFYYSAMNAGKSTALLQSSYNYQERGMRTVVYTAEIDDRFGAGKVSSRIGLSSPAKLFNQNSSLFDEIRAEHEQQAIHCVLVDECQFLTRQQVYELSEVVDQLDIPVLCYGLRTDFRGELFIGSQYLLAWSDKLVELKTICFCGRKASMVLRLDQAGRPYNEGEQVVIGGNERYVSVCRKHYKEALQVDSLTAIQERHRHD

SEQ ID NO: 56532 - protein, 196 aa, Escherichia coli
MALPPDRTDRGAERYLKDDWHGLQLFAIDGAQFRTPDKPELREYYGSANTSTKRQNAYPVMRLVALMNLGSHILLNAVTAPYRQSETVLAHSMLATIPDNSITLFDKLFYSEDLLLTLNQKGCNRHWLLPAWKNIASEMIELGNTASPGTIPKRLEHLRGALEVVFITKRPRPSRPRSVKISKTRYPVKHSAAPLK

SEQ ID NO: 56533 - protein, 891 aa, Escherichia coli
MAVTNVAELNALVERVKKAQREYASFTQEQVDKIFRAAALAAADARIPLAKMAVAESGMGIVEDKVIKNHFASEYIYNAYKDEKTCGVLSEDDTFGTITIAEPIGIICGIVPTTNPTSTAIFKSLISLKTRNAIIFSPHPRAKDATNKAADIVLQAAIAAGAPKDLIGWIDQPSVELSNALMHHPDINLILATGGPGMVKAAYSSGKPAIGVGAGNTPVVIDETADIKRAVASVLMSKTFDNGVICASEQSVVVVDSVYDAVRERFATHGGYLLQGKELKAVQDVILKNGALNAAIVGQPAYKIAELAGFSVPENTKILIGEVTVVDESEPFAHEKLSPTLAMYRAKDFEDAVEKAEKLVAMGGIGHTSCLYTDQDNQPARVSYFGQKMKTARILINTPASQGGIGDLYNFKLAPSLTLGCGSWGGNSISENVGPKHLINKKTVAKRAENMLWHKLPKSIYFRRGSLPIALDEVITDGHKRALIVTDRFLFNNGYADQITSVLKAAGVETEVFFEVEADPTLSIVRKGAELANSFKPDVIIALGGGSPMDAAKIMWVMYEHPETHFEELALRFMDIRKRIYKFPKMGVKAKMIAVTTTSGTGSEVTPFAVVTDDATGQKYPLADYALTPDMAIVDANLVMDMPKSLCAFGGLDAVTHAMEAYVSVLASEFSDGQALQALKLLKEYLPASYHEGSKNPVARERVHSAATIAGIAFANAFLGVCHSMAHKLGSQFHIPHGLANALLICNVIRYNANDNPTKQTAFSQYDRPQARRRYAEIADHLGLSAPGDRTAAKIEKLLAWLETLKAELGIPKSIREAGVQEADFLANVDKLSEDAFDDQCTGANPRYPLISELKQILLDTYYGRDYVEGETAAKKEAAPAKAEKKAKKSA

SEQ ID NO: 56534 - protein, 337 aa, Escherichia coli
MNVIETATVPLAQQQADALLNVKDLRVTFSTPDGDVTAVNDLNFSLRAGETLGIVGESGSGKSQTAFALMGLLAANGRIGGSATFNGREILNLPEHELNKLRAEQISMIFQDPMTSLNPYMRVGEQLMEVLMLHKNMSKAEAFEESVRMLDAVKMPEARKRMKMYPHEFSGGMRQRVMIAMALLCRPKLLIADEPTTALDVTVQAQIMTLLNELKREFNTAIIMITHDLVVVAGICDKVLVMYAGRTMEYGNARDVFYQPVHPYSIGLLNAVPRLDAEGETMLTIPGNPPNLLRLPKGCPFQPRCPHAMEICSSAPPLEEFTPGRLRACFKPVEELL

SEQ ID NO: 56535 - protein, 239 aa, Escherichia coli
MTLDLPRRFPWPTLLSVCIHGAVVAGLLYTSVHQVIELPAPAQPISVTMVTPADLEPPQAVQPPPEPVVEPEPEPEPIPEPPKEAPVVIEKPKPKPKPKPKPVKKVQEQPKRDVKPVESRPASPFENTAPARLTSSTATAATSKPVTSVASGPRALSRNQPQYPARAQALRIEGQVKVKFDVTPDGRVDNVQILSAKPANMFEREVKNAMRRWRYEPGKPGSGIVVNILFKINGTTEIQ

SEQ ID NO: 56536 - protein, 531 aa, Escherichia coli
MADILLLDNIDSFTYNLADQLRSNGHNVVIYRNHIPAQTLIERLATMSNPVLMLSPGPGVPSEAGCMPELLTRLRGKLPIIGICLGHQAIVEAYGGYVGQAGEILHGKASSIEHDGQAMFAGLTNPLPVARYHSLVGSNIPAGLTINAHFNGMVMAVRHDADRVCGFQFHPESILTTQGARLLEQTLAWAQQKLEPANTLQPILEKLYQAQTLSQQESHQLFSAVVRGELKPEQLAAALVSMKIRGEHPNEIAGAATALLENAAPFPRPDYLFADIVGTGGDGSNSINISTASAFVAAACGLKVAKHGNRSVSSKSGSSDLLAAFGINLDMNADKSRQALDELGVCFLFAPKYHTGFRHAMPVRQQLKTRTLFNVLGPLINPAHPPLALIGVYSPELVLPIAETLRVLGYQRAAVVHSGGMDEVSLHAPTIVAELHDGEIKSYQLTAEDFGLTPYHQEQLAGGTPEENRDILTRLLQGKGDAAHEAAVAANVAMLMRLHGHEDLQANAQTVLEVLRSGSAYDRVTALAARG

SEQ ID NO: 56537 - protein, 293 aa, Escherichia coli
MSDTNYAVIYDLHSHTTASDGCLTPEALVHRAVEMRVGTLAITDHDTTAAIAPAREEISRSGLALNLIPGVEISTVWENHEIHIVGLNIDITHPLMCEFLAQQTERRNQRAQLIAERLEKAQIPGALEGAQRLAQGGAVTRGHFARFLVECGKASSMADVFKKYLARGKTGYVPPQWCTIEQAIDVIHHSGGKAVLAHPGRYNLSAKWLKRLVAHFAEHHGDAMEVAQCQQSPNERTQLAALARQHHLWASQGSDFHQPCPWIELGRKLWLPAGVEGVWQLWEQPQNTTEREL

SEQ ID NO: 56538 - protein, 252 aa, Escherichia coli
MHYQPKQDLLNDRIILVTGASDGIGREAAMTYARYGATVILLGRNEEKLRQVASHINEETGRQPQWFILDLLTCTSENCQQLAQRIAVNYPRLDGVLHNAGLLGDVCPMSEQNPQVWQDVMQVNVNATFMLTQALLPLLLKSDAGSLVFTSSSVGRQGRANWGAYAASKFATEGMMQVLADEYQQRLRVNCINPGGTRTAMRASAFPTEDPQKLKTPADIMPLYLWLMGDDSRRKTGMTFDAQPGRKPGISQ

SEQ ID NO: 56539 - protein, 865 aa, Escherichia coli
MGKALVIVESPAKAKTINKYLGSDYVVKSSVGHIRDLPTSGSAAKKSADSTSTKTAKKPKKDERGALVNRMGVDPWHNWEAHYEVLPGKEKVVSELKQLAEKADHIYLATDLDREGEAIAWHLREVIGGDDARYSRVVFNEITKNAIRQAFNKPGELNIDRVNAQQARRFMDRVVGYMVSPLLWKKIARGLSAGRVQSVAVRLVVEREREIKAFVPEEFWEVDASTTTPSGEALALQVTHQNDKPFRPVNKEQTQAAVSLLEKARYSVLEREDKPTTSKPGAPFITSTLQQAASTRLGFGVKKTMMMAQRLYEAGYITYMRTDSTNLSQDAVNMVRGYISDNFGKKYLPESPNQYASKENSQEAHEAIRPSDVNVMAESLKDMEADAQKLYQLIWRQFVACQMTPAKYDSTTLTVGAGDFRLKARGRILRFDGWTKVMPALRKGDEDRILPAVNKGDALTLVELTPAQHFTKPPARFSEASLVKELEKRGIGRPSTYASIISTIQDRGYVRVENRRFYAEKMGEIVTDRLEENFRELMNYDFTAQMENSLDQVANHEAEWKAVLDHFFSDFTQQLDKAEKDPEEGGMRPNQMVLTSIDCPTCGRKMGIRTASTGVFLGCSGYALPPKERCKTTINLVPENEVLNVLEGEDAETNALRAKRRCPKCGTAMDSYLIDPKRKLHVCGNNPTCDGYEIEEGEFRIKGYDGPIVECEKCGSEMHLKMGRFGKYMACTNEECKNTRKILRNGEVAPPKEDPVPLPELPCEKSDAYFVLRDGAAGVFLAANTFPKSRETRAPLVEELYRFRDRLPEKLRYLADAPQQDPEGNKTMVRFSRKTKQQYVSSEKDGKATGWSAFYVDGKWVEGKK

SEQ ID NO: 56540 - protein, 254 aa, Escherichia coli
MRSIARRTAVGAALLLVMPVAVWISGWRWQPGEQSWLLKAAFWVTETVTQPWGVITHLILFGWFLWCLRFRIKAAFVLFAILAAAILVGQGVKSWIKDKVQEPRPFVIWLEKTHHIPVDEFYTLKRAERGNLVKEQLAEEKNIPQYLRSHWQKETGFAFPSGHTMFAASWALLAVGLLWPRRRTLTIAILLVWATGVMGSRLLLGMHWPRDLVVATLISWALVAVATWLAQRICGPLTPPAEENREIAQREQES

SEQ ID NO: 56541 - protein, 351 aa, Escherichia coli
MKSAMTSSPLRVAIIGAGQVADKVHASYYCTRNDLELVAVCDSRLSQAQALAEKYGNASVWDDPQAMLLAVKPDVVSVCSPNRFHYEHTLMALEAGCHVMCEKPPAMTPEQAREMCDTARKLGKVLAYDFHHRFALDTQQLREQVTNGVLGEIYVTTARALRRCGVPGWGVFTNKELQGGGPLIDIGIHMLDAAMYVLGFPAVKSVNAHSFQKIGTQKSCGQFGEWDPATYSVEDSLFGTIEFHNGGILWLETSFALNIREQSIMNVSFCGDKAGATLFPAHIYTDNNGELMTLMQREIADDNRHLRSMEAFINHVQGKPVMIADAEQGYIIQQLVAALYQSAETGTRVEL

SEQ ID NO: 56542 - protein, 332 aa, Escherichia coli
MSPTIYDIARVAGVSKSTVSRVLNKQTNISPEAREKVLRAIEELQYQPNKLARALTSSGFDAIMVISTRSTKTTAGNPFFSEVLHAITAKAEEEGFDVILQTSHNPAEDLQKCESKIKQKMIKGIIMLSSPADESFFAQLDKYDIPVVVIGKVEGQYAHVYSVDTDNFGDSIALTDALIESGHQNIACLHAPLDVHVSVDRVNGYKQSLAAHNIAVRDEWIVDGGYTHETALKAARQLLSQSPLPEAVFATDSLKLMSIYRAAAEKNIAIPQQLAVVGYSNETLSFILTPAPGGIDVPTQELGQQSCELLFRLISGKPSPQNITVATHMTLK

SEQ ID NO: 56543 - protein, 338 aa, Escherichia coli; identical to SEQ ID NO: 43054

SEQ ID NO: 56544 - protein, 171 aa, Escherichia coli
MLRLLEEKIATPLGPLWVICDEQFRLRAVEWEEYSERMVQLLDIHYRKEGYERISATNPGGLSDKLREYFAGNLSIIDTLPTATGGTPFQREVWKTLRTIPCGQVMHYGQLAEQLGRPGAARAVGAANGSNPISIVVPCHRVIGRNGTMTGYAGGVQRKEWLLRHEGYLLL

SEQ ID NO: 56545 - protein, 468 aa, Escherichia coli
MKKYQQLAEQLREQIASGIWQPGDRLPSLRDQVALSGMSFMTVSHAYQLLESQGYIIARPQSGYYVAPQAIKMPKAPVIPVTRDEAVDINTYIFDMLQASRDPSVVPFASAFPDPRLFPLQQLNRSLAQVSKTATAMSVIENLPPGNAELRQAIARRYALQGITISPDEIVITAGALEALNLSLQAVTEPGDWVIVENPCFYGALQALERLRLKALSVATDVKEGIDLQALELALQEYPVKACWLMTNSQNPLGFTLTPQKKAQLVALLNQYNVTLIEDDVYSELYFGREKPLPAKAWDRHDGVLHCSSFSKCLVPGFRIGWVAAGKHARKIQRLQLMSTLSTSSPMQLALVDYLSTRRYDAHLRRLRRQLAERKQRAWQALLRYLPAEVKIHHNDSGYFLWLELPEPLDAGELSLAALTHHISIAPGKMFSTGENWSRFFRFNTAWQWGEREEQAVKQLGKLIQERL

SEQ ID NO: 56546 - protein, 376 aa, Escherichia coli
MLQRGCDGCKQNQSREPATIDGFMPKAQESIMGQQKQRNRRWVLASRPHGAPVPENFRLEEDDVATPGEGQVLLRTVYLSLDPYMRGRMSDEPSYSPPVDIGGVMVGGTVSRVVESNHPDYQSGDWVLGYSGWQDYDISSGDDLVKLGDHPQNPSWSLGVLGMPGFTAYMGLLDIGQPKEGETLVVAAATGPVGATVGQIGKLKGCRVVGVAGGAEKCRHATEVLGFDVCLDHHADDFAEQLAKACPKGIDIYYENVGGKVFDAVLPLLNTSARIPVCGLVSSYNATELPPGPDRLPLLMATVLKKRIRLQGFIIAQDYGHRIHEFQREMGQWVKEDKIHYREEITDGLENAPQTFIGLLKGKNFGKVVIRVAGDD

SEQ ID NO: 56547 - protein, 682 aa, Escherichia coli
MSTRLTTLSHTSEGHRVSVHYGYDDKGRLTGERQTVENPETGELLWHHETGHAYNEQGLANRVTPDSLPPVEWLTYGSGYLAGMKLGGTPLLEFTRDRLHRETVRSFGSMAGSNAAYKLTSTYTPAGQLQSQHLNSLVYDRDYGWNDNGDLVRISGPRQTREYGYSATGRLESVRTLAPDLDIRIPYATDPAGNRLPDPELHPDSTLTVWPDNRIAEDAHYVYRHDEYGRLTEKTDRIPAGVIRTDDERTHHYHYDSQHRLVFYTRIQHGEPLVESRYLYDPLGRRMAKRVWRRERDLTGWMSLSRKPEVTWYGWDGDRLTTVQTDTTRIQTVYEPGSFTPLIRVETENGEREKAQRRSLAETLQQEGSENGHGVVFPAELVRLLDRLEEEIRADRVSSESRAWLAQCGLTVEQLARQVEPEYTPARKVHFYHCDHRGLPLALISEDGNTAWRGEYDEWGNQLNEENPHHLHQPYRLPGQQHDEESGLYYNRHRHYDPLQGRYITPDPIGLRGGWNMYQYPLNPIQVIDPMGLDAIENMTSGGLIYAVSGVPGLIAANSITNSAYQFGYDMDAIVGGAHNGAADAMRHCYLMCRMTKTFGSTIADVIGKNHEAAGDRQGQPAKERIMDLKNNTVGIACGDFSAKCSDACIEKYNTGQLFGLDGIKADNPIKAKQGSSDASNY

SEQ ID NO: 56548 - protein, 346 aa, Escherichia coli
MQNIIRKGGTMKAAVVTKDHHVDVTYKTLRSLKHGEALLKMECCGVCHTDLHVKNGDFGDKTGVILGHEGIGVVAEVGPGVTSLKPGDRASVAWFYEGCGHCEYCNSGNETLCRSVKNAGYSVDGGMAEECIVVADYAVKVPDGLDSAAASSITCAGVTTYKAVKLSKIRPGQWIAIYGLGGLGNLALQYAKNVFNAKVIAIDVNDEQLKLATEMGADLAINSHTEDAAKIVQEKTGGAHAAVVTAVAKAAFNSAVDAVRAGGRVVAVGLPPESMSLDIPRLVLDGIEVVGSLVGTRQDLTEAFQFAAEGKVVPKVALRPLADINTIFTEMEEGKIRGRMVIDFRH

SEQ ID NO: 56549 - protein, 931 aa, Escherichia coli
MEIIMRNLCFLLTLVATLLLPGRLIAAALPQDEKLITGQLDNGLRYMIYPHAHPKDQVNLWLQIHTGSLQEEDNELGVAHFVEHMMFNGTKTWPGNKVIETFESMGLRFGRDVNAYTSYDETVYQVSLPTTQKQNLQQVMAIFSEWSNAATFEKLEVDAERGVITEEWRAHQDAKWRTSQARRPFLLANTRNLDREPIGLMDTVATVTPAQLRQFYQRWYQPNNMTFIVVGDIDSKEALALIKDNLSKLPANKAAENRVWPTKAENHLRFNIINDKENRVNGIALYYRLPMVQVNDEQSFIEQAEWSMLVQLFNQRLQERIQSGELKTISGGTARSVKIAPDYQSLFFRVNARDDNMQDAANALMAELATIDQHGFSAEELDDVKSTRLTWLKNAVDQQAERDLRMLTSRLASSSLNNTPFLSPEETYQLSKRLWQQITVQSLAEKWQQLRKNQDAFWEQMVNNEVAAKKALSPAAILALEKEYANKKLAAYVFPGRNLSLTVDADPQAEISSKETLAENLTSLTLSNGARVILAKSAGEEQKLQIIAVSNKGDLSFPAQQKSLIALANKAVSGSGVGELSSSSLKRWSAENSVTMSSKVSGMNTLLSVSARTNNPEPGFQLINQRITHSTINDNIWASLQNAQIQALKTLDQRPAEKFAQQMYETRYADDRTKLLQENQIAQFTAADALAADRQLFSSPADITFVIVGNVAEDKLVALITRYLGSIKHSDSPLAAGKPLTRATDNASVTVKEQNEPVAQVSQWKRYDSRTPVNLPTRMALDAFNVALAKDLRVNIREQASGAYSVSSRLSVDPQAKDISHLLAFTCQPERHDELLTLANEVMVKRLAKGISEQELNEYQQNVQRSLDIQQRSVQQLANTIVNSLIQYDDPAAWTEQEQLLKQMTVENVNTAVKQYLSHPVNTYTGVLLPK

SEQ ID NO: 56550 - protein, 571 aa, Escherichia coli
MELSTIRRGTFMKSALKKSVVSTSISLILASGMAAFAAHAADDVKLKATKTNVAFSDFTPTEYSTKGKPNIIVLTMDDLGYGQLPFDKGSFDPKTMENREVVDTYKIGIDKAIEAAQKSTPTLLSLMDEGVRFTNGYVAHGVSGPSRAAIMTGRAPARFGVYSNTDAQDGIPLTETFLPELFQNHGYYTAAVGKWHLSKISNVPVPEDKQTRDYHDNFTTFSAEEWQPQNRGFDYFMGFHAAGTAYYNSPSLFKNRERVPAKGYISDQLTDEAIGVVDRAKTLDQPFMLYLAYNAPHLPNDNPAPDQYQKQFNTGSQTADNYYASVYSVDQGVKRILEQLKKNGQYDNTIILFTSDNGAVIDGPLPLNGAQKGYKSQTYPGGTHTPMFMWWKGKLQPGNYDKLISAMDFYPTALDAADISIPKDLKLDGVSLLPWLQDKKQGEPHKNLTWITSYSHWFDEENIPFWDNYHKFVRHQSDDYPHNPNTEDLSQFSYTVRNNDYSLVYTVENNQLGLYKLTDLQQKDNLAAANPQVVKEMQGVVREFIDSSQPPLSEVNQEKFNNIKKALSEAK

SEQ ID NO: 56551 - protein, 253 aa, Escherichia coli
MSLVCSVIFIHHAFNANILDKDYAFSDGEILMVDNAVRTHFEPYERHFKEIGFTENTIKKYLQCTNIQTVTVPVPAKFLRASNVPTGLLNEMIAYLNSEERNHHNFSELLLFSCLSIFAACKGFITLLTNGVLSVSGKVRNIVNMKPAHPWKLKDICDCLYISESLLKKKLKQEQTTFSQILLDARMQHAKNLIRVEGSVNKIAEQCGYASTSYFIYAFRKHFGNSPKRVSKEYRCQSHTGMNTGNTMNALAI

SEQ ID NO: 56552 - protein, 317 aa, Escherichia coli
MTINDSAISEQGMCEEEQVARIAWFYYHDGLTQSEISDRLGLTRLKVSRLLEKGHQSGIIRVQINSRFEGCLEYETQLRRQFSLQHVRVIPGLADADVGGRLGIGAAHMLMSLLQPQQMLAIGFGEATMNTLQRLSGFISSQQIRLVTLSGGVGSYMTGIGQLNAACSVNIIPAPLRASSADIARTLKNENCVKDVLLAAQAADVAIVGIGAVSQQDDATIIRSGYISQGEQLMIGRKGAVGDILGYFFDAKGDVVTNIKIHNELIGLPLSALKTIPVRVGVAGGENKAEAIAAAMKGGYINALVTDQDTAAAILRS

SEQ ID NO: 56553 - protein, 321 aa, Escherichia coli
MIVITFNRATFPRLKITMIVRPQQHWLRRIFVWHGSVLSKISSRLLLNFLFSIAVIFMLPWYTHLGIKFTLAPFSILGVAIAIFLGFRNNAGYARYVEARKLWGQLMIASRSLLREVKTTLPDSASVREFARLQIAFAHCLRMTLRKQPQAEVLAHYLKTEDLQRVLASNSPANRILLIMGEWLAVQRRNGQLSDILFISLNDRLNDISAVLAGCERIAYTPIPFAYTLILHRTVYLFCIMLPFALVVDLHYMTPFISVLISYTFISLDCLAEELEDPFGTENNDLPLDAICNAIEIDLLQMNDEAEIPAKILPDRHYQLT

SEQ ID NO: 56554 - protein, 228 aa, Escherichia coli
MTVETQLNPTQPVNQQIYRILRRDIVHCLIAPGTPLSEKEVSVRFNVSRQPVREAFIKLAENGLIQIRPQRGSYVNKISMAQVRNGSFIRQAIECAVARRAASMITESQCYQLEQNLHQQRIAIERKQLDDFFELDDNFHQLLTQIADCQLAWDTIENLKATVDRVRYMSFDHVSPPEMLLRQHLDIFSALQKRDGDAVERAMTQHLQEISESVRQIRQENSDWFSEE

SEQ ID NO: 56555 - protein, 320 aa, Escherichia coli
MNITALTDNTQGAAGLELYEVYNNGYPTAYGNIIHLKGMTAVGEGELLIGWSGTSGAHAPAFIRSRRDTTDANWSPWAQLYTSAHPPAEFYPVGAPIPWPSDTVPSGYALMQGQTFDKSAYPKLAVAYPSGVIPDMRGWTIKGKPASGRAVLSQEQDGIKSHTHSASASSTDLGTETTSSFDYGTKSTNNTGAHTHSISGTANSAGAHQHKSSGAFGGTNTSIFPNGYTAISNLSAGIMSTTSGSGQTRNAGKTSSDGAHTHSLSGTAASAGAHAHTVGIGAHTHSVAIGSHGHTITVNAAGNAENTVKNIAFNYIVRLA

SEQ ID NO: 56556 - protein, 141 aa, Escherichia coli
MEGLSMDQVVIFKQIFDKVRNDLNYQWFYSELKRHNVSHYIYYLATENVHIVLKNDNTVLLKGLKNIVSVKFSKDRHLIETTSNKLKSREITFQEYRRNLAKAGVFRWVTNIHEQKRYYYTFDNSLLFTESIQKTTQILPR

SEQ ID NO: 56557 - protein, 248 aa, Escherichia coli
MIENHLYSLVTVVKYKLLPCLLAIFLTGCDRTEVTLSFTPEMASFSNEFDFDPLRGPVKDFTQTLMDEQGEVTKRVSGTLSEEGCFDSLELLDLENNTVVALVLDANYYRDAETLEKRVRLQGKCQLAELPSAGVSWETDDNGFVIKASSKQMQMEYRYDDQGYPLGKTTKSNDKTLSVSATPSTDPIKKLDYTAVTLLNNQRVGNVKQSCEYDSHANPVDCQLIIVDEGVKPAVERVYTIKNTIDYY

SEQ ID NO: 56558 - protein, 417 aa, Escherichia coli
MSRTTTVDGAPASDTDKQSISQPNQFIKRGTPQFMRVTLALFSAGLATFALLYCVQPILPVLSQEFGLTPANSSISLSISTAMLAIGLLFTGPLSDAIGRKPVMVTALLLASICTLLSTMMTSWHGILIMRALIGLSLSGVAAVGMTYLSEEIHPSFVAFSMGLYISGNSIGGMSGRLISGVFTDFFNWRIALAAIGCFALASALMFWKILPESRHFRPTSLRPKTLFINFRLHWRDRGLPLLFAEGFLLMGSFVTLFNYIGYRLMLSPWHVSQAVVGLLSLAYLTGTWSSPKAGTMTTRYGRGPVMLFSTGVMLFGLLMTLFSSLWLIFAGMLLFSAGFFAAHSVASSWIGPRAKRAKGQASSLYLFSYYLGSSIAGTLGGVFWHNYGWNGVGAFIALMLVIALLVGTRLHRRLHA

SEQ ID NO: 56559 - protein, 510 aa, Escherichia coli
MRIGIPRERLTNETRVAATPKTVEQLLKLGFTVAVESGAGQLASFDDKAFVQAGAEIVEGNSVWQSEIILKVNAPLDDEIALLNPGTTLVSFIWPAQNPELMQKLAERNVTVMAMDSVPRISRAQSLDALSSMANIAGYRAIVEAAHEFGRFFTGQITAAGKVPPAKVMVIGAGVAGLAAIGAANSLGAIVRAFDTRPEVKEQVQSMGAEFLELDFKEEAGSGDGYAKVMSDAFIKAEMELFAAQAKEVDIIVTTALIPGKPAPKLITREMVDSMKAGSVIVDLAAQNGGNCEYTVPGEIFTTENGVKVIGYTDLPGRLPTQSSQLYGTNLVNLLKLLCKEKDGNITVDFDDVVIRGVTVIRAGEITWPAPPIQVSAQPQAAQKAAPEVKTEEKCTCSPWRKYALMALAIILFGWMASVAPKEFLGHFTVFALACVVGYYVVWNVSHALHTPLMSVTNAISGIIVVGALLQIGQGGWVSFLSFIAVLIASINIFGGFTVTQRMLKMFRKN

SEQ ID NO: 56560 - protein, 424 aa, Escherichia coli
MASSNLIKQLQERGLVAQVTDEEALAERLAQGPIALYCGFDPTADSLHLGHLVPLLCLKRFQQAGHKPVALVGGATGLIGDPSFKAAERKLNTEETVQEWVDKIRKQVAPFLDFDCGENSAIAANNYDWFGNMNVLTFLRDIGKHFSVNQMINKEAVKQRLNREDQGISFTEFSYNLLQGYDFACLNKQYGVVLQIGGSDQWGNITSGIDLTRRLHQNQVFGLTVPLITKADGTKFGKTEGGAVWLDPKKTSPYKFYQFWINTADADVYRFLKFFTFMSIEEINALEEEDKNSGKAPRAQYVLAEQVTRLVHGEEGLQAAKRITECLFSGSLSALSEADFEQLAQDGVPMVEMEKGADLMQALVDSELQPSRGQARKTIASNAITINGEKQSDPEYFFKEEDRLFGRFTLLRRGKKNYCLICWK

SEQ ID NO: 56561 - protein, 199 aa, Escherichia coli
MNKHTEHDTREHLLATGEQLCLQRGFTGMGLSELLKTAEVPKGSFYHYFRSKEAFGVAMLERHYAAYHQRLTELLQSGEGNYRDRILAYYQQTLNQFCQHGTISGCLTVKLSAEVCDLSEDMRSAMDKGARGVIALLSQALENGRENHCLTFCGEPLQQAQVLYALWLGANLQAKISRSFEPLENALAHVKNIIATPAV

SEQ ID NO: 56562 - protein, 213 aa, Escherichia coli
MFTGIVQGTAKLVSIDEKPNFRTHVVELPDHMLDGLETGASVAHNGCCLTVTEINGNHVSFDLMKETLRITNLGDLKVGDWVNVERAAKFSDEIGGHLMSGHIMTTAEVAKILTSENNRQIWFKVQDSQLMKYILYKGFIGIDGISLTVGEVTPTRFCVHLIPETLERTTLGKKKLGARVNIEIDPQTQAVVDTVERVLAARENAMNQPGTEA

SEQ ID NO: 56563 - protein, 470 aa, Escherichia coli
MKKTKIVCTIGPKTESEEMLAKMLDAGMNVMRLNFSHGDYAEHGQRIQNLRNVMSKTGKTAAILLDTKGPEIRTMKLEGGNDVSLKAGQTFTFTTDKSVIGNSEMVAVTYEGFTTDLSVGNTVLVDDGLIGMEVTAIEGNKVICKVLNNGDLGENKGVNLPGVSIALPALAEKDKQDLIFGCEQGVDFVAASFIRKRSDVIEIREHLKAHGGENIHIISKIENQEGLNNFDEILEASDGIMVARGDLGVEIPVEEVIFAQKMMIEKCIRARKVVITATQMLDSMIKNPRPTRAEAGDVANAILDGTDAVMLSGESAKGKYPLEAVSIMATICERTDRVMNSRLEFNNDNRKLRITEAVCRGAVETAEKLDAPLIVVATQGGKSARAVRKYFPDATILALTTNEKTAHQLVLSKGVVPQLVKEITSTDDFYRLGKELALQSGLAHKGDVVVMVSGALVPSGTTNTASVHVL

SEQ ID NO: 56564 - protein, 248 aa, Escherichia coli
MLSIKDLHVSVEDKAILRGLSLDVHPGEVHAIMGPNGSGKSTLSATLAGREDYEVTGGTVEFKGKDLLALSPEDRAGEGIFMAFQYPVEIPGVSNQFFLQTALNAVRSYRGQETLDRFDFQDLMEEKIALLKMPEDLLTRSVNVGFSGGEKKRNDILQMAVLEPELCILDESDSGLDIDALKVVADGVNSLRDGKRSFIIVTHYQRILDYIKPDYVHVLYQGRIVKSGDFTLVKQLEEQGYGWLTEQQ

SEQ ID NO: 56565 - protein, 288 aa, Escherichia coli
MDVTAKYELIGLMAYPIRHSLSPEMQNKALEKAGLPFTYMAFEVDNDSFPGAIEGLKALKMRGTGVSMPNKQLACEYVDELTPAAKLVGAINTIVNDDGYLRGYNTDGTGHIRAIKESGFDIKGKTMVLLGAGGASTAIGAQGAIEGLKEIKLFNRRDEFFDKALAFAQRVNENTDCVVTVTDLADQQAFAEALASADILTNGTKVGMKPLENESLVNDISLLHPGLLVTECVYNPHMTKLLQQAQQAGCKTIDGYGMLLWQGAEQFTLWTGKDFPLEYVKQVMGFGA

SEQ ID NO: 56566 - protein, 252 aa, Escherichia coli
MKTVTVKDLVIGTGAPKIIVSLMAKDIASVKSEALAYREADFDILEWRVDHYADLSNVESVMAAAKILRETMPEKPLLFTFRSAKEGGEQAISTEAYIALNRAAIDSGLVDMIDLELFTGDDQVKETVAYAHAHDVKVVMSNHDFHKTPEAEEIIARLRKMQSFDADIPKIALMPQSTSDVLTLLAATLEMQEQYADRPIITMSMAKTGVISRLAGEVFGSAATFGAVKKASAPGQISVNDLRTVLTILHQA

SEQ ID NO: 56567 - protein, 429 aa, Escherichia coli
MSDDKFDAIVVGAGVAGSVAALVMARAGLDVLVIERGDSAGCKNMTGGRLYAHTLEAIIPGFAVSAPVERKVTREKISFLTEESAVTLDFHREQPDVPQHASYTVLRNRLDPWLMEQAEQAGAQFIPGVRVDALVREGNKVTGVQAGDDILEANVVILADGVNSMLGRSLGMVPASDPHHYAVGVKEVIGLTPEQINDRFNITGEEGAAWLFAGSPSDGLMGGGFLYTNKDSISLGLVCGLGDIAHAQKSVPQMLEDFKQHPAIRPLISGGKLLEYSAHMVPEGGLAMVPQLVNEGVMIVGDAAGFCLNLGFTVRGMDLAIASAQAAATTVIAAKERADFSASSLAQYKRELEQSCVMRDMQHFRKIPALMENPRLFSQYPRMVADIMNEMFTIDGKPNQPVRKMIMGHAKKIGLINLLKDGIKGATAL

SEQ ID NO: 56568 - protein, 795 aa, Escherichia coli
MKFSELWLREWVNPAIDSDALANQITMAGLEVDGVEPVAGSFHGVVVGEVVECAQHPNADKLRVTKVNVGGDRLLDIVCGAPNCRQGLRVAVATIGAVLPGDFKIKAAKLRGEPSEGMLCSFSELGISDDHSGIIELPADAPIGTDIREYLKLDDNTIEISVTPNRADCLGIIGVARDVAVLNQLPLVQPEIVPVGATIDDTLPITVEAPEACPRYLGRVVKGINVKAPTPLWMKEKLRRCGIRSIDAVVDVTNYVLLELGQPMHAFDKDRIEGGIVVRMAKEGETLVLLDGTEAKLNADTLVIADHNKALAMGGIFGGEHSGVNDETQNVLLECAFFSPLSITGRARRHGLHTDASHRYERGVDPALQHKAMERATRLLIDICGGEAGPVIDITNEATLPKRATITLRRSKLDRLIGHHIADEQVTDILRRLGCEVTEGKDEWQAVAPSWRFDMEIEEDLVEEVARVYGYNNIPDEPVQASLIMGTHREADLSLKRVKTLLNDKGYQEVITYSFVDPKVQQMIHPGVEALLLPSPISVEMSAMRLSLWTGLLATVVYNQNRQQNRVRIFESGLRFVPDTQAPLGIRQDLMLAGVICGNRYEEHWNLAKETVDFYDLKGDLESVLDLTGKLNEVEFRAEANPALHPGQSAAIYLKGERIGFVGVVHPELERKLDLNGRTLVFELEWNKLADRVVPQAREISRFPANRRDIAVVVAENVPAADILSECKKVGVNQVVGVNLFDVYRGKGVAEGYKSLAISLILQDTSRTLEEEEIAATVAKCVEALKERFQASLRD

SEQ ID NO: 56569 - protein, 327 aa, Escherichia coli
MSHLAELVASAKAAISQASDVAALDNVRVEYLGKKGHLTLQMTTLRELPPEERPAAGAVINEAKEQVQQALNARKAELESAALNARLAAETIDVSLPGRRIENGGLHPVTRTIDRIESFFGELGFTVATGPEIEDDYHNFDALNIPGHHPARADHDTFWFDTTRLLRTQTSGVQIRTMKAQQPPIRIIAPGRVYRNDYDQTHTPMFHQMEGLIVDTNISFTNLKGTLHDFLRNFFEEDLQIRFRPSYFPFTEPSAEVDVMGKNGKWLEVLGCGMVHPNVLRNVGIDPEVYSGFAFGMGMERLTMLRYGVTDLRSFFENDLRFLKQFK

SEQ ID NO: 56570 - protein, 309 aa, Escherichia coli
MVRIYTLTLAPSLDSATITPQIYPEGKLRCTAPVFEPGGGGINVARAIAHLGGSATAIFPAGGATGEHLVSLLADENVPVATVEAKDWTRQNLHVHVEASGEQYRFVMPGAALNEDEFRQLEEQVLEIESGAILVISGSLPPGVKLEKLTQLISAAQKQGIRCIVDSSGEALSAALAIGNIELVKPNQKELSALVNRELTQPDDVRKAAQEIVNSGKAKRVVVSLGPQGALGVDSENCIQVVPPPVKSQSTVGAGDSMVGAMTLKLAENASLEEMVRFGVAAGSAATLNQGTRLCSHDDTQKIYAYLSR

SEQ ID NO: 56571 - protein, 116 aa, Escherichia coli
MMDLDNIPDTQTEAEELEEVVMGLIINSGQARSLAYAALKQAKQGDFAAAKAMMDQSRMALNEAHLVQTKLIEGDAGEGKMKVSLVLVHAQDHLMTSMLARELITELIELHEKLKA

SEQ ID NO: 56572 - protein, 452 aa, Escherichia coli
MSNVIASLEKVLLPFAVKIGKQPHVNAIKNGFIRLMPLTLAGAMFVLINNVFLSFGEGSFFYSLGIRLDASTIETLNGLKGIGGNVYNGTLGIMSLMAPFFIGMALAEERKVDALAAGLLSVAAFMTVTPYSVGEAYAVGANWLGGANIISGIIIGLVVAEMFTFIVRRNWVIKLPDSVPASVSRSFSALIPGFIILSVMGIIAWALNTWGTNFHQIIMDTISTPLASLGSVVGWAYVIFVPLLWFFGIHGALALTALDNGIMTPWALENIATYQQYGSVEAALAAGKTFHIWAKPMLDSFIFLGGSGATLGLILAIFIASRRADYRQVAKLALPSGIFQINEPILFGLPIIMNPVMFIPFVLVQPILAAITLAAYYMGIIPPVTNIAPWTMPTGLGAFFNTNGSVAALLVALFNLGIATLIYLPFVVVANKAQNAIDKEESEEDIANALKF

SEQ ID NO: 56573 - protein, 275 aa, Escherichia coli
MTLQQQIIKALGAKPQINAEEEIRRSVDFLKSYLQTYPFIKSLVLGISGGQDSTLAGKLCQMAINELRLETGNESLQFIAVRLPYGVQADEQDCQDAIAFIQPDRVLTVNIKGAVLASEQALREAGIELSDFVRGNEKARERMKAQYSIAGMTSGVVVGTDHAAEAITGFFTKYGDGGTDINPLYRLNKRQGKQLLAALACPEHLYKKAPTADLEDDRPSLPDEVALGVTYDNIDDYLEGKNVPQQVARTIENWYLKTEHKRRPPITVFDDFWKK

SEQ ID NO: 56574 - protein, 406 aa, Escherichia coli
MSQPITRENFDEWMIPVYAPAPFIPVRGEGSRLWDQQGKEYIDFAGGIAVNALGHAHPELREALNEQASKFWHTGNGYTNEPVLRLAKKLIDATFADRVFFCNSGAEANEAALKLARKFAHDRYGSHKSGIVAFKNAFHGRTLFTVSAGGQPAYSQDFAPLPADIRHAAYNDINSASALIDDSTCAVIVEPIQGEGGVVPASNAFLQGLRELCNRHNALLIFDEVQTGVGRTGELYAYMHYGVTPDLLTTAKALGGGFPVGALLATEECARVMTVGTHGTTYGGNPLASAVAGKVLELINTPEMLNGVKQRHDWFVERLNTINHRYGLFSEVRGLGLLIGCVLNADYAGQAKQISQEAAKAGVMVLIAGGNVVRFAPALNVSEEEVTTGLDRFAAACEHFVSRGSS

SEQ ID NO: 56575 - protein, 653 aa, Escherichia coli
MRLFIAEKPSLARAIADVLPKPHRKGDGFIECGNGQVVTWCIGHLLEQAQPDAYDSRYARWNLADLPIVPEKWQLQPRPSVTKQLNVIKRFLHEASEIVHAGDPDREGQLLVDEVLDYLQLAPEKRQQVQRCLINDLNPQAVERAIDRLRSNSEFVPLCVSALARARADWLYGINMTRAYTILGRNAGYQGVLSVGRVQTPVLGLVVRRDEEIENFVAKDFFEVKAHIVTPADERFTAIWQPSEACEPYQDEEGRLLHRPLAEHVVNRISGQPAIVTSYNDKRESESAPLPFSLSALQIEAAKRFGLSAQNVLDICQKLYETHKLITYPRSDCRYLPEEHFAGRHAVMNAISVHAPDLLPQPVVDPDIRNRCWDDKKVDAHHAIIPTARSSAINLTENEAKVYNLIARQYLMQFCPDAVFRKCVIELDIAKGKFVAKARFLAEAGWRTLLGSKERDEENDGTPLPVVAKGDELLCEKGEVVERQTQPPRHFTDATLLSAMTGIARFVQDKDLKKILRATDGLGTEATRAGIIELLFKRGFLTKKGRYIHSTDAGKALFHSLPEMATRPDMTAHWESVLTQISEKQCRYQDFMQPLVGTLYQLIDQAKRTPVRQFRGIVAPGSGGSADKKKAAPRKRSAKKSPPADEVGSGAIA

SEQ ID NO: 56576 - protein, 183 aa, Escherichia coli
MDALELLINRRSASRLAEPAPTGEQLQNILRAGMRAPDHKSMQPWHFFVIEGEGRERFSAVLEQGAIAAGSDDKAIDKARNAPFRAPLIITVVAKCEENHKVPRWEQEMSAGCAVMAMQMAAVAQGFGGIWRSGALTESPVVREAFGCREQDKIVGFLYLGTPQLKASTSINVPDPTPFVTYF

SEQ ID NO: 56577 - protein, 358 aa, Escherichia coli
MKALARFGKAFGGYKMIDVPQPMCGPEDVVIEIKAAAICGADMKHYNVDSGSDEFNSIRGHEFAGCIAQVGEKVKDWKVGQRVVSDNSGHVCGVCPACEQGDFLCCTEKVNLGLDNNTWGGGFSKYCLVPGEILKIHRHALWEIPDGVDYEDAAVLDPICNAYKSIAQQSKFLPGQDVVVIGTGPLGLFSVQMARIMGAVNIVVVGLQEDVAVRFPVAKELGATAVVNGSTEDVVARCQQICGKDNLGLVIECSGANIALKQAIEMLRPNGEVVRVGMGFKPLDFSINDITAWNKSIIGHMAYDSTSWRNAIRLLASGAIKVKPMITHRIGLSQWREGFDAMVDKTAIKVIMTYDFDE

SEQ ID NO: 56578 - protein, 331 aa, Escherichia coli
MTIKVGINGFGRIGRIVFRAAQKRSDIEIVAINDLLDADYMAYMLKYDSTHGRFDGTVEVKDGHLIVNGKKIRVTAERDPANLKWDEVGVDVVAEATGLFLTDETARKHITAGAKKVVMTGPSKDNTPMFVKGANFDKYAGQDIVSNASCTTNCLAPLAKVINDNFGIIEGLMTTVHATTATQKTVDGPSHKDWRGGRGASQNIIPSSTGAAKAVGKVLPELNGKLTGMAFRVPTPNVSVVDLTVRLEKAATYEQIKAAVKAAAEGEMKGVLGYTEDDVVSTDFNGEVCTSVFDAKAGIALNDNFVKLVSWYDNETGYSNKVLDLIAHISK

SEQ ID NO: 56579 - protein, 491 aa, Escherichia coli
MAVTQTAQACDLVIFGAKGDLARRKLLPSLYQLEKAGQLNPDTRIIGVGRADWDKAAYTKVVREALETFMKETIDEGLWDTLSARLDFCNLDVNDTAAFSRLGAMLDQKNRITINYFAMPPSTFGAICKGLGEAKLNAKPARVVMEKPLGTSLATSQEINDQVGEYFEECQVYRIDHYLGKETVLNLLALRFANSLFVNNWDNRTIDHVEITVAEEVGIEGRWGYFDKAGQMRDMIQNHLLQILCMIAMSPPSDLSADSIRDEKVKVLKSLRRIDRSNVREKTVRGQYTAGFAQGKKVPGYLEEEGANKSSNTETFVAIRVDIDNWRWAGVPFYLRTGKRLPTKCSEVVVYFKTPELNLFKESWQDLPQNKLTIRLQPDEGVDIQVLNKVPGLDHKHNLQITKLDLSYSETFNQTHLADAYERLLLETMRGIQALFVRRDEVEEAWKWVDSITEAWAMDNDAPKPYQAGTWGPVASVAMITRDGRSWNEFE

SEQ ID NO: 56580 - protein, 419 aa, Escherichia coli
MLGSLTVLTLAVAVWRPYVYHRDATPIVKTIELEQNEIRSLLPEASEPIDQAAQEDEAIPQDELDDKIAGEAGVHEYVVSTGDTLSSILNQYGIDMGDITQLAAADKELRNLKIGQQLSWTLTADGELQRLTWEVSRRETRTYDRTAANGFKMTSEMQQGEWVNNLLKGTVGGSFVASARNAGLTSAEVSAVIKAMQWQMDFRKLKKGDEFAVLMSREMLDGKREQSQLLGVRLRSEGKDYYAIRAEDGKFYDRNGTGLAKGFLRFPTAKQFRISSNFNPRRTNPVTGRVAPHRGVDFAMPQGTPVLSVGDGEVVVAKRSGAAGYYVAIRHGRSYTTRYMHLRKILVKPGQKVKRGDRIALSGNTGRSTGPHLHYEVWINQQAVNPLTAKLPRTEGLTGSDRREFLAQAKEIVPQLRFD

SEQ ID NO: 56581 - protein, 199 aa, Escherichia coli
MRHDFVFSGVIMLELNAKTTALVVIDLQEGILPFAGGPHTADEVVNRAGKLAAKFRASGQPVFLVRVGWSADYAEALKQPVDAPSPAKVLPENWWQHPAALGATDSDIEIIKRQWGAFYGTDLELQLRRRGIDTIVLCGISTNIGVESTARNAWELGFNLVIAEDACSAASAEQHNNSINHIYPRIARVRSVEEILNAL

SEQ ID NO: 56582 - protein, 182 aa, Escherichia coli
MQFNIPTLLTLFRVILIPFFVLVFYLPVTWSPFAAALIFCVAAVTDWFDGFLARRWNQSTRFGAFLDPVADKVLVAIAMVLVTEHYHSWWVTLPAATMIAREIIISALREWMAELGKRSSVAVSWIGKVKTTAQMVALAWLLWRPNIWVEYAGIALFFVAAVLTLWSMLQYLSAARADLLDQ

SEQ ID NO: 56583 - protein, 240 aa, Escherichia coli
MQDKDFFSWRRTMLLRFQRMETAEEVYHEIELQAQQLEYDYYSLCVRHPVPFTRPKVAFYTNYPEAWVSYYQAKNFLAIDPVLNPENFSQGHLMWNDDLFSEAQPLWEAARAHGLRRGVTQYLMLPNRALGFLSFSRCSAREIPILSDELQLKMQLLVRESLMALMRLNDEIVMTPEMNFSKREKEILRWTAEGKTSAEIAMILSISENTVNFHQKNMQKKINAPNKTQVACYAAATGLI

SEQ ID NO: 56584 - protein, 331 aa, Escherichia coli
MSNLTGTDKSVILLMTIGEDRAAEVFKHLSQREVQTLSAAMANVTQISNKQLTDVLAEFEQEAEQFAALNINANDYLRSVLVKALGEERAASLLEDILETRDTASGIETLNFMEPQSAADLIRDEHPQIIATILVHLKRAQAADILALFDERLRHDVMLRIATFGGVQPAALAELTEVLNGLLDGQNLKRSKMGGVRTAAEIINLMKTQQEEAVITAVREFDGELAQKIIDEMFLFENLVDVDDRSIQRLLQEVDSESLLIALKGAEQPLREKFLRNMSQRAADILRDDLANRGPVRLSQVENEQKAILLIVRRLAETGEMVIGSGEDTYV

SEQ ID NO: 56585 - protein, 283 aa, Escherichia coli [sequence omitted]

SEQ ID NO: 56586 - protein, 211 aa, Escherichia coli
MRLTAKQVTWLKVCLHLAGLLPFLWLVWAINHGGLGADPVKDIQHFTGRTALKFLLATLLITPLARYAKQPLLIRTRRLLGLWCFAWATLHLTSYALLELGVNNLALLGKELITRPYLTLGIISWVILLALAFTSTQAMQRKLGKHWQQLHNFVYLVAILAPIHYLWSVKIISPQPLIYAGLAVLLLALRYKKLRSLFNRLRKQVHNKLSV

SEQ ID NO: 56587 - protein, 475 aa, Escherichia coli
MMNDGKQQSTFLFHDYETFGTHPALDRPAQFAAIRTDSEFNVIGEPEVFYCKPADDYLPQPGAVLITGITPQEARAKGENEAAFAARIHSLFTVPKTCILGYNNVRFDDEVTRNIFYRNFYDPYAWSWQHDNSRWDLLDVMRACYALRPEGINWPENDDGLPSFRLEHLTKANGIEHSNAHDAMADVYATIAMAKLVKTRQPRLFDYLFTHRNKHKLMALIDVPQMKPLVHVSGMFGAWRGNTSWVAPLAWHPENRNAVIMVDLAGDISPLLELDSDTLRERLYTAKTDLGDNAAVPVKLVHINKCPVLAQANTLRPEDADRLGINRQHCLDNLKILRENPQVREKVVAIFAEAEPFTPSDNVDAQLYNGFFSDADRAAMKIVLETEPRNLPALDITFVDKRIEKLLFNYRARNFPGTLDYAEQQRWLEHRRQVFTPEFLQGYADELQMLVQQYADDKEKVALLKALWQYAEEIV

SEQ ID NO: 56588 - protein, 338 aa, Escherichia coli
MRTWKFPSVRVMMRVENNNVSGQNHDPEQIDLIDLLVQLWRGKMTIIISVIVAIALAIGYLAVAKEKWTSTAIITQPDVGQIAGYNNAMNVIYGQAAPKVSDLQETLIGRFSSAFSALAETLDNQEEREKLTIEPSVKNQQLPLTVSYVGQTAEGAQMKLAQYIQQVDDKVNQELEKDLKDNIALGRKNLQDSLRTQEVVAQEQKDLRIRQIQEALQYANQAQVTKPQIQQTGEDITQDTLFLLGSEALESMIKHEATRPLVFSPNYYQTRQNLLDIESLKVDDLDIHAYRYVMKPMLPIRRDSPKKAITLILAVLLGGMVGAGIVLGRNALRNYNAK

SEQ ID NO: 56589 - protein, 468 aa, Escherichia coli
MSKQQIGVVGMAVMGRNLALNIESRGYTVSIFNRSREKTEEVIAENPGKKLVPYYTVKEFVESLETPRRILLMVKAGAGTDAAIDSLKPYLDKGDIIIDGGNTFFQDTIRRNRELSAEGFNFIGTGVSGGEEGALKGPSIMPGGQKEAYELVAPILTKIAAVAEDGEPCVTYIGADGAGHYVKMVHNGIEYGDMQLIAEAYSLLKGGLNLTNEELAQTFTEWNNGELSSYLIDITKDIFTKKDEDGNYLVDVILDEAANKGTGKWTSQSALDLGEPLSLITESVFARYISSLKDQRVAASKVLSGPQAQPAGDKAEFIEKVRRALYLGKIVSYAQGFSQLRAASEEYNWDLNYGEIAKIFRAGCIIRAQFLQKITDAYAENPQIANLLLAPYFKQIADDYQQALRDVVAYAVQNGIPVPTFSAAVAYYDSYRAAVLPANLIQAQRDYFGAHTYKRIDKEGVFHTEWLD

SEQ ID NO: 56590 - protein, 492 aa, Escherichia coli
MSLREKTISGAKWSAIATVIIIGLGLVQMTVLARIIDNHQFGLLTVSLVIIALADTLSDFGIANSIIQRKEISHLELTTLYWLNVGLGIVVCVAVFLLSDLIGDVLNNPDLAPLIKTLSLAFVVIPHGQQFRALMQKELEFNKIGMIETSAVLAGFTCTVVSAHFWPLAMTAILGYLVNSAVRTLLFGYFGRKIYRPGLHFSLASVAPNLRFGAWLTADSIINYLNTNLSTLVLARILGAGVAGGYNLAYNVAVVPPMKLNPIITRVLFPAFAKIQDDTEKLRVNFYKLLSVVGIINFPALLGLMVVSNNFVPLVFGEKWNSIIPVLQLLCVVGLLRSVGNPIGSLLMAKARVDISFKFNVFKTFLFIPAIVIGGQMAGAIGVTLGFLLVQIINTILSYFVMIKPVLGSSYRQYILSLWLPFYLSLPTLVVSYALGIVLKGQLALGMLLAVQIATGVLAFVVMIVLSRHPLVVEVKRQFCRSEKMKMLLRAG

SEQ ID NO: 56591 - protein, 407 aa, Escherichia coli
MKILVYGINYSPELTGIGKYTGEMVEWLAAQGHEVRVITAPPYYPQWQVGENYSAWRYKREEGAATVWRCPLYVPKQPSTLKRLLHLGSFAVSSFFPLMAQRRWKPDRIIGVVPTLFCAPGMRLLAKLSGARTVLHIQDYEVDAMLGLGLAGKGKGGKVAQLATAFERSGLHNVDNVSTISRSMMNKAIEKGVAAENVIFFPNWSEIARFQHVADADVDALRNQLDLPDNKKIILYSGNIGEKQGLENVIEAADRLRDEPLIFAIVGQGGGKARLEKMAQQRGLRNMQFFPLQSYDALPALLKMGDCHLVVQKRGAADAVLPSKLTNILAVGGNAVITAEAYTELGQLCETFPGIAVCVEPESVEALVAGIRQALLLPKHNTVAREYAERTLDKENVLRQFINDIRG

SEQ ID NO: 56592 - protein, 732 aa, Escherichia coli
MGAGIERRAGIRMTEKVKQHAAPVTGSDEIDIGRLVGTVIEARWWVIGITTVFALCAVVYTFFATPIYSADALVQIEQNSGNSLVQDIGSALANKPPASDAEIQLIRSRLVLGKTVDDLDLDIAVSKNTFPIFGAGWDRLMGRQNETVKVTTFNRPKEMADQVFTLNVLDNKNYTLSSDGGFSARGQAGQMLKKEGVTLMVEAIHASPGSEFTVTKYSTLGMINQLQNSLTVTENGKDAGVLSLTYTGEDREQIRDILNSIARNYQEQNIERKSAEASKSLAFLAQQLPEVRSRLDVAENKLNAFRQDKDSVDLPLEAKAVLDSMVNIDAQLNELTFKEAEISKLYTKVHPAYRTLLEKRQALEDEKAKLNGRVTAMPKTQQEIVRLTRDVESGQQVYMQLLNKEQELKITEASTVGDVRIVDPAITQPGVLKPKKGLIILGAIILGLMLSIVGVLLRSLFNRGIESPQVLEEHGISVYASIPLSEWQKARDSVKTIKGIKRYKQSQLLAVGNPTDLAIEAIRSLRTSLHFAMMQAQNNVLMMTGVSPSIGKTFVCANLAAVISQTNKRVLLIDCDMRKGYTHELLGTNNVNGLSEILIGQGDITTAAKPTSIAKFDLIPRGQVPPNPSELLMSERFAELVNWASKNYDLVLIDTPPILAVTDAAIVGRHVGTTLMVARYAVNTLKEVETSLSRFEQNGIPVKGVILNSIFRRASAYQDYGYYEYEYKSDAK

SEQ ID NO: 56593 - protein, 471 aa, Escherichia coli
MSRRQHFAKVTPLLHRHGDYFVFIGFDYGTANCSVAVMRDGKPHLLKMENDSTLLPSMLCAPTREAVSEWLYRHHDVPADDDETQALLRRAIRYNREEDIDVTAKSVQFGLSSLAQYIDDPEEVWFVKSPKSFLGASGLKPQQVALFEDLVCAMMLHIRQQAQAQLPEAITQAVIGRPINFQGLGGDEANTQAQGILERAAKRAGFRDVVFQYEPVAAGLDYEATLQEEKRVLVVDIGGGTTDCSLLLMGPQWRSRLDREASLLGHSGCRIGGNDLDIALAFKNLMPLLGMGGETEKGIALPILPWWNAVAINDVPAQSDFYSSANGRLLNDLVRDAREPEKVALLQKVWRQRLSYRLVRSAEECKIALSSVAETRASLPFISNELATLISQRGLESALSQPLTRILEQVQLALDNAQEKPDVIYLTGGSARSPLIKKALAEQLPGIPIAGGDDFGSVTAGLARWAEVVFR

SEQ ID NO: 56594 - protein, 1040 aa, Escherichia coli
MQVLPPSSTGGPSRLFIMRPVATTLLMVAILLAGIIGYRALPVSALPEVDYPTIQVVTLYPGASPDVMTSAVTAPLERQFGQMSGLKQMSSQSSGGASVITLQFQLTLPLDVAEQEVQAAINAATNLLPSDLPNPPVYSKVNPADPPIMTLAVTSTAMPMTQVEDMVETRVAQKISQISGVGLVTLSGGQRPAVRVKLNAQAIAALGLTSETVRTAITGANVNSAKGSLDGPSRAVTLSANDQMQSAEEYRQLIIAYQNGAPIRLGDVATVEQGAENSWLGAWANKEQAIVMNVQRQPGANIISTADSIRQMLPQLTESLPKSVKVTVLSDRTTNIRASVDDTQFELMMAIALVVMIIYLFLRNIPATIIPGVAVPLSLIGTFAVMVFLDFSINNLTLMALTIATGFVVDDAIVVIENISRYIEKGEKPLAAALKGAGEIGFTIISLTFSLIAVLIPLLFMGDIVGRLFREFAITLAVAILISAVVSLTLTPMMCARMLSQESLRKQNRFSRASEKMFDRIIAAYGRGLAKVLNHPWLTLSVALSTLLLSVLLWVFIPKGFFPVQDNGIIQGTLQAPQSSSFANMAQRQRQVADVILQDPAVQSLTSFVGVDGTNPSLNSARLQINLKPLDERDDRVQKVIARLQTAVDKVPGVDLFLQPTQDLTIDTQVSRTQYQFTLQATSLDALSTWVPQLMEKLQQLPQLSDVSSDWQDKGLVAYVNVDRDSASRLGISMADVDNALYNAFGQRLISTIYTQANQYRVVLEHNTENTPGLAALDTIRLTSSDGGVVPLSSIAKIEQRFAPLSINHLDQFPVTTISFNVPDNYSLGDAVQAIMDTEKTLNLPVDITTQFQGSTLAFQSALGSTVWLIVAAVVAMYIVLGILYESFIHPITILSTLPTAGVGALLALLIAGSELDVIAIIGIILLIGIVKKNAIMMIDFALAAEREQGMSPREAIYQACLLRFRPILMTTLAALLGALPLMLSTGVGAELRRPLGIGMVGGLIVSQVLTLFTTPVIYLLFDRLALWTKSRFARHEEEA

SEQ ID NO: 56595 - protein, 299 aa, Escherichia coli
MAEFPASLLILNGKSTDNLPLREAIMLLREEGMTIHVRVTWEKGDAARYVEEARKFGVATVIAGGGDGTINEVSTALIQCEGDDIPALGILPLGTANDFATSVGIPEALDKALKLAIAGDAIAIDMAQVNKQTCFINMATGGFGTRITTETPEKLKAALGSVSYIIHGLMRMDTLQPDRCEIRGENFHWQGDALVIGIGNGRQAGGGQQLCPNALINDGLLQLRIFTGDEILPALVSTLKSDEDNPNIIEGASSWFDIQAPHDITFNLDGEPLSGQNFHIEILPAALRCRLPPDCPLLR

SEQ ID NO: 56596 - protein, 346 aa, Escherichia coli
MKSVVNDTDGIVRVAESVIPEIKHQDEVRVKIASSGLCGSDLPRIFKNGAHYYPITLGHEFSGYIDAVGSGVDDLHPGDAVACVPLLPCFTCPECLKGFYSQCAKYDFIGSRRDGGFAEYIVVKRKNVFALPTDMPIEDGAFIEPITVGLHAFHLAQGCENKNVIIIGAGTIGLLAIQCAVALGAKSVTAIDISSEKLALAKSFGAMQTFNSSEMSAPQMQSVLRELRFNQLILETAGVPQTVELAVEIAGPHAQLALVGTLHQDLHLTSATFGKILRKELTVIGSWMNYSSPWPGQEWETASRLLTERKLSLEPLIAHRGSFESFAQAVRDIARNAMPGKVLLIP

SEQ ID NO: 56597 - protein, 286 aa, Escherichia coli
MKMYVVSTKQMLNNAQRGGYAVPAFNIHNLETMQVVVETAANLHAPVIIAGTPGTFTHAGTENLLALVSAMAKQYHHPLAIHLDHHTKFDDIAQKVRSGVRSVMIDASHLPFAQNISRVKEVVDFCHRFDVSVEAELGQLGGQEDDVQVNEADALYTNPAQAREFAEATGIDSLAVAIGTAHGMYASAPALDFSRLENIRQWVNLPLVLHGASGLSTKDIQQTIKLGICKINVATELKNAFSQALKNYLTEHPEATDPRDYLQSAKSAMRDVVSKVIADCGCEGRA

SEQ ID NO: 56598 - protein, 262 aa, Escherichia coli
MQVDLLGSAQSAHALHLFHQHSPLVHCMTNDVVQTFTANTLLALGASPAMVIETEEASQFAAIASALLINVGTLTQPRAQAMRAAVEQAKSSQTPWTLDPVAVGALDYRRHFCHELLSFKPAAIRGNASEIMALAGIANGGRGVDTTDAAANAIPAAQTLARETGAIVVVTGEMDYVTDGHRIIGIHGGDPLMTKVVGTGCALSAVVAACCALPGDTLENVASACHWMKQAGERAVARSEGPGSFVPHFLDALWQLTQEVQA

SEQ ID NO: 56599 - protein, 90 aa, Escherichia coli
MSHTIRDKQKLKARASKIQGQVVALKKMLDEPHECAAVLQQIAAIRGAVNGLMREVIKGHLTEHIVHQGDELKREEDLDVVLKVLDSYIK

SEQ ID NO: 56600 - protein, 677 aa, Escherichia coli
MTQVAKKILVTCALPYANGSIHLGHMLEHIQADVWVRYQRMRGHEVNFICADDAHGTPIMLKAQQLGITPEQMIGEMSQEHQTDFAGFNISYDNYHSTHSEENRQLSELIYSRLKENGFIKNRTISQLYDPEKGMFLPDRFVKGTCPKCKSPDQYGDNCEVCGATYSPTELIEPKSVVSGATPVMRDSEHFFFDLPSFSEMLQAWTRSGALQEQVANKMQEWFESGLQQWDISRDAPYFGFEIPNAPGKYFYVWLDAPIGYMGSFKNLCDKRGDSVSFDEYWKKDSTAELYHFIGKDIVYFHSLFWPAMLEGSNFRKPSNLFVHGYVTVNGAKMSKSRGTFIKASTWLNHFDADSLRYYYTAKLSSRIDDIDLNLEDFVQRVNADIVNKVVNLASRNAGFINKRFDGVLASELADPQLYKTFTDAAEVIGEAWESREFGKAVREIMALADLANRYVDEQAPWVVAKQEGRDADLQAICSMGINLFRVLMTYLKPVLPKLTERAEAFLNTELTWDGIQQPLLGHKVNPFKALYNRIDMRQVEALVEASKEEVKAAAAPVTGPLADDPIQETITFDDFAKVDLRVALIENAEFVEGSDKLLRLTLDLGGEKRNVFSGIRSAYPDPQALIGRHTIMVANLAPRKMRFGISEGMVMAAGPGGKDIFLLSPDAGAKPGHQVK

SEQ ID NO: 56601 - protein, 1210 aa, Escherichia coli
MDKELPWLADNAQLELKYKKGKTPLSHRRWPGEPVSVITGSLIQTLGDELLQKAEKKKNIVWRYENFSLEWQSAITQAINLIGEHKPSIPARTMAALACIAQNDSQQLLDEIVQQEGLEYATEVVIARQFIARCYESDPLVVTLQYQDEDYGYGYRSETYNEFDLRLRKHLSLAEESCWQRCADKLIAALPGINKVRRPFIALILPEKPEIANELVGLECPRTHFHSKEWLKVVANDPTAVRKLEHYWSQDIFSDREASYMSHENHFGYAACAALLREQGLAAIPRLAMYAHKEDCGSLLVQINHPQVIRTLLLVADKNKPSLQRVAKYHKNFPHATLAALAELLALTEPPARPGYPIIEDKKLPAQQKARDEYWRTLLQTLMASQPQLAAEVMPWLSTQPQSVLKSYLSAPPKPVIDGTDNSNLPEILVSPPWRSKKKMTAPRLDLAPLELTPQVYWQPGEQERLAATEPARYFSTESLAQRMEQKSGRVVLQELGFGDDVWLFLNYILPGKLDAARNSLFVQWHYYQGRVEEILNGWNSPEAQLAEQALRSGHIEALINIWENDNYSHYRPEKSVWNLYLLAQLPREMALTFWLRINEKKHLFAGEDYFLSILGLDALPGLLLAFSHRPKETFPLILNFGATELALPVAHVWRRFAAQRDLARQWILQWPEHTASALIPLVFTKPSDNSEAALLALRLLYEQGHGELLQTVANRWQRTDVWSALEQLLKQGPMDIYPARIPKAPDFWHPQMWSRPRLITNNQTVTNDALEIIGEMLRFTQGGRFYSGLEQLKTFCQPQTLAAFAWDLFTAWQQAGAPAKDNWAFLALSLFGDESTARDLTTQILAWPQEGKSARAVSGLNILTLMNNDMALIQLHHISQRAKSRPLRDNAAEFLQVVAENRGLSQEELADRLVPTLGLDDPQALSFDFGPRQFTVRFDENLNPVIFDQQNVRQKSVPRLRADDDQLKAPEALARLKGLKKDATQVSKNLLPRLETALRTTRRWSLADFHSLFVNHPFTRLVTQRLIWGVYPANEPRCLLKAFRVAAEGEFCNAQDEPIDLPADALIGIAHPLEMTAEMRSEFAQLFADYEIMPPFRQLSRRTVLLTPDESTSNSLTRWEGKSATVGQLMGMRYKGWESGYEDAFVYNLGEYRLVLKFSPGFNHYNVDSKALMSFRSLRVYRDNKSVTFAELDVFDLSEALSAPDVIFH

SEQ ID NO: 56602 - protein, 561 aa, Escherichia coli
MYDFNLVLLLLQQMCVFLVIAWLMSKTPLFIPLMQVTVRLPHKFLCYIVFSIFCIMGTWFGLHIDDSIANTRAIGAVMGGLLGGPVVGGLVGLTGGLHRYSMGGMTALSCMISTIVEGLLGGLVHSILIRRGRTDKVFNPITAGAVTFVAEMVQMLIILAIARPYEDAVRLVSNIAAPMMVTNTVGAALFMRILLDKRAMFEKYTSAFSATALKVAASTEGILRQGFNEVNSMKVAQVLYQELDIGAVAITDREKLLAFTGIGDDHHLPGKPISSTYTLKAIETGEVVYADGNEVPYRCSLHPQCKLGSTLVIPLRGENQRVMGTIKLYEAKNRLFSSINRTLGEGIAQLLSAQILAGQYERQKAMLTQSEIKLLHAQVNPHFLFNALNTIKAVIRRDSEQASQLVQYLSTFFRKNLKRPSEFVTLADEIEHVNAYLQIEKARFQSRLQVNIAIPQELSQQQLPAFTLQPIVENAIKHGTSQLLDTGRVAISARREGQHLMLEIEDNAGLYQPVTNASGLGMNLVDKRLRERFGDDYGISVACEPDSYTRITLRLPWRDEA

SEQ ID NO: 56603 - protein, 308 aa, Escherichia coli
MIEFSHVSKLFGAQKAVNDLNLNFQEGSFSVLIGTSGSGKSTTLKMINRLVEHDSGEIRFAGEEIRSLPVLELRRRMGYAIQSIGLFPHWSVAQNIATVPQLQKWSRARIDDRIDELMALLGLESNLRERYPHQLSGGQQQRVGVARALAADPQVLLMDEPFGALDPVTRGALQQEMTRIHRLLGRTIVLVTHDIDEALRLAEHLVLMDHGEVVQQGNPLTMLTRPANDFVRQFFGRSELGVRLLSLRSVADYVRREERADGEALAEEMTLRDALSLFVARGCEVLPVVNMQGQPCGTLHFQDLLVEA

SEQ ID NO: 56604 - protein, 315 aa, Escherichia coli
MRVLLAPMEGVLDSLVRELLTEVNDYDLCITEFVRVVDQLLPVKVFHRICPELQNASRTPSGTLVRVQLLGQFPQWLAENAARAVELGSWGVDLNCGCPSKTVNGSGGGATLLKDPELIYQGAKAMREAVPAHLPVSVKVRLGWDSGEKKFEIADAVQQAGATELVVHGRTKEQGYRAEHIDWQAIGDIRQRLNIPVIANGEIWDWQSAQQCMAISGCDAVMIGRGALNIPNLSRVVKYNEPRMPWPEVVALLQKYTRLEKQGDTGLYHVARIKQWLSYLRKEYDEATELFQHVRVLNNSPDIARAIQAIDIEKL

SEQ ID NO: 56605 - protein, 506 aa, Escherichia coli [sequence omitted]

SEQ ID NO: 56606 - protein, 285 aa, Escherichia coli
MKYIGAHVSAAGGLANAAIRAAEIDATAFALFTKNQRQWRAAPLTTQTIDEFKAACEKYHYTSAQILPHDSYLINLGHPVTEALEKSRDAFIDEMQRCEQLGLSLLNFHPGSHLMQISEEDCLARIAESINIALDKTQGVTAVIENTAGQGSNLGFKFEHLAAIIDGVEDKSRVGVCIDTCHAFAAGYDLRTPAECEKTFADFARTVGFKYLRGMHLNDAKSTFGSRVDRHHSLGEGNIGHDAFRWIMQDDRFDGIPLILETINPDIWAEEIAWLKAQQTEKAVA

SEQ ID NO: 56607 - protein, 312 aa, Escherichia coli
MSELKISPELLQISPEVQDALKNKKPVVALESTIISHGMPFPQNAQTAIEVEETIRKQGAVPATIAIIGGVMKVGLSKEEIELLGREGHNVTKVSRRDLPFVVAAGKNGATTVASTMIIAALAGIKVFATGGIGGVHRGAEHTFDISADLQELANTNVTVVCAGAKSILDLGLTTEYLETFGVPLIGYQTKALPAFFCRTSPFDVSIRLDSASEIARAMVVKWQSGLNGGLVVANPIPEQFAMPEHTINAAIDQAVAEAEAQGVIGKESTPFLLARVAELTGGDSLKSNIQLVFNNAILASEIAKEYQRLAG

SEQ ID NO: 56608 - protein, 563 aa, Escherichia coli
MKTLLIIDANLGQARAYMAKTLLGAAARKAKLEIIDNPNDAEMAIVLGDSIPNDSALNGKNVWLGDISRAVAHPELFLSEAKGHAKPYTAPVAATAPVAASGPKRVVAVTACPTGVAHTFMAAEAIETEAKKRGWWVKVETRGSVGAGNAITPEEVAAADLVIVAADIEVDLAKFAGKPMYRTSTGLALKKTAQELDKAVAEATPYEPAGKAQTATTESKKESAGAYRHLLTGVSYMLPMVVAGGLCIALSFAFGIEAFKEPGTLAAALMQIGGGSAFALMVPVLAGYIAFSIADRPGLTPGLIGGMLAVSTGSGFIGGIIAGFLAGYIAKLISTQLKLPQSMEALKPILIIPLISSLVVGLAMIYLIGKPVAGILEGLTHWLQTMGTANAVLLGAILGGMMCTDMGGPVNKAAYAFGVGLLSTQTYGPMAAIMAAGMVPPLAMGLATMVARRKFDKAQQEGGKAALVLGLCFISEGAIPFAARDPMRVLPCCIVGGALTGAISMAIGAKLMAPHGGLFVLLIPGAITPVLGYLVAIIAGTLVAGLAYAFLKRPEVDAVAKAA

SEQ ID NO: 56609 - protein, 312 aa, Escherichia coli
MSRRVATITLNPAYDLVGFCPEIERGEVNLVKTTGLHAAGKGINVAKVLKDLGIDVTVGGFLGKDNQDGFQQLFSELGIANRFQVVQGRTRINVKLTEKDGEVTDFNFSGFEVTPADWERFVTDSLSWLGQFDMVCVSGSLPSGVSPEAFTDWMTRLRSQCPCIIFDSSREALVAGLKAAPWLVKPNRRELEIWAGRKLPEMKDVIEAAHALREQGIAHVVISLGAEGALWVNASGEWIAKPPSVDVVSTVGAGDSMVGGLIYGLLMRESSEHTLRLATAVAALAVSQSNVGITDRPQLAAMMARVDLQPFN

SEQ ID NO: 56610 - protein, 376 aa, Escherichia coli
MFQLSVQDIHPGEKAGDKEEAIRQVAAALVQAGNVAEGYVNGMLAREQQTSTFLGNGIAIPHGTTDTRDQVLKTGVQVFQFPEGVTWGDGQVAYVAIGIAASSDEHLGLLRQLTHVLSDDSVAEQLKSATTAEELRALLMGEKQSEQLKLDNEMLTLDIVASDLLTLQALNAARLKEAGAVDATFVTKAINEQPLNLGQGIWLSDSAEGNLRSAIAVSRAANAFDVDGETAAMLVSVAMNDDQPIAVLKRLADLLLDNKADRLLKADAATLLALLTSDDAPTDDVLSAEFVVRNEHGLHARPGTMLVNTIKQFNSDITVTNLDGTGKPANGRSLMKVVALGVKKGHRLRFTAQGADAEQALKAIGDAIAAGLGEGA

SEQ ID NO: 56611 - protein, 231 aa, Escherichia coli
MRLDKFIAQQLGVSRAIAGREIRGNRVTVDGEIVRNAAFKLLPEHDVAYDGNPLAQQHGPRYFMLNKPQGYVCSTDDPDHPTVLYFLDEPVAWKLHAAGRLDIDTTGLVLMTDDGQWSHRITSPRHHCEKTYLVTLESPVADDTAEQFAKGVQLHNEKDLTKPAVLEVITPTQVRLTISEGRYHQVKRMFAAVGNHVVELHRERIGGITLDADLAPGEYRPLTEEEIASVV

SEQ ID NO: 56612 - protein, 586 aa, Escherichia coli [sequence omitted]

SEQ ID NO: 56613 - protein, 836 aa, Escherichia coli
MASTVEYGETVDGVVLEKDIQLVYGTANNTKINPGGEQHIKEFGVSNNTEINGGYQYIEMNGAAEYSVLNDGYQIVQMGGAANQTTLNNGVLQVYGAANDTTIKGGRLIVEKDGGAVFVAIEKGGLLEVKEGGFAFAVDQKAGGAIKTTTRAMEVFGTNRLGQFDIKNGIANNMLLENGGSLRVEENDFAYNTTVDSGGLLEVMDGGTVTGVDKKAGGKLIVSTNALEVSGPNSKGQFSIKDGVSKNYELDDGSGLIVMEDTQAIDTILDKHATMQSLGKDTGTKVQANAVYDLGRSYQNGSITYSSKAISENMVINNGRANVWAGTMVNVSVRGNDGILEVMKPQINYAPAMLVGKVVVSEGASFRTHGAVDTSKADVSLENSVWTIIADITTTNQNTLLNLANLAMSDANVIMMDEPVTRSSVTASAENFITLTTNTLSGNGNFYMRTDMANHQSDQLNVTGQATGDFKIFVTDTGASPAAGDSLTLVTTGGGDAAFTLGNAGGVVDIGTYEYTLLDNGNHSWSLAENRAQITPSTTDVLNMAAAQPLVFDAELDTVRERLGSVKGVSYDTAMWSSAINTRNNVTTDAGAGFEQTLTGLTLGIDSRFSREESSTIRGLIFGYSHSDIGFDRGGKGNIDSYTLGAYAGWEHQNGAYVDGVVKVDRFANTIHGKMSNGATAFGDYNSNGAGAHVESGFRWVDGLWSVRPYLAFTGFTTDGQDYTLSNGMRADVGNTRILRAEAGTAVSYHMDLQNGTTLEPWLKAAVRQEYADSNQVKVNDDGKFNNDVAGTSGVYQAGIRSSFTPTLSGHLSVSYGNGAGVESPWNTQAGVVWTF

SEQ ID NO: 56614 - protein, 338 aa, Escherichia coli; identical to SEQ ID NO: 43054

SEQ ID NO: 56615 - protein, 162 aa, Escherichia coli
MKTILPAVLFAAFATTSAWAAESVQPLEKIAPYPQAEKGMKRQVIQLTPQEDESTLKVELLIGQTLEVDCNLHRLGGKLENKTLEGWGYDYYVFDKVSSPVSTMMACPDGKKEKKFVTAYLGDAGMLRYNSKLPIVVYTPDNVDVKYRVWKAEEKIDNAVVR

SEQ ID NO: 56616 - protein, 548 aa, Escherichia coli [sequence omitted]

SEQ ID NO: 56617 - protein, 875 aa, Escherichia coli
MSDLAREITPVNIEEELKSSYLDYAMSVIVGRALPDVRDGLKPVHRRVLYAMNVLGNDWNKAYKKSARVVGDVIGKYHPHGDSAVYDTIVRMAQPFSLRYMLVDGQGNFGSIDGDSAAAMRYTEIRLAKIAHELMADLEKETVDFVDNYDGTEKIPDVMPTKIPNLLVNGSSGIAVGMATNIPPHNLTEVINGCLAYIDDEDISIEGLMEHIPGPDFPTAAIINGRRGIEEAYRTGRGKVYIRARAEVEVDAKTGRETIIVHEIPYQVNKARLIEKIAELVKEKRVEGISALRDESDKDGMRIVIEVKRDAVGEVVLNNLYSQTQLQVSFGINMVALHHGQPKIMNLKDIIAAFVRHRREVVTRRTIFELRKARDRAHILEALAVALANIDPIIELIRHAPTPAEAKTALVANPWQLGNVAAMLERAGDDAARPEWLEPEFGVRDGLYYLTEQQAQAILDLRLQKLTGLEHEKLLDEYKELLDQIAELLRILGSADRLMEVIREELELVREQFGDKRRTEITANSADINLEDLITQEDVVVTLSHQGYVKYQPLSEYEAQRRGGKGKSAARIKEEDFIDRLLVANTHDHILCFSSRGRVYSMKVYQLPEATRGARGRPIVNLLPLEQDERITAILPVTEFEEGVKVFMATANGTVKKTVLTEFNRLRTAGKVAIKLVDGDELIGVDLTSGEDEVMLFSAEGKVVRFKESSVRAMGCNTTGVRGIRLGEGDKVVSLIVPRGDGAILTATQNGYGKRTAVAEYPTKSRATKGVISIKVTERNGLVVGAVQVDDCDQIMMITDAGTLVRTRVSEISIVGRNTQGVILIRTAEDENVVGLQRVAEPVDEEDLDTIDGSAAEGDDEIAPEVDVDDEPEEE

SEQ ID NO: 56618 - protein, 613 aa, Escherichia coli
MNMLALTIILPLIGFVLLAFSRGRWSENVSAIVGVGSVGLAALVTAFIGVDFFANGEQTYSQPLWTWMSVGDFNIGFNLVLDGLSLTMLSVVTGVGFLIHMYASWYMRGEEGYSRFFAYTNLFIASMVVLVLADNLLLMYLGWEGVGLCSYLLIGFYYTDPKNGAAAMKAFVVTRVGDVFLAFALFILYNELGTLNFREMVELAPAHFADGNNMLMWATLMLLGGAVGKSAQLPLQTWLADAMAGPTPVSALIHAATMVTAGVYLIARTHGLFLMTPEVLHLVGIVGAVTLLLAGFAALVQTDIKRVLAYSTMSQIGYMFLALGVQAWDAAIFHLMTHAFFKALLFLASGSVILACHHEQNIFKMGGLRKSIPLVYLCFLVGGAALSALPLVTAGFFSKDEILAGAMANGHINLMVAGLVGAFMTSLYTFRMIFIVFHGKEQIHAHAVKGVTHSLPLIVLLILSTFVGALIVPPLQGVLPQTTELAHGSMLTLEITSGVVAVVGILLAAWLWLGKRTLVTSIANSAPGRLLGTWWYNAWGFDWLYDKVFVKPFLGIAWLLKRDPLNSMMNIPAVLSRFAGKGLLLSENGYLRWYVASMSIGAVVVLALLMVLR

SEQ ID NO: 56619 - protein, 445 aa, Escherichia coli
MKNIIRTPETHPLTWRLRDDKQPVWLDEYRSKNGYEGARKALTGLSPDEIVNQVKDAGLKGRGGAGFSTGLKWSLMPKDESMNIRYLLCNADEMEPGTYKDRLLMEQLPHLLVEGMLISAFALKAYRGYIFLRGEYIEAAVNLRRAIAEATEAGLLGKNIMGTGFDFELFVHTGAGRYICGEETALINSLEGRRANPRSKPPFPATSGAWGKPTCVNNVETLCNVPAILANGVEWYQNISKSKDAGTKLMGFSGRVKNPGLWELPFGTTAREILEDYAGGMRDGLKFKAWQPGGAGTDFLTEAHLDLPMEFESIGKAGSRLGTALAMAVDHEINMVSLVRNLEEFFARESCGWCTPCRDGLPWSVKILRALERGEGQPGDIETLEQLCRFLGPGKTFCAHAPGAVEPLQSAIKYFREEFEAGIKQPFSNTHLINGIQPNLLKERW

SEQ ID NO: 56620 - protein, 166 aa, Escherichia coli
MHENQQPQTEAFELSAAEREAIEHEMHHYEDPRAASIEALKIVQKQRGWVPDGAIHAIADVLGIPASDVEGVATFYSQIFRQPVGRHVIRYCDSVVCHINGYQGIQAALEKKLNIKPGQTTFDGRFTLLPTCCLGNCDKGPNMMIDEDTHAHLTPEAIPELLERYK

SEQ ID NO: 56621 - protein, 513 aa, Escherichia coli
MQGNICAMSAITESKPTRRWAMPDTLVIIFFVAILTSLATWVVPVGMFDSQEVQYQVDGQTKTRKVVDPHSFRILTNEAGEPEYHRVQLFTTGDERPGLMNFPFEGLTSGSKYGTAVGIIMFMLVIGGAFGIVMRTGTIDNGILALIRHTRGNEILFIPALFILFSLGGAVFGMGEEAVAFAIIIAPLMVRLGYDSITTVLVTYIATQIGFASSWMNPFCVVVAQGIAGVPVLSGSGLRIVVWVIATLIGLIFTMVYASRVKKNPLLSRVHESDRFFREKQADVEQRPFTFGDWLVLIVLTAVMVWVIWGVIVNAWFIPEIASQFFTMGLVIGIIGVVFRLNGMTVNTMASSFTEGARMMIAPALLVGFAKGILLLVGNGEAGDASVLNTILNSIANAISGLDNAVAAWFMLLFQAVFNFFVTSGSGQAALTMPLLAPLGDLVGVNRQVTVLAFQFGDGFSHIIYPTSASLMATLGVCRVDFRNWLKVGATLLGLLFIMSSVVVIGAQLMGYH

SEQ ID NO: 56622 - protein, 297 aa, Escherichia coli
MNIVITGGTGLIGRHLIPRLLELGHQITVVTRNPQKASSVLGPRVTLWQGLADQSNLNGVDAVINLAGEPIADKRWTHEQKERLCQSRWNITQKLVDLINASDTPPSVLISGSATGYYGDLGEVVVTEEEPPHNEFTHKLCARWEEIACRAQSDKTRVCLLRTGVVLAPDGGILGKMLPPFRLGLGGPIGSGRQYLAWIHIDDMVNGILWLLDNELRGPFNMVSPYPVRNEQFAHALGHALHRPAILRVPATAIRLLMGESSVLVLGGQRALPKRLEEAGFAFRWYDLEEALADVVR

SEQ ID NO: 56623 - protein, 361 aa, Escherichia coli
MAGNTIGQLFRVTTFGESHGLALGCIVDGVPPGIPLTEADLQHDLDRRRPGTSRYTTQRREPDQVKILSGVFEGVTTGTSIGLLIENTDQRSQDYSAIKDVFRPGHADYTYEQKYGLRDYRGGGRSSARETAMRVAAGAIAKKYLAEKFGIEIRGCLTQMGDIPLDIKDWSQVEQNPFFCPDPDKIDALDELMRALKKEGDSIGAKVTVVASGVPAGLGEPVFDRLDADIAHALMSINAVKGVEIGDGFDVVALRGSQNRDEITKDGFQSNHAGGILGGISSGQQIIAHMALKPTSSITVPGRTINRFGEEVEMITKGRHDPCVGIRAVPIAEAMLAIVLMDHLLRQRAQNADVKTDIPRW

SEQ ID NO: 56624 - protein, 578 aa, Escherichia coli
MPDHSLFRLRILPWCIALAMSGSYSSVWAEDDIQFDSRFLELKGDTKIDLKRFSSQGYVEPGKYNLQVQLNKQPLAEEYDIYWYAGEDDVSKSYACLTPELVAQFGLKEDVAKNLQWSHDGKCLKPGQLEGVEIKADLSQSALVISLPQAYLEYTWPDWDPPSRWDDGISGIIADYSITAQTRHEENGGDDSNEISGNGTVGVNLGPWRMRADWQTNYQHTRSNDDDDEFGGDDTQKKWEWSRYYAWRALPSLKAKLALGEDYLNSDIFDGFNYVGGSVSTDDQMLPPNLRGYAPDISGVAHTTAKVTVSQMGRVIYETQVPAGPFRIQDLGDSVSGTLHIRIEEQNGQVQEYDISTASMPYLTRPGQVRYKIMMGRPQEWGHHVEGGFFSGAEASWGIANGWSLYGGALGDENYQSAALGVGRDLSTFGAVAFDVTHSHTKLDKDTAYGKGSLDGNSFRVSYSKDFDQLNSRVTFAGYRFSEENFMTMSEYLDASDSEMVRTGNDKEMYTATYNQNFRDAGVSVYLNYTRHTYWDREEQTNYNIMLSHYFNMGSIRNMSVSLTGYRYEYDNRADKGM

SEQ ID NO: 56625 - protein, 146 aa, Escherichia coli
MNYIYSATTNSFYPLEMKEDYTQAGSWPDDAVEVDEQVYIEFSGLPPKGKIRIAGENGFPAWSEIPPPTHEEQIAAAELKKQQLINQANDYMNSKQWAGKAAIGRLKGEELAQYNLWLDYLDALELVDTSSAPDIEWPTPPAVQAR

SEQ ID NO: 56626 - protein, 244 aa, Escherichia coli
MKVIIVEDEFLAQQELSWLIKEHSQMEIVGTFDDGLDVLKFLQHNRVDAIFLDINIPSLDGVLLAQNISQFAHKPFIVFITAWKEHAVEAFELEAFDYILKPYQESRITGMLQKLEAAWQQQQTSSTPAATVTRENDTINLVKDERIIVTPINDIYYAEAHEKMTFVYTRRESYVMPMNITEFCSKLPPSHFFRCHRSFCVNLNKIREIEPWFNNTYILRLKDLDFEVPVSRSKVKEFRQLMHL

SEQ ID NO: 56627 - protein, 412 aa, Escherichia coli
MTNYRVESSSGRAARKMRLALMGPAFIAAIGYIDPGNFATNIQAGASFGYQLLWVVVWANLMAMLIQILSAKLGIATGKNLAEQIRDHYPRPVVWFYWVQAEIIAMATDLAEFIGAAIGFKLILGVSLLQGAVLTGIATFLILMLQRRGQKPLEKVIGGLLLFVAAAYIVELIFSQPNLAQLGKGMVIPSLPTSEAVFLAAGVLGATIMPHVIYLHSSLTQHLHGGSRQQRYSATKWDVAIAMTIAGFVNLAMMATAAAAFHFSGHTGVADLDEAYLTLQPLLSHAAATVFGLSLVAAGLSSTVVGTLAGQVVMQGFIRFHIPLWVRRTVTMLPSFIVILMGLDPTRILVMSQVLLSFGIALALVPLLIFTSDSKLMGDLVNSKRVKQTGWVIVVLVVALNIWLLVGTALGL

SEQ ID NO: 56628 - protein, 671 aa, Escherichia coli
MESIEQQLTELRTTLRHHEYLYHVMDAPEIPDAEYDRLMRELRELETKHPELITPDSPTQRVGAAPLAAFSQIRHEVPMLSLDNVFDEESFLAFNKRVQDRLKNNEKVTWCCELKLDGLAVSILYENGVLVSAATRGDGTTGEDITSNVRTIRAIPLKLHGENIPARLEVRGEVFLPQAGFEKINEDARRTGGKVFANPRNAAAGSLRQLDPRITAKRPLTFFCYGVGVLEGGELPDTHLGRLLQFKKWGLPVSDRVTLCESAEEVLAFYHKVEEDRPTLGFDIDGVVIKVNSLAQQEQLGFVARAPRWAVAFKFPAQEQMTFVRDVEFQVGRTGAITPVARLEPVHVAGVLVSNATLHNADEIERLGLRIGDKVVIRRAGDVIPQVVNVVLSERPEDTREVVFPTHCPVCGSDVERVEGEAVARCTGGLICGAQRKESLKHFVSRRAMDVDGMGDKIIDQLVEKEYVHTPADLFKLTAGKLTGLERMGPKSAQNVVNALEKAKETTFARFLYALGIREVGEATAAGLAAYFGTLEALEAASIEELQKVPDVGIVVASHVHNFFAEESNRNVISELLAEGVHWPAPIVINAEEIDSPFAGKTVVLTGSLSQMSRDDAKARLVELGAKVAGSVSKKTDLVIAGEAAGSKLAKAQELGIEVIDEAEMLRLLGS

SEQ ID NO: 56629 - protein, 323 aa, Escherichia coli
MSKIFEDNSLTIGHTPLVRLNRIGNGRILAKVESRNPSFSVKCRIGANMIWDAEKRGVLKPGVELVEPTSGNTGIALAYVAAARGYKLTLTMPETMSIERRKLLKALGANLVLTEGAKGMKGAIQKAEEIVASNPEKYLLLQQFSNPANPEIHEKTTGPEIWEDTDGQVDVFIAGVGTGGTLTGVSRYIKGTKGKTDLISVAVEPTDSPVIAQALAGEEIKPGPHKIQGIGAGFIPANLDLKLVDKVIGITNEEAISTARRLMEEEGILAGISSGAAVAAALKLQEDESFTNKNIVVILPSSGERYLSTALFADLFTEKELQQ

SEQ ID NO: 56630 - protein, 575 aa, Escherichia coli
MISGILASPGIAFGKALLLKEDEIVIDRKKISADQVDQEVERFLSGRAKASAQLETIKTKAGETFGEEKEAIFEGHIMLLEDEELEQEIIALIKDKHMTADAAAHEVIEGQASALEELDDEYLKERAADVRDIGKRLLRNILGLKIIDLSAIQDEVILVAADLTPSETAQLNLKKVLGFITDAGGRTSHTSIMARSLELPAIVGTGSVTSQVKNDDYLILDAVNNQVYVNPTNEVIDKMRAVQEQVASEKAELAKLKDLPAITLDGHQVEVCANIGTVRDVEGAERNGAEGVGLYRTEFLFMDRDALPTEEEQFAAYKAVAEACGSQAVIVRTMDIGGDKELPYMNFPKEENPFLGWRAIRIAMDRREILRDQLRAILRASAFGKLRIMFPMIISVEEVRALRKEIEIYKQELRDEGKAFDESIEIGVMVETPAAATIARHLAKEVDFFSIGTNDLTQYTLAVDRGNDMISHLYQPMSPSVLNLIKQVIDASHAEGKWTGMCGELAGDERATLLLLGMGLDEFSMSAISIPRIKKIIRNTNFEDAKVLAEQALAQPTTDELMTLVNKFIEEKTIC

SEQ ID NO: 56631 - protein, 298 aa, Escherichia coli
MQFEKMITEGSNTASAEIDRVSTLEMCRIINDEDKTVPLAVERVLPDIAAAIDVIHAQVSGGGRLIYLGAGTSGRLGILDASECPPTYGVKPGLVVGLIAGGEYAIQHAVEGAEDSREGGVNDLKNINLTAQDVVVGIAASGRTPYVIAGLEYARQLGCRTVGISCNPGSAVSTTAEFAITPIVGAEVVTGSSRMKAGTAQKLVLNMLSTGLMIKSGKVFGNLMVDVVATNEKLHVRQVNIVKNATGCSAEQAEAALIACERNCKTAIVMVLKNLDAAEAKKRLDQHGGFIRQVLDKE

SEQ ID NO: 56632 - protein, 474 aa, Escherichia coli
MAKEISSELLNTILTRVGGPGNIASCGNCMTRLRLGVHDSSLVDPNIKTLEGVKGVILTSDQVQVVFGPGKAHRAAKAMSELLGEAPVQDAAEIAAQNKRQLKAKQTSGVQQFLAKFATIFTPLIPGFIAAGLLLGIATLIATVMHVPADAQGTLPDALNFMKVFSKGLFTFLVILVGYNAAQAFGGTGVNGAIIAALFLLGYNPAATTGYYAGFHDFFGLPIDPRGNIIGVLIAAWACARIEGMVRRFMPDDLDMLLTSLITLLITATLAYLIIMPLGGWLFEGMSWLFMHLNSNPFGCAVLAGLFLIAVVFGVHQGFIPVYLALMDSQGFNSLFPILSMAGAGQVGAALALYWRAQPHSALRSQVRGAIIPGLLGVGEPLIYGVTLPRMKPFVTACLGGAAGGLFIGLIAWWGLPMGLNSAFGPSGLVALPLMTSAQGILPAMAVYAGGILVAWVCGFIFTTLFGCRNVNLD

SEQ ID NO: 56633 - protein, 467 aa, Escherichia coli
MKNANHRFFLRERLMKLKTTLFGNVYQFKDVKEVLAKANELRSGDVLAGVAAASSQERVAAKQVLSEMTVADIRNNPVIAYEDDCVTRLIQDDVNETAYNQIKNWSISELREYVLSDETSVDDIAFTRKGLTSEVVAAVAKICSNADLIYGAKKMPVIKKANTTIGIPGTFSARLQPNDTRDDVQSIAAQIYEGLSFGVGDAVIGVNPVTDDVENLSRVLDTIYGVIDKFNIPTQGCVLAHVTTQIEAIRRGAPGGLIFQSICGSEKGLKEFGVELAMLDEARAVGAEFNRIAGENCLYFETGQGSALSAGANFGADQVTMEARNYGLARHYDPFIVNTVVGFIGPEYLYNDRQIIRAGLEDHFMGKLSGISMGCDCCYTNHADADQNLNENLMILLATAGCNYIMGMPLGDDIMLNYQTTAFHDTATVRQLLNLRPSPEFERWLESMGIMANGRLTKRAGDPSLFF

SEQ ID NO: 56634 - protein, 659 aa, Escherichia coli
MNRFIMANSQQCLGCHACEIACVMAHNDEQHVLSQHHFHPRITVIKHQQQRSAVTCHHCEDAPCARSCPNGAISHVDDSIQVNQQKCIGCKSCVVACPFGTMQIVLTPVAAGKVKATAHKCDLCAGRENGPACVENCPADALQLVTDVALSGMAKSRRLRTARQEHQPWHASTAAQEMPVMSKVEQMQATPARGEPDKLAIEARKTGFDEIYLPFRADQAQREASRCLKCGEHSVCEWTCPLHNHIPQWIELVKAGNIDAAVELSHQTNTLPEITGRVCPQDRLCEGACTIRDEHGAVTIGNIERYISDQALAKGWRPDLSHVTKVDKRVAIIGAGPAGLACADVLTRNGVGVTVYDRHPEIGGLLTFGIPSFKLDKSLLARRREIFSAMGIHFELNCEVGKDVSLDSLLEQYDAVFVGVGTYRSMKAGLPNEDAPGVYDALPFLIANTKQVMGLEELPEEPFINTAGLNVVVLGGGDTAMDCVRTALRHGASNVTCAYRRDEANMPGSKKEVKNAREEGANFEFNVQPVALELNEQGHVCGIRFLRTRLGEPDAQGRRRPVPVEGSEFVMPADAVIMAFGFNPHGMPWLESHGVTVDKWGRIIADVESQYRYQTTNPKIFAGGDAVRGADLVVTAMAEGRHAAQGIIDWLGVKSVKSH

SEQ ID NO: 56635 - protein, 217 aa, Escherichia coli
MAAPQRRKSMKIVEVKHPLVKHKLGLMREQDISTKRFRELASEVGSLLTYEATADLETEKVTIEGWNGPVEIDQIKGKKITVVPILRAGLGMMDGVLENVPSARISVVGMYRNEETLEPVPYFQKLVSNIDERMALIVDPMLATGGSVIATIDLLKKAGCSSIKVLVLVAAPEGIAALEKAHPDVELYTASIDQGLNEHGYIIPGLGDAGDKIFGTK

SEQ ID NO: 56636 - protein, 525 aa, Escherichia coli
MTENIHKHRILILDFGSQYTQLVARRVRELGVYCELWAWDVTEAQIRDFNPSGIILSGGPESTTEENSPRAPQYVFEAGVPVFGVCYGMQTMAMQLGGHVEASNEREFGYAQVEVVNDSALVRGIEDALTADGKPLLDVWMSHGDKVTAIPSDFITVASTESCPFAIMANEEKRFYGVQFHPEVTHTRQGMRMLERFVRDICQCEALWTPAKIIDDAVARIREQVGDDKVILGLSGGVDSSVTAMLLHRAIGKNLTCVFVDNGLLRLNEAEQVLDMFGDHFGLNIVHVPAEDRFLSALAGENDPEAKRKIIGRVFVEVFDEEALKLEDVKWLAQGTIYPDVIESAASATGKAHVIKSHHNVGGLPKEMKMGLVEPLKELFKDEVRKIGLELGLPYDMLYRHPFPGPGLGVRVLGEVKKEYCDLLRRADAIFIEELRKADLYDKVSQAFTVFLPVRSVGVMGDGRKYDWVVSLRAVETIDFMTAHWAHLPYDFLGRVSNRIINEVNGISRVVYDISGKPPATIEWE

SEQ ID NO: 56637 - protein, 456 aa, Escherichia coli
MLPSQSPAIFTVSRLNQTVRLLLEHEMGQVWISGEISNFTQPASGHWYFTLKDDTAQVRCAMFRNSNRRVTFRPQHGQQVLVRANITLYEPRGDYQIIVESMQPAGEGLLQQKYEQLKAKLQAEGLFDQQYKKPLPSPAHCVGVITSKTGAALHDILHVLKRRDPSLPVIIYPAAVQGDDAPGQIVRAIELANQRNECDVLIVGRGGGSLEDLWSFNDERVARAIFTSRIPVVSAVGHETDVTIADFVADLRAPTPSAAAEVVSRNQQELLRQVQSTRQRLEMAMDYYLANRTRRFTQIHHRLQQQHPQLRLARQQTMLERLQKRMSFALENQLKRTGQQQQRLTQRLNQQNPQPKIHRAQTRIQQLEYRLAETLRAQLSATRERFGNAVTHLEAVSPLSTLARGYSVTTATDGNVLKKVKQVKAGEMLTTRLEDGWIESEVKNIQPVKKSRKKVH

SEQ ID NO: 56638 - protein, 424 aa, Escherichia coli
MAKNIQAIRGMNDYLPGETAIWQRIEGTLKNVLGSYGYSEIRLPIVEQTPLFKRAIGEVTDVVEKEMYTFEDRNGDSLTLRPEGTAGCVRAGIEHGLLYNQEQRLWYIGPMFRHERPQKGRYRQFHQLGCEVFGLQGPDIDAELIMLTARWWRALGISEHVTLELNSIGSLEARANYRDALVAFLEQHKEKLDEDCKRRMYTNPLRVLDSKNPEVQALLNDAPALGDYLDEESREHFAGLCKLLESAGIAYTVNQRLVRGLDYYNRTVFEWVTNSLGSQGTVCAGGRYDGLVEQLGGRATPAVGFAMGLERLVLLVQAVNPEFKADPVVDIYLVASGADTQSAAMALAERLRDELPGVKLMTNHGGGNFKKQFARADKWGARVAVVLGESEVANGTAVVKDLRSGEQTAVAQDSVAAHLRTLLG

SEQ ID NO: 56639 - protein, 128 aa, Escherichia coli
MAYSEKVIDHYENPRNVGSFDNNDENVGSGMVGAPACGDVMKLQIKVNDEGIIEDARFKTYGCGSAIASSSLVTEWVKGKSLDEAQAIKNTDIAEELELPPVKIHCSILAEDAIKAAIADYKSKREAK

SEQ ID NO: 56640 - protein, 162 aa, Escherichia coli
MRLTSKGRYAVTAMLDVALNSEAGPVPLADISERQGISLSYLEQLFSRLRKNGLVSSVRGPGGGYLLGKDASSIAVGEVISAVDESVDATRCQGKGGCQGGDKCLTHALWRDLSDRLTGFLNNITLGELVNNQEVLDVSGRQHTHDAPRTRTQDAIDVKLRA

SEQ ID NO: 56641 - protein, 417 aa, Escherichia coli
MLKREMNIADYDAELWQAMEQEKVRQEEHIELIASENYTSPRVMQAQGSQLTNKYAEGYPGKRYYGGCEYVDIVEQLAIDRAKELFGADYANVQPHSGSQANFAVYTALLEPGDTVLGMNLAHGGHLTHGSPVNFSGKLYNIVPYGIDATGHIDYADLEKQAKEHKPKMIIGGFSAYSGVVDWAKMREIADSIGAYLFVDMAHVAGLVAAGVYPNPVPHAHVVTTTTHKTLAGPRGGLILAKGGSEELYKKLNSAVFPGGQGGPLMHVIAGKAVALKEAMEPEFKTYQQQVAKNAKAMVEVFLERGYKVVSGGTDNHLFLVDLVDKNLTGKEADAALGRANITVNKNSVPNDPKSPFVTSGIRVGTPAITRRGFKEAEAKELAGWMCDVLDSINDEAVIERIKGKVLDICARYPVYA

SEQ ID NO: 56642 - protein, 472 aa, Escherichia coli
MSTIHTPLTYNEINGKPFGLDYELAKQFADYLGVKLKVTVRQNISQLFDDLDNGNADLLAAGLVYNSERVKNYQPGPTYYSVSQQLVYKVGQYRPRTLGNLTAEQLTVAPGHVVVNDLQTLKETKFPELSWKVDDKKGSAELMEDVIEGKLDYTIADSVAISLFQRVHPELAVALDITDEQPVTWFSPLDGDNTLSAALLDFFNEMNEDGTLARIEEKYLGHGDDFDYVDTRTFLRAVDAVLPQLKPLFEKYAEEIDWRLLAAIAYQESHWDAQATSPTGVRGMMMLTKNTAQSLGITDRTDAEQSISGGVRYLQDMMSKVPESVPENERIWFALAAYNMGYAHMLDARALTAKTKGNPDSWADVKQRLPLLSQKPYYSKLTYGYARGHEAYAYVENIRKYQISLVGYLQEKEKQATEAAMQLAQDYPAVSPTELGKEKFPFLSFLSQSSSNYLTHSPSLLFSRKGSEEKQN

SEQ ID NO: 56643 - protein, 126 aa, Escherichia coli
MAILGLGTDIVEIARIEAVIARSGDRLARRVLSDNEWAIWKTHHQPVRFLAKRFAVKEAAAKAFGTGIRNGLAFNQFEVFNDELGKPRLRLWGEALKLAEKLGVANMHVTLADERHYACATVIIES

SEQ ID NO: 56644 - protein, 301 aa, Escherichia coli
MSIDKSYCGFIAIVGRPNVGKSTLLNKLLGQKISITSRKAQTTRHRIVGIHTEGAYQAIYVDTPGLHMEEKRAINRLMNKAASSSIGDVELVIFVVEGTRWTPDDEMVLNKLREGKAPVILAVNKVDNVQEKADLLPHLQFLASQMNFLDIVPISAETGLNVDTIAAIVRKHLPEATHHFPEDYITDRSQRFMASEIIREKLMRFLGAELPYSVTVEIERFVSNERGGYDINGLILVEREGQKKMVIGNKGAKIKTIGIEARKDMQEMFEAPVHLELWVKVKSGWADDERALRSLGYVDDL

SEQ ID NO: 56645 - protein, 324 aa, Escherichia coli
MANMFALILVIATLVTGILWCVDKFFFAPKRRERQAAAQAAAGDSLDKATLKKVAPKPGWLETGASVFPVLAIVLIVRSFIYEPFQIPSGSMMPTLLIGDFILVEKFAYGIKDPIYQKTLIETGHPKRGDIVVFKYPEDPKLDYIKRAVGLPGDKVTYDPVSKELTIQPGCSSGQACENALPVTYSNVEPSDFVQTFSRRNGGEATSGFFEVPKNETKENGIRLSERKETLGDVTHRILTVPIAQDQVGMYYQQPGQQLATWIVPPGQYFMMGDNRDNSADSRYWGFVPEANLVGRATAIWMSFDKQEGEWPTGLRLSRIGGIH

SEQ ID NO: 56646 - protein, 857 aa, Escherichia coli
MRLDRLTNKFQLALADAQSLALGHDNQFIEPLHLMSALLNQEGGSVSPLLTSAGINAGQLRTDINQALNRLPQVEGTGGDVQPSQDLVRVLNLCDKLAQKRGDNFISSELFVLAALESRGTLADILKAAGATTANITQAIEQMRGGESVNDQGAEDQRQALKKYTIDLTERAEQGKLDPVIGRDEEIRRTIQVLQRRTKNNPVLIGEPGVGKTAIVEGLAQRIINGEVPEGLKGRRVLALDMGALVAGAKYRGEFEERLKGVLNDLAKQEGNVILFIDELHTMVGAGKADGAMDAGNMLKPALARGELHCVGATTLDEYRQYIEKDAALERRFQKVFVAEPSVEDTIAILRGLKERYELHHHVQITDPAIVAAATLSHRYIADRQLPDKAIDLIDEAASSIRMQIDSKPEELDRLDRRIIQLKLEQQALMKESDEASKKRLDMLNEELSDKERQYSELEEEWKAEKASLSGTQTIKAELEQAKIAIEQARRVGDLARMSELQYGKIPELEKQLEAATQLEGKTMRLLRNKVTDAEIAEVLARWTGIPVSRMMESEREKLLRMEQELHHRVIGQNEAVDAVSNAIRRSRAGLADPNRPIGSFLFLGPTGVGKTELCKALANFMFDSDEAMVRIDMSEFMEKHSVSRLVGAPPGYVGYEEGGYLTEAVRRRPYSVILLDEVEKAHPDVFNILLQVLDDGRLTDGQGRTVDFRNTVVIMTSNLGSDLIQERFGELDYAHMKELVLGVVSHNFRPEFINRIDEVVVFHPLGEQHIASIAQIQLKRLYKRLEERGYEIHISDEALKLLSENGYDPVYGARPLKRAIQQQIENPLAQQILSGELVPGKVIRLEVNEDRIVAVQ

SEQ ID NO: 56647 - protein, 288 aa, Escherichia coli
MQRLEQRSPDAILLLFLIAQTVDITMPVFALLALVAYSVSLALIVPGLLQKNGGWRRMAIISAVIALVCHAIALEARILPDGDSGQNLSLLNVGSLVSLMICTVMTIVASRNRGWLLLPIVYAFALINLALATFMPNEYITHLEATPGMLVHIGLSLFSYATLIIAALYALQLAWIDYQLKNKKLAFNQEMPPLMSIERKMFHITQIGVVLLTLTLCTGLFYMHNLFSMENIDKAVLSIVAWFVYIVLLWGHYHEGWRGRRVVWFNVAGAVILTLAYFGSRIVQQLIS

SEQ ID NO: 56648 - protein, 160 aa, Escherichia coli
MTKKKAHKPGSATIALNKRARHEYFIEEEFEAGLALQGWEVKSLRAGKANISDSYVLLRDGEAFLFGANITPMAVASTHVVCDPTRTRKLLLNQRELDSLYGRVNREGYTVVALSLYWKNAWCKVKIGVAKGKKQHDKRSDIKEREWQVDKARIMKNAHR

SEQ ID NO: 56649 - protein, 160 aa, Escherichia coli
MMEQSLIPQTPVLPLTAQRTVKRALTLLDRHLRETGVAFTSTQAARDWLKLKMAGLEREEFMMLYLNQQNQLIAHETLFAGSISSTEVHPREVVKRALYFNAAAVILAHNHPSGDTTPSQADKTITQRLVQALQLVDIRVPDHLIVGGRQIYSFAEHGLL

SEQ ID NO: 56650 - protein, 482 aa, Escherichia coli
MKLNDSNLFRQQALINGEWLDANNGEAIDVTNPANGDKLGSVPKMGADETRAAIDAANRALPAWRALTAKERATILRNWFNLMMEHQDDLARLMTLEQGKPLAEAKGEISYAASFIEWFAEEGKRIYGDTIPGHQADKRLIVIKQPIGVTAAITPWNFPAAMITRKAGPALAAGCTMVLKPASQTPFSALALAELAIRAGVPAGVFNVVTGSAGAVGNELTSNPLVRKLSFTGSTEIGRQLMEQCAKDIKKVSLELGGNAPFIVFDDADLDKAVEGALASKFRNAGQTCVCANRLYVQDGVYDRFAEKLQQAVSKLHIGDGLDNGVTIGPLIDEKAVAKVEEHIADALEKGARVVCGGKAHERGGNFFQPTILVDVPANAKVSKEETFGPLAPLFRFKDEADVIAQANDTEFGLAAYFYARDLSRVFRVGEALEYGIVGINTGIISNEVAPFGGIKASGLGREGSKYGIEDYLEIKYMCIGL

SEQ ID NO: 56651 - protein, 466 aa, Escherichia coli
MGQSSQPHELGGGLKSRHVTMLSIAGVIGASLFVGSSVAIAEAGPAVLLAYLFAGLLVVMIMRMLAEMAVATPDTGSFSTYADKAIGRWAGYTIGWLYWWFWVLVIPLEANIAAMILHSWVPGIPIWLFSLVITLALTGSNLLSVKNYGEFEFWLALCKVIAILAFIFLGAVAISGFYPYAEVSGISRLWDSGGFMPNGFGAVLSAMLITMFSFMGAEIVTIAAAESDTPEKHIVRATNSVIWRISIFYLCSIFVVVALIPWNMPGLKAVGSYRSVLELLNIPHAKLIMDCVILLSVTSCLNSALYTASRMLYSLSRRGDAPAVMGKINRSKTPYVAVLLSTGAAFLTVVVNYYAPAKVFKFLIDSSGAIALLVYLVIAVSQLRMRKILRAEGSEIRLRMWLYPWLTWLVIGFITFVLVVMLFRPAQQLEVISTGLLAIGIICTVPIMARWKKLVLWQKTPVHNTR

SEQ ID NO: 56652 - protein, 714 aa, Escherichia coli
MATTTAECLTQETMDYHALNAMLNLYDSAGRIQFDKDRQAVDAFIATHVRPNSVTFSSQQQRLNWLVNEGYYDESVLNRYSRDFVITLFTHAHTSGFRFQTFLGAWKFYTSYTLKTFDGKRYLEDFADRVTMVALTLAQGDETLALQLTDEMLSGRFQPATPTFLNCGKQQRGELVSCFLLRIEDNMESIGRAVNSALQLSKRGGGVAFLLSNLREAGAPIKRIENQSSGVIPVMKMLEDAFSYANQLGARQGAGAVYLHAHHPDILRFLDTKRENADEKIRIKTLSLGVVIPDITFHLAKENAQMALFSPYDVERVYGKPFADVAISQHYDELVADERIRKKYLNARDFFQRLAEIQFESGYPYIMYEDTVNRANPIAGRINMSNLCSEILQVNSASEYDENLDYTRTGHDISCNLGSLNIAHTMDSPDFARTVETAVRGLTAVSDMSHIRSVPSIEAGNAASHAIGLGQMNLHGYLAREGIAYGSPEALDFTNLYFYAITWHALRTSMLLARERGETFAGFKQSRYASGEYFSQYLQGNWQPKTAKVGELFTRSGITLPTREMWAQLRDDVMRYGIYNQNLQAVPPTGSISYINHATSSIHPIVAKVEIRKEGKTGRVYYPAPFMTNENLALYQDAYEIGAEKIIDTYAEATRHVDQGLSLTLFFPDTATTRDINKAQIYAWRKGIKTLYYIRLRQMALEGTEIEGCVSCAL

SEQ ID NO: 56653 - protein, 319 aa, Escherichia coli
MKLSRISAINWNKISDDKDLEVWNRLTSNFWLPEKVPLSNDIPAWQTLTVVEQQLTMRVFTGLTLLDTLQNVIGAPSLMPDALTPHEEAVLSNISFMEAVHARSYSSIFSTLCQTKDVDAAYAWSEENAPLQRKAQIIQQHYRGDDPLKKKIASVFLESFLFYSGFWLPMYFSSRGKLTNTADLIRLIIRDEAVHGYYIGYKYQKNMEKISLGQREELKSFAFDLLLELYDNELQYTDELYAETPWADDVKAFLCYNANKALMNLGYEPLFPAEMAEVNPAILAALSPNADENHDFFSGSGSSYVMGKAVETEDEDWNF

SEQ ID NO: 56654 - protein, 176 aa, Escherichia coli
MDSSFTPIEQMLKFRASRHEDFPYQEILLTRLCMHMQSKLLENRNKMLKAQGINETLFMALITLESQENHSIQPSELSCALGSSRTNATRIADELEKRGWIERRESDNDRRCLHLQLTEKGHEFLREVLPPQHNCLHQLWSALSTTEKDQLEQITRKLLSRLDQMEQDGVVLEAMS

SEQ ID NO: 56655 - protein, 290 aa, Escherichia coli
MCTTCGCGEGNLYIEGDEHNPHSAFRSAPFAPAARPKMKITGIKAPEFTPSQTEEGDLHYGHGEAGTHAPGMSQRRMLEVEIDVLDKNNRLAERNRARFAARKQLVLNLVSSPGSGKTTLLTETLMRLKDSVPCAVIEGDQQTVNDAARIRATGTPAIQVNTGKGCHLDAQMIADAAPRLPLDDNGILFIENVGNLVCPASFDLGEKHKVAVLSVTEGEDKPLKYPHMFAAASLMLLNKVDLLPYLNFDVEKCIACAREVNPEIEIILISATSGEGMDQWLNWLETQRCA

SEQ ID NO: 56656 - protein, 853 aa, Escherichia coli
MSAIENFDAHTPMMQQYLRLKAQHPEILLFYRMGDFYELFYDDAKRASQLLDISLTKRGASAGEPIPMAGIPYHAVENYLAKLVNQGESVAICEQIGDPATSKGPVERKVVRIVTPGTISDEALLQERQDNLLAAIWQDSKGFGYATLDISSGRFRLSEPADRETMAAELQRTNPAELLYAEDFAEMSLIEGRRGLRRRPLWEFEIDTARQQLNLQFGTRDLVGFGVENAPRGLCAAGCLLQYAKDTQRTTLPHIRSITMEREQDSIIMDAATRRNLEITQNLAGGAENTLASVLDCTVTPMGSRMLKRWLHMPVRDTRVLLERQQTIGALQDFTAGLQPVLRQVGDLERILARLALRTARPRDLARMRHAFQQLPELRAQLETVDSAPVQALREKMGEFAELRDLLERAIIDTPPVLVRDGGVIASGYNEELDEWRALADGATDYLERLEVRERERTGLDTLKVGFNAVHGYYIQISRGQSHLAPINYMRRQTLKNAERYIIPELKEYEDKVLTSKGKALALEKQLYEELFDLLLPHLEALQQSASALAELDVLVNLAERAYTLNYTCPTFIDKPGIRITEGRHPVVEQVLNEPFIANPLNLSPQRRMLIITGPNMGGKSTYMRQTALIALMAYIGSYVPAQKVEIGPIDRIFTRVGAADDLASGRSTFMVEMTETANILHNATEYSLVLMDEIGRGTSTYDGLSLAWACAENLANKIKALTLFATHYFELTQLPEKMEGVANVHLDALEHGDTIAFMHSVQDGAASKSYGLAVAALAGVPKEVIKRARQKLRELESISPNAAATQVDGTQMSLLSVPEETSPAVEALENLDPDSLTPRQALEWIYRLKSLV

SEQ ID NO: 56657 - protein, 159 aa, Escherichia coli
MRIGHGFDVHAFGGEGPIIIGGVRIPYEKGLLAHSDGDVALHALTDALLGAAALGDIGKLFPDTDPAFKGADSRELLREAWRRIQAKGYTLGNVDVTIIAQAPKMLPHIPQMRVFIAEDLGCHMDDVNVKATTTEKLGFTGRGEGIACEAVALLIKATK

SEQ ID NO: 56658 - protein, 236 aa, Escherichia coli
MATTHLDVCAVVPAAGFGRRMQTECPKQYLSIGNQTILEHSVHALLAHPRVKRVVIAISPGDSRFAQLPLANHPQITVVDGGDERADSVLAGLKAAGDAQWVLVHDAARPCLHQDDLARLLALSETSRTGGILAAPVRDTMKRAEPGKNAIAHTVDRNGLWHALTPQFFPRELLHDCLTRALNEGATITDEASALEYCGFHPQLVEGRADNIKVTRPEDLALAEFYLTRTIHQENT

SEQ ID NO: 56659 - protein, 313 aa, Escherichia coli
MITNIKLPMPPSIYLSRFNEKFIMRYFILMFTFVCSFVAAQPTIVPQLQQQVTDLTSSLNSQEKKELTHKLESIFNNTQVQIAVLIVPTTKDETIEQYATRVFDNWRLGDAKRNDGILIVVAWSDRTVRIQVGYGLEEKVTDALAGDIIRSNMIPAFKQQKLAKGLELAINALNNQLTSQHQYPTNPSESESASSSDHYYFAIFWVFAVMFFPFWFFHQGSNFCRACKSGVCISAIYLLDLFLFSDKIFSIAVFSFFFTFTIFMVFTCLCVLQKRASGRSYHSDNSGSAGGSDSGGFSGGGGSSGGGGASGRW

SEQ ID NO: 56660 - protein, 432 aa, Escherichia coli
MSKIVKIIGREIIDSRGNPTVEAEVHLEGGFVGMAAAPSGASTGSREALELRDGDKSRFLGKGVTKAVAAVNGPIAQALIGKDAKDQAGIDKIMIDLDGTENKSKFGANAILAVSLANAKAAAAAKGMPLYEHIAELNGTPGKYSMPVPMMNIINGGEHADNNVDIQEFMIQPVGAKTVKEAIRMGSEVFHHLAKVLKAKGMNTAVGDEGGYAPNLGSNAEALAVIAEAVKAAGYELGKDITLAMDCAASEFYKDGKYVLAGEGNKAFTSEEFTHFLEELTKQYPIVSIEDGLDESDWDGFAYQTKVLGDKIQLVGDDLFVTNTKILKEGIEKGIANSILIKFNQIGSLTETLAAIKMAKDAGYTAVISHRSGETEDATIADLAVGTAAGQIKTGSMSRSDRVAKYNQLIRIEEALGEKAPYNGRKEIKGQA

SEQ ID NO: 56661 - protein, 545 aa, Escherichia coli
MTTNYIFVTGGVVSSLGKGIAAASLAAILEARGLNVTIMKLDPYINVDPGTMSPIQHGEVFVTEDGAETDLDLGHYERFIRTKMSRRNNFTTGRIYSDVLRKERRGDYLGATVQVIPHITNAIKERVLEGGEGHDVVLVEIGGTVGDIESLPFLEAIRQMAVEIGREHTLFMHLTLVPYMAASGEVKTKPTQHSVKELLSIGIQPDILICRSDRAVPANERAKIALFCNVPEKAVISLKDVDSIYKIPGLLKSQGLDDYICKRFSLNCPEANLSEWEQVIFEEANPVSEVTIGMVGKYIELPDAYKSVIEALKHGGLKNRVSVNIKLIDSQDVETRGVEILKGLDAILVPGGFGYRGVEGMITTARFARENNIPYLGICLGMQVALIDYARHVANMENANSTEFVPDCKYPVVALITEWRDENGNVEVRSEKSDLGGTMRLGAQQCQLVDDSLVRQLYNAPTIVERHRHRYEVNNMLLKQIEDAGLRVAGRSGDDQLVEIIEVPNHPWFVACQFHPEFTSTPRDGHPLFAGFVKAASEFQKRQAK

SEQ ID NO: 56662 - protein, 263 aa, Escherichia coli
MNQIDRLLTIMQRLRDPENGCPWDKEQTFATIAPYTLEETYEVLDAIAREDFDDLRGELGDLLFQVVFYAQMAQEEGRFDFNDICAAISDKLERRHPHVFADSSAENSSEVLARWEQIKTEERAQKAQHSALDDIPRSLPALMRAQKIQKRCANVGFDWTTLGPVVDKVYEEIDEVMYEARQAVVDQAKLEEEMGDLLFATVNLARHLGTKAEIALQKANEKFERRFREVERIVAARGLEMTGVDLETMEEVWQQVKRQEIDL

SEQ ID NO: 56663 - protein, 744 aa, Escherichia coli
MVAVRSAHINKAGEFDPEKWIASLGITSQKSCECLAETWAYCLQQTQGHPDASLLLWRGVEMVEILSTLSMDIDTLRAALLFPLADANVVSEDVLRESVGKSVVNLIHGVRDMAAIRQLKATHTDSVSSEQVDNVRRMLLAMVDDFRCVVIKLAERIAHLREVKDAPEDERVLAAKECTNIYAPLANRLGIGQLKWELEDYCFRYLHPTEYKRIAKLLHERRLDREHYIEEFVGHLRAEMKAEGVKAEVYGRPKHIYSIWRKMQKKNLAFDELFDVRAVRIVAERLQDCYAALGIVHTHYRHLPDEFDDYVANPKPNGYQSIHTVVLGPGGKTVEIQIRTKQMHEDAELGVAAHWKYKEGAAAGGARSGHEDRIAWLRKLIAWQEEMADSGEMLDEVRSQVFDDRVYVFTPKGDVVDLPAGSTPLDFAYHIHSDVGHRCIGAKIGGRIVPFTYQLQMGDQIEIITQKQPNPSRDWLNPNLGYVTTSRGRSKIHAWFRKQDRDKNILAGRQILDDELEHLGISLKEAEKHLLPRYNFNDVDELLAAIGGGDIRLNQMVNFLQSQFNKPSAEEQDAAALKQLQQKSYTPQNRSKDNGRVVVEGVGNLMHHIARCCQPIPGDEIVGFITQGRGISVHRADCEQLAELRSHAPERIVDAVWGESYSAGYSLVVRVVANDRSGLLRDITTILANEKVNVLGVASRSDTKQQLATIDMTIEIYNLQVLGRVLGKLNQVPDVIDARRLHGS

SEQ ID NO: 56664 - protein, 447 aa, Escherichia coli
MTDYASFAKVSGQISRLLVTQLRFLLLGRGMSGSNTAISRRRLLQGAGAMWLLSVSQVSLAAVSQVVAVRVWPASSYTRVTVESNRQLKYKQFALSNPERVVVDIEDVNLNSVLKGMAAQIRADDPFIKSARVGQFDPQTVRMVFELKQNVKPQLFALAPVAGFKERLVMDLYPANAQDMQDPLLALLEDYNKGDLEKQVPPAQSGPQPGKAGRDRPIVIMLDPGHGGEDSGAVGKYKTREKDVVLQIARRLRSLIEKEGNMKVYMTRNEDIFIPLQVRVAKAQKQRADLFVSIHADAFTSRQPSGSSVFALSTKGATSTAAKYLAQTQNASDLIGGVSKSGDRYVDHTMFDMVQSLTIADSLKFGKAVLNKLGKINKLHKNQVEQAGFAVLKAPDIPSILVETAFISNVEEERKLKTATFQQEVAESILAGIKAYFADGATLARRG

SEQ ID NO: 56665 - protein, 608 aa, Escherichia coli
MKLQKQLLEAVEHKQLRPLDVQFALTVAGDEHPAVTLAAALLSHDAGEGHVCLPLSRLENNEASHPLLATCVSEIGELQNWEECLLASQAVSRGDEPTPMILCGDRLYLNRMWCNERTVARFFNEVNHAIEVDEALLAQTLDKLFPVSDEINWQKVAAAVALTRRISVISGGPGTGKTTTVAKLLAALIQMADGERCRIRLAAPTGKAAARLTESLGKALRQLPLTDEQKKRIPEDASTLHRLLGAQPGSQRLRHHAGNPLHLDVLVVDEASMIDLPMMSRLIDALPDHARVIFLGDRDQLASVEAGAVLGDICAYANAGFTAERARQLSRLTGTHVPAGTGTEAASLRDSLCLLQKSYRFGSDSGIGQLAAAINRGDKTAVKTVFQQDFTDIEKRLLQSGEDYIAMLEEALAGYGRYLDLLQARAEPDLIIQAFNEYQLLCALREGPFGVAGLNERIEQFMQQKRKIHRHPHSRWYEGRPVMIARNDSALGLFNGDIGIALDRGQGTRVWFAMPDGNIKSVQPSRLPEHETTWAMTVHKSQGSEFDHAALILPSQRTPVVTRELVYTAVTRARRRLSLYADERILSAAIATRTERRSGLAALFSSRE

SEQ ID NO: 56666 - protein, 1180 aa, Escherichia coli
MSDVAETLDPLRLPLQGERLIEASAGTGKTFTIAALYLRLLLGLGGSAAFPRPLTVEELLVVTFTEAATAELRGRIRSNIHELRIACLRETTDNPLYERLLEEIDDKAQAAQWLLLAERQMDEAAVFTIHGFCQRMLNLNAFESGMLFEQQLIEDESLLRYQACADFWRRHCYPLPREIAQVVFETWKGPQALLRDINRYLQGEAPVIKAPPPDDETLASRHAQIVARIDTVKQQWRDAVGELDALIESSGIDRRKFNRSNQAKWIDKISAWAEEETNSYQLPESLEKFSQRFLEDRTKAGGETPRHPLFEAIDQLLAEPLSIRDLVITRALAEIRETVAREKRRRGELGFDDMLSRLDSALRSESGEVLAAAIRTRFPVAMIDEFQDTDPQQYRIFRRIWHHQPETALLLIGDPKQAIYAFRGADIFTYMKARSEVHAHYTLDTNWRSAPGMVNSVNKLFSQTDDAFMFREIPFIPVKSAGKNQALRFVFKGETQPAMKMWLMEGESCGVGDYQSTMAQVCAAQIRDWLQAGQRGEALLMNGDDARPVRASDISVLVRSRQEAAQVRDALTLLEIPSVYLSNRDSVFETLEAQEMLWLLQAVMTPERENTLRSALATSMMGLNALDIETLNNDEHAWDVVVEEFDGYRQIWRKRGVMPMLRALMSARNIAENLLATAGGERRLTDILHISELLQEAGTQLESEHALVRWLSQHILEPDSNASSQQMRLESDKHLVQIVTIHKSKGLEYPLVWLPFITNFRVQEQAFYHDRHSFEAVLDLNAAPESVDLAEAERLAEDLRLLYVALTRSVWHCSLGVAPLVRRRGDKKGDTDVHQSALGRLLQKGEPQDAAGLRTCIEALCDDDIAWQTAQTGDNQPWQVNDVSTAELNAKTLQRLPGDNWRVTSYSGLQQRGHGIAQDLMPRLDVDAAGVASVVEEPTLTPHQFPRGASPGTFLHSLFEDLDFTQPVDPNWVREKLELGGFESQWEPVLTEWITAVLQAPLNETGVSLSQLSARNKQVEMEFYLPISEPLIASQLDTLIRQFDPLSAGCPPLEFMQVRGMLKGFIDLVFRHEGRYYLLDYKSNWLGEDSSAYTQQAMAAAMQAHRYDLQYQLYTLALHRYLRHRIADYDYEHHFGGVIYLFLRGVDKEHPQQGIYTTRPNAGLIALMDEMFAGMTLEEA

SEQ ID NO: 56667 - protein, 394 aa, Escherichia coli
MMKDVVIVGALRTPIGCFRGALAGHSAVELGSLVVKALIERTGVPAYAVDEVILGQVLTAGAGQNPARQSAIKGGLPNSVSAITINDVCGSGLKALHLATQAIQCGEADIVIAGGQENMSRAPHVLTDSRTGAQLGNSQLVDSLVHDGLWDAFNDYHIGVTAENLAREYGISRQLQDAYALSSQQKARAAIDAGRFKDEIVPVMTQSNGQTLVVDTDEQPRTDASAEGLARLNPSFDSLGSVTAGNASSINDGAAAVMMMSEAKARALNLPVLARIRAFASVGVDPALMGIAPVYATRRCLERVGWQLAEVDLIEANEAFAAQALSVGKMLEWDERRVNVNGGAIALGHPIGASGCRILVSLVHEMVKRNARKGLATLCIGGGQGVALTIERDE

SEQ ID NO: 56668 - protein, 310 aa, Escherichia coli
MSKKIVLALGGNALGDDLAGQMKAVKITSQAIVDLIAQGHEVIVTHGNGPQVGMINQAFEAAAKTEAHSPMLPMSVCVALSQGYIGYDLQNALREELLSRGINKPVATLVTQVEVDANDPAFLNPTKPIGSFFTEQEAEQLTKQGYTLKEDAGRGYRRVVASPKPVDIIEKETVKALVDAGQVVITVGGGGIPVIREGNHLRGASAVIDKDWASARLAEMIDADMLIILTAVEKVAINFGKENEQWLDRLSLSDAERFIEEGHFAKGSMLPKVEAAASFARSRAGREALITVLSKAKEGIEGKTGTVICQ

SEQ ID NO: 56669 - protein, 644 aa, Escherichia coli
MKGMQMNKFIAAEAAECIGCHACEIACAVAHNQENWPLSHSDFRPRIHVVGKGQAANPVACHHCNNAPCVTACPVNALTFQSDSVQLDEQKCIGCKRCAIACPFGVVEMVDTIAQKCDLCNQRSSGTQACIEVCPTQALRLMDDKGLQQIKVARQRKTAAGKASSDAQPSRSAALLPVNSRKGADKISASERKTHFGEIYCGLDPQQATYESDRCVYCAEKANCNWHCPLHNAIPDYIRLVQEGKIIEAAELCHQTSSLPEICGRVCPQDRLCEGACTLKDHSGAVSIGNLERYITDTALAMGWRPDVSKVVPRSEKVAVIGAGPAGLGCADILARAGVQVDVFDRHPEIGGMLTFGIPPFKLDKTVLSQRREIFTAMGIDFHLNCEIGRDITFSDLTSEYDAVFIGVGTYGMMRADLPHEDAPGVIQALPFLTAHTRQLMGLPESEEYPLTDVEGKRVVVLGGGDTTMDCLRTSIRLNAASVTCAYRRDEVSMPGSRKEVVNAREEGVEFQFNVQPQYIACDEDGRLTAVGLIRTAMGEPGPDGRRRPRPVAGSEFELPADVLIMAFGFQAHAMPWLQGSGIKLDKWGLIQTGDVGYLPTQTHLKKVFAGGDAVHGADLVVTAMAAGRQAARDMLTLFDTKAS

SEQ ID NO: 56670 - protein, 505 aa, Escherichia coli
MSEQHAQGADAVVDLNNELKTRREKLANLREQGIAFPNDFRRDHTSDQLHAEFDGKENEELEALNIEVAVAGRMMTRRIMGKASFVTLQDVGGRIQLYVARDDLPEGVYNEQFKKWDLGDILGAKGKLFKTKTGELSIHCTELRLLTKALRPLPDKFHGLQDQEARYRQRYLDLISNDESRNTFKVRSQILSGIRQFMVNRGFMEVETPMMQVIPGGAAARPFITHHNALDLDMYLRIAPELYLKRLVVGGFERVFEINRNFRNEGISVRHNPEFTMMELYMAYADYKDLIELTESLFRTLAQDILGKTEVTYGDVTLDFGKPFEKLTMREAIKKYRPETDMADLDNFDSAKAIAESIGIHVEKSWGLGRIVTEIFEEVAEAHLIQPTFITEYPAEVSPLARRNDVNPEITDRFEFFIGGREIGNGFSELNDAEDQAQRFLDQVAAKDAGDDEAMFYDEDYVTALEHGLPPTAGLGIGIDRMVMLFTNSHTIRDVILFPAMRPVK

SEQ ID NO: 56671 - protein, 236 aa, Escherichia coli
MKKGFMLFTLLAAFSGFAQADDAAIQQTLAKMGIKSSDIQPAPVAGMKTVLTNSGVLYITDDGKHIIQGPMYDVSGTAPVNVTNKMLLKQLNALEKEMIVYKAPQEKHVITVFTDITCGYCHKLHEQMADYNALGITVRYLAFPRQGLDSDAEKEMKAIWCAKDKNKAFDDVMAGKSVAPASCDVDIADHYALGVQLGVSGTPAVVLSNGTLVPGYQPPKEMKEFLDEHQKMTSGK

SEQ ID NO: 56672 - protein, 298 aa, Escherichia coli
MKQDLARIEQFLDALWLEKNLAENTLNAYRRDLSMMVEWLHHRGLTLATAQSDDLQALLAERLEGGYKATSSARLLSAVRRLFQYLYREKFREDDPSAHLASPKLPQRLPKDLSEAQVERLLQAPLIDQPLELRDKAMLEVLYATGLRVSELVGLTMSDISLRQGVVRVIGKGNKERLVPLGEEAVYWLETYLEHGRPWLLNGVSIDVLFPSQRAQQMTRQTFWHRIKHYAVLAGIDSEKLSPHVLRHAFATHLLNHGADLRVVQMLLGHSDLSTTQIYTHVATERLRQLHQQHHPRA

SEQ ID NO: 56673 - protein, 219 aa, Escherichia coli
MVQKPLIKQGYSLAEEIANSVSHGIGLVFGIVGLVLLLVQAVDLNASATAITSYSLYGGSMILLFLASTLYHAIPHQRAKMWLKKFDHCAIYLLIAGTYTPFLLVGLDSPLARGLMIVIWSLALLGILFKLTIAHRFKILSLVTYLAMGWLSLVVIYEMAVKLAAGSVTLLAVGGVVYSLGVIFYVCKRIPYNHAIWHGFVLGGSVCHFLAIYLYIGQA

SEQ ID NO: 56674 - protein, 479 aa, Escherichia coli
MIVKKLTLPKDFLWGGAVAAHQVEGGWNKGGKGPSICDVLTGGAHGVPREITKEVLPGKYYPNHEAVDFYGHYKEDIKLFAEMGFKCFRTSIAWTRIFPKGDEAQPNEEGLKFYDDMFDELLKYNIEPVITLSHFEMPLHLVQQYGSWTNRKVVDFFVRFAEVVFERYKHKVKYWMTFNEINNQRNWRAPLFGYCCSGVVYTEHENPEETMYQVLHHQFVASALAVKAARRINPEMKVGCMLAMVPLYPYSCNPDDVMFAQESMRERYVFTDVQLRGYYPSYVLNEWERRGFNIKMEDGDLDVLREGTCDYLGFSYYMTNAVKAEGGTGDAISGFEGSVPNPYVKASDWGWQIDPVGLRYALCELYERYQRPLFIVENGFGAYDKVEEDGSINDDYRIDYLRAHIEEMKKAVTYDGVDLMGYTPWGCIDCVSFTTGQYSKRYGFIYVNKHDDGTGDMSRSRKKSFNWYKEVIASNGEKL

SEQ ID NO: 56675 - protein, 364 aa, Escherichia coli
MAQQTPLYEQHTLCGARMVDFHGWMMPLHYGSQIDEHHAVRTDAGMFDVSHMTIVDLRGSRTREFLRYLLANDVAKLTKSGKALYSGMLNASGGVIDDLIVYYFTEDFFRLVVNSATREKDLSWITQHAEPFGIEITVRDDLSMIAVQGPNAQAKAATLFNDAQRQAVEGMKPFFGVQAGDLFIATTGYTGEAGYEIALPNEKAADFWRALVEAGVKPCGLGARDTLRLEAGMNLYGQEMDETISPLAANMGWTIAWEPADRDFIGREALEVQREHGTEKLVGLVMTEKGVLRNELPVRFTDAQGNQHEGIITSGTFSPTLGYSIALARVPEGIGETAIVQIRNREMPVKVTKPVFVRNGKAVA

SEQ ID NO: 56676 - protein, 297 aa, Escherichia coli
MKRPDYRTLQALDAVIRERGFERAAQKLCITQSAVSQRIKQLENMFGQPLLVRTVPPRPTEQGQKLLALLRQVELLEEEWLGDEQTGSTPLLLSLAVNADSLATWLLPALAPVLADSPIRLNLQVEDETRTQERLRRGEVVGAVSIQHQALPSCLVDKLGALDYLFVSSKPFAEKYFPNGVTRSALLKAPVVAFDHLDDMHQAFLQQNFDLPPGSVPCHIVNSSEAFVQLARQGTTCCMIPHLQIEKELASGELIDLTPGLFQRRMLYWHRFAPESRMMRKVTDALLDYGHKVLRQD

SEQ ID NO: 56677 - protein, 387 aa, Escherichia coli
MSVIKMTDLDLAGKRVFIRADLNVPVKDGKVTSDARIRASLPTIELALKQGAKVMVTSHLGRPTEGEYNEEFSLLPVVNYLKDKLSNPVRLVKDYLDGVDVAEGELVVLENVRFNKGEKKDDETLSKKYAALCDVFVMDAFGTAHRAQASTHGIGKFADVACAGPLLAAELDALGKALKEPARPMVAIVGGSKVSTKLTVLDSLSKIADQLIVGGGIANTFIAAQGHDVGKSLYEADLVDEAKRLLTTCNIPVPSDVRVATEFSETAPATLKSVNDVKADEQILDIGDASAQELAEILKNAKTILWNGPVGVFEFPNFRKGTEIVANAIADSEAFSIAGGGDTLAAIDLFGIADKISYISTGGGAFLEFVEGKVLPAVAMLEERAKK

SEQ ID NO: 56678 - protein, 384 aa, Escherichia coli
MAKHLFTSESVSEGHPDKIADQISDAVLDAILEQDPKARVACETYVKTGMVLVGGEITTSAWVDIEEITRNTVREIGYVHSDMGFDANSCAVLSAIGKQSPDINQGVDRADPLEQGAGDQGLMFGYATNETDVLMPAPITYAHRLVQRQAEVRKNGTLPWLRPDAKSQVTFQYDDGKIVGIDAVVLSTQHSEEIDQKSLQEAVMEEIIKPILPAEWLTSATKFFINPTGRFVIGGPMGDCGLTGRKIIVDTYGGMARHGGGAFSGKDPSKVDRSAAYAARYVAKNIVAAGLADRCEIQVSYAIGVAEPTSIMVETFGTEKVPSEQLTLLVREFFDLRPYGLIQMLDLLHPIYKETAAYGHFGREHFPWEKTDKAQLLRDAAGLK

SEQ ID NO: 56679 - protein, 252 aa, Escherichia coli
MGRRRGFLTMRIPRIYHPEPLTSHSHIALCEDAANHIGRVLRMGPGQALQLFDGSNQVFDAEITSASKKSVEVKVLEGQIDDRESPLHIHLGQVMSRGEKMEFTIQKSIELGVSLITPLFSERCGVKLDSERLNKKLQQWQKIAIAACEQCGRNRVPEIRPAMDLEAWCAEQDEGLKLNLHPRASNSINTLPLPVERVRLLIGPEGGLSADEIAMTARYQFTDILLGPRVLRTETTALTAITALQVRFGDLG

SEQ ID NO: 56680 - protein, 138 aa, Escherichia coli
MSGTLLAFDFGTKSIGVAVGQRITGTARPLPAIKAQDGTPDWNIIERLLKEWQPDEIIVGLPLNMDGTEQPLTARARKFANRIHGRFGVEVKLHDERLSTVEARSGLFEQGGYRALNKGKVDSASAVIILESYFEQGY

SEQ ID NO: 56681 - protein, 234 aa, Escherichia coli
MNDIAHNLAQVRDKISAAATRCGRSPEEITLLAVSKTKPASAIAEAIDAGQRQFGENYVQEGVDKIRHFQELGVTGLEWHFIGPLQSNKSRLVAEHFDWCHTIDRLRIATRLNDQRPAELPPLNVLIQINISDENSKSGIQLAELDELAAAVAELPRLRLRGLMAIPAPESEYVRQFEVARQMAVAFAGLKTRYPHIDTLSLGMSDDMEAAIAAGSTMVRIGTAIFGARDYSKK

SEQ ID NO: 56682 - protein, 197 aa, Escherichia coli
MQKVVLATGNVGKVRELASLLSDFGLDIVAQTDLGVDSAEETGLTFIENAILKARHAAKVTALPAIADDSGLAVDVLGGAPGIYSARYSGEDATDQKNLQKLLETMKDVPDDQRQARFHCVLVYLRHAEDPTPLVCHGSWPGVITREPAGTGGFGYDPIFFVPSEGKTAAELTREEKSAISHRGQALKLLLDALRNG

SEQ ID NO: 56683 - protein, 675 aa, Escherichia coli
MNKKFKYKKSLLAAILSATLLAGCDGGGSGSSSDTPPVDSGTGSLPEVKPDPTPNPEPTPEPTPDPEPTPEPIPDPEPTPEPEPEPVPTKTGYLTLGGSQRVTGATCNGESSDGFTFKPGEDVTCVAGNTTIATFNTQSEAARSLRAVEKVSFSLEDAQELAGSDDKKSNAVSLVTSSNSCPANTEQVCLTFSSVIESKRFDSLYKQIDLAPEEFKKLVNEEVENNAATDKAPSTHTSPVVPVTTPGTKPDLNASFVSANAEQFYQYQPTEIILSEGRLVDSQGYGVAGVNYYTNSGRGVTGENGEFSFSWGETISFGIDTFELGSVRGNKSTIALTELGDEVRGANIDQLIHRYSTTGQNNTRVVPDDVRKVFAEYPNVINEIINLSLSNGATLGEGEQVVNLPNEFIEQFNTGQAKEIDTAICAKTDGCNEARWFSLTTRNVNDGQIQGVINKLWGVDTNYKSVSKFHVFHDSTNFYGSTGNARGQAVVNISNAAFPILMARNDKNYWLAFGEKRAWDKNELAYITEAPSLVEPENVTRDTATFNLPFISLGQVGEGKLMVIGNPHYNSILRCPNGYSWNGGVNKDGQCTLNSDPDDMKNFMENVLRYLSDDKWKPDAKASMTVGTNLDTVYFKRHGQVTGNSAAFDFHPDFAGISVEHLSSYGDLDPQKCRC

SEQ ID NO: 56684 - protein, 338 aa, Escherichia coli; identical to SEQ ID NO: 43054

SEQ ID NO: 56685 - protein, 252 aa, Escherichia coli
MDALQTQTVNSTTAPQPNYIPGLIAVVGCDGTGKSTLTTDLVKSLQQHWQTERRYLGLLSGEDGDKIKRLPLVGVWLERRLAAKSSKTQSMKTKSPALWAAVIMYCFSLRRMANLRKVQRLAQSGVLVVSDRFPQAEISGFYYDGPGIGVERATGKISMFLAQRERRLYQQMAQYRPELIIRLGIDIETAISRKPDHDYAELQDKIGVMSKIGYNGTKILEIDSRAPYSEVLEQAQKAVSLVAIVSDRRSLT

SEQ ID NO: 56686 - protein, 237 aa, Escherichia coli
MNQRNMSIINSTPVRVIAIVGCDGSGKSTLTASLVNELAARMPTEHIYLGQSSGRIGEWISQLPVIGAPFGRYLRSKAAHVHEKPSTPPGNITALVIYLLSCWRAYKFRKMLCKSQQGFLLITDRYPQVEVPGFRFDGPQLAKTTGGNGWIKMLRQRELKLYQWMASYLPVLLIRLGIDEQTAFARKPDHQLAALQEKIAVTPQLTFNGAKILELDGRHPADEILQASLRAIHAALS

SEQ ID NO: 56687 - protein, 294 aa, Escherichia coli
MSHLKDPTTQYYTGEYPKQKQPTPGIQAKMTPVPDCGEKTYVGSGRLKDRKALVTGGDSGIGRAAAIAYAREGADVAISYLPVEEEDAQDVKKIIEECGRKAVLLPGDLSDEKFARSLVHEAHKALGGLDIMALVAGKQVAIPDIADLTSEQFQKTFAINVFALFWLTQEAIPLLPKGASIITTSSIQAYQPSPHLLDYAATKAAILNYSRGLAKQVAEKGIRVNIVAPGPIWTALQISGGQTQDKIPQFGQQTPMKRAGQPAELAPVYVYLASQESSYVTAEVHGVCGGEHLG

SEQ ID NO: 56688 - protein, 245 aa, Escherichia coli
MLYIFRLIITVIYSILVCVFGSIYCLFSPRNPKHVATFGHMFGRLAPLFGLKVECRKPTDAESYGNAIYIANHQNNYDMVTASNIVQPPTVTVGKKSLLWIPFFGQLYWLTGNLLIDRNNRTKAHGTIAEVVNHFKKRRISIWMFPEGTRSRGRGLLPFKTGAFHAAIAAGVPIIPVCVSTTSNKINLNRLHNGLVIVEMLPPIDVSQYGKDQVRELAAHCRSIMEQKIAELDKEVAEREAAGKV

SEQ ID NO: 56689 - protein, 752 aa, Escherichia coli
MSDMAERLALHEFTENAYLNYSMYVIMDRALPFIGDGLKPVQRRIVYAMSELGLNASAKFKKSARTVGDVLGKYHPHGDSACYEAMVLMAQPFSYRYPLVDGQGNWGAPDDPKSFAAMRYTESRLSKYSELLLSELGQGTADWVPNFDGTLQEPKMLPARLPNILLNGTTGIAVGMATDIPPHNLREVAQAAIALIDQPKTTLDQLLDIVQGPDYPTEAEIITSRAEIRKIYENGRGSVRMRAVWKKEDGAVVISALPHQVSGARVLEQIAAQMRNKKLPMVDDLRDESDHENPTRLVIVPRSNRVDMDQVMNHLFATTDLEKSYRINLNMIGLDGRPAVKNLLEILSEWLVFRRDTVRRRLNYRLEKVLKRLHILEGLLVAFLNIDEVIEIIRNEDEPKPALMSRFGLTETQAEAILELKLRHLAKLEEMKIRGEQSELEKERDQLQGILASERKMNNLLKKELQADAQAYGDDRRSPLQEREEAKAMSEHDMLPSEPVTIVLSQMGWVRSAKGHDIDAPGLNYKAGDSFKAAVKGKSNQPVVFVDSTGRSYAIDPITLPSARGQGEPLTGKLTLPPGATVDHMLMESDDQKLLMASDAGYGFVCTFNDLVARNRAGKALITLPENAHVMPPVVIEDASDMLLAITQAGRMLMFPVSDLPQLSKGKGNKIINIPSAEAARGEDGLAQLYVLPPQSTLTIHVGKRKIKLRPEELQKVTGERGRRGTLMRGLQRIDRVEIDSPRRASSGDSEE

SEQ ID NO: 56690 - protein, 630 aa, Escherichia coli
MTQTYNADAIEVLTGLEPVRRRPGMYTDTTRPNHLGQEVIDNSVDEALAGHAKRVDVILHADQSLEVIDDGRGMPVDIHPEEGVPAVELILCRLHAGGKFSNKNYQFSGGLHGVGISVVNALSKRVEVNVRRDGQVYNIAFENGEKVQDLQVVGTCGKRNTGTSVHFWPDETFFDSPRFSVSRLTHVLKAKAVLCPGVEITFKDEINNTEQRWCYQDGLNDYLAEAVNGLPTLPEKPFIGNFAGDTEAVDWALLWLPEGGELLTESYVNLIPTMQGGTHVNGLRQGLLDAMREFCEYRNILPRGVKLSAEDIWDRCAYVLSVKMQDPQFAGQTKERLSSRQCAAFVSGVVKDAFILWLNQNVQAAELLAEMAISSAQRRMRAAKKVVRKKLTSGPALPGKLADCTAQDLNRTELFLVEGDSAGGSAKQARDREYQAIMPLKGKILNTWEVSSDEVLASQEVHDISVAIGIDPDSDDLSQLRYGKICILADADSDGLHIATLLCALFVKHFRALVKHGHVYVALPPLYRIDLGKEVYYALTEEEKEGVLEQLKRKKGKPNVQRFKGLGEMNPMQLRETTLDPNTRRLVQLTIDDEDDQRTDAMMDMLLAKKRSEDRRNWLQEKGDMAEIEV

SEQ ID NO: 56691 - protein, 217 aa, Escherichia coli
MNQTLLSSFGTPFERVENALAALREGRGVMVLDDEDRENEGDMIFPAETMTVEQMALTIRHGSGIVCLCITEDRRKQLDLPMMVENNTSAYGTGFTVTIEAAEGVTTGVSAADRITTVRAAIADGAKPSDLNRPGHVFPLRAQAGGVLTRGGHTEATIDLMTLAGFKPAGVLCELTNDDGTMARAPECIEFANKHNMALVTIEDLVAYRQAHERKAS

SEQ ID NO: 56692 - protein, 183 aa, Escherichia coli
MSAFKKSLLVAGVAMILSNNVFADEGHGIVKFKGEVISAPCSIKPGDEDLTVNLGEVADTVLKSDQKSLAEPFTIHLQDCMLSQGGTTYSKAKVTFTTANTMTGQSDLLKNTKETEIGGATGVGVRILDSQSGEVTLGTPVVITFNNTNSYQELNFKARMESPSKDATPGNVYAQADYKIAYE

SEQ ID NO: 56693 - protein, 433 aa, Escherichia coli [sequence omitted]

SEQ ID NO: 56694 - protein, 205 aa, Escherichia coli
MSAIAPGMILIAYLCGSISSAILVCRLCGLPDPRTSGSGNPGATNVLRIGGKGAAVAVLIFDVLKGMLPVWGAYELGVSPFWLGLIAIAACLGHIWPVFFGFKGGKGVATAFGAIAPIGWDLTGVMAGTWLLTVLLSGYSSLGAIVSALIAPFYVWWFKPQFTFPVSMLSCLILLRHHDNIQRLWRRQETKIWTKFKRKREKDPE

SEQ ID NO: 56695 - protein, 337 aa, Escherichia coli
MRVLGIETSCDETGIAIYDDEKGLLANQLYSQVKLHADYGGVVPELASRDHVRKTVPLIQAALKESGLTAKDIDAVAYTAGPGLVGALLVGATVGRSLAFAWDVPAIPVHHMEGHLLAPMLEDNPPEFPFVALLVSGGHTQLISVTGIGQYELLGESIDDAAGEAFDKTAKLLGLDYPGGPLLSKMAAQGTAGRFVFPRPMTDRPGLDFSFSGLKTFAANTIRDNGTDDQTRADIARAFEDAVVDTLMIKCKRALDQTGFKRLVMAGGVSANRTLRAKLAEMMKKRRGEVFYARPEFCTDNGAMIAYAGMVRFKAGATADLGVSVRPRWPLAELPAA

SEQ ID NO: 56696 - protein, 496 aa, Escherichia coli
MITEFVFIPIFAIAAGVAQSLQYLNRYHVIREPPEHILNRLPSSASALACSAHALNLIEKRTLDHEEMKALNREVIEYFKEHVNPGFLEYRKSVTAGGDYGAVEWQAGSLNTLVDTQGQEFIDCLGGFGIFNVGHRNPVVVSAVQNQLAKQPLHSQELLDPLRAMLAKTLAALTPGKLKYSFFCNSGTESVEAALKLAKAYQSPRGKFTFIATSGAFHGKSLGALSATAKSTFRKPFMPLLPGFRHVPFGNIEAMRTALNECKKTGDDVAAVILEPIQGEGGVILPPPGYLTAVRKLCDEFGALMILDEVQTGMGRTGKMFACEHENVQPDILCLAKALGGGVMPIGATIATEEVFSVLFDNPFLHTTTFGGNPLACAAALATINVLLEQNLPAQAEQKGDMLLDGFRQLAREYPDLVQEARGKGMLMAIEFVDNEIGYNFASEMFRQRVLVAGTLNNAKTIRIEPPLTLTIEQCELVIKAARKALAAMRVSVEEA

SEQ ID NO: 56697 - protein, 101 aa, Escherichia coli
MSKEHTTEHLRAELKSLSDTLEEVLSSSGEKSKEELSKIRSKAEQALKQSRYRLGETGDAIAKQTRVAAARADEYVRENPWTGVGIGAAIGVVLGVLLSRR

SEQ ID NO: 56698 - protein, 134 aa, Escherichia coli
MADTHHAQGPGKSVLGIGQRIVSIMVEMVETRLRLAVVELEEEKANLFQLLLMLGLTMLFAAFGLMSLMVLIIWAVDPQYRLNAMIATTVVLLLLALIGGIWTLRKSRKSTLLRHTRHELANDRQLLEEESREQ

SEQ ID NO: 56699 - protein, 328 aa, Escherichia coli
MGQLIDGVWHDTWYDTKSTGGKFQRSASAFRNWLTADGAPGPTGTGGFIAEKDRYHLYVSLACPWAHRTLIMRKLKGLEPFISVSVVNPLMLENGWTFDDSFPGATGDTLYQNEFLYQLYLHADPHYSGRVTVPVLWDKKNHTIVSNESAEIIRMFNTAFDALGAKAGDYYPPALQTKIDELNGWIYDTVNNGVYKAGFATSQEAYDEAVAKVFESLARLEQILGQHRYLTGNQLTEADIRLWTTLVRFDPVYVTHFKCDKHRISDYLNLYGFLRDIYQMPGIAETVNFDHIRNHYFRSHKTINPTGIISIGPWQDLDEPHGRDVRFG

SEQ ID NO: 56700 - protein, 256 aa, Escherichia coli [sequence omitted]

SEQ ID NO: 56701 - protein, 286 aa, Escherichia coli
MKQHQSADNSQGQLYIVPTPIGNLADITQRALEVLQAVDLIAAEDTRHTGLLLQHFGINARLFALHDHNEQQKAETLLAKLQEGQNIALVSDAGTPLINDPGYHLVRTCREAGIRVVPLPGPCAAITALSAAGLPSDRFCYEGFLPAKSKGRRDALKAIEAEPRTLIFYESTHRLLDSLEDIVAVLGESRYVVLARELTKTWETIHGAPVGELLAWVKEDENRRKGEMVLIVEGHKAQEEDLPADALRTLALLQAELPLKKAAALAAEIHGVKKNALYKYALEQQG

SEQ ID NO: 56702 - protein, 734 aa, Escherichia coli
MRRRSGINTSAVRYCLRKRKDITLLNPIVRKFQYGQHTVTLETGMMARQATAAVMVSMDDTAVFVTVVGQKKAKPGQDFFPLTVNYQERTYAAGRIPGSFFRREGRPSEGETLIARLIDRPIRPLFPEGFVNEVQVIATVVSVNPQVNPDIVAMIGASAALSLSGIPFNGPIGAARVGYINDQYVLNPTQDELKESKLDLVVAGTEAAVLMVESEAQLLSEDQMLGAVVFGHEQQQVVIQNINELVKEAGKPRWDWQPEPVNEALNARVAALAEARLSDAYRITDKQERYAQVDVIKSETIATLLAEDETLDENELGEILHAIEKNVVRSRVLAGEPRIDGREKDMIRGLDVRTGVLPRTHGSALFTRGETQALVTATLGTARDAQVLDELMGERTDTFLFHYNFPPYSVGETGMVGSPKRREIGHGRLAKRGVLAVMPDMDKFPYTVRVVSEITESNGSSSMASVCGASLALMDAGVPIKAAVAGIAMGLVKEGDNYVVLSDILGDEDHLGDMDFKVAGSRDGISALQMDIKIEGITKEIMQVALNQAKGARLHILGVMEQAINAPRGDISEFAPRIHTIKINPDKIKDVIGKGGSVIRALTEETGTTIEIEDDGTVKIAATDGEKAKHAIRRIEEITAEIEVGRVYTGKVTRIVDFGAFVAIGGGKEGLVHISQIADKRVEKVTDYLQMGQEVPVKVLEVDRQGRIRLSIKEATEQSQPAAAPEAPAAEQGE

SEQ ID NO: 56703 - protein, 445 aa, Escherichia coli
MSNRKYFGTDGIRGRVGDAPITPDFVLKLGWAAGKVLARHGSRKIIIGKDTRISGYMLESALEAGLAAAGLSALFTGPMPTPAVAYLTRTFRAEAGIVISASHNPFYDNGIKFFSIDGTKLPDAVEEAIEAEMEKEISCVDSAELGKASRIVDAAGRYIEFCKATFPNELSLSELKIVVDCANGATYHIAPNVLRELGANVIAIGCEPNGVNINAEVGATDVRALQARVLAEKADLGIAFDGDGDRVIMVDHEGNKVDGDQIMYIIAREGLRQGQLRGGAVGTLMSNMGLELALKQLGIPFARAKVGDRYVLEKMQEKGWRIGAENSGHVILLDKTTTGDGIVAGLQVLAAMARNHMSLHDLCSGMKMFPQILVNVRYTAGSGDPLEHESVKAVTAEVEAALGNRGRVLLRKSGTEPLIRVMVEGEDEAQVTEFAHRIADAVKAV

SEQ ID NO: 56704 - protein, 297 aa, Escherichia coli
MLRGFFLSIHTRDNIMKLFAQGTSLDLSHPHVMGILNVTPDSFSDGGTHNSLIDAVKHANLMINAGATIIDVGGESTRPGAAEVSVEEELQRVIPVVEAIAQRFEVWISVDTSKPEVIRESAKVGAHIINDIRSLSEPGALEAAAETGLPVCLMHMQGNPKTMQEAPKYDDVFAEVNRYFIEQIARCEQAGIAKEKLLLDPGFGFGKNLSHNYSLLARLAEFHHFNLPLLVGMSRKSMIGQLLNVGPSERLSGSLACAVIAAMQGAHIIRVHDVKETVEAMRVVEATLSAKENKRYE

SEQ ID NO: 56705 - protein, 644 aa, Escherichia coli
MAKNLILWLVIAVVLMSVFQSFGPSESNGRKVDYSTFLQEVNNDQVREARINGREINVTKKDSNRYTTYIPVQDPKLLDNLLTKNVKVVGEPPEEPSLLASIFISWFPMLLLIGVWIFFMRQMQGGGGKGAMSFGKSKARMLTEDQIKTTFADVAGCDEAKEEVAELVEYLREPSRFQKLGGKIPKGVLMVGPPGTGKTLLAKAIAGEAKVPFFTISGSDFVEMFVGVGASRVRDMFEQAKKAAPCIIFIDEIDAVGRQRGAGLGGGHDEREQTLNQMLVEMDGFEGNEGIIVIAATNRPDVLDPALLRPGRFDRQVVVGLPDVRGREQILKVHMRRVPLAPDIDAAIIARGTPGFSGADLANLVNEAALFAARGNKRVVSMVEFEKAKDKIMMGAERRSMVMTEAQKESTAYHEAGHAIIGRLVPEHDPVHKVTIIPRGRALGVTFFLPEGDAISASRQKLESQISTLYGGRLAEEIIYGPEHVSTGASNDIKVATNLARNMVTQWGFSEKLGPLLYAEEEGEVFLGRSVAKAKHMSDETARIIDQEVKALIERNYNRARQLLTDNMDILHAMKDALMKYETIDAPQIDDLMARRDVRPPAGWEEPGASNNSGDNGSPKAPRPVDEPRTPNPGNTMSEQLGDK

SEQ ID NO: 56706 - protein, 477 aa, Escherichia coli
MRFSRFIIGLTSCIAFSVQAANVDEYITQLPAGANLALMVQKVGASAPAIDYHSQQMALPASTQKVITALAALIQLGPDFRFTTTLETKGNVENGVLKGDLVARFGADPTLKRQDIRNMVATLKKSGVNQIDGNVLIDTSIFASHDKAPGWPWNDMTQCFSAPPAAAIVDRNCFSVSLYSAPKPGDMAFIRVASYYPVTMFSQVRTLPRGSAEAQYCELDVVPGDLNRFTLTGCLPQRSEPLPLAFAVQDGASYAGAILKDELKQAGITWSGTLLRQTQVNEPGTVVASKQSAPLHDLLKIMLKKSDNMIADTVFRMIGHARFNVPGTWRAGSDAVRQILRQQAGVDIGNTIIADGSGLSRHNLIAPATMMQVLQYIAQHDNELNFISMLPLAGYDGSLQYRAGLHQAGVDGKVSAKTGSLQGVYNLAGFITTASGQRMAFVQYLSGYAVEPADQRNRRIPLVRFESRLYKDIYQNN

SEQ ID NO: 56707 - protein, 390 aa, Escherichia coli
MKFVDEASILVVAGDGGNGCVSFRREKYIPKGGPDGGDGGDGGDVWMEADENLNTLIDYRFEKSFRAERGQNGASRDCTGKRGKDVTIKVPVGTRVIDQGTGETMGDMTKHGQRLLVAKGGWHGLGNTRFKSSVNRTPRQKTNGTPGDKRELLLELMLLADVGMLGMPNAGKSTFIRAVSAAKPKVADYPFTTLVPSLGVVRMDNEKSFVVADIPGLIEGAAEGAGLGIRFLKHLERCRVLLHLIDIDPIDGTDPVENARIIISELEKYSQDLATKPRWLVFNKIDLLDKVEAEEKAKAIAEALGWEDKYYLISAASGLGVKDLCWDVMTFIIENPVVQAEEAKQPEKVEFMWDDYHRQQLEEIAEEDDEDWDDDWDEDDEEGVEFIYKR

SEQ ID NO: 56708 - protein, 323 aa, Escherichia coli
MNLEKINELTAQDMAGVNAAILEQLNSDVQLINQLGYYIVSGGGKRIRPMIAVLAARAVGYEGNAHVTIAALIEFIHTATLLHDDVVDESDMRRGKATANAAFGNAASVLVGDFIYTRAFQMMTSLGSLKVLEVMSEAVNVIAEGEVLQLMNVNDPDITEENYMRVIYSKTARLFEAAAQCSGILAGCTPEEEKGLQDYGRYLGTAFQLIDDLLDYNADGEQLGKNVGDDLNEGKPTLPLLHAMHHGTPEQAQMIRTAIEQGNGRHLLEPVLEAMNACGSLEWTRQRAEEEADKAIAALQVLPDTPWREALIGLAHIAVQRDR

SEQ ID NO: 56709 - protein, 419 aa, Escherichia coli
MDKFRVQGPTKLQGEVTISGAKNAALPILFAALLAEEPVEIQNVPKLKDVDTSMKLLSQLGAKVERNGSVHIDARDVNVFCAPYDLVKTMRASIWALGPLVARFGQGQVSLPGGCTIGARPVDLHISGLEQLGATIKLEEGYVKASVDGRLKGAHIVMDKVSVGATVTIMCAATLAEGTTIIENAAREPEIVDTANFLITLGAKISGQGTDRIVIEGVERLGGGVYRVLPDRIETGTFLVAAAISRGKIICRNAQPDTLDAVLAKLRDAGADIEVGEDWISLDMHGKRPKAVNVRTAPHPAFPTDMQAQFTLLNLVAEGTGFITETVFENRFMHVPELSRMGAHAEIESNTVICHGVEKLSGAQVMATDLRASASLVLAGCIAEGTTVVDRIYHIDRGYERIEDKLRALGANIERVKGE

SEQ ID NO: 56710 - protein, 284 aa, Escherichia coli
MVLMIVSGRSGSGKSVALRALEDMGFYCVDNLPVVLLPDLARTLADREISAAVSIDVRNMPESPEIFEQAMSNLPDAFSPQLLFLDADRNTLIRRYSDTRRLHPLSSKNLSLESAIDKESDLLEPLRSRADLIVDTSEMSVHELAEMLRTRLLGKRERELTMVFESFGFKHGIPIDADYVFDVRFLPNPHWDPKLRPMTGLDKPVAAFLDRHTEVHNFIYQTRSYLELWLPMLETNNRSYLTVAIGCTGGKHRSVYIAEQLADYFRSRGKNVQSRHRTLEKRKP

SEQ ID NO: 56711 - protein, 242 aa, Escherichia coli
MSKSRLTVFSFVRRFLLRLMVVLAVFWGGGIALFSVAPVPFSAVMVERQVSAWLHGNFRYVAHSDWVSMDQISPWMGLAVIAAEDQKFPEHWGFDVASIEKALAHNERNENRIRGASTISQQTAKNLFLWDGRSWVRKGLEAGLTLGIETVWSKKRILTVYLNIAEFGDGVFGVEAAAQRYFHKPASKLTRSEAALLAAVLPNPLRFKVSSPSGYVRSRQAWILRQMYQLGGEPFMQQHQLD

SEQ ID NO: 56712 - protein, 1517 aa, Escherichia coli
MTRKPRRHALSVPVRSGSEVGFPQSLGEVHDMLYDKSLERDNCGFGLIAHIEGEPSHKVVRTAIHALARMQHRGAILADGKTGDGCGLLLQKPDRFFRIVAQERGWRLAKNYAVGMLFLNKDPELAAAARRIVEEELQRETLSIVGWRDVPTNEGVLGEIALSSLPRIEQIFVNAPAGWRPRDMERRLFIARRRIEKRLEADKDFYVCSLSNLVNIYKGLCMPTDLPRFYLDLADLRLESAICLFHQRFSTNTVPRWPLAQPFRYLAHNGEINTITGNRQWARARTYKFQTPLIPDLHDAAPFVNETGSDSSSMDNMLELLLAGGMDIIRAMRLLVPPAWQNNPDMDPELRAFFDFNSMHMEPWDGPAGIVMSDGRFAACNLDRNGLRPARYVITKDKLITCASEVGIWDYQPDEVVEKGRVGPGELMVIDTRSGRILHSAETDDDLKSRHPYKEWMEKNVRRLVPFEDLPDEEVGSRELDDDTLASYQKQFNYSAEELDSVIRVLGENGQEAVGSMGDDTPFAVLSSQPRIIYDYFRQQFAQVTNPPIDPLREAHVMSLATSIGREMNVFCEAEGQAHRLSFKSPILLYSDFKQLTTMKEEHYRADTLDITFDVTKTTLEATVKELCDKAEKMVRSGTVLLVLSDRNIAKDRLPVPAPMAVGAIQTRLVDQSLRCDANIIVETASARDPHHFAVLLGFGATAIYPYLAYETLGRLVDTHAIAKDYRTVMLNYRNGINKGLYKIMSKMGISTIASYRCSKLFEAVGLHDDVVGLCFQGAVSRIGGASFEDFQQDLLNLSKRAWLARKPISQGGLLKYVHGGEYHAYNPDVVRTLQQAVQSGEYSDYQEYAKLVNERPATTLRDLLAITPGENAVNIADVEPASELFKRFDTAAMSIGALSPEAHEALAEAMNSIGGNSNSGEGGEDPARYGTNKVSRIKQVASGRFGVTPAYLVNADVIQIKVAQGAKPGEGGQLPGDKVTPYIAKLRYSVPGVTLISPPPHHDIYSIEDLAQLIFDLKQVNPKAMISVKLVSEPGVGTIATGVAKAYADLITIAGYDGGTGASPLSSVKYAGCPWELGLVETQQALVANGLRHKIRLQVDGGLKTGVDIIKAAILGAESFGFGTGPMVALGCKYLRICHLNNCATGVATQDDKLRKNHYHGLPFKVTNYFEFIARETRELMAQLGVTRLVDLIGRTDLLKELDGFTAKQQKLALSKLLETAEPHPGKALYCTENNPPFDNGLLNAQLLQQAKPFVDERQSKTFWFDIRNTDRSVGASLSGYIAQTHGDQGLAADPIKAYFNGTAGQSFGVWNAGGVELYLTGDANDYVGKGMAGGLIAIRPPVGSAFRSHEASIIGNTCLYGATGGRLYAAGRAGERFGVRNSGAITVVEGIGDNGCEYMTGGIVCILGKTGVNFGAGMTGGFAYVLDESGDFRKRVNPELVEVLSVDALAIHEEHLRGLITEHVQHTGSQRGEEILANWSTFATKFALVKPKSSDVKALLGHRSRSAAELRVQAQ

SEQ ID NO: 56713 - protein, 338 aa, Escherichia coli; identical to SEQ ID NO: 43054

SEQ ID NO: 56714 - protein, 655 aa, Escherichia coli
MGIFSIANQHIRFAVKLATAIVLALFVGFHFQLETPRWAVLTAAIVAAGTAFAAGGEPYSGAIRYRGFLRIIGTFIGCIAGLVIIIAMIRAPLLMILVCCIWAGFCTWISSLVRIENSYAWGLAGYTALIIVITIQPEPLLTPQFAVERCSEIVIGIVCAIMADLLFSPRSIKQEVDRELESLLVAQYQLMQLCIKHGDGEVVDKAWGDLVRRTTALQGMRSNLNMESSRWARANRRLKAINTLSLTLITQSCETYLIQNTRPELITDTFREFFDTPVETAQDVHKQLKRLRRVIAWTGERETPVTIYSWVAAATRYQLLKRGVISNTKINATEEEILQGEPEVKVESAERHHAMVNFWRTTLSCILGTLFWLWTGWTSGSGAMVMIAVVTSLAMRLPNPRMVAIDFIYGTLAALPLGLLYFLVIIPNTQQSMLLLCISLAVLGFFLGIEVQKRRLGSMGALASTINIIVLDNPMTFHFSQFLDSALGQIVGCVLAFTVILLVRDKSRDRTGRVLLNQFVSAAVSAMTTNVARRKENHLPALYQQLFLLMNKFPGDLPKFRLALTMIIAHQRLRDAPIPVNEDLSAFHRQMRRTADHVISARSDDKRRRYFGQLLEELEIYQEKLRIWQAPPQVTEPVNRLAGMLHKYQHALTDS

SEQ ID NO: 56715 - protein, 458 aa, Escherichia coli
MKIIILGAGQVGGTLAENLVGENNDITVVDTNGERLRTLQDKFDLRVVQGHGSHPRVLREAGADDADMLVAVTSSDETNMVACQVAYSLFNTPNRIARIRSPDYVRDADKLFHSDAVPIDHLIAPEQLVIDNIYRLIEYPGALQVVNFAEGKVSLAVVKAYYGGPLIGNALSTMREHMPHIDTRVAAIFRHDRPIRPQGSTIVEAGDEVFFIAASQHIRAVMSELQRLEKPYKRIMLVGGGNIGAGLARRLEKDYSVKLIERNQQRAAELAEKLQNTIVFFGDASDQELLAEEHIDQVDLFIAVTNDDEANIMSAMLAKRMGAKKVMVLIQRRAYVDLVQGSVIDIAISPQQATISALLSHVRKADIVGVSSLRRGVAEAIEAVAHGDESTSRVVGRVIDEIKLPPGTIIGAVVRGNDVMIANDNLRIEQGDHVIMFLTDKKFITDVERLFQPSPFFL

SEQ ID NO: 56716 - protein, 654 aa, Escherichia coli
MDCVMKGLNKITCCLLAALLMPCAGHAENEQYGANFNNADIRQFVEIVGQHLGKTILIDPSVQGTISVRSNDTFSQQEYYQFFLSILDLYGYSVITLDNGFLKVVRSANVKTSPGMIADSSRPGVGDELVTRIVPLENVPARDLAPLLRQMMDAGSVGNVVHYEPSNVLILTGRASTINKLIEVIKRVDVIGTEKQQIIHLEYASAEDLAEILNQLISESHGKSQMPALLSAKIVADKRTNSLIISGPEKARQRITSLLKSLDVEESEEGNTRVYYLKYAKATNLVEVLTGVSEKLKDEKGNARKPSSSGAMDNVAITADEQTNSLVITADQSVQEKLATVIARLDIRRAQVLVEAIIVEVQDGNGLNLGVQWANKNVGAQQFTNTGLPIFNAAQGVADYKKNGGITSANPAWDMFSAYNGMAAGFFNGDWGVLLTALASNNKNDILATPSIVTLDNKLASFNVGQDVPVLSGSQTTSGDNVFNTVERKTVGTKLKVTPQVNEGDAVLLEIEQEVSSVDSSSNSTLGPTFNTRTIQNAVLVKTGETVVLGGLLDDFSKEQVSKVPLLGDIPLVGQLFRYTSTERAKRNLMVFIRPTIIRDDDVYRSLSKEKYTRYRQEQQQRIDGKSKALVGSEDLPVLDENTFNSHAPAPSSR

SEQ ID NO: 56717 - protein, 637 aa, Escherichia coli
MIVFSSLQIRRGVRVLLDNATATINPGQKVGLVGKNGCGKSTLLALLKNEISADGGSYTFPGSWQLAWVNQETPALPQAALEYVIDGDREYRQLEAQLHDANERNDGHAIATIHGKLDAIDAWSIRSRAASLLHGLGFSNEQLERPVSDFSGGWRMRLNLAQALICRSDLLLLDEPTNHLDLDAVIWLEKWLKSYQGTLILISHDRDFLDPIVDKIIHIEQQSMFEYTGNYSSFEVQRATRLAQQQAMYESQQERVAHLQSYIDRFRAKATKAKQAQSRIKMLERMELIAPAHVDNPFRFSFRAPESLPNPLLKMEKVSAGYGDRIILDSIKLNLVPGSRIGLLGRNGAGKSTLIKLLAGELAPVSGEIGLAKGIKLGYFAQHQLEYLRADESPIQHLARLAPQELEQKLRDYLGGFGFQGDKVTEETRRFSGGEKARLVLALIVWQRPNLLLLDEPTNHLDLDMRQALTEALIEFEGALVVVSHDRHLLRSTTDDLYLVHDRKVEPFDGDLEDYQQWLSDVQKQENQTDEAPKENANSAQARKDQKRREAELRAQTQPLRKEIARLEKEMEKLNAQLAQAEEKLGDSELYDQSRKAELTACLQQQASAKSGLEECEMAWLEAQEQLEQMLLEGQSN

SEQ ID NO: 56718 - protein, 696 aa, Escherichia coli
MWRRLIYHPDINYALRQTLVLCLPVAVGLMLGELRFGLLFSLVPACCNIAGLDTPHKRFFKRLIIGASLFATCSLLTQLLLAKDVPLPFLLTGLTLVLGVTAELGPLHAKLLPASLLAAIFTLSLAGYMPVWEPLLIYALGTLWYGLFNWFWFWIWREQPLRESLSLLYRELADYCEAKYSLLTQHTDPEKALPPLLVRQQKAVDLITQCYQQMHMLSAQNNTDYKRMLRIFQEALDLQEHISVSLHQPEEVQKLVERSHAEEVIRWNAQTVAARLRVLADDILYHRLPTRFTMEKQIGALEKIARQHPDNPVGQFCYWHFSRIARVLRTQKPLYARDLLADKQRRMPLLPALKSYLSLKSPALRNAGRLSVMLSVASLMGTALHLPKSYWILMTVLLVTQNGYGATRLRIVNRSVGTVVGLIIAGVALHFKIPEGYTLTLMLITTLASYLILRKNYGWATVGFTITAVYTLQLLWLNGEQYILPRLIDTIIGCLIAFGGTVWLWPQWQSGLLRKNAHDALEAYQEAIRLILSEDPQPTPLAWQRMRVNQAHNTLYNSLNQAMQEPAFNSHYLADMKLWVTHSQFIVEHINAMTTLAREHRALPPELAQEYLQSCEIAIQRCQQRLEYDEPGSSGDANIMDAPEMQPHEGAAGTLEQHLQRVIGHLNTMHTISSMAWRQRPHHGIWLSRKLRDSKA

SEQ ID NO: 56719 - protein, 406 aa, Escherichia coli
MAIEQTAITRATFDEVILPIYAPAEFIPVKGQGSRIWDQQGKEYVDFAGGIAVTALGHCHPALVNALKTQGETLWHISNVFTNEPALRLGRKLIEATFAERVVFMNSGTEANETAFKLARHYACVRHSPFKTKIIAFHNAFHGRSLFTVSVGGQPKYSDGFGPKPADIIHVPFNDLHAVKAVMDDHTCAVVVEPIQGEGGVTAATPEFLQGLRELCDQHQALLVFDEVQCGMGRTGDLFAYMHYGVTPDILTSAKALGGGFPISAMLTTAEIASAFHPGSHGSTYGGNPLACAVAGAAFDIINTPEVLEGIQAKRQRFVDHLQKIDQQYDVFSDIRGMGLLIGAELKPQYKGRARDFLYAGAEAGVMVLNAGPDVMRFAPSLVVEDADIDEGMQRFAHAVAKVVGA

SEQ ID NO: 56720 - protein, 847 aa, Escherichia coli
MSKVRLAIIGNGMVGHRFIEDLLDKSDAANFDITVFCEEPRIAYDRVHLSSYFSHHTAEELSLVREGFYEKHGIKVLVGERAITINRQEKVIHSSAGRTVFYDKLIMATGSYPWIPPIKGSDTQDCFVYRTIEDLNAIESCARRSKRGAVVGGGLLGLEAAGALKNLGIETHVIEFAPMLMAEQLDQMGGEQLRRKIESMGVRVHTSKNTLEIVQEGVEARKTMRFADGSELEVDFIVFSTGIRPRDKLATQCGLDVAPRGGIVINDSCQTSDPDIYAIGECASWNNRVFGLVAPGYKMAQVAVDHILGSENAFEGADLSAKLKLLGVDVGGIGDAHGRTPGARSYVYLDESKEIYKRLIVSEDNKTLLGAVLVGDTSDYGNLLQLVLNAIELPENPDSLILPAHSGSGKPSIGVDKLPDSAQICSCFDVTKGDLIAAINKGCHTVAALKAETKAGTGCGGCIPLVTQVLNAELAKQGIEVNNNLCEHFAYSRQELFHLIRVEGIKTFEELLAKHGKGYGCEVCKPTVGSLLASCWNEYILKPEHTPLQDSNDNFLANIQKDGTYSVIPRSPGGEITPEGLMAVGRIAREFNLYTKITGSQRLAMFGAQKDDLPEIWRQLIEAGFETGHAYAKALRMAKTCVGSTWCRYGVGDSVGLGVELENRYKGIRTPHKMKFGVSGCTRECSEAQGKDVGIIATEKGWNLYVCGNGGMKPRHADLLAADIDRETLIKYLDRFMMFYIRTADKLTRTAPWLENLEGGIDYLKAVIIDDKLGLNAHLEEEMARLREAVLCEWTETVNTPSAQTRFKHFINSDKRDPNVQMVPEREQHRPATPYERIPVTLVEDNA

SEQ ID NO: 56721 - protein, 108 aa, Escherichia coli
MSQWKDICKIDDILPETGVCALLGDEQVAIFRPYHSDQVFAISNIDPFFESSVLSRGLIAEHQGELWVASPLKKQRFRLSDGLCMEDEQFSVKHYEARVKDGVVQLRG

SEQ ID NO: 56722 - protein, 457 aa, Escherichia coli
MDHLPIFCQLRDRDCLIVGGGDVAERKARLLLDAGARLTVNALAFIPQFTAWADAGMLTLVEGPFDESLLDTCWLAIAATDDDALNQRVSEAAEARRIFCNVVDAPKAASFIMPSIIDRSPLMVAVSSGGTSPVLARLLREKLESLLPLHLGQVAKYAGQLRGRVKQQFATMGERRRFWEKLFVNDRLAQSLANNDQKAITETTEQLINEPLDHRGEVVLVGAGPGDAGLLTLKGLQQIQQADVVVYDRLVSDDIMNLVRRDADRVFVGKRAGYHCVPQEEINQILLREAQKGKRVVRLKGGDPFIFGRGGEELETLCNAGIPFSVVPGITAASGCSAYSGIPLTHRDYAQSVRLITGHLKTGGELDWENLAAEKQTLVFYMGLNQAATIQQKLIEHGMPGEMPVAIVENGTAVTQRVIDGTLTQLGELAQQMNSPSLIIIGRVVGLRDKLNWFSNH

SEQ ID NO: 56723 - protein, 334 aa, Escherichia coli
MTKPIVFSGAQPSGELTIGNYMGALRQWVNMQDDYHCIYCIVDQHAITVRQDAQKLRKATLDTLALYLACGIDPEKSTIFVQSHVPEHAQLGWALNCYTYFGELSRMTQFKDKSARYAENINAGLFDYPVLMAADILLYQTNLVPVGEDQKQHLELSRDIAQRFNALYGEIFKVPEPFIPKSGARVMSLLEPTKKMSKSDDNRNNVIGLLEDPKSVVKKIKRAVTDSDEPPVVRYDVQNKAGVSNLLDILSAVTGQSIPELEKQFEGKMYGHLKGEVADAVSGMLTELQERYHRFRNDEAFLQQVMKDGAEKASAHASRTLKAVYEAIGFVAKP

SEQ ID NO: 56724 - protein, 428 aa, Escherichia coli
MDEFKPEDELKPDPSDRRTGRSRQSSERSERTERGEPQINFDDIELDDTDDRRPTRAQKERNEEPEIEEEIDESEDETVDEERVERRPRKRKKAASKPASRQYMMMGVGILVLLLLIIGIGSALKAPSTTSSDQTASGEKSIDLAGNATDQANGVQPAPGTTSAENTQQDVSLPPISSTPTQGQTPVATDGQQRVEVQGDLNNALTQPQNQQQLNNVAVNSTLPTEPATVAPVRNGNASRDTAKTQTAERPSTTRPARQQAVIEPKKPQATVKTEPKPVAQTPKRTEPAAPVASTKAPAATSTPAPKETATTAPVQTASPAQTTATPAAGAKTAGNVGSLKSAPSSHYTLQLSSSSNYDNLNGWAKKENLKNYVVYETTRNGQPWYVLVSGVYASKEEAKKAVSTLPADVQAKNPWAKPLRQVQADLK

SEQ ID NO: 56725 - protein, 133 aa, Escherichia coli
MKEKPAVEVRLDKWLWAARFYKTRALAREMIEGGKVHYNGQRSKPSKIVELNATLTLRQGNDERTVIVKAITEQRRPASEAALLYEETAESVEKREKMALARKLNALTMPHPDRRPDKKERRDLLRFKHGDSE

SEQ ID NO: 56726 - protein, 294 aa, Escherichia coli
MIMPQHDQLHRYLFENFAVRGELVTVSETLQQILENHDYPQPVKNVLAELLVATSLLTATLKFDGDITVQLQGDGPMNLAVINGNNNQQMRGVARVQGEIPENADLKTLVGNGYVVITITPSEGERYQGVVGLEGDTLAACLEDYFMRSEQLPTRLFIRTGDVDGKPAAGGMLLQVMPAQNAQQDDFDHLATLTETIKTEELLTLPANEVLWRLYHEEEVTVYDPQDVEFKCTCSRERCADALKTLPDEEVDSILAEDGEIDMHCDYCGNHYLFNAMDIAEIRNNASPADPQVH

SEQ ID NO: 56727 - protein, 540 aa, Escherichia coli
MRVNNGLTPQELEAYGISDVHDIVYNPSYDLLYQEELDPSLTGYERGVLTNLGAVAVDTGIFTGRSPKDKYIVRDDTTRDTFWWADKGKGKNDNKPLSPETWQHLKGLVTRQLSGKRLFVVDAFCGANPDTRLSVRFITEVAWQAHFVKNMFIRPSDEELAGFKPDFIVMNGAKCTNPQWKEQGLNSENFVAFNLTERMQLIGGTWYGGEMKKGMFSMMNYLLPLKGIASMHCSANVGEKGDVAVFFGLSGTGKTTLSTDPKRRLIGDDEHGWDDDGVFNFEGGCYAKTIKLSKEAEPEIYNAIRRDALLENVTVREDGTIDFDDGSKTENTRVSYPIYHIDNIVKPVSKAGHATKVIFLTADAFGVLPPVSRLTADQTQYHFLSGFTAKLAGTERGITEPTPTFSACFGAAFLSLHPTQYAEVLVKRMQAAGAQAYLVNTGWNGTGKRISIKDTRAIIDAILNGSLDNAETFTLPMFNLAIPTELPGVDTKILDPRNTYASPEQWQEKAETLAKLFIDNFDKYTDTPAGAALVAAGPKL

SEQ ID NO: 56728 - protein, 450 aa, Escherichia coli
MRRLRFSPRSSFARTLLLIVTLLFASLVTTYLVVLNFAILPSLQQFNKVLAYEVRMLMTDKLQLEDGTQLVVPPAFRREIYRELGISLYSNEAAEEAGLRWAQHYEFLSHQMAQQLGGPTEVRVEVNKSSPVVWLKTWLSPNIWVRVPLTEIHQGDFSPLFRYTLAIMLLAIGGAWLFIRIQNRPLVDLEHAALQVGKGIIPPPLREYGASEVRSVTRAFNHMAAGVKQLADDRTLLMAGVSHDLRTPLTRIRLATEMMSEQDGYLAESINKDIEECNAIIEQFIDYLRTGQEMPMEMADLNAVLGEVIAAESGYEREIETALYPGSIEVKMHPLSIKRAVANMVVNAARYGNGWIKVSSGTEPNRAWFQVEDDGPGIAPEQRKHLFQPFVRGDSARTISGTGLGLAIVQRIVDNHNGMLELGTSERGGLSIRAWLPVPVTRAQGTTKEG

SEQ ID NO: 56729 - protein, 740 aa, Escherichia coli
MPFIARYRKEITGGLDDTQLRNLETRLSYLRELEERRQAILKSISEQGKLTDDLAKAINATLSKTELEDLYLPYKPKRRTRGQIAIEAGLEPLADLLWSDPSHTPEVAAAQYVYADKGVADTKAALDGARYILMERFAEDAALLAKVRDYLWKNAHLVSTVVSGKEEEGAKFRDYFDHHEPLSTVPSHRALAMFRGRNEGVLQLSLNADPQFDEPPKESYCEQIIMDHLGLRLNNAPADSWRKGVVSWTWRIKVLMHLETELMGTVRERAEDEAINVFARNLHDLLMAAPAGLRATMGLDPGLRTGVKVAVVDATGKLVATDTIYPHTGQAAKAAMTVAALCEKHNVELVAIGNGTASRETERFYLDVQKQFPKVTAQKVIVSEAGASVYSASELAAQEFPDLDVSLRGAVSIARRLQDPLAELVKIDPKSIGVGQYQHDVSQTQLARKLDAVVEDCVNAVGVDLNTASVPLLTRVAGLTRMMAQNIVAWRDENGQFQNRQQLLKVSRLGPKAFEQCAGFLRINHGDNPLDASTVHPEAYPVVERILAATQQALKDLMGNSSELRNLKASDFTDEKFGVPTVTDIIKELEKPGRDPRPEFKTAQFADGVETMNDLQPGMILEGAVTNVTNFGAFVDIGVHQDGLVHISSLSNKFVEDPHTVVKAGDIVKVKVLEVDLQRKRIALTMRLDEQPGETNARRGGGNERPQNNRPAAKPRGREAQPAGNSAMMDALAAAMGKKR

SEQ ID NO: 56730 - protein, 91 aa, Escherichia coli; identical to SEQ ID NO: 43001

SEQ ID NO: 56731 - protein, 425 aa, Escherichia coli
MKPMHIAMALLSAAMFFVLAGVFMGVQLELDGTKLVVDTASDVRWQWVFIGTAVVFFFQLLRPAFQKGLKSVSGPKFILPAIDGSTVKQKLFLVALLVLAVAWPFMVSRGTVDIATLTMIYIILGLGLNVVVGLSGLLVLGYGGFYAIGAYTFALLNHYYGLGFWTCLPIAGLMAAAAGFLLGFPVLRLRGDYLAIVTLGFGEIVRILLLNNTEITGGPNGISQIPKPTLFGLEFSRTAREGGWDTFSNFFGLKYDPSDRVIFLYLVALLLVVLSLFVINRLLRMPLGRAWEALREDEIACRSLGLSPRRIKLTAFTISAAFAGFAGTLFAARQGFVSPESFTFAESAFVLAIVVLGGMGSQFAVILAAILLVVSRELMRDFNEYSMLMLGGLMVLMMIWRPQGLLPMTRPQLKLKNGAAKGEQA

SEQ ID NO: 56732 - protein, 497 aa, Escherichia coli
MAKEKKRGFFSWLGFGQKEQTPEKETEVQNEQPVVEEIVQAQEPVKASEQAVEEQPQAHTEAEAETFAADVVEVTEQVAESEKAQPEAEVVAQPEPVVEETPEPVAIEREELPLPEDVNAEAVSPEEWQAEAETVEIVEAAEEEAAKEEITDEELETALAAEAAEEAVMVVPPAEEEQPVEEIAQEQEKPTKEGFFARLKRSLLKTKENLGSGFISLFRGKKIDDDLFEELEEQLLIADVGVETTRKIITNLTEGASRKQLRDAEALYGLLKEEMGEILAKVDEPLNVEGKAPFVILMVGVNGVGKTTTIGKLARQFEQQGKSVMLAAGDTFRAAAVEQLQVWGQRNNIPVIAQHTGADSASVIFDAIQAAKARNIDVLIADTAGRLQNKSHLMEELKKIVRVMKKLDVEAPHEVMLTIDASTGQNAVSQAKLFHEAVGLTGITLTKLDGTAKGGVIFSVADQFGIPIRYIGVGERIEDLRPFKADDFIEALFARED

SEQ ID NO: 56733 - protein, 400 aa, Escherichia coli
MERFDAIIIGAGAAGMFCSALAGQAGRRVLLIDNGKKPGRKILMSGGGRCNFTNLYVEPGAYLSQNPHFCKSALARFTQWDFIDLVNKHGIAWHEKTLGQLFCDDSAQQIVDMLVDECEKGNVTFRLRSEVLSVAKDETGFTLDLNGMTVGCEKLVIATGGLSMPGLGASPFGYKIAEQFGLNVLPTRAGLVPFTLHKPLLEELQVLAGVAVPSVITAENGTVFRENLLFTHRGLSGPAVLQISSYWQPGEFVSINLLPDVDLETFLNEQRNAHPNQSLKNTLAVHLPKRLVERLQQLGQIPDVSLKQLNVRDQQALISTLTDWRVQPNGTEGYRTAEVTLGGVDTNELSSRTMEARKVPGLYFIGEVMDVTGWLGGYNFQWAWSSAWACAQDLIAAKSS

SEQ ID NO: 56734 - protein, 499 aa, Escherichia coli
MLHLFAGLDLHTGLLLLLALAFVLFYEAINGFHDTANAVATVIYTRAMRSQLAVVMAAVFNFLGVLLGGLSVAYAIVHMLPTDLLLNMGSSHGLAMVFSMLLAAIIWNLGTWYFGLPASSSHTLIGAIIGIGLTNALMTGTSVVDALNIPKVLSIFGSLIVSPIVGLVFAGGLIFLLRRYWSGTKKRARIHLTPAEREKKDGKKKPPFWTRIALILSAIGVAFSHGANDGQKGIGLVMLVLIGVAPAGFVVNMNATGYEITRTRDAINNVEAYFEQHPALLKQATGADQLVPAPEAGATQPAEFHCHPSNTINALNRLKGMLTTDVESYDKLSLDQRSQMRRIMLCVSDTIDKVVKMPGVSADDQRLLKKLKSDMLSTIEYAPVWIIMAVALALGIGTMIGWRRVATTIGEKIGKKGMTYAQGMSAQMTAAVSIGLASYTGMPVSTTHVLSSSVAGTMVVDGGGLQRKTVTSILMAWVFTLPAAVLLSGGLYWLSLQFL

SEQ ID NO: 56735 - protein, 338 aa, Escherichia coli; identical to SEQ ID NO: 43054

SEQ ID NO: 56736 - protein, 242 aa, Escherichia coli [sequence omitted]

SEQ ID NO: 56737 - protein, 274 aa, Escherichia coli
MQSLHGNCLIAYARHKYILTMVNGEYRYFNGGDLVFADASQIRVDKCVENFVFVSRDTLSLFLPMLKEEALNLHAHKKVSSLLVHHCSRDIPVFQEVAQLSQNKNLRYAEMLRKRALIFALLSVFLEDEHFIPLLLNVLQPNMRTRVCTVINNNIAHEWTLARIASELLMSPSLLKKKLREEETSYSQLLTECRMQRALQLIVIHGFSIKRVAVSCGYHSVSYFIYVFRNYYGMTPTEYQERSAQRLSNRDSAASIVAQGNFYGTDRSAEGIRL

SEQ ID NO: 56738 - protein, 334 aa, Escherichia coli
MSTQEATLQQPLLQAIDLKKHYPVKKGMFAPERLVKALDGVSFNLERGKTLAVVGESGCGKSTLGRLLTMIEMPTGGELYYQGQDLLKHDPQAQKLRRQKIQIVFQNPYGSLNPRKKVGQILEEPLLINTSLSKEQRREKALSMMAKVGLKTEHYDRYPHMFSGGQRQRIAIARGLMLDPDVVIADEPVSALDVSVRAQVLNLMMDLQQELGLSYVFISHDLSVVEHIADEVMVMYLGRCVEKGTKDQIFNNPRHPYTQALLSATPRLNPDDRRERIKLSGELPSPLNPPPGCAFNARCRRRFGPCTQLQPQLKDYGGQLVACFAVDQDENPQR

SEQ ID NO: 56739 - protein, 484 aa, Escherichia coli
MYIGIDLGTSGVKVILLNEQGEVVAAQTEKLTVSRPHPLWSEQDPEQWWQATDRAMKALGDQHSLQDVKALGIAGQMHGATLLDAQQRVLRPAILWNDGRCAQECTLLEARVPQSRVITGNLMMPGFTAPKLLWVQRHEPEIFRQIDKVLLPKDYLRLRMTGEFASDMSDAAGTMWLDVAKRDWSDVMLQACDLSRDQMPALYEGSEITGALLPEVAKAWGMATVPVVAGGGDNAAGAVGVGMVDANQAMLSLGTSGVYFAVSEGFLSKPESAVHSFCHALPQRWHLMSVMLSAASCLDWAAKLTGLSNVPALIAAAQQADESAEPVWFLPYLSGERTPHNNPQAKGVFFGLTHQHGPNELARAVLEGVGYALADGMDVVHACGIKPQSVTLIGGGARSEYWRQMLADISGQQLDYRTGGDVGPALGAARLAQIAANPEKSLIELLPQLPLEQSHLPDAQRYAAYQPRRETFRRLYQQLLPLMA

SEQ ID NO: 56740 - protein, 233 aa, Escherichia coli
MQMLDRLESEILADRVSEESRRWLASCGLTVEQMKNQMDPVYTPARKIHLYHCDHRGLPLALISKEGTTEWCAEYDEWGNLLNEENPHQLQQLIRLPGQQYDEESGLYYNRHRYYDPLQGRYITQDPIGLKGGWNFYQYPLNPVINVDPQGLVDINLYPESDLIHSVADEINIPGVFTIGGHGTPTSIESATRSIMTAKDLAYLIKFDGNYKDGMTVWLFSCNTGKGQNSFAS

SEQ ID NO: 56741 - protein, 382 aa, Escherichia coli
MKALHFGAGNIGRGFIGKLLADAGIQLTFADVNQVVLDALNARHSYQVHVVGETEQVDTVSGVNAVSSIGDDVVDLIAQVDLVTTAVGPVVLERIAPAIAKGQVKRKEQGNESPLNIIACENMVRGTTQLKGHVMNALPEDAKAWVEEHVGFVDSAVDRIVPPSASATNDPLEVTVETFSEWIVDKTQFKGALPNIPGMELTDNLMAFVERKLFTLNTGHAITAYLGKLAGHQTIRDAILDEKIRAVVKGAMEESGAVLIKRYGFDADKHAAYIQKILGRFENPYLKDDVERVGRQPLRKLSAGDRLIKPLLGTLEYGLPHKNLIEGIAAAMHFRSEDDPQAQELAALIADKGPQAALAQISGLDANSEVVSEAVTAYKAMQ

SEQ ID NO: 56742 - protein, 273 aa, Escherichia coli
MSCEELEIVWNNIKAEARTLADCEPMLASFYHATLLKHENLGSALSYMLANKLSSPIMPAIAIREVVEEAYAADPEMIASAACDIQAVRTRDPAVDKYSTPLLYLKGFHALQAYRIGHWLWNQGRRALAIFLQNQVSVTFQVDIHPAAKIGRGIMLDHATGIVVGETAVIENDVSILQSVTLGGTGKSGGDRHPKIREGVMIGAGAKILGNIEVGRGAKIGAGSVVLQPVPPHTTAAGVPARIVGKPDSDKPSMDMDQHFNGINHTFEYGDGI

SEQ ID NO: 56743 - protein, 339 aa, Escherichia coli
MNQRNASMTVIGAGSYGTALAITLARNGHEVVLWGHDPEHIATLERDRCNAAFLPDVPFPDTLHLESDLATALAASRNILVVVPSHVFGEVLRQIKPLMRPDARLVWATKGLEAETGRLLQDVAREALGDQIPLAVISGPTFAKELAAGLPTAISLASTDQTFADDLQQLLHCGKSFRVYSNPDFIGVQLGGAVKNVIAIGAGMSDGIGFGANARTALITRGLAEMSRLGAALGADPATFMGMAGLGDLVLTCTDNQSRNRRFGMMLGQGMDVQSAQEKIGQVVEGYRNTKEVRELAHRFGVEMPITEEIYQVLYCGKNAREAALTLLGRARKDERSSH

SEQ ID NO: 56744 - protein, 344 aa, Escherichia coli
MMNSTNKLSVIIPLYNAGDDFRTCMESLITQTWTALEIIIINDGSTDNSVEIAKYYAENYPHVRLLHQANAGASVARNRGIEVATGKYVAFVDADDEVYPTMYETLMTMALEDDLDVAQCNADWCFRETGETWQSIPTDRLRSTGVLTGPDWLRMGLSSRRWTHVVWMGVYRRDVIVKNNIKFIAGLHHQDIVWTTEFMFNALRARYTEQSLYKYYLHNTSVSRLHRQGNKNLNYQRHYIKITRLLEKLNRNYADKIMIYPEFHQQITYEALRVCHAVRKEPDILTRQRMIAEIFTSGMYKRLITNVRSVKVGYQALLWSFRLWQWRDKTRSHHRITRSAFNLR

SEQ ID NO: 56745 - protein, 398 aa, Escherichia coli
MRGEFYQQLTNDLETARAEGLFKEERIITSAQQADITVADGSHVINFCANNYLGLANHPDLIAAAKAGMDSHGFGMASVRFICGTQDSHKELEQKLAAFLGMEDAILYSSCFDANGGLFETLLGAEDAIISDALNHASIIDGVRLCKAKRYRYANNDMQELEARLKEAREAGARHVLIATDGVFSMDGVIANLKGVCDLADKYDALVMVDDSHAVGFVGENGRGSHEYCDVMGRVDIITGTLGKALGGASGGYTAARKEVVEWLRQRSRPYLFSNSLAPAIVAASIKVLEMVEAGSELRDRLWANARQFREQMSAAGFTLAGADHAIIPVMLGDAVVAQKFARELQKEGIYVTGFFYPVVPKGQARIRTQMSAAHTPEQITRAVEAFTRIGKQLGVIA

SEQ ID NO: 56746 - protein, 213 aa, Escherichia coli
MKPYQRQFIEFALSKQVLKFGEFTLKSGRKSPYFFNAGLFNTGRDLALLGRFYAEALVDSGIEFDLLFGPAYKGIPIATTTAVALAEHHDLDLPYCFNRKEAKDHGEGGNLVGSALQGRVMLVDDVITAGTAIRESMEIIQANGATLAGVLISLDRQERGRGEISAIQEVERDYNCKVISIITLKDLIAYLEEKPEMAEHLAAVKAYREEFGV

SEQ ID NO: 56747 - protein, 501 aa, Escherichia coli
MMKTLFSRLITVIACFFIFSAAWFCLWSISLHLVERPDMAVLLFPFGLRLGLMLQCPRGYWPVLLGAEWLLIYWLTQAVGLTHFPLLMIGSLLTLLPVALISRYRHQRDWRTLLLQGAALTAAALLQSLPWLWHGKESWNALLLTLTGGLTLAPICLVFWHYLANNTWLPLGPSLVSQPINWRGRHLVWYLLLFVISLWLQLGLPDELSRFTPFCLALPIIALAWHYGWQGALIATLMNAIALIASQTWRDHPVDLLLSLLVQSLTGLLLGAGIQRLRELNQSLQKELARNQHLAERLLETEESVRRDVARELHDDIGQTITAIRTQAGIVQRLAADNASVKQSGQLIEQLSLGVYDAVRRLLGRLRPRQLDDLTLEQAIRSLMREMELEGRGIVSHLEWRIDESALSENQRVTLFRVCQEGLNNIVKHADASAVTLQGWQQDERLMLVIEDDGSGLPPGSGQQGFGLTGMRERVTALGGTLHISCLHGTRVSVSLPQRYV

SEQ ID NO: 56748 - protein, 270 aa, Escherichia coli
MAIKLIAIDMDGTLLLPDHTISPAVKNAIAAARARGVNVVLTTGRPYAGVHNYLKELHMEQPGDYCITYNGALVQKAADGSTVAQTALSYDDYRFLEKLSREVGSHFHALDRTTLYTANRDISYYTVHESFVATIPLVFCEAEKMDPNTQFLKVMMIDEPAILDQAIARIPQEVKEKYTVLKSAPYFLEILDKRVNKGTGVKSLADVLGIKPEEIMAIGDQENDIAMIEYAGVGVAMDNAIPSVKEVANFVTKSNLEDGVAFAIEKYVLN

SEQ ID NO: 56749 - protein, 804 aa, Escherichia coli
MSNSYDSSSIKVLKGLDAVRKRPGMYIGDTDDGTGLHHMVFEVVDNAIDEALAGHCKEIIVTIHADNSVSVQDDGRGIPTGIHPEEGVSAAEVIMTVLHAGGKFDDNSYKVSGGLHGVGVSVVNALSQKLELVIQREGKIHRQIYEHGVPQAPLAVTGETEKTGTMVRFWPSLETFTNVTEFEYEILAKRLRELSFLNSGVSIRLRDKRDGKEDHFHYEGGIKAFVEYLNKNKTPIHPNIFYFSTEKDGIGVEVALQWNDGFQENIYCFTNNIPQRDGGTHLAGFRAAMTRTLNAYMDKEGYSKKAKVSATGDDAREGLIAVVSVKVPDPKFSSQTKDKLVSSEVKSAVEQQMNELLAEYLLENPTDAKIVVGKIIDAARAREAPRRAREMTRRKGALDLAGLPGKLADCQERDPALSELYLVEGDSAGGSAKQGRNRKNQAILPLKGKILNVEKARFDKMLSSQEVATLITALGCGIGRDEYNPDKLRYHSIIIMTDADVDGSHIRTLLLTFFYRQMPEIVERGHVYIAQPPLYKVKKGKQEQYIKDDEAMDQYQISIALDGATLHTNASAPALAGEALEKLVSEYNATQKMINRMERRYPKAMLKELIYQPTLTEADLSDEQTVTRWVNALVSELNDKEQHGSQWKFDVHTNAEQNLFEPIVRVRTHGVDTDYPLDHEFITGGEYRRICTLGEKLRGLLEEDAFIERGERRQPVASFEQALDWLVKESRRGLSIQRYKGLGEMNPEQLWETTMDPESRRMLRVTVKDAIAADQLFTTLMGDAVEPRRAFIEENALKAANIDI

SEQ ID NO: 56750 - protein, 366 aa, Escherichia coli
MKFTVEREHLLKPLQQVSGPLGGRPTLPILGNLLLQVADGTLSLTGTDLEMEMVARVALVQPHEPGATTVPARKFFDICRGLPEGAEIAVQLEGERMLVRSGRSRFSLSTLPAADFPNLDDWQSEVEFTLPQATMKRLIEATQFSMAHQDVRYYLNGMLFETEGEELRTVATDGHRLAVCSMPIGQSLPSHSVIVPRKGVIELMRMLDGGDNPLRVQIGSNNIRAHVGDFIFTSKLVDGRFPDYRRVLPKNPDKHLEAGCDLLKQAFARAAILSNEKFRGVRLYVSENQLKITANNPEQEEAEEILDVTYSGAEMEIGFNVSYVLDVLNALKCENVRMMLTDSVSSVQIEDAASQSAAYVVMPMRL

SEQ ID NO: 56751 - protein, 467 aa, Escherichia coli
MSLSLWQQCLARLQDELPATEFSMWIRPLQAELSDNTLALYAPNRFVLDWVRDKYLNNINGLLTSFCGADAPQLRFEVGTKPVTQTPQAAVTSNVAAPAQVAQTQPQRAAPSTRSGWDNVPAPAEPTYRSNVNVKHTFDNFVEGKSNQLARAAARQVADNPGGAYNPLFLYGGTGLGKTHLLHAVGNGIMARKPNAKVVYMHSERFVQDMVKALQNNAIEEFKRYYRSVDALLIDDIQFFANKERSQEEFFHTFNALLEGNQQIILTSDRYPKEINGVEDRLKSRFGWGLTVAIEPPELETRVAILMKKADENDIRLPGEVAFFIAKRLRSNVRELEGALNRVIANANFTGRAITIDFVREALRDLLALQEKLVTIDNIQKTVAEYYKIKVADLLSKRRSRSVARPRQMAMALAKELTNHSLPEIGDAFGGRDHTTVLHACRKIEQLREESHDIKEDFSNLIRTLSS

SEQ ID NO: 56752 - protein, 319 aa, Escherichia coli
MAATKPAFNPPGKKGDIIFSVLVKLAALIVLLMLGGIIVSLIISSWPSIQKFGLAFLWTKEWDAPNDIYGALVPIYGTLVTSFIALLIAVPVSFGIALFLTELAPGWLKRPLGIAIELLAAIPSIVYGMWGLFIFAPLFAVYFQEPVGNIMSNIPIVGALFSGPAFGIGILAAGVILAIMIIPYIAAVMRDVFEQTPVMMKESAYGIGCTTWEVIWRIVLPFTKNGVIGGIMLGLGRALGETMAVTFIIGNTYQLDSASLYMPGNSITSALANEFAEAESGLHVAALMELGLILFVITFIVLAASKFMIMRLAKNEGAR

SEQ ID NO: 56753 - protein, 609 aa, Escherichia coli
MCGIVGAIAQRDVAEILLEGLRRLEYRGYDSAGLAVVDAEGHMTRLRRLGKVQMLAQAAEEHPLHGGTGIAHTRWATHGEPSEVNAHPHVSEHIVVVHNGIIENHEPLREELKARGYTFVSETDTEVIAHLVNWELKQGGTLREAVLRAIPQLRGAYGTVIMDSRHPDTLLAARSGSPLVIGLGMGENFIASDQLALLPVTRRFIFLEEGDIAEITRRSVNIFDKTGAEVKRQDIESNLQYDAGDKGIYRHYMQKEIYEQPNAIKNTLTGRISHGQVDLSELGPNADELLSKVEHIQILACGTSYNSGMVSRYWFESLAGIPCDVEIASEFRYRKSAVRRNSLMITLSQSGETADTLAGLRLSKELGYLGSLAICNVPGSSLVRESDLALMTNAGTEIGVASTKAFTTQLTVLLMLVAKLSRLKGLDASIEHDIVHGLQALPSRIEQMLSQDKRIEALAEDFSDKHHALFLGRGDQYPIALEGALKLKEISYIHAEAYAAGELKHGPLALIDADMPVIVVAPNNELLEKLKSNIEEVRARGGQLYVFADQDAGFVSSDNMHIIEMPHVEEVIAPIFYTVPLQLLAYHVALIKGTDVDQPRNLAKSVTVE

SEQ ID NO: 56754 - protein, 456 aa, Escherichia coli
MLNNAMSVVILAAGKGTRMYSDLPKVLHTLAGKAMVQHVIDAANELGAAHVHLVYGHGGDLLKQALKDDNLNWVLQAEQLGTGHAMQQAAPFFADDEDILMLYGDVPLISVETLQRLRDAKPQGGIGLLTVKLDDPTGYGRITRENGKVTGIVEHKDATDEQRQIQEINTGILIANGADMKRWLAKLTNNNAQGEYYITDIIALAYQEGREIVAVHPQRLSEVEGVNNRLQLSRLERVYQSEQAEKLLLAGVMLRDPARFDLRGTLTHGRDVEIDTNVIIEGNVTLGHRVKIGTGCVIKNSVIGDDCEISPYTVVEDANLAAACTIGPFARLRPGAELLEGAHVGNFVEMKKARLGKGSKAGHLTYLGDAEIGDNVNIGAGTITCNYDGANKFKTIIGDDVFVGSDTQLVAPVTVGKGATIAAGTTVTRNVGENALAISRVPQTQKEGWRRPVKKK

SEQ ID NO: 56755 - protein, 177 aa, Escherichia coli
MSEFITVARPYAKAAFDFAVEHQSVERWQDMLAFAAEVTKNEQMAELLSGALAPETLAESFIAVCGEQLDENGQNLIRVMAENGRLNALPDVLEQFIHLRAVSEATAEVDVISAAALSEQQLAKISAAMEKRLSRKVKLNCKIDKSVMAGVIIRAGDMVIDGSVRGRLERLADVLQS

SEQ ID NO: 56756 - protein, 156 aa, Escherichia coli
MNLNATILGQAIAFVLFVLFCMKYVWPPLMAAIEKRQKEIADGLASAERAHKDLDLAKASATDQLKKAKAEAQVIIEQANKRRSQILDEAKAEAEQERTKIVAQAQAEIEAERKRAREELRKQVAILAVAGAEKIIERSVDEAANSDIVDKLVAEL

SEQ ID NO: 56757 - protein, 207 aa, Escherichia coli
MLNKLSLLLKDAGISLTDHQKNQLIAYVNMLHKWNKAYNLTSVRDPNEMLVRHILDSIVVAPYLQGERFIDVGTGPGLPGIPLSIVRPEAHFTLLDSLGKRVRFLRQVQHELKLENIEPVQSRVEEFPSEPPFDGVISRAFASLNDMVSWCHHLPGEQGRFYALKGQMPEDEIALLPEEYQVESVVKLQVPALDGERHLVVIKANKI

SEQ ID NO: 56758 - protein, 629 aa, Escherichia coli
MFYPDPFDVIIIGGGHAGTEAAMAAARMGQQTLLLTHNIDTLGQMSCNPAIGGIGKGHLVKEVDALGGLMAKAIDQAGIQFRILNASKGPAVRATRAQADRVLYRQAVRTALENQPNLMIFQQAVEDLIVENDRVVGAVTQMGLKFRAKAVVLTVGTFLDGKIHIGLDNYSGGRAGDPPSIPLSRRLRELPLRVGRLKTGTPPRIDARTIDFSVLAQQHGDNPMPVFSFMGNASQHPQQVPCYITHTNEKTHDVIRSNLDRSPMYAGVIEGVGPRYCPSIEDKVMRFADRNQHQIFLEPEGLTSNEIYPNGISTSLPFDVQMQIVRSMQGMENAKIVRPGYAIEYDFFDPRDLKPTLESKFIQGLFFAGQINGTTGYEEAAAQGLLAGLNAARLSADKEGWAPARSQAYLGVLVDDLCTLGTKEPYRMFTSRAEYRLMLREDNADLRLTEIGRELGLVDDERWARFNEKLENIERERQRLKSTWVTPSAEAAAEVNAHLTAPLSREASGEDLLRRPEMTYEKLTTLTPFAPALTDEQAAEQVEIQVKYEGYIARQQDEIEKQLRNENTLLPATLDYRQVSGLSNEVIAKLNDHKPASIGQASRISGVTPAAISILLVWLKKQGMLRRSA

SEQ ID NO: 56759 - protein, 491 aa, Escherichia coli
MANYFNTLNLRQQLAQLGKCRFMGRDEFADGASYLQGKKVVIVGCGAQGLNQGLNMRDSGLDISYALRKEAIAEKRASWRKATENGFKVGTYEELIPQADLVINLTPDKQHSDVVRTVQPLMKDGAALGYSHGFNIVEVGEQIRKDITVVMVAPKCPGTEVREEYKRGFGVPTLIAVHPENDPKGEGMAIAKAWAAATGGHRAGVLESSFVAEVKSDLMGEQTILCGMLQAGSLLCFDKLVEEGTDPAYAEKLIQFGWETITEALKQGGITLMMDRLSNPAKLRAYALSEQLKEIMAPLFQKHMDDIISGEFSSGMMADWANDDKKLLTWREETGKTAFETAPQYEGKIGEQEYFDKGVLMIAMVKAGVELAFETMVDSGIIEESAYYESLHELPLIANTIARKRLYEMNVVISDTAEYGNYLFSYACVPLLKPFMAELQPGDLGKAIPEGAVDNGQLRDVNEAIRSHAIEQVGKKLRGYMTDMKRIAVAG

SEQ ID NO: 56760 - protein, 551 aa, Escherichia coli
MEFSFSPKRLVVAVAAALPLMASAADTPSTATARKGFAGYDHPNQYLVKPATTIADNMMPVMQHPAQDKETQQKLAELEKKTGKKPNVVVFLLDDVGWMDVGFNGGGVAVGNPTPDIDAVASQGLILTSAYSQPSSSPTRATILTGQYSIHHGILMPPMYGQPGGLQGLTTLPQLLHDQGYVTQAIGKWHMGENKESQPQNVGFDDFRGFNSVSDMYTEWRDVHVNPEVALSPDRSEYIKQLPFSKDDVHAVRGGEQQAIADITPKYMEDLDQRWMDYGVKFLDKMAKSDKPFFLYYGTRGCHFDNYPNAKYAGSSPARTSYGDCMVEMNDVFANLYKTLEKNGQLDNTLIVFTSDNGPEAEVPPHGRTPFRGAKGSTWEGGVRVPTFVYWKGMIQPRKSDGIVDLADLFPTALDLAGHPGAKVANLVPKTTFIDGVDQTSFFLGTNGQSNRKAEHYFLNGKLAAVRMDEFKYHVLIQQPYAYTQSGYQGGFTGTVMQTAGSSVFNLYTDPQESDSIGVRHIPMGVPLQTEMHAYMEILKKYPPRAQIKSD

SEQ ID NO: 56761 - protein, 320 aa, Escherichia coli
MIMTVTSMLDNVLRIATRQSPLALWQAHYVKDKLMASHPGLVVELVPMVTRGDVILDTPLAKVGGKGLFVKELEVALLENRADIAVHSMKDVPVEFPQGLGLVTICEREDPRDAFVSNNYDSLDALPAGSIVGTSSLRRQCQLAERRPDLIIRSLRGNVGTRLSKLDNGEYDAIILAVAGLKRLGLESRIRAGLPPEISLPAVGQGAVGIECRLDDSRTRELLAALNHHETALRVTAERAMNTRLEGGCQVPIGSYAELIDGEIWLRALVGRPDGSQIIRGERRGAPQDAEQMGISLAEELLNNGAREILAEVYNGDAPA

SEQ ID NO: 56762 - protein, 340 aa, Escherichia coli
MFQQQKDWETRENAFAAFTMGPLTDFWRQRDEAEFTGVDDIPVRFVRFRAQHHDRVVVICPGRIESYVKYAELAYDLFHLGFDVLIIDHRGQGRSGRLLADPHLGHVNRFNDYVDDLAAFWQQEVQPGPWRKRYILAHSMGGAISTLFLQRHPGVCDAIALTAPMFGIVIRMPSFMARQILNWAEAHPRFRDGYAIGTGRWRALPFAINVLTHSRQRYRRNLRFYADDPTIRVGGPTYHWVRESILAGEQVLAGAGDDATPTLLLQAEEERVVDNRMHDRFCELRTAAGHPVEGGRPLVIKGAYHEILFEKDAMASVALHAIVDFFNRHNSPSGNRSTEV

SEQ ID NO: 56763 - protein, 171 aa, Escherichia coli
MFATGRHHVDVGQIRDNLEIKSYMITSNGARVHDLDGNLIFAHNLDRDIASDLFGVVNDNPDIITNVYRDDEWFMNRHRPEEMRFFKEAVFQYALYEPGLLEPEGVSKVFFTCDSHEQLLPLEQAINARWGDRVNVSFSTLTCLEVMAGGVSKAMRWKAGELATAEGLIAL

SEQ ID NO: 56764 - protein, 251 aa, Escherichia coli
MVDKSQETTHFGFQTVAKEQKADMVAHVFHSVASKYDVMNDLMSFGIHRLWKRFTIDCSGVRRGQTVLDLAGGTGDLTAKFSRLVGETGKVVLADINESMPKMGREKLRNIGVIGNVEYVQANAEALPFPDNTFDCITISFGLRNVTDKDKALRSMYRVLKPGGRLLVLEFSKPIIEPLSKAYDAYSFHVLPRIGSLVANDADSYRYLAESIRMHPDQDTLKAMMQDAGFESVDYYNLTAGVVALHRGYKF

SEQ ID NO: 56765 - protein, 387 aa, Escherichia coli
MEQVVIVDAIRTPMGRSKGGAFRNVRAEDLSAHLMRTLLARNPALEAAALDDIYWGCVQQTLEQGFNIARNAALLAEVPHSVPAVTVNRLCGSSMQALHDAARMIMTGDAQACLVGGVEHMGHVPMSHGVDFHPGLSRNVAKAAGMMGLTAEMLARMHGISREMQDAFAARSHARAWAATQSAAFKNEIIPTGGHDADGVLKQFNYDEVIRPETTVEALATLRPAFDPVNGMVTAGTSSALSDGAAAMLVMSESRAHELGLKPRARVRSMAVVGCDPSIMGYGPVPASKLALKKAGLSASDIGVFEMNEAFAAQILPCIKDLGLIEQIDEKINLNGGAIALGHPLGCSGARISTTLLNLMERKDVQFGLATMCIGLGQGIATVFERV

SEQ ID NO: 56766 - protein, 729 aa, Escherichia coli
MLYKGDTLYLDWLEDGIAELVFDAPGSVNKLDTATVASLGEAIGVLEQQSDLKGLLLRSNKAAFIVGADITEFLSLFLVPEEQLSQWLHFANSVFNRLEDLPVPTIAAVNGYALGGGCECVLATDYRLATPDLRIGLPETKLGIMPGFGGSVRMPRMLGADSALEIIAAGKDVGADQALKIGLVDGVVKAEKLVEGAKAVLRQAINGDLDWKAKRQPKLEPLKLSKIEATMSFTIAKGMVAQTAGKHYPAPITAVKTIEAAARFGREEALNLENKSFVPLAHTNEARALVGIFLNDQYVKGKAKKLTKDVETPKQAAVLGAGIMGGGIAYQSAWKGVPVVMKDINDKSLTLGMTEAAKLLNKQLERGKIDGLKLAGVISTIHPTLDYAGFDRVDIVVEAVVENPKVKKAVLAETEQKVRQDTVLASNTSTIPISELANALERPENFCGMHFFNPVHRMPLVEIIRGEKSSDETIAKVVAWASKMGKTPIVVNDCPGFFVNRVLFPYFAGFSQLLRDGADFRKIDKVMEKQFGWPMGPAYLLDVVGIDTAHHAQAVMAAGFPQRMQKDYRDAIDALFDANRFGQKNGLGFWRYKEDSKGKPKKEEDAAVEDLLAEVSQPKRDFSEEEIIARMMIPMVNEVVRCLEEGIIATPAEADMALVYGLGFPPFHGGAFRWLDTLGSAKYLDMAQQYQHLGPLYEVPEGLRNKARHNEPYYPPVEPARPVGDLKTA

SEQ ID NO: 56767 - protein, 928 aa, Escherichia coli [sequence omitted]

SEQ ID NO: 56768 - protein, 469 aa, Escherichia coli
MSAEHVLTMLNEHEVKFVDLRFTDTKGKEQHVTIPAHQVNAEFFEEGKMFDGSSIGGWKGINESDMVLMPDASTAVIDPFFADSTLIIRCDILEPGTLQGYDRDPRSIAKRAEDYLRSTGIADTVLFGPEPEFFLFDDIRFGSSISGSHVAIDDIEGAWNSSTQYEGGNKGHRPAVKGGYFPVPPVDSAQDIRSEMCLVMEQMGLVVEAHHHEVATAGQNEVATRFNTMTKKADEIQIYKYVVHNVAHRFGKTATFMPKPMFGDNGSGMHCHMSLSKNGVNLFAGDKYAGLSEQALYYIGGVIKHAKAINALANPTTNSYKRLVPGYEAPVMLAYSARNRSASIRIPVVSSPKARRIEVRFPDPAANPYLCFAALLMAGLDGIKNKIHPGEAMDKNLYDLPPEEAKEIPQVAGSLEEALNELDLDREFLKAGGVFTDEAIDAYIALRREEDDRVRMTPHPVEFELYYSV

SEQ ID NO: 56769 - protein, 292 aa, Escherichia coli
MNKYTINDITRASGGFAMLAVDQREAMRMMFAAAGAPAPVADSVLTDFKVNAAKALSPYASAILVDQQFCYRQVVEQNAIAKSCAMIVAADEFIPGNGIPVDSVVIDRKINPLQIKQDGGKALKLLVLWRSDEDAQQRLDMVKEFNELCHSHGLVSIIEPVVRPPRRGDKFDREQAIIDAAKELGDSGADLYKVEMPLYGKGPQQELLCASQRLNDHINMPWVILSSGVDEKLFPRAVRVAMTAGASGFLAGRAVWASVVGLPDNELMLRDVCAPKLQQLGDIVDEMMAKRR

SEQ ID NO: 56770 - protein, 232 aa, Escherichia coli
MNKILLVDDDRELTSLLKELLEMEGFNVIVAHDGEQALDLLDDSIDLLLLDVMMPKKNGIDTLKALRQTHQTPVIMLTARGSELDRVLGLELGADDYLPKPFNDRELVARIRAILRRSHWSEQQQNNDNGSPTLEVDALVLNPGRQEASFDGQTLELTGTEFTLLYLLAQHLGQVVSREHLSQEVLGKRLTPFDRAIDMHISNLRRKLPDRKDGHPWFKTLRGRGYLMVSAS

SEQ ID NO: 56771 - protein, 320 aa, Escherichia coli
MIKKIGVLTSGGDAPGMNAAIRGVVRSALTEGLEVMGIYDGYLGLYEDRMVQLDRYSVSDMINRGGTFLGSARFPEFRDENIRAVAIENLKKRGIDALVVIGGDGSYMGAMRLTEMGFPCIGLPGTIDNDIKGTDYTIGFFTALSTVVEAIDRLRDTSSSHQRISVVEVMGRYCGDLTLAAAIAGGCEFVVVPEVEFSREDLVNEIKAGIAKGKKHAIVAITEHMCDVDELAHFIEKETGRETRATVLGHIQRGGSPVPYDRILASRMGAYAIDLLLAGYGGRCVGIQNEQLVHHDIIDAIENMKRPFKGDWLDCAKKLY

SEQ ID NO: 56772 - protein, 176 aa, Escherichia coli
MTTIVSVRRNGHVVIAGDGQATLGNTVMKGNVKKVRRLYNDKVIAGFAGGTADAFTLFELFERKLEMHQGHLVKAAVELAKDWRTDRMLRKLEALLAVADETASLIITGNGDVVQPENDLIAIGSGGPYAQAAARALLENTELSAREIAEKALDIAGDICIYTNHFHTIEELSYKA

SEQ ID NO: 56773 - protein, 220 aa, Escherichia coli
MELYLDTANVAEVERLARIFPIAGVTTNPSIIAASKESIWEVLPRLQKAIGDEGILFAQTMSRDAQGMVEEAKRLRDAIPGIVVKIPVTSEGLAAIKILKKEGITTLGTAVYSAAQGLLAALAGAKYVAPYVNRVDAQGGDGIRTVQELQTLLEMHAPESMVLAASFKTPRQALDCLLAGCESITLPLDVAQQMLNTPAVESAIEKFEHDWNAAFGTTHL

SEQ ID NO: 56774 - protein, 444 aa, Escherichia coli
MGLVKQGARVAVIERYQNVGGGCTHWGTIPSKALRHAVSRIIEFNQNPLYSDHSRLLRSSFADILNHADNVINQQTRMRQGFYERNHCEILQGNARFVDEHTLALDCPDGSVETLTAEKFVIACGSRPYHPTDVDFTHPRIYDSDSILSMHHEPRHVLIYGAGVIGCEYASIFRGMDVKVDLINTRDRLLAFLDQEMSDSLSYHFWNSGVVIRHNEEYEKIEGCDDGVIMHLKSGKKLKADCLLYANGRTGNTDSLALQNIGLETDSRGQLKVNSMYQTAQPHVYAVGDVIGYPSLASAAYDQGRIAAQALVKGEATAHLIEDIPTGIYTIPEISSVGKTEQQLTAMKVPYEVGRAQFKHLARAQIVGMNVGTLKILFHRETKEILGIHCFGERAAEIIHIGQAIMEQKGGGNTIEYFVNTTFNYPTMAEAYRVAALNGLNRLF

SEQ ID NO: 56775 - protein, 342 aa, Escherichia coli
MNHSLKPWNTFGIDHNAQHIVCAEDEQQLLNAWQYATAEGQPVLILGEGSNVLFLEDYRGTVIINRIKGIEIHDEPDAWYLHVGAGENWHRLVKYTLQEGMPGLENLALIPGCVGSSPIQNIGAYGVELQRVCAYVDSVELATGKQVRLTAKECRFGYRDSIFKHEYQDRFAIVAVGLRLPKEWQPVLTYGDLTRLDPTTVTPQQVFNAVCHMRTTKLPDPKVNGNAGSFFKNPVVSAETAKALLSQFPTAPNYPQADGSVKLAAGWLIDQCQLKGMQIGGAAVHRQQALVLINEDNAKSEDVVQLAHHVRQKVGEKFNVWLEPEVRFIGASGEVSAVETIS

SEQ ID NO: 56776 - protein, 281 aa, Escherichia coli
MSSGRNISCRMATRSCFFRLLQGVEMLRIADKTFDSHLFTGTGKFASSQLMVEAIRASGSQLVTLAMKRVDLRQHNDAILEPLIAAGVTLLPNTSGAKTAEEAIFAAHLAREALGTNWLKLEIHPDARWLLPDPIETLKAAETLVQQGFVVLPYCGADPVLCKRLEEVGCAAVMPLGAPIGSNQGLETRAMLEIIIQQATVPVVVDAGIGVPSHAAQALEMGADAVLVNTAIAVADDPVNMAKAFRLAVEAGLLARQSGPGSRSYFAHATSPLTGFLEASA

SEQ ID NO: 56777 - protein, 245 aa, Escherichia coli
MRYSRQILLDDIALDGQQKLLDSQVLIIGLGGLGTPAALYLAGAGVGTLVLADDDDVHLSNLQRQILFTTEDIDRPKSQVSQQRLTQLNPDIQLTALQQRLTGEALKDAVARADVVLDCTDNMATRQEINAACVALNTPLITASAVGFGGQLMVLTPPWEQGCYRCLWPDNQEPERNCRTAGVVGPVVGVMGTLQALEAIKLLSGIETPAGELRLFDGKSSQWRSLALRRASGCPVCGGSNADPV

SEQ ID NO: 56778 - protein, 211 aa, Escherichia coli
MYQPDFPPVPFRSGLYPVVDSVQWIERLLDAGVRTLQLRIKDRRDEEVEADVVAAIALGRRYNARLFINDYWRLAIKHQAYGVHLGQEDLQATDLNAIRAAGLRLGVSTHDDMEIDVALAARPSYIALGHVFPTQTKQMPSAPQGLEQLARHVERLADYPTVAIGGISLARAPAVIATGVGSIAVVSAITQAADWRLATAQLLEIAGVGDE

SEQ ID NO: 56779 - protein, 434 aa, Escherichia coli
MKTRTQQIEELQKEWTQPRWEGITRPYSAEDVVKLRGSVNPECTLAQLGAAKMWRLLHGESKKGYINSLGALTGGQALQQAKAGIEAVYLSGWQVAADANLAASMYPDQSLYPANSVPAVVERINNTFRRADQIQWSAGIEPGDPRYVDYFLPIVADAEAGFGGVLNAFELMKAMIEAGAAAVHFEDQLASVKKCGHMGGKVLVPTQEAIQKLVAARLAADVTGVPTLLVARTDADAADLITSDCDPYDSEFITGERTSEGFFRTHAGIEQAISRGLAYAPYADLVWCETSTPDLELARRFAQAIHAKYPGKLLAYNCSPSFNWQKNLDDKTIASFQQQLSDMGYKFQFITLAGIHSMWFNMFDLANAYAQGEGMKHYVEKVQQPEFAAAKDGYTFVSHQQEVGTGYFDKVTTIIQGGTSSVTALTGSTEESQF

SEQ ID NO: 56780 - protein, 1227 aa, Escherichia coli
MSSKVEQLRAQLNERILVLDGGMGTMIQSYRLNEADFRGERFADWPCDLKGNNDLLVLSKPEVIAAIHNAYFEAGADIIETNTFNSTTIAMADYQMESLSAEINFAAAKLARACADEWTARTPEKPRYVAGVLGPTNRTASISPDVNDPAFRNITFDGLVAAYRESTKALVEGGADLILIETVFDTLNAKAAVFAVKTEFEALGVELPIMISGTITDASGRTLSGQTTEAFYNSLRHAEALTFGLNCALGPDELRQYVQELSRIAECYVTAHPNAGLPNAFGEYDLDADTMAKQIREWAQAGFLNIVGGCCGTTPQHIAAMSRAVEGLAPRKLPEIPVACRLSGLEPLNIGEDSLFVNVGERTNVTGSAKFKRLIKEEKYSEALDVARQQVENGAQIIDINMDEGMLDAEAAMVRFLNLIAGEPDIARVPIMIDSSKWDVIEKGLKCIQGKGIVNSISMKEGVDAFIHHAKLLRRYGAAVVVMAFDEQGQADTRARKIEICRRAYKILTEEVGFPPEDIIFDPNIFAVATGIEEHNNYAQDFIGACEDIKRELPHALISGGVSNVSFSFRGNDPVREAIHAVFLYYAIRNGMDMGIVNAGQLAIYDDLPAELRDAVEDVILNRRDDGTERLLELAEKYRGSKTDDTANAQQAEWRSWEVNKRLEYSLVKGITEFIEQDTEEARQQATRPIEVIEGPLMDGMNVVGDLFGEGKMFLPQVVKSARVMKQAVAYLEPFIEASKEQGKTNGKMVIATVKGDVHDIGKNIVGVVLQCNNYEIVDLGVMVPAEKILRTAKEVNADLIGLSGLITPSLDEMVNVAKEMERQGFTIPLLIGGATTSKAHTAVKIEQNYSGPTVYVQNASRTVGVVAALLSDTQRDDFVARTRKEYETVRIQHGRKKPRTPPVTLEAARDNDFAFDWQAYTPPVAHRLGVQEVEASIETLRNYIDWTPFFMTWSLAGKYPRILEDEVVGVEAQRLFKDANDMLDKLSAEKTLNPRGVVGLFPANRVGDDIEIYRDETRTHVINVSHHLRQQTEKTGFANYCLADFVAPKLSGKADYIGAFAVTGGLEEDALADAFEAQHDDYNKIMVKALADRLAEAFAEYLHERVRKVYWGYAPNENLSNEELIRENYQGIRPAPGYPACPEHTEKATIWELLEVEKHTGMKLTESFAMWPGASVSGWYFSHPDSKYYAVAQIQRDQVEDYARRKGMSVTEVERWLAPNLGYDAD

SEQ ID NO: 56781 - protein, 290 aa, Escherichia coli
MLPDSSVRLNKYISESGICSRREADRYIEQGNVFLNGKRATIGDQVKPGDVVKVNGQLIEPREAEDLVLIALNKPVGIVSTTEDGERDNIVDFVNHSKRVFPIGRLDKDSQGLIFLTNHGDLVNKILRAGNDHEKEYLVTVDKPITEEFIRGMSAGVPILGTVTKKCKVKKEAPFVFRITLVQGLNRQIRRMCEHFGYEVKKLERTRIMNVSLSGIPLGEWRDLTDDELIDLFKLIENSSSEVKPKAKAKPKTAGIKRPVVKMEKTAEKGGRPASNGKRFTSPGRKKKGR

SEQ ID NO: 56782 - protein, 122 aa, Escherichia coli
MANNTTGFTRIIKAAGYSWKGLRAAWINEAAFRQEGVAVLLAVVIACWLDVDAITRVLLISSVMLVMIVEILNSAIEAVVDRIGSEYHELSGRAKDMGSAAVLIAIIVAVITWCILLWSHFG

SEQ ID NO: 56783 - protein, 69 aa, Escherichia coli
MNKDEAGGNWKQFKGKVKEQWGKLTDDDMTIIEGKRDQLVGKIQERYGYQKDQAEKEVVDWETRNEYRW

SEQ ID NO: 56784 - protein, 327 aa, Escherichia coli
MATRIEFHKHGGPEVLQAVEFTPADPAENEIQVENKAIGINFIDTYIRSGLYPPPSLPSGLGTEAAGIVSKVGSGVKHIKAGDRVVYAQSALGAYSSVHNIIADKAAILPAAISFEQAAASFLKGLTVYYLLRKTYEIKPDEQFLFHAAAGGVGLIACQWAKALGAKLIGTVGTAQKAQSALKAGAWQVINYREEDLVERLKEITGGKKVRVVYDSVGRDTWERSLDCLQRRGLMVSFGNSSGAVTGVNLGILNQKGSLYVTRPSLQGYITTREELTEASNELFSLIASGVIKVDVAEQQKYPLKDAQRAHEILESRATQGSSLLIP

SEQ ID NO: 56785 - protein, 471 aa, Escherichia coli
MAGNKPFNKQQAEPRERDPQVAGLKVPPHSIEAEQSVLGGLMLDNERWDDVAERVVADDFYTRPHRHIFTEMARLQESGSPIDLITLAESLERQGQLDSVGGFAYLAELSKNTPSAANISAYADIVRERAVVREMISVANEIAEAGFDPQGRTSEDLLDLAESRVFKIAESRANKDEGPKNIADVLDATVARIEQLFQQPHDGVTGVNTGYDDLNKKTAGLQPSDLIIVAARPSMGKTTFAMNLVENAAMLQDKPVLIFSLEMPSEQIMMRSLASLSRVDQTKIRTGQLDDEDWARISGTMGILLEKRNIYIDDSSGLTPTEVRSRARRIAREHGGIGLIMIDYLQLMRVPALSDNRTLEIAEISRSLKALAKELNVPVVALSQLNRSLEQRADKRPVNSDLRESGSIEQDADLIMFIYRDEVYHENSDLKGIAEIIIGKQRNGPIGTVRLTFNGQWSRFDNYAGPQYDDE

SEQ ID NO: 56786 - protein, 359 aa, Escherichia coli
MQAATVVINRRALRHNLQRLRELAPASKMVAVVKANAYGHGLLETARTLPDADAFGVARLEEALRLRAGGITKPVLLLEGFFDARDLPTISAQHFHTAVHNEEQLAALEEASLDEPVTVWMKLDTGMHRLGVRPEQAEAFYHRLTQCKNVRQPVNIVSHFARADEPKCGATEKQLAIFNTFCEGKPGQRSIAASGGILLWPQSHFDWVRPGIILYGVSPLEDRSTGADFGCQPVMSLTSSLIAVREHKAGEPVGYGGTWVSERDTRLGVVAMGYGDGYPRAAPSGTPVLVNGREVPIVGRVAMDMICVDLGPQAQDKAGDPVILWGEGLPVERIAEMTKVSAYELITRLTSRVAMKYVD

SEQ ID NO: 56787 - protein, 940 aa, Escherichia coli
MDKIEVRGARTHNLKNINLVIPRDKLIVVTGLSGSGKSSLAFDTLYAEGQRRYVESLSAYARQFLSLMEKPDVDHIEGLSPAISIEQKSTSHNPRSTVGTITEIHDYLRLLFARVGEPRCPDHDVPLAAQTVSQMVDNVLSQPEGKRLMLLAPIIKERKGEHTKTLENLASQGYIRARIDGEVCDLSDPPKLELQKKHTIEVVVDRFKVRDDLTQRLAESFETALELSGGTAVVADMDDPKAEELLFSANFACPICGYSMRELEPRLFSFNNPAGACPTCDGLGVQQYFDPDRVIQNPELSLAGGAIRGWDRRNFYYFQMLKSLADHYKFDVEAPWGSLSANVHKVVLYGSGKENIEFKYMNDRGDTSIRRHPFEGVLHNMERRYKETESSAVREELAKFISNRPCASCEGTRLRREARHVYVENTPLPAISDMSIGHAMEFFNNLKLAGQRAKIAEKILKEIGDRLKFLVNVGLNYLTLSRSAETLSGGEAQRIRLASQIGAGLVGVMYVLDEPSIGLHQRDNERLLGTLIHLRDLGNTVIVVEHDEDAIRAADHVIDIGPGAGVHGGEVVAEGPLEAIMAVPESLTGQYMSGKRKIEVPKKRVPANPEKVLKLTGARGNNLKDVTLTLPVGLFTCITGVSGSGKSTLINDTLFPIAQRQLNGATIAEPAPYRDIQGLEHFDKVIDIDQSPIGRTPRSNPATYTGVFTPVRELFAGVPESRARGYTPGRFSFNVRGGRCEACQGDGVIKVEMHFLPDIYVPCDQCKGKRYNRETLEIKYKGKTIHEVLDMTIEEAREFFDAVPALARKLQTLMDVGLTYIRLGQSATTLSGGEAQRVKLARELSKRGTGQTLYILDEPTTGLHFADIQQLLDVLHKLRDQGNTIVVIEHNLDVIKTADWIVDLGPEGGSGGGEILVSGTPETVAECEASHTARFLKPML

SEQ ID NO: 56788 - protein, 652 aa, Escherichia coli
MSQIHKHTIPANIADRCLINPQQYEAMYQQSINVPDTFWGEQGKILDWIKPYQKVKNTSFAPGNVSIKWYEDGTLNLAANCLDRHLQENGDRTAIIWEGDDASQSKHISYKELHRDVCRFANTLLELGIKKGDVVAIYMPMVPEAAVAMLACARIGAVHSVIFGGFSPEAVAGRIIDSNSRLVITSDEGVRAGRSIPLKKNVDDALKNPNVTSVEHVVVLKRTGGKIDWQEGRDLWWHDLVEQASDQHQAEEMNAEDPLFILYTSGSTGKPKGVLHTTGGYLVYAALTFKYVFDYHPGDIYWCTADVGWVTGHSYLLYGPLACGATTLMFEGVPNWPTPARMAQVVDKHQVNILYTAPTAIRALMAEGDKAIEGTDRSSLRILGSVGEPINPEAWEWYWKKIGNEKCPVVDTWWQTETGGFMITPLPGATELKAGSATRPFFGVQPALVDNEGNPLEGATEGSLVITDSWPGQARTLFGDHERFEQTYFSTFKNMYFSGDGARRDEDGYYWITGRVDDVLNVSGHRLGTAEIESALVAHPKIAEAAVVGIPHNIKGQAIYAYVTLNHGEEPSPELYAEVRNWVRKEIGPLATPDVLHWTDSLPKTRSGKIMRRILRKIAAGDTSNLGDTSTLADPGVVEKLLEEKQAIAMPS

SEQ ID NO: 56789 - protein, 665 aa, Escherichia coli
MEIYMNNSRLFRLSRIVIALTAASGMMVNTANAKEEAKAATQYTQQVNQNYAKSLPFSDRQDFDDAQRGFIAPLLDEGILRDANGKVYYRADDYKFDINAAAPETVNPSLWRQSQINGISGLFKVTDKMYQVRGQDISNITFVEGEKGIIVIDPLVTPPAAKAALDLYFQHRPQKPIVAVIYTHSHTDHYGGVKGIISEADVKSGKVQVIAPAGFMDEAISENVLAGNIMSRRALYSYGLLLPHNAQGNVGNGLGVTLATGDPSIIAPTKTIVRTGEKMIIDGLEFDFLMTPGSEAPAEMHFYIPALKALCTAENATHTLHNFYTLRGAKTRDTSKWTEYLNETLDMWGNDAEVLFMPHTWPVWGNKHINDYIGKYRDTIKYIHDQTLHLANQGYTMNEIGDMIKLPPALANNWASRGYYGSVSHNARAVYNFYLGYYDGNPANLHPYGQVEMGKRYVQALGGSARVINLAQEANKQGDYRWSAELLKQVIAANPGDQVAKNLQANNFEQLGYQAESATWRGFYLTGAKELREGVHKFSHGTTGSPDTIRGMSVEMLFDFMAVRLDSAKAAGKNISLNFNMSNGDNLNLTLNDSVLNYRKTLQPQADASFYISREDLHAVLTGQAKMADLVKAKKAKIIGNGAKLEEIIACLDNFDLWVNIVTPN

SEQ ID NO: 56790 - protein, 307 aa, Escherichia coli
MASSIQGQENVMSQSEFDSALPNGIGLAPYLRMKQEGMTENESRIVEWLLKPGNLSCAPAIKDVAEALAVSEAMIVKVSKLLGFSGFRNLRSALEDYFSQSEQVLPSELAFDEAPQDVVNKVFNITLRTIMEGQSIVNVDEIHRAARFFYQARQRDLYGAGGSNAICADVQHKFLRIGVRCQAYPDAHIMMMSASLLQEGDVVLVVTHSGRTSDVKAAVELAKKNGAKIICITHSYHSPIAKLADYIICSPAPETPLLGRNASARILQLTLLDAFFVSVAQLNIEQANINMQKTGAIVDFFSPGALK

SEQ ID NO: 56791 - protein, 149 aa, Escherichia coli
MKKIAFGCDHVGFILKHEIVAHLVERGVEVIDKGTWSSERTDYPHYASQVALAVAGGEVDGGILICGTGVGISIAANKFAGIRAVVCSEPYSAQLSRQHNDTNVLAFGSRVVGLELAKMIVDAWLGAQYEGGRHQQRVEAITAIEQRRN

SEQ ID NO: 56792 - protein, 378 aa, Escherichia coli
MIINNVKLVLENEVVSGSLEVQNGEIRAFAESQSRLPEAMDGEGGWLLPGLIELHTDNLDKFFTPRPKVDWPAHSAMSSHDALMVASGITTVLDAVAIGDVRDGGDRLENLEKMINAIEETQKRGVNRAEHRLHLRCELPHHTTLPLFEKLVQREPVTLVSLMDHSPGQRQFANREKYREYYQGKYSLTDAQMQQYEEEQLALAARWSQPNRESIAALCRARKIALASHDDATHAHVAESHQLGSVIAEFPTTFEAAEASRKHGMNVLMGAPNIVRGGSHSGNVAASELAQLGLLDILSSDYYPASLLDAAFRVADDQSNRFTLPQAVKLVTKNPAQALNLQDRGVIGEGKRADLVLAHRKDNHIHIDHVWRQGKRVF

SEQ ID NO: 56793 - protein, 505 aa, Escherichia coli
MSEQETRGANEAIDFNDELRNRREKLAALRQQGVAFPNDFRRDHTSDQLHEEFDAKDNQELESLNIEVSVAGRMMTRRIMGKASFVTLQDVGGRIQLYVARDSLPEGVYNDQFKKWDLGDIIGARGTLFKTQTGELSIHCTELRLLTKALRPLPDKFHGLQDQEVRYRQRYLDLIANDKSRQTFVVRSKILAAIRQFMVARGFMEVETPMMQVIPGGASARPFITHHNALDLDMYLRIAPELYLKRLVVGGFERVFEINRNFRNEGISVRHNPEFTMMELYMAYADYHDLIELTESLFRTLAQEVLGTTKVTYGEHVFDFGKPFEKLTMREAIKKYRPETDMADLDNFDAAKALAESIGITVEKSWGLGRIVTEIFDEVAEAHLIQPTFITEYPAEVSPLARRNDVNPEITDRFEFFIGGREIGNGFSELNDAEDQAERFQEQVNAKAAGDDEAMFYDEDYVTALEYGLPPTAGLGIGIDRMIMLFTNSHTIRDVILFPAMRPQK

SEQ ID NO: 56794 - protein, 615 aa, Escherichia coli
MPIQVLPPQLANQIAAGEVVERPASVVKELVENSLDAGATRIDIDIERGGAKLIRIRDNGCGIKKDELALALARHATSKIASLDDLEAIISLGFRGEALASISSVSRLTLTSRTAEQQEAWQAYAEGRDMNVTVKPAAHPVGTTLEVLDLFYNTPARRKFLRTEKTEFNHIDEIIRRIALARFDVTINLSHNGKIVRQYRAVPEGGQKERRLGAICGTAFLEQALAIEWQHGDLTLRGWVADPNHTTPALAEIQYCYVNGRMMRDRLINHAIRQACEDKLGADQQPAFVLYLEIDPHQVDVNVHPAKHEVRFHQSRLVHDFIYQGVLSVLQQQLETPLPLDDEPQPAPRSIPENRVAAGRNHFAEPAAREPVAPRYTPAPASGSRPAAPWPNAQPGYQKQQGEVYRQLLQTPAPMQKLKAPEPQEPALAANSQSFGRVLTIVHSDCALLERDGNISLLSLPVAERWLRQAQLTPGEAPVCAQPLLIPLRLKVSAEEKSALEKAQSALAELGIDFQSDAQHVTIRAVPLPLRQQNLQILIPELIGYLAKQSVFEPGNIAQWIARNLMSEHAQWSMAQAITLLADVERLCPQLVKTPPGGLLQSVDLHPAIKALKDE

SEQ ID NO: 56795 - protein, 419 aa, Escherichia coli
MAWNQPGNNGQDRDPWGSSKPGGNSEGNGNKGGRDQGPPDLDDIFRKLSKKLGGLGGGKGTGSGGGSSSQGPRPQLGGRVVTIAAAAIVIIWAASGFYTIKEAERGVVTRFGKFSHLVEPGLNWKPTFIDEVKPVNVEAVRELAASGVMLTSDENVVRVEMNVQYRVTNPEKYLYSVTSPDDSLRQATDSALRGVIGKYTMDRILTEGRTVIRSDTQRELEETIRPYDMGITLLDVNFQAARPPEEVKAAFDDAIAARENEQQYIREAEAYTNEVQPRANGQAQRILEEARAYKAQTILEAQGEVARFAKLLPEYKAAPEITRERLYIETMEKVLGNTRKVLVNDKGGNLMVLPLDQMLKGGNAPAAKSDNGASNLLRLPPASSSTTSGASNTSSTSQGDIMDQRRANAQRNDYQRQGE

SEQ ID NO: 56796 - protein, 432 aa, Escherichia coli
MGNNVVVLGTQWGDEGKGKIVDLLTERAKYVVRYQGGHNAGHTLVINGEKTVLHLIPSGILRENVTSIIGNGVVLSPAALMKEMKELEDRGIPVRERLLLSEACPLILDYHVALDNAREKARGAKAIGTTGRGIGPAYEDKVARRGLRVGDLFDKETFAEKLKEVMEYHNFQLVNYYKAEAVDYQKVLDDTMAVADILTSMVVDVSDLLDQARQRGDFVMFEGAQGTLLDIDHGTYPYVTSSNTTAGGVATGSGLGPRYVDYVLGILKAYSTRVGAGPFPTELFDETGEFLCKQGNEFGATTGRRRRTGWLDTVAVRRAVQLNSLSGFCLTKLDVLDGLKEVKLCVAYRMPDGREVTTTPLAADDWKGVEPIYETMPGWSESTFGVKDRSGLPQAALNYIKRIEELTGVPIDIISTGPDRTETMILRDPFDA

SEQ ID NO: 56797 - protein, 484 aa, Escherichia coli
MHNIPGVWNTRLPLLQEIVMEILYNIFTVFFNQVMTNAPLLLGIVTCLGYILLRKSVSVIIKGTIKTIIGFMLLQAGSGILTSTFKPVVAKMSEVYGINGAISDTYASMMATIDRMGDAYSWVGYAVLLALALNICYVLLRRITGIRTIMLTGHIMFQQAGLIAVTLFIFGYSMWTTIICTAILVSLYWGITSNMMYKPTQEVTDGCGFSIGHQQQFASWIAYKVAPFLGKKEESVEDLKLPGWLNIFHDNIVSTAIVMTIFFGAILLSFGIDTVQAMAGKVHWTVYILQTGFSFAVAIFIITQGVRMFVAELSEAFNGISQRLIPGAVLAIDCAAIYSFAPNAVVWGFMWGTIGQLIAVGILVACGSSILIIPGFIPMFFSNATIGVFANHFGGWRAALKICLVMGMIEIFGCVWAVKLTGMSAWMGMADWSILAPPMMQGFFSIGIAFMAVIIVIALAYMFFAGRALRAEEDAEKQLAEQSA

SEQ ID NO: 56798 - protein, 228 aa, Escherichia coli
MQKLKQQVFEANMELPRYGLVTFTWGNVSAIDRERGLVVIKPSGVAYETMKAADMVVVDMSGKVVEGEYRPSSDTATHLELYRRYPSLGGIVHTHSTHATAWAQAGLAIPALGTTHADYFFGDIPCTRGLSEEEVQGEYELNTGKVIIETLGNAEPLHTPGIVVYQHGPFAWGKDAHDAVHNAVVMEEVAKMAWIARGINPQLNHIDSFLMNKHFMRKHGPNAYYGQK

SEQ ID NO: 56799 - protein, 264 aa, Escherichia coli
MTLPTTIYSFPAYLSRFSSTDKPVKLKFHQYARATLLSNRGRDHNCDGRRTVEIHKLDLSDWQAFNKLATRCNAYDGITMNGDNSFGWNHEATLDNIHAQKYNKAYAGARLTAELKYLLQDVESFEPNSKYTIHEVVLGPGYGTPDYTGQTIGYVVTLPAQMPNCWSSELPTIDLYIDQLRTVTGVSNALGFIIAALLNAYSDLPHDLKIGLRSLSSSAAIYSGLGFERVPQERDISCARMYLTPANHPDLWTQENGEWIYLRN

SEQ ID NO: 56800 - protein, 220 aa, Escherichia coli
MAYRDQPLGELALSIPRASALFRKYDMDYCCGGKQTLARAAARKELDVEVIEAELAKLAEQPIEKDWRSAPLAEIIDHIIVRYHDRHREQLPELILQATKVERVHADKPSVPKGLTKYLTMLHEELSSHMMKEEQILFPMIKQGMGSQAMGPISVMESEHDEAGELLEVIKHTTNNVTPPPEACTTWKAMYNGINELIDDLMDHISLENNVLFPRALAGE

SEQ ID NO: 56801 - protein, 341 aa, Escherichia coli
MMPQSLPDTTTPKRRFRWPTGMPQLVALLLVLLVDSLVAPHFWQVVLQDGRLFGSPIDILNRAAPVALLAIGMTLVIATGGIDLSVGAVMAIAGATTAAMTVAGFSLPIVLLSALGTGILAGLWNGILVAILKIQPFVATLILMVAGRGVAQLITAGQIVTFNSPDLSWFGSGSLLFLPTPVIIAVLTLILFWLLTRKTALGMFIEAVGINIRAAKNAGVNTRIIVMLTYVLSGLCAAIAGIIVAADIRGADANNAGLWLELDAILAVVIGGGSLMGGRFNLLLSVVGALIIQGMNTGILLSGFPPEMNQVVKAVVVLCVLIVQSQRFISLIKGVRSRDKT

SEQ ID NO: 56802 - protein, 183 aa, Escherichia coli
MTKQPEDWLDDVPGDDIEDEDDEIIWVSKSEIKRDAEELKRLGAEIVDLGKNALDKIPLDADLRAAIELAQRIKMEGRRRQLQLIGKMLRQRDVEPIRQALDKLKNRHNQQVVLFHKLENLRDRLIDQGDDAIAEVLNLWPDADRQQLRTLIRNAKKEKEGNKPPKSARQIFQYLRELAENEG

SEQ ID NO: 56803 - protein, 154 aa, Escherichia coli
MNYHQYYPVDIVNGPGTRCTLFVSGCVHECPGCYNKSTWRVNSGQPFTKAMEDQIINDLNDTRIKRQGISLSGGDPLHPQNVPDILKLVQRIRAECPGKDIWVWTGYKLDELNAAQMQVVDLINVLVDGKFVQDLKDPSLIWRGSSNQVVHHLR

SEQ ID NO: 56804 - protein, 503 aa, Escherichia coli
MEFSVKSGSPEKQRSACIVVGVFEPRRLSPIAEQLDKISDGYISALLRRGELEGKPGQTLLLHHVPNVLSERILLIGCGKERELDERQYKQVIQKTINTLNDTGSMEAVCFLTELHVKGRNNYWKVRQAVETAKETLYSFDQLKTNKSEPRRPLRKMVFNVPTRRELTSGERAIQHGLAIAAGIKAAKDLGNMPPNICNAAYLASQARQLADSYSKNVITRVIGEQQMKELGMHSYLAVGQGSQNESLMSVIEYKGNASEDARPIVLVGKGLTFDSGGISIKPSEGMDEMKYDMCGAAAVYGVMRMVAELQLPINVIGVLAGCENMPGGRAYRPGDVLTTMSGQTVEVLNTDAEGRLVLCDVLTYVERFEPEAVIDVATLTGACVIALGHHITGLMANHNPLAHELIAASEQSGDRAWRLPLGDEYQEQLESNFADMANIGGRPGGAITAGCFLSRFTRKYNWAHLDIAGTAWRSGKAKGATGRPVALLAQFLLNRAGFNGEE

SEQ ID NO: 56805 - protein, 302 aa, Escherichia coli
MIMLAFIRFLFAGLLLVISHAFAATVQDEHGTFTLEKTPQRIVVLELSFADALAAVDVIPIGIADDNDAKRILPEVRAHLKPWQSVGTRAQPSLEAIAALKPDLIIADSSRHAGVYIALQQIAPVLLLKSRNETYAENLQSAAIIGEMVGKKREMQARLEQHKERMAQWASQLPKGTRVAFGTSREQQFNLHTQETWTGSVLASLGLNVPAAMAGASMPSIGLEQLLAVNPAWLLVAHYREESIVKRWQQDPLWQMLTAAQKQQVASVDSNTWARMRGIFAAERIAADTVKIFHHQPLTVVK

SEQ ID NO: 56806 - protein, 323 aa, Escherichia coli
MVSGAALHITGFLRVKDSLRSLRILLDILLICLKGITVTKSISLSKRISIIVILFAIVAVCTFFVQSCARKSNHAASFQNYHATIDGKEIAGITNNISSLTWSAQSNTLFSTINKPAAIVEMTTNGDFIRTIPLDFVKDLETIEYIGDNQFVISDERDYAIYVISLTPNSEVKILKKIKIPLQDSPTNCGFEGLAYSRQDHTFWFFKEKNPIEVYKVNGLLSSNELHISKDEALQRQFTLDDVSGAEFNQQKNTLLVLSHESRALQEVTLVGEVIGEMSLTKGSRGLSHNIKQAEGVAMDASGNIYIVSEPNRFYRFTPQSSH

SEQ ID NO: 56807 - protein, 529 aa, Escherichia coli
MNNNDLVAKLWKLCDNLRDGGVSYQNYVNELASLLFLKMCKETGQEAEYLPEGYRWDDLKSRIGQEQLQFYRKMLVHLGEDDKKLVQAVFHNVSTTITEPKQITALVSNMDSLDWYNGAHGKSRDDFGDMYEGLLQKNANETKSGAGQYFTPRPLIKTIIHLLKPQPREVVQDPAAGTAGFLIEADRYVKSQTNDLDDLDGDTQDFQIHRAFIGLELVPGTRRLALMNCLLHDIEGNLDHGGAIRLGNTLGSDGENLPKAHIVATNPPFGSAAGTNITRTFVHPTSNKQLCFMQHIIETLHPGGRAAVVVPDNVLFEGGKGTDIRRDLMDKCHLHTILRLPTGIFYAQGVKTNVLFFTKGTVANPNQDKNCTDDVWVYDLRTNMPSFGKRTPFTDEHLQPFERVYGEDPHGLSPRTEGEWSFNAEETEVADSEENKNTDQHLATSRWRKFSREWIRTAKSDSLDISWLKDKDSIDADSLPEPDVLAAEAMGELVQALSELDALMRELGASDEADLQRQLLEEAFGGVKE

SEQ ID NO: 56808 - protein, 1188 aa, Escherichia coli
MLWALNIWTGPHSNGLITMMNKSNFEFLKGVNDFTYAIACAAENNYPDDPNTTLIKMRMFGEATAKHLGLLLNIPPCENQHDLLRELGKIAFVDDNILSVFHKLRRIGNQAVHEYHNDLNDAQMCLRLGFRLAVWYYRLVTKDYDFPVPVFVLPERGENLYHQEVLTLKQQLEQQVREKAQTQAEVEAQQQKLVALNGYIAILEGKQQETEAQTQARLAALEAQLAEKNAELAKQTEQERKAYHKEITDQAIKRTLNLSEEESRFLIDAQLRKAGWQADSKTLRFSKGARPEPGVNKAIAEWPTGKDETGNQGFADYVLFVGLKPIAVVEAKRNNIDVPARLNESYRYSKCFDNGFLRETLLEHYSPDEVHEAVPEYETSWQDTSGKQRFKIPFCYSTNGREYRATMKTKSGIWYRDVRDTRNMSKALPEWHRPEELLEMLGSEPQKQNQWFADNPGMSELGLRYYQEDAVRAVEKAIVKGQQEILLAMATGTGKTRTAIAMMFRLIQSQRFKRILFLVDRRSLGEQALGAFEDTRINGDTFNSIFDIKGLTDKFPEDSTKIHVATVQSLVKRTLQSDEPMPVARYDCIVVDEAHRGYILDKEQTEGELQFRSQLDYVSAYRRILDHFDAVKIALTATPALHTVQIFGEPVYRYTYRTAVIDGFLIDQDPPIQIITRNAQEGVYLSKGEQVERISPQGEVINDTLEDDQDFEVADFNRGLVIPAFNRAVCNELTNYLDPTGSQKTLVFCVTNAHADMVVEELRAAFKKKYPQLEHDAIIKITGDADKDARKVQTMITRFNKERLPNIVVTVDLLTTGVDIPSICNIVFLRKVRSRILYEQMKGRATRLCPEVNKTSFKIFDCVDIYSTLESVDTMRPVVVRPKVELQTLVNEITDSETYKITEADGRSFAEHSHEQLVAKLQRIIGLATFNRDRSETIDKQVRRLDELCQDAAGVNFNGFASRLREKGPHWSAEVFNKLPGFIARLEKLKTDINNLNDAPIFLDIDDEVVSVKSLYGDYDTPQDFLEAFDSLVQRSPNAQPALQAVINRPRDLTRKGLVELQEWFDRQHFEESSLRKAWKETRNEDIAARLIGHIRRAAVGDALKPFEERVDHALTRIKGENDWSSEQLSWLDRLAQALKEKVVLDDDVFKTGNFHRRGGKAMLQRTFDDNLDTLLGKFSDYIWDELA

SEQ ID NO: 56809 - protein, 529 aa, Escherichia coli
MTLSPYLQEVAKRRTFAIISHPDAGKTTITEKVLLFGQAIQTAGTVKGRGSNQHAKSDWMEMEKQRGISITTSVMQFPYHDCLVNLLDTPGHEDFSEDTYRTLTAVDCCLMVIDAAKGVEDRTRKLMEVTRLRDTPILTFMNKLDRDIRDPMELLDEVENELKIGCAPITWPIGCGKLFKGVYHLYKDETYLYQSGKGHTIQEVRIVKGLNNPDLDAAVGEDLAQQLRDELELVKGASNEFDKELFLAGEITPVFFGTALGNFGVDHMLDGLVEWAPAPMPRQTDTRTVEASEDKFTGFVFKIQANMDPKHRDRVAFMRVVSGKYEKGMKLRQVRTAKDVVISDALTFMAGDRSHVEEAYPGDILGLHNHGTIQIGDTFTQGEMMKFTGIPNFAPELFRRIRLKDPLKQKQLLKGLVQLSEEGAVQVFRPISNNDLIVGAVGVLQFDVVVARLKSEYNVEAVYESVNVATARWVECADAKKFEEFKRKNESQLALDGGDNLAYIATSMVNLRLAQERYPDVQFHQTREH

SEQ ID NO: 56810 - protein, 259 aa, Escherichia coli
MTDLKASSLRALKLMDLTTLNDDDTDEKVIALCHQAKTPVGNTAAICIYPRFIPIARKTLKEQGTPEIRIATVTNFPHGNDDIDIALAETRAAIAYGADEVDVVFPYRALMAGNEQVGFDLVKACKEACAAANVLLKVIIETGELKDEALIRKASEISIKAGADFIKTSTGKVAVNATPESARIMMEVIRDMGVEKTVGFKPAGGVRTAEDAQKYLAIADELFGADWADARHYRFGASSLLASLLKALGHGDGKSASSY

SEQ ID NO: 56811 - protein, 460 aa, Escherichia coli
MAKAPKRAFVCNECGADYPRWQGQCSACHAWNTITEVRLAASPMVARNERLSGYAGSAGVAKVQKLSDISLEELPRFSTGFKEFDRVLGGGVVPGSAILIGGNPGAGKSTLLLQTLCKLAQQMKTLYVTGEESLQQVAMRAHRLGLPTDNLNMLSETSIEQICLIAEEEQPKLMVIDSIQVMHMADVQSSPGSVAQVRETAAYLTRFAKTRGVAIVMVGHVTKDGSLAGPKVLEHCIDCSVLLDGDADSRFRTLRSHKNRFGAVNELGVFAMTEQGLREVSNPSAIFLSRGDEVTSGSSVMVVWEGTRPLLVEIQALVDHSMMANPRRVAVGLEQNRLAILLAVLHRHGGLQMADQDVFVNVVGGVKVTETSADLALLLAMVSSLRDRPLPQDLVVFGEVGLAGEIRPVPSGQERISEAAKHGFRRAIVPAANVPKKAPEGMQIFGVKKLSDALSVFDDL

SEQ ID NO: 56812 - protein, 713 aa, Escherichia coli
MSTGLRFTLEVDGLPPDAFAVVSFHLNQSLSSLFSLALSLVSQQFLSLEFQQILDKMAYLTIWQGDDVQRRVKGVVTWFELGENDKNQKLYSMKVCPPLWRTGLRQNFRIFQNEDIASILGTILQENGVTEWSPLFSEPHPSREFCVQYGETDYDFLCRMAAEEGIFFYEEHAQKSTDQSLVLCDTVLYLPESFEIPWNPNTRTEVSTLCISQFRYSAQIRPSSVVTKDYTFKRPGWAGRFDQEGQHQDYQRTQYEVYDYPGRFKGAHGQNFARWQMDGWRNNAEVARGTSRSPEIWPGRRIVLTGHPQANLNREWQVVASELHGEQPQAVPGRRGSGTTLDNHFAVIPADRTWRPQPLLKPLVDGPQSAVVTGPAGEEIFCDEHGRVRVKFNWDRYNPSNQDSSCWIRVAQAWAGTGFGNLAIPRVGQEVIVDFLNGDPDQPIIMGRTYHQENRTPGSLPGTKTQMTIRSKTYKGSGFNELKFDDATGKEQVYIHAQKNMNTEVLNNRTTDVINNHAEKIGNNQAITVTNNQILNIGVNQIQTVGVNQVETVGSNQIIKVGSNQVEKVGIIRALTVGVAYQTTVGGIMNTSVALLQSSQVGLHKSLMVGMGYSVNVGNNVTFSVGKTMKENTGQTAVYSAGEHLELCCGKARLVLTKDGSIFLNGTHIHLEGESDVNGDAPVINWNCGATQPVPDAPVPKDLPPGMPDMRQF

SEQ ID NO: 56813 - protein, 294 aa, Escherichia coli
MEGLTVEFSVLSNNLKMPMMGFGVFQVTDKNVCKQSVLNAIRTGYRLIDTAAVYGNEDAVGEAVREAISEGLCTREELFITSKLWVQDMLNQDTAAAGIEASLKKSGLEYFDLYLLHQAMRDYFSAWRALEDAYEEGKLKAIGVSNFYPHVLANFCETVRVKPMVNQVELHPYFAQPEALATMKYYNVQPEAWAPLGGGRHKPFENNLLQSIADAHQKSISQVILRWNIQRGVVVIPKSTHQQRIEENFAIWDFSLTEKEMAQISSLDLGYVGESVKHFNPEFVRGCLAVKIHD

SEQ ID NO: 56814 - protein, 720 aa, Escherichia coli
MKKNAQSVEAWLEAMIAVARYYRLDFSQENVRATVNWERDSKREELLTDMARQLGMGLRLVEFSADSLNPWRLPLIAVFDNQQIGVITRRDNHDNISVQFSGDEGLETTLNVADIEDKIVELALLRPLSAIPDARVDDYIRPYQANWFWSLSLKDWRRYGDIMLASLVANVLALAAMIFSMQVYDRVVPAQSYPTLWVLFAGVMMAILFEFCMRMVRTHLSDVIGKRADLRISDRVFGHALRLKNNVRSKSTGSFISQIRELESVRELITSTTIGAVADLPFFLLFVFILWMIGGWLVLVVLLALPLLVIPGLLVQRPLARLANEGMRESAVRNATLVEAVQSIEDIKLLRAEQRFQNQWNHTNDVASSISMKQRFLTGLLLTWTQEVQSIVYVVVLLVGCFMVMNGDMTTGALVGTTILASRTIAPLSQISGVLSRWQQAKVARNGLDELMKRPVDQPEHGKLVHKAVLHGNYQFSNAVFYYDEEEKIADVAIGKLNIQAGEKIAILGRNGAGKSTLLQMLAGMRIAQQGQVLLDNISIGQLDPADLRRDMGLLSQTGRLFFGSLRENLTMGMPEASDEDIERALTLSGALPFVQKQKNGLNYMIQEGGFGLSGGQRQTLLLARLLISQPNIVLLDEPSASLDEMAEAYLIEQLKQWIGHRTLIIATHRTAMLQLVDRIIVMDQGRIVMDGAKEAILREQGEPTARRVVLQEKNKGSAA

SEQ ID NO: 56815 - protein, 633 aa, Escherichia coli
MSTGLRFTLEVDGLPPDAFAVVSFHLTQSLSSLFSLDLSLVSQQFLSLEFAQVLDKMAYLTIWQGDDVQRRVKGVVTWFELGENDKNQMLYSMKVHPPLWRAGLRQNFRIFQNEDIKSILGTILQENGVTEWSPLFSEPHPSREFCVQYGETDYDFLCRMAAEEGIFFYEEHAYKSTDQSLVLCDTVRHLPESFEIPWNPNTRTEVSTLCISQFRYSAQIRPSSVVTKDYTFKRPGWAGRFDQEGQHQDYQRTQYEVYDYPGRFKGAHGQNFARWQMEGWRNNAETARGMSRSPEIWPGRRIVLTGHPQANLNREWQVVASELHGEQPQAVPGRRGAGTALENHFAVIPADRTWRPQPRLKPLVDGPQSAVVTGPEGEEIFCDEHGRVRVKFNWDRYNPADQDSSCWIRVAQAWAGTGFGNLAIPRVGQEVIVDFLNGDPDQPIIMGRTYHQENRTPGSLPGTKTQMTIRSKTYMGSGFNELKFDDATGREQVYIHAQKNMDTEVLNDRTTTVKHDHRETVKNDQTVTIQEGNRLLTVEKGHKITGVLKGSLSEDVFQDRGTIAGSVHVDAVNNGGEGNGIQAYTAIKEIMLAVEESKIALTPDGIQLQVGESTVIRLSKDGITIVGGSVFIN

SEQ ID NO: 56816 - protein, 115 aa, Escherichia coli
MVSNASALGRNGVHDFILVRATAIVLTLYIIYMVGFFATSGELTYEVWIGFCASAFTKVFTLLALFSILIHAWIGMWQVLTDYVKPLALRLMLQLVIVVALVVYVIYGFVVVWGV

SEQ ID NO: 56817 - protein, 257 aa, Escherichia coli
MSEINYQALREKAEKATKGSYIVGHTSVNQHGNLTGVFVCQKWKGEPGGVIAECHVNCLIESDDQAYANAEFIAEANPATVLALLDEQERNQQYIKRRDQENEEIALTVGKLRVELEAAENNLIDSECHVAELEEALRDKQALLEASEKRNAKLQSENAYIRNRYKELDLLIGKNILVMQAAIIEWQATGDAKSGLAWIYNTLFGPGELPDESEKDAQAYFNRKYAPIDEKLMALHKWFWEQSEAERAAGIRIKRGE

SEQ ID NO: 56818 - protein, 348 aa, Escherichia coli
MLTPYKRADVEFEWISDLEEQGCFSKVYLAHDRHLAHDLVIKEIEKKENTNHDDYFNEARLLYKHAHPNIVQVQYAAQCESNIYIAMPFYHNGSLNQLMKKNNLTSREIIRYSIQFLSGLYHIHSKGLMHFDIKPNNIMISNRNEAMLSDFGLSQLVNEESRAAPEFGYHFHVPPEYFSLSTNDYNFTYDIYQAGLTIYRMCVGHDNFERERSAFSTIEQLRESIINGCYPLKEYPPHIHKKLITIVNKCIHVDPNERYQSVLDVLNDLSAISDGVLDWRLQMTKPTNGTCEWQKKSGDAILSIVFDAENSSTTGFRLYDDGRKRRATNLTISSGCTPTKLYRLLKDN

SEQ ID NO: 56819 - protein, 299 aa, Escherichia coli
MSEINYQALREKAEKATKGSYIVGHTSVNQHGNLTGVFVCQKWKGEPGGVIAECHVNCLIESDDQAYANAEFIAEANPATVLALLDEQERNQQYIKRRDQENEEIALTVGKLRVELGAAQNNLIDSECHVAELEEALRDKQALLEASEKRIAELEAELVSQTYKLPHTQFEQIANLYEMQFDDGRTCAFHTDAQKAEQWLQACDGNRVQEYVKLERLQNALSGNSPVTPDGWISCSERMPDTKTAVLVAVEFDRKGDWRMKWATYIPGHPDANDGWIIPGASWKPSHWMPLPEPPQEVN

SEQ ID NO: 56820 - protein, 279 aa, Escherichia coli
MGGMFVPFLIMLREGLEAALIVSLIASYLKRTQRGRWIGVMWIGVLLAAALCLGLGIFINETTGEFPQKEQELFEGIVAVIAVVILTWMVFWMRKVSRNVKVQLEQAVDSALQRGNHHGWALVMMVFFAVAREGLESVFFLLAAFQQDVGIWPPLGAMLGLATAVVLGFLLYWGGIRLNLGAFFKWTSLFILFVAAGLAAGAIRAFHEAGLWNHFQEIAFDMSAVLSTHSLFGTLMEGIFGYQEAPSVSEVAVWFIYLIPALVAFALPPRAGATASRSA

SEQ ID NO: 56821 - protein, 186 aa, Escherichia coli
MFSTFKKAALLAAIALPFSTMAAPTVTFQGEVTDQTCSVNINGQTNSVVLMPTVAMADFGATLADGQSAGQTPFTVSVSNCQAPTGADQAINTTFLGYDVDASTGVMGNRDTSSDAAKGFGIQLMDSSTSGNPVTLAGATNVPGLTLKVGDTEASYDFGARYFVIDSAAATAGKITAVAEYTLSYL

SEQ ID NO: 56822 - protein, 100 aa, Escherichia coli
MELTPREKDKLLLFTAALLAERRLARGLKLNYPESVALISAFIMEGARDGKSVAALMEEGRHVLSREQVMEGIPEMIPDIQVEATFPDGSKLVTVHNPII

SEQ ID NO: 56823 - protein, 568 aa, Escherichia coli
MMSNISRQAYADMFGPTTGDKIRLADTELWIEVEDDLTTYGEEVKFGGGKVIRDGMGQGQMLSAGCADLVLTNALIIDYWGIVKADIGVKDGRIFAIGKAGNPDIQPNVTIPIGVSTEIIAAEGRIVTAGGVDTHIHWICPQQAEEALTSGITTMIGGGTGPTAGSNATTCTPGPWYIYQMLQAADSLPVNIGLLGKGNCSNPDALREQVAAGVIGLKIHEDWGATPAVINCALTVADEMDVQVALHSDTLNESGFVEDTLTAIGGRTIHTFHTEGAGGGHAPDIITACAHPNILPSSTNPTLPYTVNTIDEHLDMLMVCHHLDPDIAEDVAFAESRIRQETIAAEDVLHDLGAFSLTSSDSQAMGRVGEVVLRTWQVAHRMKVQRGPLPEESGDNDNVRVKRYIAKYTINPALTHGIAHEVGSIEVGKLADLVLWSPAFFGVKPATIVKGGMIAMAPMGDINGSIPTPQPVHYRPMFAALGSARHRCRVTFLSQAAAANGVAEQLNLHSTTAVVKGCRTVQKADMRHNSLLPDITVDSQTYEVRINGELITSEPADILPMAQRYFLF

SEQ ID NO: 56824 - protein, 224 aa, Escherichia coli
MPTPEKRLRLMQLASNSLPVGGYSWSQGLEWAVEAGWVEDSAAFEHWQQLQMEQSFFAVDLPLLARLYRACEAGDPDSAGRWTAYLLACRETRELRDEERNRGAAFTRLLVDWQPDCPAEWRKLCQQSQLTGMAWLGVRWQISVSDLALSLGYSWIESAVMAGVRLVPYGQLAAQQLIMRLCARYAANMDSALATPDHAIGSATPLASIASARHETQYSRLFRS

SEQ ID NO: 56825 - protein, 205 aa, Escherichia coli
MNIIKQPLRVGVGGPVGSGKTALLEALCKSMRDTWQLAVVTNDIYTREDQRILTEAGALEAERIVGVETGGCPHTAIREDASMNLAAVEALSEKFGNLELIFVESGGDNLSATFSPELADLTIYVIDVAEGEKIPRKGGPGITKSDFLVINKTDLAPYVGASLEVMERDTLRMRGERPWGFTNLKSGEGLQNIIAFIEEQGMLGK

SEQ ID NO: 56826 - protein, 293 aa, Escherichia coli
  MISC_FEATURE (92)..(92): X=any amino acid
MDLTQLEMFNAVAEAGSITQAAAIVHRVPSNLTTRLRQLETELGVDLFIRENQRLRLSPAGHNFLRYSQQILALVDEARSVVAGDEPQGLFXLGSLESTAAVRIPATLAEFNRRYPKIQFSLSTGPSGTMLEGVLEGKLNAAFIDGPINHTAIDGIPVYREELMIVTPQGHAPVIRASQVNGSNIYAFRANCSYRRHFESWFHADGAAPGTIHEMESYHGMLACVVAGAGIALIPRSMLESMPGHHQVEAWPLAEQWCWLTTWLVWRRGAKTRPLEAFIQLLDVPDSTKQGYQ

SEQ ID NO: 56827 - protein, 714 aa, Escherichia coli
  MISC_FEATURE (354)..(354): X=any amino acid
  MISC_FEATURE (442)..(442): X=any amino acid
MCGLLFIFTEVAMSTGLRFTLEVDGLPPDAFAVVSFHLNQSLSSLFSLDLSLVSQQFLSLEFAQVLDKMAYLTVWQGDDVQRRVKGVVTWFELGENDKNQMLYSMKVCPPLWRTGLRQNFRIFQNEDIESILATILKENGVTEWSPLFSEPHPSREFCVQYGETDYDFLCRMAAEEGIFFYEEHAQKSIDQSLVLCDTVRYLPESFEIPWNPNTRTEVSTLCISQFRYSAQIRPSSVVTKDYTFKRPGWAGRFDQEGQYQDYQRTQYEVYDYPGRFKGAHGQNFARWQMDGWRNNAEVARGTSRSPEIWPGRRIVLTGHPQANLNREWQVVASELHGEQPQAVPGRRGSGTTLXNHFAVIPADRTWRPQPLLKPLVDGPQSAVVTGPAGEEIFCDEHGRVRVKFNWDRYNPSNQDSSCWIRVAQAWAGTGFGNLAIPRVGQXVIVDFLNGDPDQPIIMGRTYHQENRTPGSLPGTKTQMTIRSKNYKGSGFNELKFDDATGKEQVYIHAQKNMNTEVLNNRTTDVINNHAETIGNNQMIAVTNNQIQTVGVNQIETVGSNQIINVGSVQVETIGLVRALTVGVAYQTTVGGIMNTSVALMQSSQIGLHKSLRVGLGYDVKVGNNVTFTVGKTKKDDTGQTAIYSAGEHLELCCGKARLVLTKDGQIFLNGTKIHLQGKEQVNGDSLLINWNCAASKSPPKTPDEKQDTPDMREY

SEQ ID NO: 56828 - protein, 333 aa, Escherichia coli
MSKVGINGFGRIGRLVLRRLLEVKSNIDVVAINDLTSPKILAYLLKHDSNYGPFPWSVDFTEDSLIVDGKSIAVYAEKEAKNIPWKAKGAEIIVECTGFYTSAEKSQAHLDAGAKKVLISAPAGEMKTIVYKVNDDTLDGNDTIVSVASCTTNCLAPMAKALHDSFGIEVGTMTTIHAYTGTQSLVDGPRGKDLRASRAAAENIIPHTTGAAKAIGLVIPELSGKLKGHAQRVPVKTGSVTELVSILGKKVTAEEVNNALKQATTNNESFGYTDEEIVSSDIIGSHFGSVFDATQTEITAVGDLQLVKTVAWYDNEYGFVTQLIRTLEKFAKL

SEQ ID NO: 56829 - protein, 527 aa, Escherichia coli
MAGKFRCILLLIVGLFFSSLSYAKNTEMPSYEEGISLFDVEATLQPDGVLDIKENIHFQARNQQIKHGFYRDLPRLWMQPDGDAALLNYHIVGVTRDGIPEPWHLDWHIGLMSIVVGDKQRFLPQGDYHYQIHYQVKNAFLREGDSDLLIWNVTGNHWPFEIYKTRFSLKFPDIAGNPFSEIDLFTGEEGDTYRNGRILEDGRIESSDPFYREDFTVLYRWPHSLLSNAPAPQTTNIFSHLLLPSTSSLLIWFPCLFLVCGWLYLWKRRPQFTSVDVLRMQKFYLPRKKSSFYRPDTFLQWGGLAILAVILYGNLSPVGWAGMSLVGDMFIMICWLLPFLFCSLELLFARDDDKPCVNRVIITLFLPLICSGVAFYSLYINVGDVFFYWYMPAGYFSAVFLTGYLTGMGYIFLPKFTQTGQQRYAHGEAIVNYLARKEAATHSGRRRKGETRKLDYALLGWAVSANLGREWVARITPSLTAAVRAPEIARSGVLFSLQMHLSLGANTSLLGRSYSGGAAGGGGGGGW

SEQ ID NO: 56830 - protein, 342 aa, Escherichia coli [sequence omitted]

SEQ ID NO: 56831 - protein, 356 aa, Escherichia coli
MPNTSIHLSRCNILQNNKLQPTEIYKESQQTAKLEFFCDEFLKISQSRYGLSTSTDSIANLLAFFTKASDAIDSIKTQKIDVHSYGFVPIRHFVEHVITYKNEFAADYEPYTLTFTRGENNEGILSVESKEGFISQRTINLNEYETAINIINEHVIKENIHNTVQSPTEKYISKINSSDKPYKTSSKESIKSQLYSDQRNIQTCYYILRKNTEWYKYASSEERYDKFKNSSKEIKNTYKQIVQAQKKLNQMKYINKLSGELIDITDKKLAPLINDSFSYTRDFFAYSKQEKNIFTFDNSKFVDPKEKEGLMVQHSNGQLVITGKYCPEGVQTAFTQEQYDKLIRYINIFFTFPKLE

SEQ ID NO: 56832 - protein, 378 aa, Escherichia coli
MATWQQGINSGGFLAGIGGQNSNAPKASDVSEALAYIRQNNEMERSGRNNIGLQALQGLGSVAQTSQAAKQQEADAAFQKEYAAAIQSGDRQQVRDLMTKYPGQLEKIQSGMKWADEDQRNSIGTLAAGARLAASSPEAMQSWLQNNAKELARVGVDPNNVAQMYQQNPSGFGEFVYHLGMAALGPIDYFNVQDKMAGREIDRGRLAETIRSNQAGDFEFKSKPSYLVLSFAEISSVVFILMSVYMVAKSQNSNGLQYDALFIPSMAFSILVFSFNGGIISKIISNKVMILLGDASFSFYLVHTIVISTLSKFFNVSGLGAISVIKFIVMALFASLFISIMMYLFFEKPINNKLRKWWSGFKNDVSTTRVEKIEGNQL

SEQ ID NO: 56833 - protein, 337 aa, Escherichia coli
  MISC_FEATURE (152)..(152): X=any amino acid
  MISC_FEATURE (169)..(169): X=any amino acid
MNTEATHDQNEALTTGARLRNAREQLGLSQQAVAERLCLKVSTVRDIEEDKAPADLASTFLRGYIRSYARLVHIPEEELLPGLEKQAPLRAAKVAPMQSFSLGKRRKKRDGWLMTFTWLVLFVVIGLSGAWWWQDHKAQQEEITTMADQSSXELSSNSEQGQSVPLNTXTTTDPATTSTPPASVDTTATNTQTPVVTAPAPAVDPQQNAVVSPSQANVDTAATPAPTAATTPDGAAPLPTDQAGVTTPVADPNALVMNFTADCWLEVTDATGKKLFSGMQRKDGNLNLTGQAPYKLKIGAPAAVQIQYQGKPVDLSRFIRTNQVARLTLNAEQSPAQ

SEQ ID NO: 56834 - protein, 146 aa, Escherichia coli
MIAADSLPGVYMTLRNKAFHQLRQLFQQHTARWQHELPDLTKPQYAVMRAIADKPGIEQVALIEAAVSTKATLAEMLARMENRGLVRREHDAADKRRRFVWLTAEGEKILAAAIPIGDSVDEEFLGRLSAEEQELFVQLVRKMMNT

SEQ ID NO: 56835 - protein, 235 aa, Escherichia coli
MHPFTSLTLWALAACTTLILPAQTILPIYSAATFFCLIALKATRRRAKYVVWLMFSLGAGLWLVHGGWLTEWLSGTPRSPERWTHAITLWLRILAIVSTSQLWMQYVPVQCFIRALFASRLPPGVAYLFAGPLLVVEQLKRQLAIIHEAQRARGVPLDEGWYQRLRAMPALTIPLTHNALNDLAVRGAALDMRAFRIHNRRTTLWAPADSTLQRVARYTMILLMLTEFGAWIWLR

SEQ ID NO: 56836 - protein, 327 aa, Escherichia coli
MMRTGLVTVIFLALLLVGCVVYPGIGARFIAPQTVLQAFLHFEPQNFDHNVIVRLRLPRLAAALLTGASLGVAGALLQAVIRNPLGEPHILGLNAGAALAVVAASALGLAFPVGRPLLASTGGALLFLLILLLSSAGRSGLTPMKVTLCGVALSAFVSSITAAILILDEQTLLAMRTWLAGDLAGQDWATLGTSAWFSLGGVVLAIYLAPSLNMLALGDRMAQGLGVSVLRTRTFTLLAIALLCGAAVSIAGPIGFVGLLVPQIVRRLVSADLRVLLPLSACVGALLLLLADIIARTLFTPHELATGVMTALVGAPVFVIMATRMFK

SEQ ID NO: 56837 - protein, 251 aa, Escherichia coli
MRAMKSLSKSSQIPLYQQVVEWIRESIYTGDLVEDDRIPSEYQIMDMLDVSRGTVKKAVAQLVKEGVLIQVQGKGTFVKKENVAYPLGEGLLSFAESLESQKIHFTTEVITSRIESANRYVAEKLRITPGQDILYLERLRSIGDEKAMLIENRINIELCPGIAEIDFNQHNLFPTIESLSQRKIRYSESRYAARLIGNERGHFLDISEDAPVLHLEQLVFFSRGLPIEFGNVWLKGNKYYLGTVLQRREVS

SEQ ID NO: 56838 - protein, 342 aa, Escherichia coli
MNHYTRWLELKEQNPGKYARDIAGLMNIREAELAFARVTHDAWRMHGDIREILAALESVGETKCICRNEYAVHEQVGTFTNQHLNGHAGLILNPRALDLRLFLNQWASVFHIKENTARGERQSIQFFDHQGDALLKVYATDNTDMAAWSELLARFITDENTPLELKAVDAPVVQTRADATVVEQEWRAMTDVHQFFTLLKRHNLTRQQAFNLVADDLACKVSNSALAQILESAQQDGNEIMVFVGNRGCVQIFTGVVEKVVPMKGWLNIFNPTFTLHLLEESIAEAWVTRKPTSDGYVTSLELFAHDGTQIAQLYGQRTEGEQEQAQWRKQIASLIPEGVAA

SEQ ID NO: 56839 - protein, 380 aa, Escherichia coli
MVDKIIFTVTPIFSIPPRGAAAVETWMYQVAQRTNFPNRIVCIKNPGYSNYTFVNDNCSIHRVGFSRIYKRLFQKWTRLDPLPYSQRILNIAHDFPITKESVIVVHNSMKLYTQIRKRAPQARVVIHMHNAFEPKLLEQNVKMIVPSLYLKKYYQSYLANADIEIVPNGIDLETYQSNFQPITRSELNISPEEKIIFYAGRIVPDKGILLLMQSFEKLAAAHKNLKLVVIGDYTEMSKSDKGAYQRNVREIAKRLKDRCIMLGSIPPEKMHCYYPLADLVVIPSQFQEPFCMVAIEAMGAGKPVLVSTRGGMTEFVKENTTGFHLKEPMTADSISSDILKTLANPELTAVAKQGQDFVFDHYSWDGVTQRFEEVIHNWFE

SEQ ID NO: 56840 - protein, 374 aa, Escherichia coli
MLNVNNDTLSVTSGVNTASGTSGITQSETGLSLDLQLVKSMNSSAGWTESSPLPTPPAGHSLVTPSAAEDVLSKLFGGISGEVTSRTEEAEPQRTSYPYLSQVNTVDPQQMMMMVTLLSLDTSAQKVSSLKNSNEIYMDGQTKALENKTQEYKKQLEEQQKAEEKSQKSKIVGQVFGWLGVALTAVAAVFNPALWAVVAIGATAMALQTAVDVMGENAPQGLKTAAQVFGGISMAASILTAGVGGVSSLLSKFGNVANKIGSSVVKVVEKAAEALVKNVFAKISTVAEGVTNGIRSAGTTALNNEAAQLQMLSQLAAFAVQNLTRQSESLGESAKLELDKAASELQNQASYLQSVSQLMSDSARVNSRIVSGRI

SEQ ID NO: 56841 - protein, 512 aa, Escherichia coli
MKKISFFIFTALFCCSAQAAPSSLEKRLGKSEYFIITKSSPVRAILNDFAANYSIPVFISSSVNDDFSGEIKNEKPVKVLEKLSKLYHLTWYYDENILYIYKTNEISRSIITPTYLDIDSLLKYLSDTISVNKNSCNVRKITTFNSIEVRGVPECIKYITSLSESLDKEAQSKAKNKDVVKVFKLNYASATDITYKYRDQNVVVPGVVSILKTMASNGSLPSTGKGAVERSGNLFDNSVTISADPRLNAVVVKDREITMDIYQQLISELDIEQRQIEISVSIIDVDANDLQQLGVNWSGTLNAGQGTIAFNSSTAQANISSSVISNASNFMIRVNALQQNSKAKILSQPSIITLNNMQAILDKNVTFYTKVSGEKVASLESITSGTLLRVTPRILDDSSNSLTGKRRERVRLLLDIQDGNQSTNQSNAQDASSTLPEVQNSEMTTEATLSAGESLLLGGFIQDKESSSKDGIPLLSDIPVIGSLFSSTVKQKHSVVRLFLIKATPIKSASSE

SEQ ID NO: 56842 - protein, 300 aa, Escherichia coli
MKKTLATLFLLTCLGSSSAYADNALILQTDFSLKDGAVSAMKGVAFGVDHNLKIFDLTHEIPPYNIWEGAYRLYQTASYWPQGSVFVSVVDPGVGTDRKSIVLKTKNGQYFVSPDNGTLTLVAESLGIESVREIDEKANRLKGSEKSYTFHGRDVYAYTGARLASGAITFEQVGPELPAKVVELSYQKAKATKGEVKGNIPILDIQYGNVWSNISDELLNQAGIKLNDTLCVTISEGSRQKYAGKMPYVASFGDVPEGQPMVYLNSLLNVSVALNMDNFAQKHQVASGADWNIDVKKCDK

SEQ ID NO: 56843 - protein, 205 aa, Escherichia coli; identical to SEQ ID NO: 56825

SEQ ID NO: 56844 - protein, 568 aa, Escherichia coli; identical to SEQ ID NO: 56823

SEQ ID NO: 56845 - protein, 224 aa, Escherichia coli; identical to SEQ ID NO: 56824

SEQ ID NO: 56846 - protein, 100 aa, Escherichia coli; identical to SEQ ID NO: 56822

SEQ ID NO: 56847 - protein, 381 aa, Enterococcus faecalis
MKISDVTVYKVKPRWIFVKISTDEGIEGWGEMISGTKTETVVAGAYEIGNRLIGRNPFEIERLFQEMHRSFFRGGPINGTIVSGLEMALWDIKGKAFNVPVYELLGGAARDKIKVYSWIGGDRPSEVAEQAQDRFDRGFTAVKMNATEELHYIDSYQKVDEVVERVASIRERFGDAMDIGVDFHGRVHKPMAKVLAKALEPFHPMFLEEVVLPENEEHFKEVADSVAVPLATGERLYTRWQFKNLFKQGTVDIIQPDVALCGGILETRKIAAMAEAYDMAVAPHAPYGPVALAATLQVDSCTPNVFIQEQSLGIHYNKGFDLLDFVKNKEVFQYKDGYVDLPSKPGLGLEMDEDKIKEIAQEGLIWTNPQWKNYDGTIAEW

SEQ ID NO: 56848 - protein, 694 aa, Enterococcus faecalis
MAKDLLLEIGLEEMPAHVVTPSRIQLEEKVIKFLDEHHLDYETVQSFATPRRLAVKVTAIPEKQADVEEEVKGPAKKIALDAEGNWSKAAQGFVRGQGVTTEDIVFKELNGVEYVYVTKFTKGQSAKEVLTKLNDVITSLTFPVTMHWANYDFEYIRPIHWIVALLDDEVIPFNVLDVTTGQTSRGHRFLGDDVTFQHANEYETKLKEQFVVVQPNERKQMIVDQANALAAEKNWQLALDEELLEEVTNLVEYPTAFVGSFDEKYLSVPDEVLVTSMKEHQRYFEVRNDQGLLMPHFIAVRNGDNVHLENVIKGNEKVLIARLEDAEFFYNEDKKLTIEACVEKLKNVTFHEKIGSIYEKMQRVALIAQIIGRKVGLSEDELEDLKRASEIYKFDLVTNMVGEFPELQGIMGEKYALLQGEKPAVATAIREHYLPTSSEGELPETAIGAVLALADKLDSVFSFFSVGMIPTGSNDPYALRRQTYGVIRIIEDKGWTFPLVQLQTEVDEAVNQDVEKYGVLLNEGQAEVVEFVKARLRQLLMTKNVRHDIIDAVVSAEQADLSKLFASANILKSRFEDQDFKPSMEALTRVINLAKKGQELLGDTEEGIDPSLFENKAEKELYQAVNDLSEAFATRTIAENYEALVNLRPLIDAYFNETMVMVEDEKVKQNRLKQLMQIAKMALSIASLDLLIVK

SEQ ID NO: 56849 - protein, 392 aa, Enterococcus faecalis
MDLTNRFNRQVNKIAVSLIRQFDEQVSGIEGILKLTLGEPDFNTPEHVKKAAKEAIDANFSHYTGMSGLLDVREAAAYFMKEKYHLTYQPGTEILVTVGATEAISASLLAILEQGDKVLLPAPIYPGYEPIITLAGAEPVYLDTRGNDFVLTPEMIEAAMAEHGEQVKAIILNYPSNPTGVTYNRQELQAIADVLKKYDIFVISDEIYSELTYDESHVSIAEMLRDQTILINGLSKSHAMTGWRIGFIFAPAILTAEIIKVHQYLVTAAATVSQKAAVRALIEGMHDAEIMKEEYRKRRDFVYEQMTQLGFEVARPNGAFYIFAKIPTGYEQDSMKFCIDLAQKEAVALIPGISFGPEAEGYVRISYASDMDKLTTAMERIAHYMATQRVTH

SEQ ID NO: 56850 - protein, 390 aa, Enterococcus faecalis
MSELKDISETITLEATKEYVQVTLQANQYQLERLEQFQQFLKSSRGFLSGKIIQATEEALVIQYHKDQYMQSILQAIKKMDQYERLLLAQRVHYLVDFLGTPVQPFIHPENIYILGEELLIAHRGFMQVIVPYSADEREFFKQYRALILAILHPKYEYEQLIQGNGTLKDTLSKQLQEAKTINEIEQIIGEQIIRQKAKREAETKLVSKKSYLTFKWASLVLLALTLLFATTTGIYVLKKLPAQERVSLAEAQYISNDYASVTKTLKEDTPEELPIGAKYVAAVSSVQLDNLSNEQKTAILNNLSQKSSENTLLYWIYIGKGDFEKSLDIAQNLGDNQYILHAYTKLYDATKANNKMNGEKKQALLTKYEEAIDKYMKILGGKTDDNENQ

SEQ ID NO: 56851 - protein, 1047 aa, Enterococcus faecalis
MKYDFEMETDESTSVGKIVAQIKENSDVLEFGPGNGRMTSYLMEEKKCRVSIVELDKELYDHVSQFSTDAFYGNIDENDWVEYFAGKTFDYIVFADVLEHLMNPQSALAKVKPFLKPGGQILITFPNLAHNSVLIDLFNNRLTWNETGLLDATHKSFYLQEGFEKVFAEVGLYIAKEDFTFNQVGYNEIPTTYEALPVEVQAAFKARPFGEVYQYFFALTAEPVEQPERVTPVNSYNEKNVHILINCGEEKETELDQPVDLQKPETKQFQLKIPEDVQLIKLFPSLTGAIIKLSMTIDGETVPVAATNAFLVQENIYYFLDTQVPVIEVTDAQMAGKDLTVDIDYFFEGNYSERENTFIHALLDERNQFLEEMNKQTETAPMPTGKYKRITLTKFDKMINLTIDDIARDVENNVSVIRGWAYDKQTNYPLRFSIAEASESVTYTVETDYRRDVIDMFELEGDQDYGFVITIKDPEDLPAYTLNIDTKSGQKVQYVVERPNMVQLGTKFDRAWRSIQTRGLMGSVKWYFKRQEKAEAPVDVEAVLAEIKTFQFQPKISVAVPVYNVEEKWLAACVSSLQNQYYENWELCLADDASPSEHIKPMLEKYKELDQRIKVIYREENGHISEATNSALSIATGDFVGFMDNDDELAPQALYEVVKALNTDPTIDFLYTDEDKITENGRRFNAFYKSDWNPELILNHNYITHFVVVKRDLLEKVGGLNSAYNGAQDYDFVLRATEQATKIKHISGMMYHWRAIESSTALNPESKGYAYVAGQKAVQAATERRGLKAQVEIAEFYGSYKINYLYDHVPMVSLIITNDTENMSSYLRQLLEKTAYTNYEILLPERFENQINIQNDRLRYVSTETRHGMIQAAKGEYVALLNAGLVPTKNDWLKELMNIGQQETSGLVTGRVVDARYRVETVGVSVDTDKGRLLYPEKGTPGKSLGYYYRIALPRNIQAATEDCLLFNKQLYLNLEGINENLGKEWMGVDLSLQFASAGKRNVYVSYAILKADEKMQNHDKKGSYKELAEKWTAEALVDPYRNPKHL

SEQ ID NO: 56852 - protein, 713 aa, Enterococcus faecalis
MNEDIKVIFDSIYRDKATNNLTITGWALDTITKESPTFTINNENQVSAYNIQRVLREDVNQIYQTEPAIEAGFVVTLEGIKQKKVLPFHFQSSAHVVTVDFPLNKKYPVIPGTEDKVTRLWIKAKKGFKYMAKNGISHTIQRAKIEKLRNQASYLNWLARNEVLDIEAMTQEIATFHYQPKISIAMPVYNVEEKWLRLCIDSILNQVYTNWELCMADDASTDPNVKKILTEYQQLDERIRVVFREQNGHISEATNSALAIATGEFVALLDNDDELAINAFYEVVKVLNENPELDLIYSDEDKIDMDGNRSDPAFKPDWSPDLLLGTNYISHLGVYRRSILEEIGGFRKGYEGSQDYDLVLRFTEKTTKERITHIPKVLYYWRMLPTSTAVDQGSKGYAFEAGLRAVQDALVRRGINGHATHGAANGLYDVYYDIESEKLVSIIIPTKNGYKDVQRCVSSIIEKTTYQNYEIIMADNGSTDPKMHELYAKFEQQLPGRFFVESIDIPFNFSTINNRAAKKAHGEYLLFLNNDTEVITENWLTLMVSFAQQERIGCVGAKLLYPNNTVQHAGVILGLGGVAGHGHYGYPHGDLGYFGRLAINVNYSAVTAACLLMKKADFDAVGGFEEAFTVAFNDVDLCLKVQALGRDNVWLHEAELYHFESQTRGYDDKGKKKKRFEQEKVMMEEKWGPLIENDPFYNPNLTRDIPNFSLRID

SEQ ID NO: 56853 - protein, 120 aa, Enterococcus faecalis
MEKDTNEKLRRNYAEQIVEKERAMDQLSKEKKQIQTIFGTLESELTRNFRELEQLNAEVIHKGGKSTRWEQEELSGKQRYLRGFLQQQTHELSQRYTKATAQSNEERLQLQRERSRLSWD

SEQ ID NO: 56854 - protein, 530 aa, Enterococcus faecalis
MGAELNQKLFSAADNLRSKMDASEYKNYLLGLIFYKYLSDRLLEQVVLLADESLEEYDTVSKQTMLYRELLSDEESKEDLIATIVDILGYAISPEYLFNVLADQAKQATFQLNDLNKAFVQLASTYNQFNGLFDDVDLQSKKLGTDEQQRNVTITEVIKKLNDVEVLGHDGDVIGDAYEFLISQFASEAGKKAGEFYTPHMVSDMMAQIVTLDQKERRFFSVFDPTMGSGSLMLNVRNYLTHPDNVKYHGQELNTTTYNLAKMNLILHGVDAEEMNLRNGDTLNKDWPTDEPYTFDAVVMNPPYSANWSADTTFLDDSRFNRYGKLAPKSKADFAFLLHGFYHLKETGTMAIVLPHGVLFRGAAEGVIRQKLLEDGSIYAVIGMPANLFFGTSIPTTVIVLKKNRQNRDVLFIDASREFVKGKNQNKLSEENIQKILENYAERKDVEKYAHLATFDEIKENDYNLNIPRYVDTFEEEEPIDMVHVGNDIKKIRQEQQVLEKELLEAISSLQTTPENEAWLQGALEVFKHE

SEQ ID NO: 56855 - protein, 1049 aa, Enterococcus faecalis
MKISHREEAEVEEQLIRVLGEGHNQWTYRPDLKSEEDLWVNLRQKIISNNQAELNDSPLTDKEFETIKTELLLRTKTPFDAAKWLKGENGMARITIEREDSQLGSVSLILYSNQDIGGGISTYEVVHQIAKRGSNIEARDRRFDVTLLINGLPIVQIELKQVTAKDGVYQAFNQIKKYAEEGMFRNNIFSTLQLFVVSNEQTTRYFANALPKDLHPKFLFSWRTKDNEKVENLYEFCKQVLNIPDAHRLIADYTIVSEDQDNKTLMVLHPYQVHAIQALFIAANKHQSGYVWHATGSGKTLTSFVSTKLLARKSGIDRTIMLVDRKDLDNQTTTEFTKFASEFNTGISSGNAKANSLIVGTGSAKELSETLLADANANVVIITTRQKLDAALKYAKKQEEKKGTNRFQKLMGQHIVFVVDECHRALSAENMEEIKKMFPKSTWFGFTGTLIFPENRKQAKGQLARTTHDQYGEVLHTYTIKNALEDGSVLGFQVEHENTVEPTSLENKIYRKLKEVETYAEYSSEQINRMIDQMESIKKESYLDPAVFEVDEHIQKVIHKMFRPDNAYTKFDFRNGRPTKSAILTTSSIDMAKKYYRAIKEMTKEPEWLTKEFPNQPIREGRTMEDPDFPRIAITYSLEENSRDSSVQQEEMQKIIEEYNQYYDTSWSLADIERYNGDINNRLARKRAEFKQFGKQIDLVIVVDRLLTGFDAPTIQTLFVDRNLEYAGLIQAFSRTNRTYPDKTKGLIVTFRKPATMEKNVEDATKLYSEAKEESGLICPSYQESKKRFKQAYGKLKEVSSMESIDEHTPLEIRIEYVKAFQELNRAYESLVTYDDYNDDIVQSSTLNNQIQLLEEQIGVYETVKGSLIEEEPEKEGEDFSTIEFYSENTTKLYDIDSTYIDQLLGTYAANSSDARDEIEKALAKLNKTEGVKEVYRQILNAFDVGTLDSNEDIFVIKRRYFTQASDDLIHVFSNEWFVSEKELHASNLQYMPGEDPIPNMKAIINSKDYEGYKANHPEAKPFKYPQEMKRAWRKMLDDELIPLENELR

SEQ ID NO: 56856 - protein, 530 aa, Enterococcus faecalis
MALSQEQQTKMWAMLNQTRGQIGLTAYKDYIFGILFYKYLSEKATRWLDDVTRGETWENIYAQNPSKALEYMQKNLGYAIQPNDFFDDWKKAIDEDRFNIGMMTDTFGHFNQQIAFEAKGDFEGIFDGMRFDSADLGANAQARASVMISMIELLSSPEFDLSGSDDTVSDIYEYLVAQFATVLASDMGQYYTPKEISNVMARILTSGREEEESFSIYDPTVGSGSLLLTTASYMKNSHKRGMIKYFGQEKDATPYRLSRMNLMMHGVEYNDISINHADTLESDWPDGVVDGKDNPRMFDAVMANPPYSAHWNNKDREDDPRWREYGIAPKTKADYAFLLHCLYHLEDNGRMAIILPHGVLFRGAAEGRIRKALIDKHQIETVIGFPDKLFLNTSIPVCVLILRKNRTASDILFVDASREFEKLKKQNHLRPEDVDKIVDTVVQRKEIEKYSHLATLDEIKENDYNLNIPRYVDTYEEEPPVDLVALNNDIKNTNEEIKKVEAELLAMLDDLVVTEETQALIDATKEVFGG

SEQ ID NO: 56857 - protein, 470 aa, Enterococcus faecalis
  MISC_FEATURE (293)..(293): X=any amino acid
  MISC_FEATURE (314)..(314): X=any amino acid
KFISDVLFNATYQVLLIILPIITMPILSRRLGTEGLGIYSYVFSIAQFLMILISVGMNPLRIRRIAQNKFNKDELNKEFWNLFIMQALIGLFFLTIYFFAKGIFKIEYEDLSHLQLIGVIGTTFDIAWVFQGIEQFAQVVIRNVIIKLLSVLLIILLVKNDKDLPLYGLITSASTVVGSLIFWLSLKNKISKPNCSMPIFKSLWKPSLIILLPQVFMQVYTTLDKTVVGSLTTNTELSYYDQSQKIARILLTLLSSLTIVMLPKMTGAIKNGDNDKVYMYTKKAFNYTWTSSXIMFTNTFANTKEFGVWFYCTXFVPMTANMMIVSFIIILNPIGGIFSNQFALAMEKDKEYGIPLIIGSIVSLLGNYILVPIYNALGATIVLVFVELIVCILRIVLIKDFINLQFLITKQILIELGLTIAITITGLLLPSIFANSFFNIAYKSMVMLLLFGIILFTTKSEVVLDVKKIL

SEQ ID NO: 56858 - protein, 389 aa, Enterococcus faecalis
MKSSNEIEKALYESSNSSISITKKDGKYFNVNQFKDIEKLKEIEEKIIQYDGLAKLKDAKVVSGEQRINREDLSDEFKNVVSLEATNNTKRNILFSSGVFTIKEGKNIEENDKNSIIVHEEFAKQNNLKLGDEVDLELLDIEKSGKIKSHKFKIIGIFSGKKQETYTGLSSDFSENMVFVDYSTSQEILNNSENNEIANKILMYSGSAESTDLALNKLKELKIDESKYFVEKDSNAFEESLESVSGIKYIIKVMTYSIMLVGMVVLSLILILWLRERIYEIGIFLSIGTSKIQIIIQFIFELIFISIPSIISSLFLGNVLLKVIVDGFINSEDSMISGGSLINNSSFMSNITTLGQSYLILISIIVLSVVFASSLMLIKKPKEILSKIS

SEQ ID NO: 56859 - protein, 330 aa, Enterococcus faecalis
MKMKTLKKSGLSKEELIQAYRQVLRGRRLDERLWQLTRIGKTSFNISGQGAEVAQVAMAMAFNPQKDYFLPYYRDMTACLVWGMTSKDILMGSFGKEADPSSHGRQMPNHYGSKEHNIVSFSSTVSTQMPLATGVGYAAQLQKADFVALTTTGEGSANQGEVQEAMNFAGVKKLPVIFVVENNEYAISVPIEEQYANKRMADRAKAYGFEGVTVDGSDFAEVYLAFKEAVKAARGKKGPKLIELMVSRLTSHSADDDQSVYRSKEEIEEMKKNDAVKLFEKQLLEEGYLTDEDIAKIDEEIRAEINQATDEAEAMPDPVPTSILEEVYAK

SEQ ID NO: 56860 - protein, 202 aa, Enterococcus faecalis
MAKKTDLRVQRTRKMIIEAFFKLVETKGYEAVTIQDIADEAMINRATFYAHFKDKQHLYDAIFTFTLSAFTAILDSQQLVNGNRVRVKHIEELLTQLYINIQENKSFFLTIMDNNFNEHFRKRLAEIIEEKYATIFSQLRITENDIDVPIDFVIEYMTSIFIGTLHWWITSETDMTPNHLAQLVIKLVGNGHLTVLGIELEK

SEQ ID NO: 56861 - protein, 1158 aa, Enterococcus faecalis
MNCTSAFSKGEKIMEGKIKKGIPFALAIGATFLLLLFFIHLGFKDENVTRSSKDQTTKMQYALVNEDKGASFEGKRYALGSDFVTLINKDTANRWETTTRNIATSGVENGQFDAQIIIPQDFSEKLLSLQAVSPEQASVEYQVRDGQNELTNQAIQDKVNTILKDFNQRVIQMYFSSIVGNLVIAQQNVNQITDTQLLYQNQLEETIQQPFKEIPMNYTTVLSTASILDEDNKLFTNEQEAFVKSVQTLLESNSRSLESTSKTTEDTKKSVDEYSKEANEKIKKSIAQFNEQFERQKQELTNQWESDTTVYKQQFDQLNGMVINQFSSFYTPSEQGSSGIYADFLSESKLFQETQGNRIGELQKEIAELHMQVEQLTALKKQIAATYYNDLEATPEIATDTQIKQAIIQLITNEKENIPNLDKNYQERLEESLSEISFVSLERLVSELEMNNRISVEQGNLFRDELQIIQRYAEQHELDFTNSSRFMYLEPKQLHEDTIAIPQEKVTFSLATNQESVISLRQTNTQNGELSFLLDDSKVQTIKTSLNQQLAGTGYSIDISAITPTQLTITKPVKIQAEIPENDEVDEENTQEELAEESEDESEKVTEPVNDLLSLPEKLSLTIDLPMSWQLTPEQQKTAFNQIDYSWWVNNELQNARSFAVYIAMDQPLVTDIPEIMKQFQLLDTVSQQIVTLYGTPNQSLSIQEYAAMLTAPENQDKTIEELAGETSIYWMYDNITENEQTMMITDKLLDEYKKTGNQLYRETDEQINQLKQLIGTETDQNTDGRPTTLYGTLNLMTVPEKLLREAEKLNTWFDEATKQVNATYATWQEAGKVGATSVIDERNPHPEESQTSTLDVETENLVKMMQTLMQTTKETSLTTADSAAKVKDVAQTIKELKASTTKVQDHAQNILANLNDSIDESKKTTKENEEYAKTFEKVLANTRDGGADNPRVFSFLASPIQGEGIFGETRQVSLIPYYATLIVSILTFVIALTFQGFMKKRTVTVADALVEPTRVWQNIPNLLLLLITVILFGSVFSLLLVFNVSQINRFAWFSYSFLVFASGALLVCACLRQFKKLTLYVYGAMLGLFFMLTPLLGIATKVGSLSNWLYRLSPLQNIQNGFTALVNGVQISWVSYLILIVLLVLGVVLNLFVRPEE

SEQ ID NO: 56862 - protein, 378 aa, Enterococcus faecalis
MANDKIVIHGARAHNLKNIDVTIPRDKMVVVTGLSGSGKSSLAFDTLYAEGQRRYVESLSAYARQFLGQMDKPDVDSIDGLSPAISIDQKTTSKNPRSTVGTVTEINDYLRLLFARVGHPICPNDHIEITSQSVEQMVDKVLELPERTKIQILAPVVVKKKGQHKKVFEMIQREGYVRMRVDGETYDVSEAPELEKNKKHDIAIVIDRIVVKEGIRSRLFDSFEAALRLAEGYAIVGVIGQEEMLFSEHYACPYCGFTVGELEPRLFSFNAPFGACPDCDGLGVKLEVDKDLVIPDPTKTLREGAIVPWNPISSQYYPQMLEQAATSFGIDMDTPFEELPADQQEIILNGSGEKNFHFHYENDFGGVRDVEVPFEGIL

SEQ ID NO: 56863 - protein, 302 aa, Enterococcus faecalis
MKNKLTVQEMILTLQKFWSSNGCMLMQAYDTEKGAGTMSPYTFLRAIGPEPWNAAYVEPSRRPADGRYGENPNRLYQHHQFQVVMKPSPENIQELYLESLKLLGIDPLEHDIRFVEDNWENPSMGCAGLGWEVWLDGMEITQFTYFQQVGGLQCHPVTSEITYGLERLASYIQEVESVYDLEWTQGVKYGEIFVQPEYEHSKYSFEISNQEMLLENFDKFEKEAKRCIEESLVHPAYDYILKCSHTFNLLDARGAVSVTERAGYLARIRNMARSVAKIFVAEREKLGFPLLNKDQHVSKEAE

SEQ ID NO: 56864 - protein, 896 aa, Enterococcus faecalis
  MISC_FEATURE (15)..(15): X=any amino acid
LFLNLEKKIFLQMDXDRLIDATRCEITEEANGKYELEMDYPAISRFSDYFENGYQIKAKPNDLEEYHIFEIKQTFKDTFTNSIVIYAQSRTYKLGNRQVRLVTVDNRNGAEAMRLIEQNMDEPCDIKLHSDINTASSTVFEARNVLNCIAGEQGSLLQYWGGEIKREPFKLSLLRRRGRDNVGTVRYGKDLKGLTIKFDWQSIVTKVLPFAELQSGADGTSQRIYGDAVKSEYINKYPDVYAQYVQFTEDQGVKDLSSLNKVAGKYFTTLYPGSDKPKVSIELEIEKLTDSEEAKEFAKMRNYNLFDTFTVYHKFYDIDIQTKVTGIVYDALAEKTIKITAGDIQVAFYKQQSQDFQEAIKTLTKKDYMSNFIDYITDLINGVKGGSILQYPKNRPHTLYFMDTDSTDTAKNVIAINNQGIGFSTTGWKGPFRNAWTIDGILNADFIRAGKIRSDIFETSFNAYGDILRLVNGALQAWNGKTKIMELTKQGLEFWNGNSHIGSIGTKGNPFPDLRDVNGNLVVSDGNSLLLVADNPQKIIGLSNQSGAGHLITGLTQFFVGNNFNFFGPKGSKSTITVDRLIVGGKEVIPGDGSGGNDGDVPPELTTEKEKNAWAVWQFLKSKGYSEQAAAGVLGNMDQESGIMPDIDEGGGGPGYGLVQWTSPIAGESGRAYVQRLLAQAGITGDYRNITTQLKLLDWHMHNGQYIPSAAYPYSVSEFKALTDIGTATMAFEANFERPAVTHPERIPMAQYWYNLLKDLKPSKPTWMNPVRSTYTITQEWDQIGWGTNVIHGGIDIASVPAGTSPPVYVARSGTVETVTYDGTGGNYVVVKHDDGYWTYYGHLDSVDLVVGEKVTTNSRVGIMGSTGLAKGIHLHFEVWKGGQWQRINPRDVINF

SEQ ID NO: 56865 - protein, 150 aa, Enterococcus faecalis
MINNVTLVGRLTKDCDLRYTSSGVAVAAFTLAVNRNFTNQNGEREADYIQCVIWRKPAETLANYTRKGTLIGLVGRLQTRNYENQQGQRIYVTEVVVESFQLLESKEVSQQRGVNASNPTPVGQQESNTQQPFPDLEGSSIEISDHDLPF

SEQ ID NO: 56866 - protein, 285 aa, Enterococcus faecalis
MKKIILSSLFSAVLVFGGGSITAFADDLGPTDPATPPITEPTDSSEPTNPTEPVDPAEPPVIPTDPTEPSKPTEPTTPSEPEKPTEPTTPIDPGTPVEPTEPSEPTEPSQPTEPTTPSEPEKPVTPEQPKEPTQPVIPEKPAEPETPKTPEQPTKPIDVVVTPSGEIDKTNQSAGTQPSIPIETSNLAEVTHVPSETTPITTEAGEEIVAVDKGVPLTKTPEGLKPISSSYKVLPSGNVEVKASDGKMKVLPHTGEKFTLLFSVLGSFFVLISGFFFFKKNKKKA

SEQ ID NO: 56867 - protein, 120 aa, Enterococcus faecalis
MVKVPHQGDILLLNTAPRSGHEQTGKRPYIVLSHDIIADYSNVVIVAPISSTKRNYPLYVSINPSYGMKTSGKVLLDQLTTIDYEARQCVFLETAHEKLIDELLLKVRTVFQKVNKTNKF

SEQ ID NO: 56868 - protein, 781 aa, Enterococcus faecalis
MNKKSLVKAVLLFLVGCFFVFTQTTAVNAEPKPDENKVIVTEPTTNVDLIYDTYKDNAFELMTKEKKQDSWTGVEEAITNASATIKTFVWSMVKGLGEFNAVMVKTLFSMDIITAIKQPIMNLTSSIATNMLGIAGTIGIAFVFVILGVKFIGQQRYKRFFGIFLMTILIFTGLSVLKDANTSNSLFDMMFSVDKEVETAFVNINPVLGDVSVPMTEKGKDKNGNEVEQKLSADQRAKSAGNLIASRVFYTNVYEPYLLMNYGTSDVNKIRKKTVKYKDKEYDRINLLLDNDMNSEENNKLMEEVVNYESKDLKNRSIMYYNNWTNTFYGLFYLVVNFIQTVVYFLLSFLRLIIAVIQLFLLPLLPLLLFAGLFLTETNVFANYFKTFGMTIFMKGMVGFATIFFASFLSLGFQLSNQTENVWQKILTILIYLLTPLGLYVFRKFFANLVTGRVSLSDGVGFIGNPFGTEANMRRAAKEQKQENKERRKQAQEERKAAIKKRQEEARKHGKAETGLKQRPLNKEQEKRSALRRELKPRPQHKAPNAIEKAQEGLRQAHEKGRMQEQKSEEQLKRQQHESARQKEYEKDRLKKQESLKKINDQSDESTNLTALRNQNRRTGQRSKKRETGHQTLMKRQGEKVLQPTNKPKDMKKQVVARSPRRTGQPTTRQNIQPKVAAQMVKRSGGTLGSNPAYRRPEVRKKMDQVKQVTQVDVPQTHSTPQRVQPKVNEPITRMNRHNTPIIKKEKKTKQSPVVRRERKKPGTQKITNKPKGVRQPRARK

SEQ ID NO: 56869 - protein, 152 aa, Enterococcus faecalis
MINNVTLVGRLTKDPDLRYTQSGTAVGQFTLAINRNFTNANNEREADFINCVIWRKAAESLANYATKGTLIGLTGRIQTRNYENQQGQRIYVTEVVTESFQLLESREVNEQRKEQATGKATFDKQSMDKPDPLDPFSPENSIVDISDNDLPF

SEQ ID NO: 56870 - protein, 285 aa, Enterococcus faecalis
MKKNLFASLFSATLLFGGSEISAFAQEIIPDDTTTPPIEVPTEPSTPEKPTDPTPPIEPPVDPVEPPITPTEPTEPTEPTTPTEPEKPVVPTEPTTPTEPTTPTEPSEPEQPTEPSKPVEPEKPVTPSKPAEPEKPVTPTKPTEPEKPVQPAEPSKPIDVVVTPTGELNHAGNGTQQPTVPIETSNLAEITHVPSVTTPITTTDGENIVAVEKGVPLTQTAEGLKPIQSSYKVLPSGNVEVKGKDGKMKVLPYTGEEMNIFLSAVGGILSVVSGFVIFKKRKAKV

SEQ ID NO: 56871 - protein, 158 aa, Enterococcus faecalis
MIQLSAVGRLTKGAELRTTTNGKSVANVTLACKRKRPDTNGNVPTTFIQCVLWGKPAQVFAKYTQKGALVGVNGELQTRSYDDQQGVTHYVTELVVEDFEFLESKETVQKREEKQHAVPQGQSTPTVNEQPAMNQAPTQQNVYQQPSMNGLSEYGYNQ

SEQ ID NO: 56872 - protein, 382 aa, Enterococcus faecalis
MKTFIFADKFFLKSDVKGPGYLEITDGIFGNYTKDEPQGDVKIIREEGKWIAPGLVDTHIHGYMNHDVMDNDAEGIKVMSEGLLSCGVTSFLPTTLTSSKERLTDVARTIGQVYQEVPGAKIQGIYFEGPFFTEEHKGAQNPSYFGDPDLDTFHEWQEASGGIIKKIALAPERNGVKEFVETVTDEGVVVALGHSNATLEEADVAVEAGASVFVHAYNGMRGLNHREPGMVGALLTLQHVFSELICDGHHVHPQAAEVLMEKAGHDHVALITDCMMAGGMPDGNYNLGEFPVVVAEGTARLDTGNLAGSILKLKEAIKNVVDWGIATPAQAIMMASLVPAISCKIDDQCGMIANGRDADFIVLEPTMELAATYLDGVERYRA

SEQ ID NO: 56873 - protein, 730 aa, Enterococcus faecalis
MAEAYNEEVVALLQKELTTYRSKQITTVLTLLNEGNTVPFIARYRKEMTGSLDEVQIREIEERYHYLQNLKKRKEEVLRLIEEQGKLTKELKTDIQKAVKMQQVEDLYRPYKQKRRTKATIAKEKGLEPLADWLLSLPENADILAKAATFINEEKEVATAEIALQGAHEILAERISDEPKYRIWLRDYMVKHAQYVSVVKDEEKDEKRTYEMYYDFAEPVSKMVPHRVLATNRGEKEDILKVSLVADETKINDYFQRQLIGKQATSLAAPYIEAAYLDSYKRFIGPAIEREIRNELTEKADEQAIAIFGENLRNLLLQSPLKGKVVLGFDPAYRTGCKLAVVDETGKVLAIQVIYPHKPATAAKREAAGPAFKKIIEDYQVDMVAIGNGTASRESELFVAEQLKAVKRDVFYVIVNEAGASVYSASEVARKEFPDLQVEERSAVSIARRLQDPLAELVKIDPKAVGVGQYQHDVSQKRLAEQLDFVVETAVNQVGVDVNTASAQLLQHISGLNKTTAQNLVTYRDENGVFTARNQVKKVPRLGPKAFEQAIGFLRIPNGKNVLDNTGIHPESYPVAQAILEKAEIASKELGTAEAIEKLKQLPVNQLATELEVGSETLTDIIASLIQPGRDMRDEMSAPLLRKDVLTMEDLKPGMEMQGTVRNVIDFGAFVDIGVKQDGLVHISKLSTKFVKHPTDVVAVGDVVTVWVEDVDLKKGRISLTMLPRADRKE

SEQ ID NO: 56874 - protein, 80 aa, Enterococcus faecalis
MGFIWALIVGGVIGAIAGAITKKGSSMGIIANIIAGLVGSTIGQAILGTWGPSLAGMAIVPSIIGAVILVAIVSWILGRK

SEQ ID NO: 56875 - protein, 297 aa, Enterococcus faecalis
MTEPNLKDPRKLFYSDGFPQQDQETPALQDKMVPKPDCGEDSYVGNHKLENRRVLITGGDSGIGRAAAIAFAREGADIALHFFPGEEKDAEEVAHYIREAGRKVVLLPADLRDKQAPEELVAQAHEALGGLDTLVLNAAQQISCAAIEELPMEQVIDTFHVNIIAMFGIVKAAVPHLPAGSSIVTTTSVQAFNPSEHLLDYAATKASIANFTVGLAKQLAPKGIRVNGVAPGPIWTPLQLDHGQPIEELPEFGQHSLLERAGQPAELAPVYVFLASNDASYVTAQVYGVTGGEAINL

SEQ ID NO: 56876 - protein, 155 aa, Enterococcus faecalis
MKFCETKKILNQLVADLSVFSVRIHQVHWYMRGGRFLTLHPKMDDLMEQINDQLDVISERLITLDGSPYSTLEEFFINSKLKEEKGSWNKTIDEQINYLLEGYSYLISIYEEGIEIAGKEGDDCTEDIFIGSKSELEKEIWMLKVELGNSPELDK

SEQ ID NO: 56877 - protein, 1348 aa, Enterococcus faecalis
  MISC_FEATURE (871)..(871): X=any amino acid
NPQEPITINSGDNTSIVDPKEMVEFAVKNPTTENINKARSLVSKMWLWDKNKYNPVLNAAEEVNRYLSTTLNGSSNDDGLILNNTHAATFVKLIDTDKDGILDRYEANMGIGTNYTNADSDGDGKSDGFEIFNDTDPLVSPYDWFDKNGEKIKIVTTDTDTISGRIGNNNYDTENVYPRTVQLIKVTDNGENLISEISSSEDRKGTFEFTGLSGKLSKGDRLVVKIITNEVQREIDRQRNVVQVGYDNPEVSEEVIVQGAQVTVSFDFNYNQTDPDFDRQPVTQVVELEKGSRLLNSYFTPERKGYKFIGWNTDKLGVGQTVNDGSSFNEDITVFAQWEKEPNLAGEVHAPQGPIEEGKSIVLNNVVQSNKSGSVIVTGELPKGLFGLSINETGNLIGTPLINDWIDGENSREVKIPVTISNGDEKVMVEVPLTILHDTRAADAVKAAEDAGKAGADKKAEVETDGLVTPEEKAAVDGLNDTTTAKKEDASKLVDALPEGPVKDSLKDRLDKVTTSEVTVNDADSNGKADDVDLAEKAAADAVKAAEDAGKAGADKKAEVETDGLVTPEEKAAVDGLNDTTTAKKEDASKLVDALPEGPVKDSLKDRLDKVTTSEVTVNDADSNGKADDVDLAEKAAADAVKAAEDAGKAGADKKAEVETDGLVTPEEKAAVDGLNDTTTAKKEDASKLVDALPEGPVKDSLKDRLDKVTTSEVTVNDADSNGKADDVDLAEKAAADAVKAAEDAGKAGADKKAEVETDGLVTPEEKAAVDGLNDTTTAKKEDASKLVDALPEGPVKDSLKDRLDKVTTSEVTVNDADSNGKADDVDLAEKAAADAVKAAEDAGKAGADKKAEVETDGLVTPEEKAAVMAXNDTTTAKKEDASKLVDALPEGPVKDSLKDRLDKVTTSEVTVNDADSNGKADDVDLAEKAAADAVKAAEDAGKAGADKKAEVETDGLVTPEEKAAVDGLNDTTTAKKEDASKLVDALPEGPVKDSLKDRLDKVTTSEVTVNDADSNGKADDVDLAEKAAADAVKAAEDAGKAGADKKAEVETDGLVTPEEKAAVDGLNDTTTAKKEDASKLVDALPEGPVKDSLKDRLDKVTTSEVTVNDADSNGKADDVDLAEKAAADAVKAAEDAGKAGADKKAEVETDGLVTPEEKAAVDGLNDTTTAKKEDASKLVDALPEGPVKDSLKDRLDKVTTSEVTVNDADSNGKADDVDLAEKAAADAVKAAEDAGKAGADKKAEVETDGLVTPEEKAAVDGLNDTTTAKKEDASKLVDALPEGPVKDSLKDRLDKVTTSEVTVNDADSNGKADDVDLAEKAAADAVKAAEDAGKAGADKKAEVETDG

SEQ ID NO: 56878 - protein, 328 aa, Enterococcus faecalis
MKLSILDQLTVPKNQSASDTLQEAKELAQLAEKLGYTRIWYAEHHGSDAFASATPEILVAHIASATEKIRVGAGGIMTMHYAPFKVAETFKTLAALYPDRIDLGMGRSPGGSPLTTLALNNGQPPQLDQFDKLPEILLFLREEFPEDHLYSKISAVPREVLLPQPWLLGASKESARSAGEYGINFSFAQFIHGHLPKEVLSAYYKHFRPVTEQQEPQVSAAYFTFAADTKEEAEYHAASFEHYIFATEHGLPNKFLSPEEALAFPYSEMDKLVLEQNKQRFVIGSSQEVAEFFHQQEELGLTEAMLITPGYDKQTRFQSFERLAKELL

SEQ ID NO: 56879 - protein, 1313 aa, Enterococcus faecalis
MKKLSFKKVKWGMHFLMAVALIAPSVTSTAYAVETTSQQSSEAVTSTTDSSRKQEPVITQETTDIKQEAPNQATSDSVKQSQETTAPTETTNLETSIAEKEETSTPQKITILGTSDVHGQLWNWSYEDDKELPVGLSQVSTVVNQVRAQNPAGTVLIDNGDNIQGTILTDDLYNKAPLVNEKTHPMITAMNVMKYDAMVLGNHEFNFGLPLIKKIQQEATFPILSANTYNKEDGLRFVEGTTTKELDFNQDGQPDLKVGIIGLTIPHIPLWDGPRVTSLNFLPLKEEAEKAVTELKANDQADIIVASIHAGQQNSDPAASADQVIENVAGIDAYILGHDHLSFTKQGAAPNGKTVPVGGPKDTGTEVVKIDLSVAKNADKWEVQEGTATIVPTTNVPADEAVKAATKEYHEKTRAFIQEEIGTATADFLPKQEIKGIPEAQLQPTAMISLINNVQKEVTGAQLSAAALFKYDSKLPAGKISYATIFDIYKYPNTLVSVPINGENLLKYLEKQGAYYNQTQPDDLTISFNPNIRVYNYDMISGVDYKIDISKPVGERIVDAKIDGQPLDPAKEYTIAMNNYRYGGLASQGIQVGEPIKNSDPETLRGMIVDYIKKKGTLDPEQEIERNWSIIGTNFDEKWRAKAIELVNDGTLQIPTSPDGRTPNAAAITKQDVRNAGFDLDNAYTIMHTNDVHGRLEAGKGELGMARLKTFKDQENPTLMVDAGDVFQGLPISNFSKGADMAKAMNEVGYDAMAVGNHEFDFGLEIALGYKDQLNFPILSSNTYYKDGSGRVFDPYTIVEKSGKKFAIVGVTTPETATKTHPKNVEKVTFKDPIPEVEAVIKEIKEKYADIQAFVVTGHLGVDETTPHIWRGDTLAETLSQTYPELDITVIDGHSHTAVESGKRYGKVIYAQTGNYLNNVGIVTAPESEPTKKTTKLISAAELLELPENPAVKAIVDEARTNFNAENEKVIVDYIPFTLDGQRENVRTRETNLGNLIGDAIMSYGQDAFSQPADFAVTNGGGIRADIKQGPIKVGDVIAVLPFGNSIAQIQVTGAQVKEMFEMSVRSIPQKDENGTILLDDAGQPKLGANGGFLHVSSSIRIHYDSTKPGTRLASDEGNETGQTIVGSRVLGIEIKNRQTQKFEPLDEKKQYRMATNDFLAAGGDGYDMLGGEREEGISLDSVLIEYLKSATSLRLYRAATTIDLAQYKEPFPGERIVSISEEAYKELIGGGETPKPDPKPDPKPTPETPVATNKQNQAGARQSNPSVTEKKKYGGFLPKTGTETETLALYGLLFVGLSSSGWYIYKRRNKAS

SEQ ID NO: 56880 - protein, 458 aa, Enterococcus faecalis
MENRYAIILAAGKGTRMKSKLYKVLHPVAGKPMVEHILDQVEQTEPTEIVTIVGHGAEMIKSHLGERSQYALQAEQLGTGHAVMQAQELLGGKQGTTLVITGDTPLLTAETLKNLFDYHQGKNASATILTAHAEDPTGYGRIIRDHVGIVERIVEQKDASEEEARVQEINTGTFCFDNESLFEALAKTDTNNTQGEYYLTDIIEILKKEGKAVAAYQMADFDEAMGVNDRVALSTANKIMHRRLNEMHMRNGVTFIDPDTTYIDEGVVIGSDTVIEAGVTIKGKTVIGEDCLIGAHSEIVDSHIGNQVVVKQSVIEESVVHEGADVGPYAHLRPKADVGANVHIGNFVEVKNATIDEGTKVGHLTYVGDATLGKDINVGCGVVFVNYDGKNKHQTIVGDHAFIGSATNIVAPVTIGDHAVTAAGSTITEDVPSEDLAIARARQVNKEGYAKKLPYMKD

SEQ ID NO: 56881 - protein, 67 aa, Enterococcus faecalis
MKTGTVKSFNHKRGYGFIIAEDGSEIFVHQTGICMPGFRKLLEGQAVEYETAEYEGRTKAVNVTVIE

SEQ ID NO: 56882 - protein, 176 aa, Enterococcus faecalis
MKKQLLIVDGYNMIGAWPELVQLKKQERLEDARELLLSRLSNYAKYEGLEIIVVFDAQLVPGIQQTYKKYLLTVVFTKEDETADSYIERLAGEKNDRLTQVTVATSDLAEQWVVFSQGALRTSANELYKAVQKTEKTIAIHATDIHFQQFRRNSPWNVEQLSKLSEKLEELSQKKD

SEQ ID NO: 56883 - protein, 478 aa, Enterococcus faecalis
MEERWKKGMIKIYNTLTREKEVFTPIEARKVRMYVCGPTVYNYIHIGNARSAIAFDTIRRYFEYRGYEVNYVSNFTDVDDKIIKAAKELKITAPEVAERFIKAFEEDTQALNVQPATLHPRVMDHMPDILAFIEVLIEKGFAYEVAGDVYYRTRKFPNYGKLSHQSIDELEVGASQRTGVEQQLKEDPLDFALWKSAKEDEISWDSPWGKGRPGWHIECSVMATKHLEETIDIHGGGQDLEFPHHENEIAQSEAKTGHTFANYWMHNGYVTIGEDDEKMSKSLGNFITVHEMIQKVDPQILRFFMSTTQYRRPIRYSESTLKEAAANYQKLKNAFENLRFRQADAVASLPEDEHYLAQLNELEQRFITEMDDDFNAANGITVVYELAKMMNQYSEQATVSEPVLVAMDKLFSGWLAIFGLFFKNEELVDAQVDALIEERNQARKDRDFARSDEIRDLLKEQGIVLEDTPQGTRWRRSE

SEQ ID NO: 56884 - protein, 179 aa, Enterococcus faecalis
MSWLKRSVAAVKRNDPAARTTLEVLLTYPGLHALFWHRLSHFLYRHQLFLLAKIHAQFWRFITGVEIHPGATIGAGVFIDHGMGIVIGETAEIEEDVVLFHGVTLGGTGRDTGKRHPTVKKGAMISARAQILGPVVIGERSKIGAGAVVISDIPADATAVGVPAKVVRLNGRKVEKGHD

SEQ ID NO: 56885 - protein, 232 aa, Enterococcus faecalis
MQVSDLFIREMPSDCLPRERLLAIGEKALSNQELLAILLRTGSKEADVMTVAATLLKQFKQLSYLQQATLNELMAIKGIGQVKAIELRAAIELGCRIYQSSQIKFGKVTSSQQVAQRLLQEMKGLQQEHLICIYLNTKNDIIQQKTIFKGSLNQSIAHPREIFREAVKYSSARILLAHNHPSGNPTPSPQDIQFTKRMEECGEMMGIQLLDHIILGDSGYISLREENFFASE

SEQ ID NO: 56886 - protein, 382 aa, Enterococcus faecalis
MKKIKVMTVFGTRPEAIKMAPLIKVLEEQSQGFDSVVVVTAQHRQMLDQVLEDFQITPNHDLNIMKDGQTLTDITSRVLNLLTEVLVTEQPDIVLVHGDTTTSFAAALAAFYQQIPVGHVEAGLRTWQKYSPFPEEMNRQLVDVLTDIYFAPTTQSKDNLIKENHPEEHIYVTGNTAIDAMAYTVDAHYQNDLLEKIPTDQRIVLITMHRRENLGLPMANVFKAVRRLVMEHPEIEVIFPMHKNPKVREIVAEHLGELARVHLIEPLDVKDFQNFAAKSALILTDSGGVQEEAPSLGVPVLVLRDTTERPEGVAAGTLKLVGTDEQVVYQEAKTLLTDSDAYHAMAHAQNPYGDGQASRRIVEAIAYEMQKSDKKPDTFTAK

SEQ ID NO: 56887 - protein, 456 aa, Enterococcus faecalis
MAKKAKVQFECQSCGYVSPKYLGRCPNCGQWNSMVEEVIQDTSDRRARVSLTGKKTQPQRLSEVIPKKEPRVKTELVELNRVLGGGVVPGSLVLIGGDPGIGKSTLLLQVSQQLAATGGTVLYVSGEESAEQIKLRAERLGTVNETFYLYAETDMHEISRAIEKLEPDYVIIDSIQTMTQPDVTSVAGSVSQVRETTAELLKLAKTNGIAIFIVGHVTKEGSIAGPRMLEHMVDTVLYFEGDKHHTFRILRAVKNRFGSTNEIGIFEMQTHGLVEVMNPSQVFLEERLEGATGSSIVVAMEGSRPILVEIQALVTPTMFGNAKRTTTGLDFNRVSLIMAVLEKRAGLLLQNQDAYLKAAGGVKINEPAIDLALAISIASSYKEKGTSSSECFIGEIGLTGEIRRVNSIEQRVREAQKLGFTKVYVPKNNLGGWEAPEGIEIIGVSTIGETLRKVFK

SEQ ID NO: 56888 - protein, 415 aa, Enterococcus faecalis
MTDLKQLGQQAKEASYTLGLMDTRQKNTLLNKMAAAIEANAPRILQANALDLEQAATHGISETMQDRLRLTEERITAMAEGIRQVATLPDPIGEVDKMWRNEAGLLIGQQRVPLGVIGIIYESRPNVTTDAASLCFKSGNAVILRGGKEAFHSNQILVTILQEALIQEAVSPHLIQFVDDTSRETAQQLMRLNDYLDVLIPRGGANLIKTVLTTATVPVIETGTGNCHIYVDKDAQLTMATEIIVNAKCQRPSVCNAAETLLIHQEVAEAFLPTIEKALKEFHVELRADERALAIFEEAIPATEQDWETEFLDFILAVKVVDSLDEAIQHINRYNTKHSESIISDNYFATQQFLQQVDAAAVYANASTRFTDGFEFGFGAEIGISTQKLHARGPMGLAELTSTKYVIYGNGQARS

SEQ ID NO: 56889 - protein, 367 aa, Enterococcus faecalis
MTDRISRRMISLYASLSTFIVILITLFSYFHSIKQNRWLLELLQRKVFYLPLIVHIVLISLLIGLLTFLLISLVQKGQYGRIEEKLRLLANGNYESPVLNKPTTSENQDHYLTEVEQDIWSIKNKLLEMSKELQLLNSRPQLMDGQTKEEILENERHRLARELHDSVSQQLFAAMMMLSALNEQAQRTETPEPYRKQLAMVAEIINASQSEMRALLLHLRPISLEGKSLRKGIEQLLKELQTKIKIELIWDVEDVHLNSSIEDHLFRIVQELLSNTLRHAKAKELEVYLHQVDKNVLLRIVDDGVGFDMKEQSNKAGSYGLNNIRERVVGMGGTVKIISFKGQGTSVEIKVPVIKEETASDQSNVSG

SEQ ID NO: 56890 - protein, 426 aa, Enterococcus faecalis
MKFKTLATTVLATAAIFALGACGNGNGAKESNDIVKEVKEDTTITFWHAMNGVQEEALTKLTKDFMKENPKIKVELQNQSAYPDLQAKINSTLTSPKDLPTITQAYPGWLWNAAQDEMLVDLKPYMDDDTIGWKDAEPIREVLLDGAKIDGKQYGIPFNKSTEMLFYNADLLKEYGVEVPKTLEELKEASKTIYEKSNKEVVGAGFDSLNNYYAIGMKNKGVDFNKDLDLTSKDSQEVVDYYRDGIEAGYFRTAGSDKYLSGPFANKKVAMFVGSIAGAGFVQKDAEAGGYEYGVAPRPEKINLQQGTDIYMFDSATPEQRTAAFEFMKFLATPDSQLYWAQQTGYMPILESVLHSDEYKNSKTTKVPAQLENAVKDLFAIPVEENADSAYNEMRTIMESIFASSNKDTRKLLKDATSQFEQAWNQ

SEQ ID NO: 56891 - protein, 336 aa, Enterococcus faecalis
MSDEKDIYDLTIIGGGPVGLFAAFYAGIRKAKTKIIDSLPQLGGQLTMLYPEKYIYDIPGFPAIKAGELIANLEKQMQPFQHDVCLEEEVTHLAQEADGLLRLDTTKGTHYSKTVIFAIGNGAFQPRRLAIENVEAFEGESIHYYVTDMKKFAGKKVAIAGGGDSAIDWALMLENVAEEVSIIHRRPQFRGHEHSVEQLEKSSVSIRTPYIISDILKENETFTGIQLTETKGDQTLDLPLDDLIINYGFTSSLTHLKEWGLDVSRNAINVHSDMSTNIPGVYAVGDICSYEGKVKLIATGFGEAPTAVNNALHYLRPDARRQPVHSTSLFENGVPK

SEQ ID NO: 56892 - protein, 149 aa, Enterococcus faecalis
  MISC_FEATURE (68)..(68): X=any amino acid
  MISC_FEATURE (107)..(107): X=any amino acid
  MISC_FEATURE (126)..(126): X=any amino acid
  MISC_FEATURE (134)..(134): X=any amino acid
MGSFRPVAGNLHLHRTKISPSLSLRQCPNRYAFRAGRNLPDKEFRYLRTVIVTAAVYWGFNSELRRSXPILLTFQHRAGVSPYTSSYDFAETCVFDKQSLGPIHCGXPKSAPLLPKLRGHFAEFLXREFARSPXGYSPRLPVVGLRYGQ

SEQ ID NO: 56893 - protein, 407 aa, Enterococcus faecalis
MKIGFFTDTYFPQVSGVATSIKTLKDELEKHGHEVYIFTTTDPNATDFEEDVIRMPSVPFVSFKDRRVVVRGMWYAYLIAKELELDLIHTHTEFGAGILGKMVGKKMKIPVIHTYHTMYEDYLHYIAKGKVVRPSHVKFFSRVFTNHTTGVVCPSERVIEKLRDYGVTAPMRIIPTGIEIDKFLRPDITEEMIAGMRQQLGIEEQQIMLLSLSRISYEKNIQAIIQGLPQVIEKLPQTRLVIVGNGPYLEDLKELAEELEVSEYVQFTGEVPNEEVAIYYKAADYFVSASTSETQGLTYTEAMAAGVQCVAEGNAYLNNLFDHESLGKTFKTDSDFATTLIDYIQANIKMDQTILDEKLFEISSTNFGNKMIEFYQDTLIYFDQLQMEKENADSIKKIKVKFTSLRK

SEQ ID NO: 56894 - protein, 296 aa, Enterococcus faecalis
MSKIGFIGTGVMGKSIIRNMMKNNLSVNVYNRTKSKTDDLVAEGAVWYDTPKAIAEASDIIFTMVGFPSDVEGVYFNETGIFQADLTGKIVVDLTTSTPTLAEKIAKKAAEVGAHALDAPVSGGDLGAKNGTLTIMVGGDQESYDTVLPIFKTFGKTFMLHGSAGKGQHTKMANQLMIAGTMTGLTEMLVYANATGLTLEKVLETVGGGSAANWSLSNYGPRILKEDYTPGFFVKHFIKDLKIALDEAKKLDLPLPATQKATELYESLADKGFENDGTQALIKLWWTDGKQPTNKN

SEQ ID NO: 56895 - protein, 318 aa, Enterococcus faecalis
MNQELCELLGINYPIFQGGMAWVADASLASAVSNAGGLGIIAGGNAPKEVVKKEIKKVKELTEQPFGVNIMLLSPFADEIVDLVCEEQVPVVTTGAGNPAKYMARFKEHNIKVIPVVPSVALAKRMEKIGADAVIFEGMEAGGHIGKLTTMSGLPQIVDAVSIPVIAAGGIGDGRGMAAAFMLGAEAVQLGTRFLIAKECNVHPDYKQKVLKARDLDAVITCQHFGHPVRTLKNKLTAQYNQLEKQELQKEVPDLEMFEKIGQGALRKAVVDGDMDYGSVMAGQIAGLIKKEETAQEIIDSLMSECKAIVHKMNQRWG

SEQ ID NO: 56896 - protein, 309 aa, Enterococcus faecalis
MKTAILFSGQGAQYQGMGEELYHQEAIVRETFDEASHILGYEMAELCFTENERLNETEYTQPAILTVSVAFYRLLQQKGLTPDVVAGLSLGEYSALVASGALRFSEAVALVQKRGQYMTEAAPQGTGKMVAVMNAEREVIEKACQEASAFGIVAPANYNTPQQIVIGGEVAAVDQAMTLLKEAGVKRMIPLNVSGPFHTALLQPASKKLAQDLAKLNFQTMQIPVISNTTAEIMPQEAIQALLEKQVMSAVRFEDSIETMKAMNVGTMIEVGPGKTLTGFVKKIDKTIEMHRVEDVATLTETLTALTGR

SEQ ID NO: 56897 - protein, 245 aa, Enterococcus faecalis
MELTGKNVFITGSTRGIGKAVALAFAKEGANIVLNGRSEITPEQRQEIEAFGVKCIGLSGDISDFDAAGEMIQATVDQLGSIDILVNNAGITNDKLLLRMTKEDFNACLDINLVGTFNMTQQAVKRMMKQRSGRIINMASVSGLMGNVGQANYAASKAGVVGFTKSVAREVAPRGITCNAIAPGFIQTEMTDVLSEKVKTQMNAQIPLQTFGQVEDVAATAIFLAKSPYITGQVVNVDGGLVMHG

SEQ ID NO: 56898 - protein, 369 aa, Enterococcus faecalis
MTEAIHCIGCGAIIQTENPHELGYTPKTAFEKGMETGEVYCQRCFRLRHYNDIQDVQLTDDDFLRLLNGLGTEDALIVNVVDIFDFNGSLIPGLHRFIGDNPVLLVGNKVDILPKSLKKPKMVQWMRERAHEAGLRPVDVLLTSGKKPQEMQELLDTIEKYREGRDVYVVGVTNVGKSTLINQIIQQTVGVQDVITTSQFPGTTLDKIEIPLDDGHFLIDTPGIIHRHQMAHYLGKKDLKIIAPQKEIKPKVYQLNAEQTLFLGGLARFDYVQGAKSSFIAYVSNDLKLHRTKTATADAFYEKHVGGLLQPPRADEVAEFPELVRFEFSVKEKTDIVFAGLGWITVTEPGVVAGWAPKGVDVLRRKALI

SEQ ID NO: 56899 - protein, 196 aa, Enterococcus faecalis
MSWITNYDAAQRELLMQKVQMQMSERRFRHVLGVEETAVALAAKYGADEAKASIAALTHDYAKERPNDEFELIIRRDGFDLALLNYGNEIWHGLVGADIVQRELAIDDEEILQAIRVHTTGAAKMSLLDKIIYVADYIEPGRDFPGVKEAREIALVDLDAAVAYETKHTLLHLIEQEHKIYPKTLETYNQWVVNQK

SEQ ID NO: 56900 - protein, 239 aa, Enterococcus faecalis
MGRKWANIKEKKAAKDANNSRVYAKFGIEIYVAAKSGDPDPHANQKLRFVIERAKTYNVPKHIIDRAIEKAKGSADEQYSELRYEGFGPNGSMVIVDALTNNVNRTAADVRAAFGKNGGNMGVSGAVSYMFDNTGIIGFAGDDADEILEYLMEKDIDVRDVVEEDGQIIVYTEPEDFHHAQEALKEKGIEEFTVTELEMVPQNEVTLEGDDLGNFEKMLDVLEDLEDVQKVHHNVDLPE

SEQ ID NO: 56901 - protein, 283 aa, Enterococcus faecalis
MNDLWNFLDNHPEEKELIKAKALQGYTVDGILNDQLNFVALDTLSIGLEKFGNIHYSIQIPEFNELLSKKMVVLFVPADGVGHSGAKERYFGLRQWNTLSQSVRKNTIILRIADVGFVSGSYYTLFEQEILDLIEAKKTEFGLKHQDIIFYGNSRGGTGALLLGITGNYKTVSVDPVIDREPWVNSADGRIDRQLMFDFVEMDFSNRIKDKMEQSNYELENITVIASEANKKMYEKIYPLSNGFTLKKLELMIDSENTIGIHGLTIMESIHLQLALINNYLFD

SEQ ID NO: 56902 - protein, 379 aa, Enterococcus faecalis
MKYNTKNYDYLIVGSGPFGATFACEAAKRGKKVLVIEKRAHIGGNMYTHKENGINVHDYGAHIFHTDNKEVWSYVNQLTEFNGYINQVVANYKGELYNLPFNMNTFYQMWGVKTPAEAQAKISEQREAAGIKGAPKNLEEQAIRLIGTDIYEKLIKGYTEKQWGRKATELPSFIIRRLPTRFTFDNNYFNHRYQGVPVDGYTAMFDKLLESELIDIQLNKDFLAEKETYLSEFPKIVYTGMIDAFFDYSYGELEYRSVRFENETVDSNNAQGNAVINYTDAETPYTRIMEWRHFDQKADENKTILTKEYPQDWDRSKEAYYPVNDEKNSLLFRKYKEKANAQEKVIFGGRLANYQYYDMDQVFGAALKAVAKEFGEMAN

SEQ ID NO: 56903 - protein, 447 aa, Enterococcus faecalis
MEKELKVRTKLLTKEYSLAQTRIDKLKTLFSVFQNKVPTFWALKGVSLDVYSGETIGIIGLNGSGKSTLSNIISGITPQTSGELEINGEVSIISIGAGLNNNLTGRENIRMKCLMLGEKNKEIDAKIDDIIEFSELGVFIDQPVKTYSSGMRAKLGFSIAVHQNPDILVIDEALSVGDQTFYNKGLKKMLAFKEQGKTIFFVSHSIQQVEQICDRVAWMHYGDLRAFGETKHILKEYRAFLHRYNHFTEPQKESYQRDGKAKQRNFSLEQLQETILEKANQQVGSRRTTKEVIKFTTKNKIGDKMTLGTKSLLILLLCMIFYVSLTFVKGISLTTAFIHPAETIQRIFVPEKVAGKDTNAVKTTKTKPASTKESRQQEEVQPSPTNVPENNNSEQAVSTYTVEVGDSVSLIAENHGLTIEQLQTLNPEIIEVPIYPGQVLKLKEVTE

SEQ ID NO: 56904 - protein, 711 aa, Enterococcus faecalis
MKKNSFIDKIKKTDAAAKSQRGRKPHIPFRLNLLFFVIFTLFVSLIVRLGYLQIVEGEEFNKKITANSSLQITTPSPRGQIYDSQGKVLVSNKANLAITYTRGKNIEGKDILPIANKVNELINVPVDPNLTDRDKKDYWLANPENLKAAQSRLTDQDKEDEKGNKITDEGTLYAKAVEKVTPEEIAFDDRTLQAVTIFKRMNAASQMNTVFIKNEGVTEGEIATIGEHTAEISGVSTGTDWTRDYSQSGALRSLLGTVSTEKQGLPAEEVDEYLKKGYARNDRVGTSYLEKQYEDVLQGKKAKSEVVLDNNGKIVSQTPISKGEKGSNLKLTIDSNFQNKVDEILQRNYSQIVKTIGPYSENAYVVAMNPQTGAILAMSGFHHDLATGEVTPNPLAPILNSEVPGSVVKAGTLTAGYETGVIKGNDVLTDEAILLAGSNPKASWWNASGGTTMQLTAEQALEYSSNAYMMKLVFKMMGVNYYPNMIFPYEVGDDTVFKELRKAFAEYGMGTKTGIDIPGETTGIQNKDFKDSSSAPQGGNLLDLSFGQYDTYSALQLAQYVSTVANNGIRVQPHVVEGIYGNDENGALGKILKEIEPKVLNKVNISEDQIGILQQGFYNVVNGTSPFTTARGLKSDKFSIAAKTGTAETQATDANGVNHTTVNSNLVAYAPYENPEIAISVVLPHLNDEASKPNQTIAKEVLEAYMEMYKK

SEQ ID NO: 56905 - protein, 243 aa, Enterococcus faecalis
MENRGILFDKDGTCIRFDTLWQAGLQACFETLSMLAPHHSAEIKKILAIQEQRFLQKHLLDEVLYQELYQELAQFEELVEQGISSRWLEQFFYDYLRKNLKKIEPIGDLKQLFLELKRKNYKIGLATSDTLPATMLIMEYLGLTEMFDFIATGDRYLPKPDADMLQAFCQSCQLKATEVIMVGDSLVDVFMGTCHGKAGIGVLTGNCQSTDFEKFEVAYFRDIHEIPYQELWENTKKKKIYYF

SEQ ID NO: 56906 - protein, 348 aa, Enterococcus faecalis
MTIFTKERKLLLAVESSCDETSVAVIEDGDKILSNIVASQIKSHQRFGGVVPEVASRHHVEQVTICIEEALTEAKVTPEELSGVAVTYGPGLVGALLIGLSAAKAFAWAHQLPLIPVNHMAGHIYAARFVAPLEFPLMALLVSGGHTELVYMKEDGSFEIVGETRDDAAGEAYDKVGRVLGLPYPSGKEIDALAHEGTDTYQFPRAMLKEDNYDFSFSGLKSAFINTVHNAEQRGEALSTKDLAASFQASVVEVLVTKTIRACQEYPVKQLLIAGGVAANQGLREAMRHAISEQLPAVTLLIPPLKLCGDNAAMIGAAAFIEAEKNHFASYNLNAEPGVSFMTISEEG

SEQ ID NO: 56907 - protein, 611 aa, Enterococcus faecalis
MKYRDDIRNVAIIAHVDHGKTTLVDELLKQSDTLDGHTQLQERAMDSNALESERGITILAKNTAVDYNGTRINILDTPGHADFGGEVERIMKMVDGVVLVVDAYEGTMPQTRFVLKKALEQKVTPIVVVNKIDKPSARPEHVVDEVLELFIELGADDDQLDFPVVYASALNGTSSESDDPADQEPTMAPIFDKIIEHVPAPVDNSDEPLQFQVSLLDYNDYVGRIGIGRVFRGTMKVGDQVALMKLDGSVKNFRVTKILGFFGLQRVEIDEAKAGDLIAVSGMEDIFVGETVVDVHNQEALPILHIDEPTLQMTFLVNNSPFAGREGKYITARKIEERLMAELQTDVSLRVDPIGPDSWTVSGRGELHLSILIENMRREGYELQVSRPEVIEREIDGVKCEPFERVQIDTPEEYMGSVIESLSLRKGEMQDMINAGNGQMRLIFLAPARGLIGYSTEFLSMTRGYGIMNHTFDQYLPMIQGTIGGRHQGALVSIDTGKATTYSIMSIEERGTVFVEPTTEVYEGMIVGENNRDNDLTVNITKAKQMTNVRSATKDQTSVIKKPKKLTLEESLEFLNEDEYCEVTPESIRLRKQILNKNEREKASKKKKKAE

SEQ ID NO: 56908 - protein, 180 aa, Enterococcus faecalis
MEKNKLRKVGLTALEWLKQHPEIKQHKESSLYEQLFASQQWQQAQTIGMIRSLPLELSTQPIFERAMQESKQVAVPRTFKGGKMHFYQVFPETVYDTSAFGVEEPPLTAAEITATAIDLLIVPGIVFNRAGYRIGFGGGFYDRYLEHFSGHSCSLVFSEQLHEQWQPEAFDQPIEQLFIQ

SEQ ID NO: 56909 - protein, 132 aa, Enterococcus faecalis
MSILWVINGILLVIVLAMVFNELYLKIMVKRSAKMLTEEEFKETMRKAQVIDVREKDTFDAGHILGARSMPYSMLKTTIGSLRKDQPVYLYDQKKALSIRAANLLRKNGYTDIYILKGGYDGWTGKVKKRNS

SEQ ID NO: 56910 - protein, 104 aa, Enterococcus faecalis
MMRGMGNMQGMMKQVQKMQKEMAKAQEALNEKEFIGEATNQLVTATFTGDRTMKDLIIKEDVVDPEDVDMLQDLVIMAVNDALVKIEKETEATLGKYTKGMPGF

SEQ ID NO: 56911 - protein, 178 aa, Enterococcus faecalis
MTKEKFCRESRVIQTHRVFPFDLNPFGALFGGKLMSLIDDAASISVSRHCRRGAVTASLDNLNFLKPLKENHSVCVETFVSGVHHKSMEVFVKVVGEDLTTGERYLAATCFTTFVAIPSHMNPESDFQLAAVVPETAEEKLICSNYETRRQQRLALREETKLFSQHLTTDLPWIDSPL

SEQ ID NO: 56912 - protein, 83 aa, Enterococcus faecalis
MPNIESAIKRVRTSANANAKNSSQTNAMRTAIKKFEEAVAAGADNVDALYNEAVKAVDMAATKGLIHKNKANRDKIRLSKLAK

SEQ ID NO: 56913 - protein, 337 aa, Enterococcus faecalis
MSIALLVTITLVMGVIFVNGWTDAPNAIATAVSTRVLKPNVAIWMAVVMNFLGALVMTFFNAQVAETISNIVSFDANGNASQVALAASLFSIVVWAVAAWYFGIPTSESHALIAGLTGSAMALGGLGAVNGSEWIKVLVGLVVSTVMGFGGGYLIAKLVVKAFSAVPRRKANKFFTVGQAFGAGANAFLHGAQDGQKFMGVFMLVLFYNNLVEKTGGGFVIPLWVMVLCSITMGIGTSVGGMRIIKSVGMDMVKLERYQGFTADLSTAICLFLASAFGIPVSTTHTKTTAIMGVGASKRISSVDWRIVKEMLIAWILTFPGCGLIAYVMSKLFIAIF

SEQ ID NO: 56914 - protein, 369 aa, Enterococcus faecalis
MYGISVFLGEEITNDTIIYIKKMKALGFDGIFTSLHIPEDDTSLYRQRLTDLGAIAKAEKMKIMVDISGEALKRAGFSFDELEPLIELGVTGLRMDYGITIEQMAHASHKIDIGLNASTITLEEVAELKAHQADFSRLEAWHNYYPRPETGIGTTFFNEKNRWLKELGLQVFTFVPGDGQTRGPIFAGLPTLEKHRGQNPFAAAVGLMADPYVDAVYIGDPTISERTMAQFGYYHQTNQFLLEVAPSESRYLKRILGTHTNRLDAARDVLRSELSRTSEMFRKDEIATIESEQTEARPVGTVTIDNEKYGRYMGEIQVTLVDLPKDEKVNTITRIIEKDQTILPLIKAGNQFTLVTEGTIENEFRKLNN

SEQ ID NO: 56915 - protein, 290 aa, Enterococcus faecalis
MPKFSPCLWFNTQAEEAANFYTTIFEKGAILSKTNYVNEEHQPQGTSLMTIEFTLANQTIIGLNGGPEFSFTPASSFFVECTTLPQTETLWKNLTADGQILMPFGEYPFSPLYGWVVDKFGVSWQVSFSGKEQTIVPTFMFANEKYGEAAKALSEWLAIFGPGEIIEKVEYEDGNIAQALFTLQEQPFRVMDARDKHDFDFTMAFSIYIDCENQEEIDRLWQQVTAKGKEWPCGWMEDQFGVSWQTGNPELKRYLSDSNPARANEVTKKLYQMKKIDLNQLKEVYDKYNH

SEQ ID NO: 56916 - protein, 296 aa, Enterococcus faecalis
MNLENLTTERRNENTMGLDEMSVKEALQKMNQEDQKVAMAVGQELAAIEPVVEAIIKSFNQGGRLIYMGAGTSGRLGVLDAAECVPTFGVEPEMVQGLIAGGQKAMTVAVEGAEDSKELGRQDLVDLKLSANDIVVGIAASGRTPYVIGGLEYATTVGAATATVACNKNAEISKYAQMPIEVDAGPEFLTGSTRLKSGTAQKLILNMLSTISMIGIGKVYNNLMVDVKPTNEKLVERSKRIIMEATGCSYEVAELKFVEAEENVKLAIVMILTDSTKEEATQKLIDGNQFIKNTLN

SEQ ID NO: 56917 - protein, 484 aa, Enterococcus faecalis
MAEERIKRIADGIYKEVGGQENVDKVIHCMTRVRMDIRDYDKVDIEGLKKIDGVMGVVEDDTLQVVVGPGTVNKVAQEMVDQAGVKLGEPFNHGTTTDASAGKSGKDLVEEKAAQMKAQQKAKQNNTSPFKKVLKAISSIFVPMIPAFVGAGIIGGIAAVMSNLVVAGDISASWQQYIDVLNIIKNGIFAYLALYTGINSASVFGATPALGGVIGAVTMLTGMNPDAPISNIFTGGTLSAGQGGIIGVIFAVWLLSLLEKQLHKIVPESIDIIVTPTISLLVIGLATIFLIMPVAGAISNGLVGIINVVLEKGGMVAGFTLGLTFLPMVMFGLHQILTPIHIEMINQTGMTLLLPILAMAGAGQVGAALALWIRCKSDKKLVEMIKGALPVGILGIGEPLIYGVTLPLGRPFITACIGGGIGGAVIGAFGNVGAIAIGPSGVALIPLIANNQWLAYVLGLLAAYAGGFVATLFFGIPKDMQTTK

SEQ ID NO: 56918 - protein, 173 aa, Enterococcus faecalis
MTIAKDMMVNDGIRARELRLIGQDGEQLGVKTKAEALQIAESANLDLVLVAPGAKPPVARIMDYGKFRFEQQKKEREARKKQKVINVKEVRLSPTIDVNDFNTKLRNARKFLEKGDKVKASIRFKGRAITHKEIGQKVLDRLAEETADIATVEQKAKMDGRSMFLTLAPKNDK

SEQ ID NO: 56919 - protein, 356 aa, Enterococcus faecalis
MKALKAYKYRLYPTSKQEEFIQKTFSCVRLVYNLMLQDRIDIYKEMRKNPQQTFKMPTPAKYKKQYPVLREVDSLALANAQVYLDRAFKNFYREKGMGFPKKKKKETVHSYTTNNQHGTVKILDNRYLKVPKLKSLIKMKVHRQPLGEIKSVTISMSASHNYYVSILCEAPIETKTKQQKMVGICSSREKFALLSNGESFEKSYCSKHLKQKLRQEERKLNKRKMIALEKGVDLSQAKNYQKQKIKVAKIREKIANQRTDILNKITTELVSSYDVICIEKAHHSNERPPKHDRSELAWSLFLAKLLYKAQWYGKELICIESEEIETELSFSESTENSEYLRSQKILERGLSKRETL

SEQ ID NO: 56920 - protein, 318 aa, Enterococcus faecalis
MAEEKKVLLEVTGLKQYFNVGRKDEVKAIDDISFHIYEGETFGLVGESGSGKSTTGRSVIRLYDPTAGEILFDGKDISKIKSKADMQAFRRDVQMIFQDPYASLNPRMKVNDIIAEGIDVNGLAKTPKEREEKVNELLKTVGLNPSHSTRYPHEFSGGQRQRIGIARALAVNPRFIICDEPISALDVSIQAQVVNLLQDLQKEQGLTYLFIAHDLSMVKHISDRIGVMHSGKLLEMGTSDDVYNFGVHPYTESLLSAIPLPDPDYERTRKRIVYQPAAADGKDRELREILNGHYVYCAEDEVAMYREKIEEKKRKAGL

SEQ ID NO: 56921 - protein, 574 aa, Enterococcus faecalis
MSWEQVYQQWLDEENIPENLKNELKDLNTDPEKCEDAFYAPLEFGTAGMRGILGAGINRMNIFTVRQATEGLARFMDTQDPETKRRGVAIAYDSRHMSPEFAMEAAKTLAKHDIPSFVFESLRPTPELSFAVRYFKAFAGIMITASHNPAAYNGYKVYGEDGGQMPPADADALTKYVRSIENPLKIDVLSDEEVAHSGLINIVGEEVDNAYLKEIKTVTINQELINEMGKELKLVYTPLHGTGKMLGEKALKQAGFEKFVLVPEQAVADPDFTTVKSPNPEEHSAFEYAIRLGEKEGADLLIATDPDADRLGAAVRMPNGDYQVLTGNQLGSIMIHYILEAHQQAGTLPQNAAVLKSIVSSELATAIAEKCNTKMFNVLTGFKFIAEKIQQYEEDHSQTFMFGFEESYGYLVKPFVRDKDAIQALVLLAEVAAFYKKQGKTLYDGLQDIFEEFGYFEEKTISVTMSGIEGSGKIKALMAKCREQAPTEFAGIQVAQTEDFKELTRTFADGQTEQLQTPPSDVLKYHLEDGSWIAIRPSGTEPKIKFYLATKATSSSEASEKIAAFEAVVNELTK

SEQ ID NO: 56922 - protein, 95 aa, Enterococcus faecalis
MKQMEEIKQVSQLYKVLSDPTRLRILLLLKEGEHNVTAISEQLGMEQSAVSHQLKLLRDSRVVKARREGKTIFYTLDDHHVIDILNQTFEHIEHR

SEQ ID NO: 56923 - protein, 357 aa, Enterococcus faecalis
MKNSTFLKDLFAIDKANDELFRLVGVAICMAIPLLIGYFSNNLLIGTFGSMGIYTFIYYQPLPLPQLLRRLNIVGFFIVLGNSLGMLSHHVPWLIPITIAIVAFLARLLFRLYGIEKPGALLVIMSTAMGTSNNFPLHKIPIMASFVLLGVVTGIIMGIVLHFIDKRPYVFQKRMSLQERLYIDPASLLDALHYAAILFLAAYLSQSLHLVNAYWMTFTCAAILQGENLHSVMQRNVQRILGTSLGLLLSAILLMIPFTPLQTIGIISILYAAFEGFINRNYAIASFFITPMSLLLSNLARQQVISNLLNYRLVGIVLGSLLGFAGAYVFTTALRFYNRAYSIDETFENQQEERGVL

SEQ ID NO: 56924 - protein, 211 aa, Enterococcus faecalis
MKITYPLPPNLPEQLPLLTNCQLEDEAILENHLYQQIDLPNQEVRNLVFRDAVFDHLSLANGQFASFDCSNVRFEACDFSNVEWLSGSFHRVTFLRCNLTGTNFADSYLKDCLFEDCKADYASFRFANFNLVHFNQTRLVESEFFEVTWKKLLLEACDLTESNWLNTSLKGLDFSQNTFERLTFSPNYLSGLKVTPEQAIYLASALGLVIT

SEQ ID NO: 56925 - protein, 287 aa, Enterococcus faecalis
MKIRVPATSANLGPGFDSCGIALSAYLTINVLGESEFWEIQHTLGEEISTNEENLLIQTALKIAPELTPKVIRMVSDIPLARGLGSSSSVIVAGIELANRLAHLNLSPKEKVRLATEMEGHPDNVAPAILGDFVVASHVENQVYHVKHHFPMCDVIAFIPEEPLFTEKSRAVLPEKLAYKEAVAASSIANVMIAAILNGDLPLAGKMMEQDKWHETYRRSLVPHLKEIRRLTQQKGAYGSFLSGAGPTVLILSPEERTNEIVQSLEKLSTKASIQIFNIDQEGVQVF

SEQ ID NO: 56926 - protein, 285 aa, Enterococcus faecalis
MTISEEKKCVTIFVISDSAGETASKLAAASMAQYPTVDFTLIRRTFVKDEDKLVQALEDAKKAEAMVLHTIINDHLVAIANQFFNEHQLFHFDILTPPVAEIERLTGVAPMREPGALHHLNENYFKRIEAMEFAVKYDDGKDPRGFLEADVLLLGVSRTSKTPLSLFLANKNLKVANLPLIPEAHLPKQLFEMDPKKIVGLTNDPNVLNGIRKERMRAYGLPENTSYSDIEKIRRELAFANDLYQKLGCIVIDVASLSIEETASMILNALNLEDHSYYSTETSED

SEQ ID NO: 56927 - protein, 144 aa, Enterococcus faecalis
MAPVKTNIEQALETMKASGLKYTKKRELLMSYLIKRNRYVSAREVYEFMNETFKGVSYDTVYRNLHDFERLELLEKTELNGEQKFRFRCCQEVEHHHHFICTVCGKTEEIHMCPMNFFEEQLKGCSIEGHRFEILGRCADCCEK

SEQ ID NO: 56928 - protein, 341 aa, Enterococcus faecalis
MDSIIRGEKVMLSGKARAHTNIALIKYWGKANEEYILPMNSSLSLTLDAFYTETTVIFDAHYSEDVFILDGILQNEKQTKKVKEFLNLVRQQADCTWFAKVESQNFVPTAAGLASSASGLAALAGACNVALGLNLSAKDLSRLARRGSGSACRSIFGGFAQWNKGHSDETSFAENIPANNWENELAMLFILINDGEKDVSSRDGMKRTVETSSFYQGWLDNVEKDLSQVHEAIKTKDFPRLGEIIEANGLRMHGTTLGAVPPFTYWSPGSLQAMALVRQARAKGIPCYFTMDAGPNVKVLVEKKNLEALKTFLSEHFSKEQLVPAFAGPGIELFETKGMDK

SEQ ID NO: 56929 - protein, 368 aa, Enterococcus faecalis
MIEVTTPGKLFIAGEYAVVEPGHPAIIVAVDQFVTVTVEETTDEGSIQSAQYSSLPIRWTRRNGELVLDIRENPFHYVLAAIHLTEKYAQEQNKELSFYHLKVTSELDSSNGRKYGLGSSGAVTVGTVKALNIFYDLGLENEEIFKLSALAHLAVQGNGSCGDIAASCYGGWIAFSTFDHDWVNQKVATETLTDLLAMDWPELMIFPLKVPKQLRLLIGWTGSPASTSDLVDRVHQSKEEKQAAYEQFLMKSRLCVETMINGFNTGKISVIQKQITKNRQLLAELSSLTGVVIETEALKNLCDLAESYTGAAKSSGAGGGDCGIVIFRQKSGILPLMTAWEKDGITPLPLHVYTYGQKECKEKHESKR

SEQ ID NO: 56930 - protein, 347 aa, Enterococcus faecalis
MNRKDEHLSLAKAFHKEKSNDFDRVRFVHQSFAESAVNEVDISTSFLSFQLPQPFYVNAMTGGSQRAKEINQQLGIIAKETGLLVATGSVSAALKDASLADTYQIMRKENPDGLIFANIGAGLGVEEAKRALDLFQANALQIHVNVPQELVMPEGDRDFTNWLTKIEAIVQAVEVPVIVKEVGFGMSQETLEKLTSIGVQAADVSGQGGTSFTQIENARRKKRELSFLDDWGQSTVISLLESQNWQKKLTILGSGGVRNSLDIVKGLALGAKSMGVAGTILASLMSKNGLENTLALVQQWQEEVKMLYTLLGKKTTEELTSTALVLDPVLVNWCHNRGIDSTVFAKR

SEQ ID NO: 56931 - protein, 867 aa, Enterococcus faecalis
MNMVKTVKKEKTETVDVSSMIDELATKANVALKAMEDFTQEQVDHIVHQMAMAALDQHMPLAKMAVEETGRGIYEDKAIKNMYASEYIWNNIKHDKTVGVINKDEQTGLMEIAEPVGVVCGVTPTTNPTSTTIFKSLIALKTRNPIVFAFHPSAQKCSAEAARIVRDAAIAAGAPENCIQWIEQPSIDATSALMNHPGIAIVLATGGAGMVKSAYSTGKPALGVGPGNVPAYIEKTAKVKRAVNDLIVSKSFDNGMICASEQAVIVDKEIYASVKAEFEAHNVYFVKPNELQKLEDAVMNEGKYAVNPAIVGNSAEKIAELAGISVPKGTKILVAELEGAGPEYPLSREKLSPVLAMMKSNNAEHAFELCEAMLNLGGLGHTAVIHTEDEELQVAFGLRMKACRILVNTPSAEGGIGNIYNEMIPSLTLGCGSYGKNSVSKNVSAINLINIKTVAKRRNNMQWFKLPPKIFFEKNSLQYLQKMENVERVMLVCDPGMVQFGYADIVRKELQKRKNDVKIEVFSDVEPNPSTNTVYAGTKMMVDFQPDTVIALGGGSAMDAAKGMWMFYEHPDTEFFGAKQKFLDIRKRTYKIAKPEKTQFVCIPTTSGTGSEVTPFAVITDSETHVKYPLADYALTPDVAIVDPQFVMSVPASVTADTGMDVLTHAIESYVSVMASDYTRGLSLQAIKLVFDHLENSVKRPDMESREKMHNASTMAGMAFANAFLGICHSIAHKIGGEYGIPHGRTNAILLPHIIRYNAKDPSKHAMFPKYDYFRADTDYADIAKFLGLKGNTTAELVEALATAVADLGKSVGIDMNLKAQGVSQETLDTTVDRMAELAYEDQCTTANPKEPLISELKQIILDAYVG

SEQ ID NO: 56932 - protein, 381 aa, Enterococcus faecalis
MTEPAIRYRLIKKDKHTGARLGELITPHGTFPTPMFMPVGTLATVKTMSPEELKEMGAGVILSNTYHLWLRPGEDLVEEAGGLHKFMNWDQPILTDSGGFQVFSLSDMRKIEEEGVHFRNHLNGSKMFLSPEKAINIQNKLGSDIMMSFDECPPFDESYEYVKRSIERTSRWAERGLKAHANPDRQGLFGIVQGAGFEDLRRQSAKDLVSMDFPGYSIGGLSVGESKEEMNRVLDFTTPLIPENKPRYLMGVGAPDSLIDGVIRGIDMFDCVLPTRIARNGTCMTSQGRLVVKNAQYARDFRPLDEKCDCYVCRNYTRAYIRHLIKCDETFGIRLTSYHNLYFLLDLMKNVRQAIMDDNLLEFRQAFFEEYGFNKANAKSF

SEQ ID NO: 56933 - protein, 133 aa, Enterococcus faecalis
MALKDEQTGKNKHFINSLEFAWQGIKTVFREERNMRKHVAFGVTAIVFGFLFSLTLAEWLWLLLAVFLVWLAEIINTIFENVVDMFTDFHFHPIGKKVKDMAAGAVLLTAGFAVLVGLILFVPKILQIIQMWK

SEQ ID NO: 56934 - protein, 300 aa, Enterococcus faecalis
MTTEHKSGFVAIVGRPNVGKSTLLNRIVGQKIAIMSDKAQTTRNKIQGIYTIPEAQIVFIDTPGIHKPKHRLGDFMVESAYNAMREVDATLFMVSADQKRGKGDDFIIERLKNNNSPVYLIINKIDKVHPDDLLSIIEDYSKQMDFKEIIPISATEGNNFEHLMDVLVEQMPEGPQYFPDDQITDHPEYFIVSELIREKVLLLTRDEIPHSVAVVVDSMKRDENDKVHVQATIIVERDSQKGIIIGKGGKMLKQIGTKARQDIEYLLDDKVYLELWVKVQKDWRDKKIYLQDFGYRKEEY

SEQ ID NO: 56935 - protein, 240 aa, Enterococcus faecalis
MINIKNLQKTFGKNEVLKGIDLEIEAGEVVVIIGPSGSGKSTFLRCLNLLETPTGGSVEFEGKNLLDKNTNIDQLRQKMGMVFQNFNLFPHKNVLENLTISPVKVKKEAASEATEHALSLLEQVGLSDKKENYPSQLSGGQQQRVAIARALAMRPDVMLFDEPTSALDPEMVGEVLSVMKNLAIEGMTMVVVTHEMGFAKEVADRVIFMDAGIIQEEGTPEEIFDAPQNPRTQDFLRKVL

SEQ ID NO: 56936 - protein, 310 aa, Enterococcus faecalis
MRKLNRWLYGSGLLFLVMFLSGCVKTGADGQPTGEGFVYNFLVLPMSNAITYLVDNFNWNYGWAIIFITIIVRIIILPLGLHQSKKSFIQTEKMQAIKPQVDVAQAKMKQASTREEQMAAQAELQKIYKENNVSMVGGIGCLPLLIQMPIFSSLFFAARYTKGIATASFLGMNLGQPNMILVALAGLAYLAQGYISMIGIPEEQKKTMKSMLIVSPLMIVFMSFSSPAGVTLYWVVGGIFTCIQSAITNILLRPRIKKQVQEELKNNPPKQVVTPIKDVTPKETNKVTQKTNQPKANGNKGRNAGKQKRK

SEQ ID NO: 56937 - protein, 420 aa, Enterococcus faecalis
MTIADIVMLTATIIIWSLLIVNILLVIFGYVYYLKTDPVAPPPVEDEDAPFVSIMVPAHNEGIVIVRTVEALLNFNYPQDRYEIIVINDNSSDNSAELLANVQKKAVNRNLQIINTDNITGGKGKSNALNIGFKQAKGDVIAIYDADNTPEPNALRYLVGELIASEEYGAVIGKFRTRNRNASLLTRFINIETLAFQWMAQAGRFQLFKLCTIPGTNFIVRRSIIEAIGGWDDKALAEDTEISFRIYMMGYKIKFQPKAVTWEQEPQTLSVWFRQRTRWVKGNIYVIVKNAKLLFNPKASRIRFDILYFLSIYFLLMTSLVLSDIMLVLSMSGYLTTTLQGFSNSLWLLAILLFIFSTFVSITTEKGEMTLENILIIALMYITYSQMWLVVAAYGMVMYIKENVFHKQTQTKWYKTERFK

SEQ ID NO: 56938 - protein, 280 aa, Enterococcus faecalis
MPELPEVETVRKGLEKLVVGKTIQEVIVFWPRIIESPEVDVFQGQLAGQTIEGIERRGKFLIFKLSDNDMISHLRMEGKYEFHQADDEIAKHTHVMFTFTDGTQLRYLDVRKFGRMTLVPKNQGHQYKGILALGPEPTPDVFQLATFQQGLKKHHKAIKPLLLDQKLVTGLGNIYVDEALWQAQIHPEQPADSLKPAEVATLYQAIIDVLARAVEAGGTTIRTYLNALGEAGTFQVALNVYGQTGLPCNRCGTPIVKTKVAQRGTHYCPQCQQLKGRRLK

SEQ ID NO: 56939 - protein, 882 aa, Enterococcus faecalis
MTKKKLLLVDGNSVAFRAFFALHNSLERFKNKNGLHTNAIYAFNNMFENVMQKEMPTHVLVAFDAGKTTFRTEFYSEYKAGRSKTPGEFKEQMPYIRELLEGLGVKYYELPNYEADDIIGTLANKVDKDEFDVVVLSGDRDLTQLATDTVKVDITVKGVSDIESYTPEHIAEKYDGLTPKQIIDMKGLAGDTSDNIPGVTKIGEKTAIKLLKQYGSVEGVYENIDEMKKSKMKENLINDKEQAFLSKRLATIEVNAPVEVNVEDLAYEGKNLEKLVPFYKEMDFKQFLAKLDITEEPVEMEDILFEVVEDQLTNEMFTDDMALYVEMMEDNYHTSPIVGLAWGNNKKIYTTNNLAVFESQPFIDWLMDETRKKNVYDAKRTYVALNRYVGKMTGIAFDVLLAAYLLDTNDNNADIEGVAQHYGYDAIQSDEAIYGKGAKKGLPEDEEVFFGHLARKIKAIQFLTSKLDSELTEKNQADLFYKMELPLSRILGDMEITGIRVDATRLKEMQVEFSERLKEIEEKIYAEAGEEFNLNSPKQLGVILFEKMGLPVIKKTKTGYSTAVDVLEQLKEQAPIVADILTYRQIAKIQSTYVEGLLKVIQPDNKIHTRYVQTLTQTGRLSSVDPNLQNIPIRLEEGRKIREAFVPREDNWLIFSSDYSQIELRVLAHISNDEHLKEAFVEGQDIHASTAMRVFGVEKAEDVTPNMRRQAKAVNFGIVYGISDYGLSQNLGITRKQAQQYIDTYFEKYPGVKQYMEEIVRDAKDKGYVETLYHRRRYLSDINSRNFNLRSFAERTAINTPIQGSAADILKIAMIEMARRLKEEKLQATMLLQVHDELVFEVPESELEQLNQLVKEVMEHAVSLHVPLITDSSWGKTWYEAK

SEQ ID NO: 56940 - protein, 240 aa, Enterococcus faecalis
MVKPKYQRVVLKLSGEALAGEDGFGIKPPVIKEIVQEIKEVHELGIEMAIVVGGGNIWRGQIGAQMGMERAQADYMGMLATVMNALALQDTLENLGVPTRVQTSIEMRQIAEPYIRRRAERHLEKGRVVIFAGGTGNPYFSTDTTAALRAAEVDADVILMAKNNVDGVYSADPRVDETATKFEELTHLDVISKGLQVMDSTASSLSMDNDIPLVVFNLNEAGNIRRAILGENIGTTVRGK

SEQ ID NO: 56941 - protein, 275 aa, Enterococcus faecalis
MKNTAVTFKESKLRNEKLTMLTAYDYSTAKIIDEAGINGILVGDSLGMVCLGHEDTLSVTMEDMIHHTRAVTRGAKNTLVVADMPFMSYQTSVYDSVVNAGRLIKEGRAQVVKLEGGIEVCDKIEAIVKASIPVMAHIGLTPQSVNAFGGFKVQGKDKEAAKELIRAAKAVEKAGAFAVVLECVPTKLAELISKEISIPTIGIGAGAGCDGQILVYQDMLGMYSDFTPKFVKKYANLSEEMNKAFTKYIEEVKDGVFPGPEHGFKISDDVLEKLY

SEQ ID NO: 56942 - protein, 185 aa, Enterococcus faecalis
MSKEVLATAKEKMTKAEESLRRELGQIRAGRANASLLDRIQVEYYGAPTPVNQLASINIPEARVLMITPFDKNSIADIEKAIQMSDIGISPTNDGNVIRLVIPQLTEERRKELAKDVKKEAENSKVAVRNVRRDAMDELKKAQKNGDITEDELRSFEKDVQKLTDDSIKNIDAITAEKEQELLEV

SEQ ID NO: 56943 - protein, 256 aa, Enterococcus faecalis
MSVLEIKNLHVSIEDKKILKGVDLTINTGEIHAIMGPNGTGKSTLSAAIMGNPNYEVTEGEILFDGVNVLDLEVDERARLGLFLAMQYPSEIPGITNAEFMRAAINAKRDEDNKMSVMQFLKKLDSKMELLNMPEEMAERYLNEGFSGGEKKRNEILQLLMLEPTFAILDEIDSGLDIDALKVVSKGVNEMRGENFGALIITHYQRLLNYITPDVVHIMMEGRVVKTGGADLAKRLETEGYAGISQELGIDYKEEA

SEQ ID NO: 56944 - protein, 155 aa, Enterococcus faecalis
MALSKLDNLYRQVILDHSSHPHHHGTLDASSQTIELNNPTCGDVIELDVAIEDGVIKDIAFQGSGCSISTASASMMTDAVLGKTIAEATALAEDFSQLVQGNEVAEDEKLGDAAMLSGVAKFPARIKCATLAWKALEQAVANNGQGEAGHLHCEK

SEQ ID NO: 56945 - protein, 668 aa, Enterococcus faecalis
MLHKAEGFDRRKFTMAGILVAMGVVYGDIGTSPLYVMKAIVGDNGGLARVSESFILGSVSLIFWTLTILTTIKYVVIALNADNHGEGGIFSLYTLVRKKSKYLIIPAMIGGAALLADGVLTPAVTVTTAIEGLRGIPAFFERFGNDQTIIVVITLTIILILFSVQRFGTELVGKAFGPIMFLWFTFLGIIGLMNFSQDWTVIRALNPYYALQLLVSPENKLGLFILGNIFLATTGAEALYSDLGHVGKMNIRISWPYIKICLILNYLGQAAWLLTVKENPEMQALAEINPFFQMIPRGILVFGVVFATIAAVIASQALISGSYTLVSEAIKLKLLPRLKIIYPGSNIGQMYIPAVNLILWLACSAIVLAFRTSTHMEAAYGLSITITMLMTTILLLFYLLDKIPAWSAYLISLFFAAIEVVFFFSSAAKFFHGGYVAVGMAVFLLCIMIIWERGNEIKEATAEQVSLKKYVPQLKALKEDTSVPMYQTNVVFLTSDRVDGEINRNIIYSILDKQPKRANVYWFVNVQVTDEPFTQEYSVDMLGTDFIVQVQLYLGFHISQEVNVYLRQIVHDLMKTGRLPKQPQRYSLTPGREVGDFQFVLIQEELSNVSELKKWDRQIMQAKLAIKNLTTSPESWFGLEYSEVKYESVPLIIGPQRKTHLVERKNRS

SEQ ID NO: 56946 - protein, 346 aa, Enterococcus faecalis
MTEMLSTEDFDFDLPEELIAQTPLKDRASSRLLVVNKETGDMEDKHFHDILDELQPGDALVMNNTRVLPARLYGEKPETGGHLEVLLLTNTEGDTWETLIKPAKRAKVGTEIQFGDGRLKAVVKEELEHGGRIIEFKYDGIFLEILESLGEMPLPPYIKERLDDPDRYQTVYAEENGSAAAPTAGLHFTKELLEEIKAKGVHLVYLTLHVGLGTFRPVSVDNIEEHHMHSEFYRLTEEAAKQLNEVRQAGGRIVAVGTTSIRTLETIGTKFNGEIQADSGWTDIFITPGYQFKVVEAFSTNFHLPKSTLVMLVSAFAGKDLTLAAYQHAIEEKYRFFSFGDAMFIK

SEQ ID NO: 56947 - protein, 394 aa, Enterococcus faecalis
MIEFQHVSKFYKGGKVAVDDINLSFDKGEFICFIGTSGSGKTTSMRMLNRMTDPSKGKILIDGQDIQKINPVELRRQIGYVIQNIGLMPHMTIRENIVLVPKLLKVPVEERNKIAEKMIDLVELPREMLDRYPNELSGGQQQRIGVVRALAANQDIILMDEPFGALDPITRDSLQDLVKDLQERLGKTIVFVTHDMDEALKLANKIAIMSEGKVIQFDTPDNILRHPANEFVEELIGEDRLLQAKPDFTTVDEVMLNSAITITPEKSLQEAIKLMREKRVDTLLVVDNSHVLKGFIDVETLDQQRGKASSVGDILNKDVFFVQKTALLRDALQRILKRGLKYVPVVDEQKRVVGILTRASLVDIVYDVIWGDETTISEAVEAKQSESETDKEEA

SEQ ID NO: 56948 - protein, 259 aa, Enterococcus faecalis
MYGELHGKVAVVTGAATGLGLFITLRYILEGMNVVADYVGELPKEFEDVQAKHADRVKFVKADVSNEEDIKALAETALKEFGHVDIWVNNAGVEASFPTIDMPLKEWQRVIDVNLNGVFLGSREALRIFRDQKIKGSIINMSSVHQRIPWPTFAHYAASKGATEMFTKTIALEYAEYGIRANCIAPGAINTPINAEKFSDPEQLKQTTSMVPMGIIGKPNQVAAAAAWLASDESSYVTGTTLFVDGGMSLYPSFQHGAG

SEQ ID NO: 56949 - protein, 444 aa, Enterococcus faecalis
MEQIQIIDSNKHVGETVKIGAWIANKRSSGKIAFLQLRDGTAFFQGVVFKPNFIEAFGEEAGTEKFQEIKHLSQETAVMVTGVIKEDSRSKFGYEMDITDLEVVGASEDYPITPKEHGTDFLMDHRHLWLRSSKQHAIMLVRNEIIRATYEFFNEQGFIKIDSPILTGSAPEGTTELFETDYFGQPAFLSQTGQLYAEAGAMAFGKVFTFGPTFRAEKSKTRRHLTEFWMIEPEMAYTTHEESLDIQEAYVKHLIKSVLKNQQYPLDVLERDTALLEKYVSEPFKRITYDDAIELLQKEEANNDYDHIEWGEDFGSPHETFISNYYGVPTFILNYPKAIKAFYMKPHPTREDVVICADLIAPEGYGEIIGGSERATDYDYLKEKVAEFGLSEEEYSWYLDLRKYGSVPHSGFGLGLERAVTFITGNEHIREAIPFPRMLNRIYP

SEQ ID NO: 56950 - protein, 917 aa, Enterococcus faecalis
MCRNIQAFVCYSLVFYAKVIQAQKKAGDFMKHIKNTWELFILDWKRIFKNPVATFLIVALMIIPSLYAWFNIKALWDPYSNTGELPIAVYSDDQTATFQDKSVNIGDEVLKNLKKNKQLGWRFVDSKKELDKGVQSGKYFAGIYLPKDFSKDLLSFTSGDINKPKIEYSINEKINAIAPKITSKGASSIQSQISEEFIKTASSTLIKTFNDIGYDIDKNMVSIQKVKSMILDTDANIGTIDTYAKQVTDLHGKMPELKEKLAKANDAMKYLPEVDALGEKIVELNGKMPSIKEQASVILTLQEKIPEIQNAGRQIAMIDEDFASVEQTMSEGIQEAKQGLEIIQQVQTALPDIRKLGDQANDLGNVTLDGATQLEKALPGITQSVGTILKAIGTISAGVNTALEDLKNHRLPVEEREAIKQQLSESLGKQHENIQQLIQLFTQIQEATGNTDLQDTINRLNTIDGIVVRLKTDVDNIDVNAVTDADLNAIQAEAQQVEATVNSINPDAIENTVKTILDKLIATIQNAQGQLNKAQQIDFEGLLSSTSQTVTNAISLLEKYQAEMPAIKQEIHDANTMLNGNMETIVNGINRGADLYKNDLPVIQDKVSKAAAFMQNDYPGIRKDLTNTLKTVNEKMPDVEAALDKANELIINDWPNIKTGLHKAANAIRKGEKEVDLGEILKLLKLDANKESDFFTQPVEVKEHAVYPIANNGSASTPFYTALCLWVGAVLFSSVATTDVYLEGKDKKRFSKREQFSARMFTFIVMGIGQALIVTLGNYFALGVDVRNPAYSVWFAVLIAITFMIMVYVLVALFGNVGKGIAIIILVLSISGGGGNYPIQVSGKFFQMINPFLPFTHAVNLLRESAGGIYWPNAWFAIWIMVGISVVFSIGGAILYPHLEHRSKKFAALAQKSHLFH

SEQ ID NO: 56951 - protein, 249 aa, Enterococcus faecalis
MEEWIKPVMRTIRHIKRAFLKQKLPATYQLKKQKANTAMEYLLEQTDNHQSIRGPKRKMTAEEIKKKRQAYQKKQRVQVVKFFMPAILFAIFVFFFVLKTSSYPIAGQSMKPTLNAGERVLVQRTKQVARYDVIAFKAPLASKGTYVKRIIGVPGDRIWVNEGKLYLSEEPIASDNEALPENASRFDLSEEAAAQLRLFQKIPAGHYFVLGDNRTHSSDSRTFGFVEIQAIEGIVVFKMAPFKEIGKVK

SEQ ID NO: 56952 - protein, 467 aa, Enterococcus faecalis
MNTIIDLANTIFKPLIDLGAAPLMTIVLTLIALCFKVKPTRALEGGLKLGIALTGISAIIGILTTAFSDAMASFVERTGISLNITDVGWAPLATITWGSPYTLYFLLIMVIVNVIMLILNKTNTLDVDIFDIWHLSIVGLFAIFCGANLIIATILVIFIGVLKIINSDLMKPTFNDLLNAPDTNPMTTTHMNYMMNPIIMVFDKIFDKLFPWLDKYDFDAAKLNSKIGFWGSKFAIGIYLGIFVGLLAGQTPTQIFSLSFTAAVCLELFSLIGTWFIAAVEPLSQGITDFASNKLKGRTLNIGLDWPFLAGRAEIWAAANVLAPIMLLEAIVLPGNKLLPLGGIIAMGVTPALLVVTRGKLIRMIIIGAIELPLFLWSGTLIAPFVTETAKKVGAFPAGLNNNTLISHTTMEGPMEKFLGYLVGNASQGQLEFILYACLALVAYLLIFIWYAKQMKKRNIIYAQKAQ

SEQ ID NO: 56953 - protein, 371 aa, Enterococcus faecalis
MVVGWHRPTRLHIDTQAITENVQKECQRLPEGTALFAVVKANGYGHGAVESAKAAKKGGATGFCVALLDEAIELREAGVQDPILILSVVDLAYVPLLIQYDLSVTVATQEWLEAALQQLTPESNTPLRVHLKVDTGMGRIGFLTPEETKQAVRFVQSHKEFLWEGIFTHFSTADEIDTSYFEKQAGRFKAVLAVLEELPRYVHVSNSATALWHPDVPGNMIRYGVAMYGLNPSGNKLAPSYALKPALRLTSELIHVKRLAAGEGIGYGETYVTEAEEWIGTVPIGYADGWLRHLQGFTVLVNGKRCEIVGRVCMDQCMIRLAEEVPVGSVVTLVGKDGNEENTLQMVAEKLETIHYEVACTFSQRIPREYN

SEQ ID NO: 56954 - protein, 515 aa, Enterococcus faecalis
MKFKELGLAPELLSAVERAGFEEATPIQSETIPLALAGKDVIGQAQTGTGKTAAFGLPMLNKIDADNRVIQGLVIAPTRELAIQTQEELFRLGRDKKIRVQAVYGGADIGRQIRGLKDRPHIVVGTPGRLLDHINRRTLKLETVETLVLDEADEMLNMGFLEDIEKIISQVPEQRQTLLFSATMPPAIKNIGVKFMKQPEHVKIKAKEMTADLIDQYYVRSKDFEKFDIMTRLLDVQTPELTIVFGRTKRRVDELARGLEARGYKAEGIHGDLSQQKRMSVLRSFKNGNLDILVATDVAARGLDISGVTHVYNYDIPQDPESYVHRIGRTGRAGKGGMSVTFVTPNEMGYLHVIENLTKKRMTPLRPPTEKEAFKGQLSAAVETIESDLEENGLDKYLESAEALLEKYSATDLAALLLKTVAKDPADAVPVKITPERPLPSNKKGFNKNGRGGGGGNNRNRNRGGNGKGGSYRGNKNHKDGDRNYKNSDRKNKDQRGGKRHNDKKRGFVIRENAK

SEQ ID NO: 56955 - protein, 142 aa, Enterococcus faecalis
MRVILGSDLDGIKLKAEMKQYLLQEKVEVIDKSESASEDFIEATLAVAHEVLKDTESLGIVFDGYGAGSFMTAAKIKGMIVAELSDERSAYMAREHNNARMITVGAKIVGTELAKNIIKEFLTGHYAGGRHQIRVDMLNKMA

SEQ ID NO: 56956 - protein, 171 aa, Enterococcus faecalis
MKIAIGCDHIVTDTKIAVSDFLKAKGYEILDVGTYDFTRTHYPIFGKKVGEAVMSNQADLGICICGTGVGITNAVNKVPGIRSALVRDMTTALYAKEELNANVIGFGGKITGEFLICDIAAAFIEAHYHPTEDNEQLIEKINQVEKQHPEQQDAHFFDEFLDKWQRGVYHD

SEQ ID NO: 56957 - protein, 348 aa, Enterococcus faecalis
MKIILLYGGRSEEHDVSVLSAYSVLNAIYYKYYQVQLVFISKDGQWVKGPLLSERPQNKEVLHLTWAQTPEETGEFSGKRISPSEIYEEEAIVFPVLHGPNGEDGTIQGFMETINMPYVGAGVLASANAMDKIMTKYLLQTVGIPQVPFVPVLRSDWKGNPKEVFEKCEGSLIYPVFVKPANMGSSVGISKVENREELQEALEEAFRYDARAIVEQGIEAREIEVAILGNEDVRTTLPGEVVKDVAFYDYDAKYINNTIEMQIPAHVPEEVAHQAQEYAKKAYIMLDGSGLSRCDFFLTSKNELFLNELNTMPGFTDFSMYPLLWENMGLKYSDLIEELIQLALNRFK

SEQ ID NO: 56958 - protein, 338 aa, Enterococcus faecalis
MYKAIVAAKGKTTKIVEKESRPLKDNEARLKMEVCGVCHTDLHVKNADFGDVSGCTLGHEGIGIVTEVGKDVTSLKIGDRASVAWFYEGCGHCEYCTSGRETLCRSVKNAGYTVDGAMAEECIVTDGYAVKVPENLASEPASSITCAGVTTYKAIKESGIRPGQWLMISGLGGLGNLALQYAKHVFNAKVVAVDVNDNQLAFAKEMGADLLINPVKDPDFAAQLQKEIGGVHAAVVTAVAKSAFNGAVDAVRAGGTVVAVGLPVETMDLSIPRLVLDGIHVVGSLVGTRQDLREAFQFGAEGKVVPVCQTRQPEEINAIFEEMEQGKIRGRMVIDFRS

SEQ ID NO: 56959 - protein, 284 aa, Enterococcus faecalis
MKKFSIRKISAGFLFLILVTLIAGFSLSANAEEYIVPAESHSRQKRSLLDPEDRRQEVADTTEAPFASIGRIISPASKPGYISLGTGFVVGTNTIVTNNHVAESFKNAKVLNPNAKDDAWFYPGRDGSATPFGKFKVIDVAFSPNADIAVVTVGKQNDRPDGPELGEILTPFVLKKFESSDTHVTISGYPGEKNHTQWSHENDLFTSNFTDLENPLLFYDIDTTGGQSGSPIYNDQVEVVGVHSNGGIKQTGNHGQRLNEVNYNFIVNRVNEEENKRLSAVPAA

SEQ ID NO: 56960 - protein, 202 aa, Enterococcus faecalis
MSVQLEVKERAIRPRSLRNQLRHEGKVPAIVYGYQIESTPIYFEEKDLSKILREHGANTVIKMTVDGKNINTLMSKAQLDTFTGQMLHVEFLSVNMKETTEVEAEVQLIGESAGVKAGGTLAQNLYTVLVAATPDKLPESIEVDITNLEIGDALTIADLPEHKDYEILTDPEEQLVAIVEAQTAPEEEEGTAAETTEPELAE

SEQ ID NO: 56961 - protein, 331 aa, Enterococcus faecalis
MLTLTAGKKAAMDRLSTQEGIISALAIDQRGALKKMIKALDVEPTDAQIETFKELVSKELTPYASAILLDPEYGLPAAKARDTEAGLLLAYEKTGYDATTPGRLPDLLADWSVLRLKEEGADAIKFLLYYDVDEDPEINHQKHVFIERLGSECAEEDLPFYLELVSYDAQIADATSLEYAKVKPHKVNEMMKEFSKPQYKVDVLKVEVPVNMNFVEGFAPAETAYTKEEAANYFLEQSQATDLPFIFLSAGVSTELFQETLRFAKEAGSTFNGVLCGRATWKNGVKPFVEAGETAACDWLKTEGRENIESLNEVIAATASSWHAKVQVNEG

SEQ ID NO: 56962 - protein, 150 aa, Enterococcus faecalis
MPWNMNDYPTSMKNLAPLIRKKAIDIGNALLADGYPDDRAIPIAISQAEKWYQEASAADKKAFEQEANPTKQDSHKQDKHAGKLLTAAVNVKYKDGQWLVISDSAEKASNTFTHKQEAIERAQEIARNKQTKLKIYKQDGTLQETKEYTE

SEQ ID NO: 56963 - protein, 339 aa, Enterococcus faecalis
MEKANLDWNNLGFSYIKTPFRYISYWRDGKWEEGTLTDNNQLTISEGSPALHYGQQCFEGLKAYQCADGSVNLFRPDENAKRLQKSCARLLMPQVPVETFVSACQEVVKANLAYLPPYGTGGTLYLRPYMIGVGDNIGVAPAKEYIFSIFCVPVGSYFKNGLAPTNFIVSEYDRAAGRGTGAAKVGGNYAASLLPGAEAHEKEFSDCIYLDPYTHTKIEEVGAANFFGITKDGTFITPKSASILPSITKYSLLTLAKERLGMTALEGDVYIDRLADFSEAGACGTAAIISPIGGIQNGTDFHVFYSETEVGPVTKQLYDELVGIQFGDKEAPEGWIVKV

SEQ ID NO: 56964 - protein, 739 aa, Enterococcus faecalis
MMNEPTPKEIKETRLYAEWGLTDEEYHQIETILQREPNYTETGLFSVMWSEHCSYKNSKPVLKKFPTEGPQVLQGPGEGAGIVDIGDGLAVVFKAESHNHPSAVEPYEGAATGVGGIIRDIFSMGARPIALLDSLRFGELTDARTRYLFQEVVAGISGYGNCIGIPTVGGEIAFEPCYQGNPLVNAMCVGLIRHDEIQKGQAKGVGNSILYVGAKTGRDGIHGATFASEEFSEGEEQQRSAVQVGDPFMEKLLLEACLDLIKNHQDILIGIQDMGAAGLVSSSAEMASKAGSGLILELDKVPQRETQMSPYEMLLSESQERMLICVEKGAEQQVCELFQTYDLEAVAIGSVTDDGQYRVFHGGKIVADVPVDALAEEAPVYQKAYQEPERMRAFKKLAPFIPEITNSTELLKRLLQQPTIASKKSVYETYDSQVQTNTVVQPGSDAAVLRVRGTNKALAMTTDCNSRYLYLNPEIGGQIAVAEAARNIVASGAQPLAITDCLNYGSPDKPESFWELWTSADGIAAACRQLGTPVISGNVSLYNETDGQAIYPTPMIGMVGVIEDVSQITTQAFKQVDDLIYLIGETHADFNGSEIQKIQLGRIEGQLRSFDLKEEKANQELVLKAIQVGLVASAHDCAEGGVAVALAESAFANELGLQVTLPLKKEYLFAETQSRFILSVSPQHQEAFETLIGRKAQHIGKVTETGLVIHALDDVINCSTKEAKALWEDAIPCLMKQKA

SEQ ID NO: 56965 - protein, 609 aa, Enterococcus faecalis
MSKIIGIDLGTTNSAVAVLEGGEAKIIANPEGNRTTPSVVSFKNGEIQVGEVAKRQAVTNPNTISSIKRHMGEAGYKVDVEGKSYTPQEVSAMILQYLKGFAEDYLGEKVEKAVITVPAYFNDAQRQATKDAGKIAGLEVERIVNEPTAAALAYGLDKTDKDEKILVFDLGGGTFDVSILELGDGVFDVLSTAGDNNLGGDDFDNKIIDYMVAEFKKENGIDLANDKMALQRLKDAAEKAKKDLSGVTSTQISLPFITAGEAGPLHLEMNLTRAKFDELTSDLVERTKVPVRQALKDAGLNPSEIDEVILVGGSTRIPAVVEAVRKETNKEPNKSVNPDEVVAMGAAIQGGVITGDVKDVVLLDVTPLSLGIETMGGVFTKLIDRNTTIPTSKSQVFSTAADNQPAVDIHVLQGERPMAADNKTLGRFQLTDIPAAPRGVPQIEVSFDIDKNGIVNVRAKDLGTQKEQTITIKSSSGLSDDEIERMVKDAEANAEADKQRKEEVDLRNDADALLFTVDKTLKELEGKVDAEEVKKAEDARDELKAAIEANDIEQMKAKRDSLNEIVQNLTVKLYEQAAQQQAQENPEAAQGGADDVVDADFEEVNGDDK

SEQ ID NO: 56966 - protein, 316 aa, Enterococcus faecalis
MQVIQLHHPYEPNQIPNEEVVMVLGFFDGVHKGHQKVIETGKKIAEEKGLKLAVMTFNQHPSIVFQKVLPENMKYLTSLEQKERLMANLGVDILYIVEFTSAFAQLKPQDFVDQYIVNLNSAVAVSGFDYTYGPKEIAGVKQLPTYAQGRFEVVTVPKEEMTGAKISSTRIREKMEAGEMEEVTELLGYIYETEGTVVHGDARGRLLGFPTANVKVKSTVRLPRIGVYAVQIEVGGKWYVGMGSIGHNDTFGEGRDLTVEVYILDFHQDIYGEQVVVRWNHYLRDQVKFNGAEALIDQLKQDERDTADYFQQSEDK

SEQ ID NO: 56967 - protein, 366 aa, Enterococcus faecalis
LENPEIRTLLDEMTQKITSFRRSLDLDQLEEDIAEAENRMGEPGFWDNTETAQKLINETNSLKEKYQQFHQLSEEIDELTVMFELQQEEYDAEIQEELEERIHLLQERLTTYELSLLLNEPYDHNNALIELHPGAGGTESQDWGSMLLRMYTRWAESHGFQVETLDYQAGDEAGIKSVTLLIKGYNAYGYLKSEKGVHRLVRISPFDSAKRRHTSFCSVDVMPELDDTIEIAINPDDLKIDTYRASGAGGQHINKTESAVRITHIPTGTVVASQAQRSQLKNREQAMSMLKAKLYQLEMEKKAQEAASLRGEQMEIGWGSQIRSYVFHPYSMVKDHRTNYETGNVQAVMDGDLDGFIDAYLKQRLS

SEQ ID NO: 56968 - protein, 306 aa, Enterococcus faecalis
MDGILPLWKERGMTSHDCVFKLRKILHTKKIGHGGTLDPDVEGVLPICVGKGTKVIEYMVDSGKTYEGEITLGFATTTEDVSGEIVEKKLVTAPLSTEQIDQAMAEMTGEITQIPPMFSAVKVNGKRLYEYARNGEEVERPQRKAMIYSFERTSEPIFNESAHTQSWRFKVVCGKGTYVRTLSVDTGKKLGYPAHMSDLTRTASGGLQAAQCLTLEEVAKQMAAETIDQCLLPIETAVEQFPRIDLSDELYQKVKNGMRLHKKELGIKAMPESLVALFYQNQVVSLYMPHPTHDKLLKPSKVLRNN

SEQ ID NO: 56969 - protein, 306 aa, Enterococcus faecalis
MEDVQKKLLTKSKRAKMEQRGKFISFLCIALIVAVVVSIFYFVASKGLATFFKDKINVFDFLFGTNWNPSDIGADGKPMVGALPMIAGSFIVTFLSAIVATPFAIGAAVFMTEISPKKGAKFLQPVIELLVGIPSVVYGFIGLSVIVPFVRSIFGGTGFGILAGTFVLFVMILPTVTTMTVDALKAVPRHYREASLALGATRWQTIYKVVLRAAVPGILTAVVFGMARAFGEALAIQMVIGNAAVMPTSLTTPASTLTSILTMGIGNTIMGTVENNVLWSLALILLLMSLLFNIVIRIIGKRGALK

SEQ ID NO: 56970 - protein, 269 aa, Enterococcus faecalis
MKEYNLNDTHLLQLDSQKDPIALHTEDLHVFYGDNEAIKGVDLQFEKNKITALIGPSGCGKSTYLRSLNRMNDGIANSRVTGKIMYKDVDVNTKEVDVYEMRKRIGMVFQRPNPFSKSIYENITFALKQHGEKDKKKLDEIVETSLKQAALWDQVKDNLNKSALALSGGQQQRLCIARAIAMKPDILLLDEPASALDPISTGTVEETLVNLKDDYTIIIVTHNMQQAARISDYTAFFYMGKVIEYDHTRKIFTRPKIQATEDYVSGHFG

SEQ ID NO: 56971 - protein, 393 aa, Enterococcus faecalis
MYRMKLQVTKKAEHKFKKGYPLIQKEDLQQVPAPLPTDWLTLIDSKGQRLAEGYLGEQNKGIGWLLSWHGPINQSFFQQLFEISREKRTSFEKDSLTTAYRLFNGEGDGIGGLIIDRYADYAVFSWYNETLYQKKAELLTAFRTVYPDIIGAYEKIRFSTKDLPESQFLYGEQAPEPLLVTENGVQFATYLNEGLMTGIFLDQKEVRGRLVDGFAVGKTVLNMFSYTGAFSVAAAMGGAVATTSVDLAKRSLPKTTEQFEVNHLNLAPQKIIVMDVFDYFKYASRKGLSYDMIILDPPSFARNKKKVFSVAKNYGELVKDSIDILTDKGTLIASTNAANLSLAKYQKMVITALQEKNVRYKITDTYQLPADFQVNPNFPEGNYLKVLFIEIEK

SEQ ID NO: 56972 - protein, 702 aa, Enterococcus faecalis
MKKLFKTNILNTRLGLFSLIAILLWLKNLFAYAVDFHLRLENINEYFILLINPIATTVFLLAIALYVRRKKASYITMMIIYFLMSLLLFSNVVYYREFTDFITVNTMLGAGKVASGLGESALRLFRPYDVIYFLDFIIIGVLLLTKKIKTDARPVRARVAVSVTLLSVVFFLFNLFMAETERPQLLGRQFSRDYIVKFLGLNAFTVYDGITTYQTNQVRAEASANDMKQVEDYVKQQYAAPDDSKFGIAKGKNVIYIHLESFQQFLVNYKLKDENGVEHEVTPFINSLYNSKSTFSFDNFFHQVGQGKTSDAETLLENSLFGLDQGSLFTQVGGKNTFEAAPDILKQTQGYTSAAFHGNAGNFWNRNETYKRLGYDYFFDASYYDVNSDNSFQYGLHDKPFFNQSVQYLEHLQQPFYSKFIAVSNHYPYSQFTNDEAGFPIAKTSDETINGYFATANYLDKAVEEFFNYLKSSGLYENSVIVLYGDHYGVSNSRNQNLAELVGKTKADWNDFDNANMQRVPYMIHVPGQENGGVNHTYGGQVDALPTLLHLLGVDTKNYIQLGQDLFSKQHNQIVAFRNGNVVTPKYTILGSSIYDTKTGTLITEPTEEVKKEVADLKAKATKQLETSDQITNGDLLRFYTNSGLKPVNPEDYDYKNQLQQLEAIEKEKGEKSTSVYSKNNNKSTVDEYHTDSYQGYQKTGK

SEQ ID NO: 56973 - protein, 522 aa, Enterococcus faecalis
MAVKKKKATFWEFFQGLGKTFMLPVALLAFMGILLGLGSSFSSESMIETIPFLGKPAVKIIFQFMSTIGGFAFAYLPVMFAMAIPLGLVRKEKGIAAFSGFVGYTVMNLAINFYLVQTNRLVDPEQLREAGQGMVFGIQTIEMGVLGGIIAGLIVYKLHNRFYTVQLPDSFAFFSGARFVPIITSLVMAFVGLVIPLVWPLFALMIMAIGQLIQRSGIFGPFLFGSGERLLLPFGLHHILVSMIRFTEAGGSAVVAGKEVFGALNIFYAELQNNLPISPSATAFLSQGKMPTFIFGLPAASLAMYHTAAPANRHKIKGLLLSGVIATAITGITEPIEFLFLFISPLLWLFHVIMTGLGFMVMALLGVVIGNTDGGLLDFVIFGLLQGTYTKWWWVLIVGAIWFVVYYFVFKTVIVTFDLKTPGRDKVLDETEYTDQEVQYKKTGGYDAPGILAALGGQENIQAIDNCITRLRLVLADANKVDDDKLKQLGALGVVHLDAQNVQVIIGTKVTTVRNQLEMILG

SEQ ID NO: 56974 - protein, 330 aa, Enterococcus faecalis
MVGIILASHGEFAEGILQSGAMIFGEQENVKAVTLMPSEGPDDVKAKMQEAIASFDNQDEVLFLVDLWGGTPFNQANSLLEDHKDKWAIVAGMNLPMVIEAYASRFSMESAQEIATHILETAKDGVKVKPEELQPAEAPKAAATEDAQPKGSLPPGTVVGDGKIKFVLARIDSRLLHGQVATAWTKATQPNRIIVVSDAVAKDDLRKKLIEQAAPPGVKANVIPISKMIEVAKDPRFGNTKALLLFENPEDVLKVVEGGVEIPEVNVGSMAHSVGKVVVSKVLSMGQEDVDTFDELKAKGIKFDVRKVPNDSKANMDEILKKAKNELANA

SEQ ID NO: 56975 - protein, 295 aa, Enterococcus faecalis
MIVSAIGQGMLWALLGLGIFMTYRILNFPDMTTEGSFPLGGAVCVTAITTGVSPFIATLLGVGAGMLAGLVTGLLFTKGKIPIILAGILVMSGLNSVILFVMKSPNKSLLNQPKIQDVFQKMALPDYYDTIFLGISVLAVVMILLLFFFNTSLGQAYIATGDNEEMARSIGIQTDRMKILGLVLSNGLIGLSGALIAQNDGYADVSKGTGVIVIGLASLIIGEVLFGELTFGERLMAIVVGSIIYQLLILLVIKLGFDTTYLKIFSAVILAICLMIPQLKKALRLHGFSDKGETK

SEQ ID NO: 56976 - protein, 570 aa, Enterococcus faecalis
MSFDGVFTHSMVHELTETLVSGRISKIHQPYENEVVLVIRAKGKNHKLLLSAHPSYARIQLSTITYSNPETPPNFVMMLRKFLDGAILETIQQIENDRVIHFTFSKRDELGDLQNIVLIVELMGRHSTIVLVNQSSGKILDAIKHIGMSQNSYRSLLPGATYIEPPKPMGLNPLTASKEEVFALLSTAPELNGRYLQQHFQGLGKDTADELSARLLAQPNEKMAIWTEFWSSVTEAVVPTLTVTEKKEYFTPIPYQSLVGEQTTYATLSELLDAFYSGKAEKDRVKQQGGELIRKIENELKRNQKKLKKLQQTLADTENAENYRRDGELLTTFMAQVPKGATEVELPNYYEENAPLRISLNPALSPNQNAQKYFQKYQKLKNAVRVVKTQIQQTQQEISYLESVVAQLEIATPMDIEVIREELIEQGYLKRKKNKKQKQPKKSQPDLFYATDGTPILVGKNNLQNDQLTLRTAKKTDYWLHAKDIPGSHVIIRDAHPSEETLTEAALLAAYFSKYRLSSQVPVDYVQVKHVHKPNGAKPGYVIYENQRTLYVTPTEESIKKIQQNKASAS

SEQ ID NO: 56977 - protein, 543 aa, Enterococcus faecalis
MITVNDVSLQFPDRKLFEEVNIKFTPGNCYGLIGANGAGKSTFLKILSGEIQPTTGVVSMGPNERLATLKQNHFDYEDYTVLETVIMGHKRLYEVMKEKDAIYMKEDFSDEDGIRAAELEGEFAELDGWEAEPEAAVLLQGLNIPEELHDQKMSELTAGQKVKVLLAQSLFGKPDVLLLDEPTNGLDTRSINWLEEFLINFENTVIVVSHDRHFLNKVCTHMADLDFSKIKLYVGNYDFWLESSQLATKLQAQSNAKKEEQIKELQDFIARFSANASKSKQATSRKKMLDKITLDDIQPSSRRYPFVGFTPEREIGNDLLQVENVSVTIDGKKILDNISFNLTKDDKVAFIADSDITTTTLFKVIMGEITPDTGSVRWGVTTSQAYLPKDNSKDFEEPLTILDWLRQFAGKEEDDNTFLRSFLGRMLFSGEEVLKPVNVLSGGEKVRVMLSKLMLSKANVLVLDDPTNHLDLESITALNDGLMAFTGSILFASHDHQFIQTLANRIIAVSDKGVIDRAETTYDEFLENPEIQKQMDVLFSSDY

SEQ ID NO: 56978 - protein, 430 aa, Enterococcus faecalis
MSSVVVVGTQWGDEGKGKITDFLSENAEVIARYQGGDNAGHTIKFDGVTYKLHLIPSGIFYKEKISVIGNGVVVNPKSLVKELAYLKENNVATDNLRISDRAHVILPYHIKLDQLQEDAKGENKIGTTIKGIGPAYMDKAARVGIRIADLLDKEIFAERLQINLEEKNRQFVKMFDSEAIEFDDIFEEYYEYGQQIKQYVTDTSVILNDALDAGKRVLFEGAQGVMLDIDQGTYPFVTSSNPVAGGVTIGSGVGPSKINKVVGVCKAYTSRVGDGPFPTELFDETGETIRRVGKEYGTTTGRPRRVGWFDSVVMRHSKRVSGITNLSLNSIDVLSGLETVKICTAYELDGELIYHYPASLKELSRCKPVYEELPGWSEDITGCKTLADLPANARNYVHRISELVGVRISTFSVGPDRNQTNVLESVWAQI

SEQ ID NO: 56979 - protein, 455 aa, Enterococcus faecalis
MNELLQDRVPPQNIEAEQAVLGSIFLDADVLIEAMEYVEPKDFYRRSHQLIFQTMMTLSDRNEAIDVVTIKDRLEQENLLEDVGGLSYLSDLALAVPTAANVIYYAKIVEQKSLLRNLIQTATEIVTKGFEQGEDVESILDDAERSILEVSEKRNRSGFLSISDVLNTTIANIDQLYQNDEEITGLPTGYQALDKMTAGLQAEELIILAARPAVGKTAFALNIAQNVGTKTDKAVAIFSLEMGAESLVNRMLCAEGSIEASHLRTGQLSEEEWQNLIIAMGSLSRANIYIDDTPGIKITEIRAKCRKLAQEKGNLGLILIDYLQLIEGTGKENRQQEVSDISRQLKKLAKELKVPVIALSQLSRGVEQRQDKRPVLSDIRESGSIEQDADIVAFLYRDDYYDRGEGEDGDHEPPEVDNVVEVIIEKNRSGARGTVELLFIKEYNKFSSLSPRTEF

SEQ ID NO: 56980 - protein, 150 aa, Enterococcus faecalis
MKVIFLQDVKGKGKKGDVKEVPTGYAQNFLIKNGYAKEANKGSMSALAGQKKAQEKHEAEVLAQAKEMQAFLEDEKTVVEIKAKAGEDSRLFGSIPSKQIAEALNKQYNVKLDKRKIELANPIRSLGYTNVPVKLHHEVTAKIKVHVVAE

SEQ ID NO: 56981 - protein, 658 aa, Enterococcus faecalis
MQKKRIQKNGFLIVVGLLLVEFLLYFLLTNKWLLLAVIIALDIFLLVVIRLLIRDVEITNVEKIQEASSIAEQSLDYVVNEVPVGIITYNGETRAVEWLNPYAASIFNKDNQLTLTASQVTSYLELAERNQDIFTIDENTYRFSVNKEQHTITFEDITKESNLYQEKVEMQTAIGIVSVDNYDDVTDTMDEKEISYLNSFITTMVSDWMDQYKVFYKRINAERYFFIAQWEDIQKMMDEKFSILDTIRKESANHEVAITLSMGIAYGGPTLDQTGTTAQTNLDTALVRGGDQVVVKEAKDEAKPLFFGGKTAVTTKRSQVRSRAMSMAIKGIIAESADIYIMGHRYPDMDALGSAFGVARLASFNNRKAWIVLDENEIIPDVKRVLEAIKEYPELEERIISPKEAMKRKKESSLLVMVDYHKPSLSISQELYERFDKVVIIDHHRRGDEFPAKPLLSYIESSASSASELVTELIEYQSNSANKLQAFEATMMLAGIVVDTKSFNTRTTARTFDVASYLRTCGADSSLVQYLLSSDLTSYLEMNNLISKSEYVTKDTVVVAGSEDKEYDSVTAAKTADTLLSMAGINAAFVITKRTDQQIGISARSNGSINVQIIMENLGGGGHFTNAAVQLSNVTVAEVKEQLLDVIRQNINEMYEQE

SEQ ID NO: 56982 - protein, 716 aa, Enterococcus faecalis
MKENQLIQLVEEMTIDEKINQLLQLAAAFYSDKAEEKTGPMSELGLSQETIDTAGTTLGVSGANEAKRVQKEYMQNHRLNIPTLLMADIIHGFRTIFPIPLALGSTWDEAAVEKMAEISAKEAAVSGLHVTFSPMVDLVRDPRWGRVMESTGEDPLLNSRLAAAMVRGYQGENLKEDNWRVAACVKHFAAYGGALAGRDYNTVDMSERQLREMYLPGYKAGLDAGAKLVMTSFNTVDGIPATGNQWLFRDVLRNEFGFEGVVISDWGAIKELIPHGVAKDEKQAAELAIKAGVDIEMMTTCYPDYLKELLEEGRIAETLIDEAVMRILKLKNELGLFENPYRGADEQAEAEVILSKEHREIAKKIAQKSMVLLKNENILPFTPQEKIALVGPGAQSQDILGAWSWQGKKEEAISLVAGAQKLTTNLLVAQEPFDYFEPTAAAIEEALTLASQADKVVVALGETDWMSGEAASRSDIRLPEKQLAVVAQIIEKNPNVVVTVYSGRPLDLQGIDVAKGIVQAWQPGTEGGNALAEILWGQYNPSGRLSMSFPETVGQVPIFYNVDNTGRPYESAPEEKYVSKYLDVSNYAKYPFGFGLSYSHFSYQPIQLSALTFTKEQPVTVSVLVRNNSPIAGEETVQFYVRDLVGQVVRPIKELKDFQKVWLEPKEEKEVQFLLSEDMVRYVHSDNQVTSDAGEFIVMIGGNSRDVQTATVTLNE

SEQ ID NO: 56983 - protein, 833 aa, Enterococcus faecalis
MSEEIKENIQDVNLTSEMKESFIDYAMSVIVARALPDVRDGLKPVHRRILYGMNELGVTPDKPHKKSARIVGDVMGKYHPHGDSAIYESMVRMAQPFSYRAMLVDGHGNFGSVDGDGAAAMRYTEARMSKIALEMLRDINKNTVDFQGNYDDSEQEPVVLPARFPNLLVNGTTGIAVGMATNIPPHNLSEVIDATSLLMDNPDVTTNELMEVLPGPDFPTGGLVMGKSGIRRAYETGKGSITVRAKVELTEMPNGKERILVTELPYMVNKAKLIERISELHRDKRIEGITDLRDESSREGMRIVIDVRRDVSASVVLNNLYKMTALQTSFGFNMLAIEKGVPKILSLKRILENYVEHQKEVITRRTIFDKNKAEARAHILEGLRIALDHIDEIIAIIRGSQSDDEAKATLIERFEFSDRQAQAILDMRLRRLTGLERDKIENEYQELLKFIADLEDILARPERVIEIIKTELNDVRTKFGDARRTELLVGEVLSLEDEDLIEEEEVVITLTNNGYIKRMANSEFRAQRRGGRGVQGMGVHDDDFVKNLVSCSTHDTLLFFTNTGKVYRAKGYEIPEYGRTAKGIPVINLLGIDSAEKIQAIISVEGKAEAGKYLFFTTLKGTVKRTAVTAFSNIRSNGLIAISLKEDDELVNVVTTNGNQKMIIGTHAGYSVTFDENTVRDMGRTASGVRGIRLRENDYVVGAAILDENKEVLVITENGYGKRTKASEYPVKGRGGKGIKTANITEKNGPLAGLTTVNGDEDILLITNKGVIIRFNVDSVSQTGRATLGVRLMRMEDGAKVVTMAVVEPEEVEEEIVEVVETTENETTSETEE

SEQ ID NO: 56984 - protein, 376 aa, Enterococcus faecalis
MKLTVKRSVFLQELQTVQRAISSKTTIPILTGVKIVLSEDGLSLTGSNADISIESFLSKDDEKAQMTIERTGSIVLQSRFFGEIIRKLPEDMFTMEVLDNNQVAITSGKADFTVNGLDADNYPHLPVIDTQNQMKLPVHLLTKIISETGFAVSMHESRPILTGVHFILENQKLLAVATDSHRLSQRVIPTEQAVEDFNIVIPGKSLTELSRSLTNEEEMVEISIMENQVLFKTETMYFYSRLLEGNYPDTNRLIPTSHNTQIEFYVPELLSAIERASLLSHEGRNNIVRLSISPDSVVLYGNSPEIGKVEEALNYENVSGEALDISFNPDYMKDALRAFGDMNITVKFLSPIRPFTLEPTETELDFIQLITPVRTN

SEQ ID NO: 56985 - protein, 118 aa, Enterococcus faecalis
MKKSYRVKKEKEFQQVFNKKQSCANRRFVVYVLEKPQQAHFRVGISVGKKIGNAVTRNAVKRKIRASLFQLKDRISPEIDFIVIARPGLEKLSSEEVKANLTHVLNLAKILDVREGIE

SEQ ID NO: 56986 - protein, 275 aa, Enterococcus faecalis
MKKYKRLLLMAGLVTLVFVLSACGTAPVSESSTGIWDRYIVYYFAQAIKFLSLGGSVGIGIILFTLVIRIILLPLMHFQTKSMRKTQELQPQLKALQQKYSSKDPETQRLFREEQQRLYAENNVNPYIGCLPLLVQLPIMMALYQAISRVPELKEGTFLWLSLDKPDPYLILPILAAVFTFASTYLSSMSQLETNASLKIMNYVMPAMIFFMGISLASSLSLYWVVSNAFQTGQTLLLNNPFKIRKEREEAARQAKARERALERAKSPKKKGKKK

SEQ ID NO: 56987 - protein, 231 aa, Enterococcus faecalis
MNPTVEAVKRNLDLTSSKPLKICTYEAFKKTIILGDIPAGERINEKEFSEQLNISRTPIRFALQELVKEQLVEHIPMVGIVVKGISMKDAYEIYDIRKSLDTLATIKAMELMTPEDFDELEALLLEGEQYNKNNQVDDLLQNFSDFNSFIYTKSQMLRLKKIVTDLHAYLIYFRDIAIRASERRSIALEEHWLIFRGMKTKNIDQITLLTHEHLNRSLQFILKEMERRQIE

SEQ ID NO: 56988 - protein, 594 aa, Enterococcus faecalis
MESDDESIVLEKRDKMNVDVLLKNVWLYQTVTQTFVQRNVAIKNDKFYYIYEEENVNLQPQKTINAENQWMIPGLIDAHMHIESSMTTPTIFSKAVVRYGVTTVIADAHEMANVFGLEGLKAFMAAETELDIFHAIPSSVPSTTPELETTGGIIGLAEVAELLKEPKVICLGEAMNFKGISYEPDSLIRQIIDLCQKQRPTMPLEGHCPKIEDQELADFLYSGITSDHTHQFPKTLKEKIEAGVFIQFQNKSITPENIQVIVDNDFYNYASIITDDVMADDLLKGHLNENVKKAVHAGLPIEKAIYMATYTPAKRMGLHDRGEIAPGKKADFLLLNDLESFDINTVYKSGKVVFEKGEPFHYPEKIEEFPATYQQTIQCKKLTEEDLLLKVATTKETVRCNVIQKQEIGTFTERITKEIPVENGLLQWQKANCALLIVMERYGKNGNISFSLMDQPLSEKGAIATTWAHDHHNLMVMGNTIEDILLAQNELLAMQGGYLVASDQQVMATCPLPIGGILSQAPIEQLGASLQKVRQAMQALGYQNMNEIMSFSTLSLPVSPAIKVTDFGMMDTKSQRFYPLVFPEDGVLLHENTH

SEQ ID NO: 56989 - protein, 234 aa, Enterococcus faecalis
MSEQYVYQHGTLGGLMESLMAGTAEIGTLLTQGDFGIGTLEGSNGEIILLDGTLYHANQTGEITILEGEELTPYAAVTRFQEDGAFPVSTETDENIKAQILEKISPNFFAAIKISGLFAKMHVRVAPKQEKPYPPFVEAARNQPEFTAENIQGTVVGFFTPKLFHGASAAGFHLHFISEDHQFGGHILDFGIKQGTVSWMETAELRQHFPVHDADYRNKEIDIAKALSAIEEAE

SEQ ID NO: 56990 - protein, 465 aa, Enterococcus faecalis
MSKKIRFTETVLRDGQQSLIATRMPTSDMLPIIKTMDEAGFHALEMWGGATFDSCVRYLNEDPWERLRQIRKEVKNTKLQMLLRGQNLLGYRHYADDVVRAFVEKSVENGIDIIRIFDALNDVRNLQTAIQTTKEAGGHCQAAISYTTSEIHTIDYFVKLAKELSQTGADSICIKDMAGVLTPQTGFELVSKMKDAIDLPLEVHTHATSGISEMTYLKVAEAGADIIDTAISSFAGGTSQPATESVAIALEDLGFETGLNMEKVTEIADYFNPIRDRFRSEGILNPKVKDTEPKTLIYQVPGGMLSNLLSQLTEQGLQDKYEEVLAEVPKVRADLGYPPLVTPLSQMVGTQALMNVISGERYSLIPNEIKDYVRGEYGKSPAPIAEEIKQKIIGDEEVITCRPADLLKPELHSLEKEIQQYAKSEEDVLLYAMFPQQGKDFLGRREDPFYDVPLQKVTVKLDLPE

SEQ ID NO: 56991 - protein, 550 aa, Enterococcus faecalis
MSKKGSDIIVESLINHEVPYIFGIPGAKIDGVFDALVDKGPELILARHEQNAAFMAQGIGRLTGEPGLVIATSGPGASNLATGLVTATAEGDPVLALAGQVKRSDLSKLTHQSMNNAALFSPITKFSTEIQDPETLSENIANAYRIAKTAKKGATFLSIPQDVTDSPVTGEAIKPLSAPKLGHASAGTIAALAERIKQAKLPVLLLGMRASARKVTAAIRELVAITGLPVVETFQGAGIISKELEEHFFGRVGLFRNQPGDRLLKRSDLVIAIGYDPIEYEARNWNAEKDARVIVIDEVQMEIDQYMQPEEELIGDMSKNILKLSEAFSEPILTEDAQDYLETLQEKLTIKEVKTSTIENRLHPLEIVQTLQEKTTNEMTVTVDVGSHYIWMARHFRSYEPRHLLFSNGMQTLGVALPWAISAALVRPNTQIISVSGDGGFLFSAQELETAVRLKQNIVHIIWNDGSYDMVKFQEEMKYNRSSGVDFGPVDFVKYAEAFGAKGVRVHSQAEFAAALEEGMQTEGPVIIDVPVDYSDNQELGKTLLPDQLY

SEQ ID NO: 56992 - protein, 303 aa, Enterococcus faecalis
MSKGKKIFAIIFGIILVLFLAVVGMGAKLYWDVSKSMDKTYETVERSKKSQVNLNNKEPFSVLLLGIDTGDDGRVEQGRSDTTIVATVNPRDKQTTLVSLARDTYVDIPGQGKQDKLNHAYAFGGASLAMDTVENYLNIPINHYVSINMAGLKELVNAVGGIEVNNNLTFSQDGYDFTIGKISLDGEQALSYSRMRYEDPNGDYGRQERQRKVIEGIVQKVLSLNSVSNYQEILTAVSDNMKTDLSFDDMKKIALDYRSAFGKVKQDQLQGTGFMQDGVSYQRVDEQELTRVQQELKNQLNTK

SEQ ID NO: 56993 - protein, 516 aa, Enterococcus faecalis
MKRGGKLWCFLSVIFIATLIIMITFFYGVTTVQTIKEVRKNQEQALLAVGEQLAIEPNVIEALKNDHYSDELEAYTVRLGEIHQLDFIVIMNMQGIRLTHPDRQKIGKHFEGGDEVRALKGEEHLSVSQGSLGESLRGFVPVYDQGKQIGVVAMGIKMTSLSQLIERTKNDYTVSVLLSVGFGFILAIVVSYYLKKQLHDLEPREIARLLEERNAMLEETKDAILVIDTDQNILLANIEATKMYHNITNSEENLLGKKLSALVLSPEKLVVHSKTEQFYRQNGQDYFVSIAPINVRKKTIGHVIFLKNATETFIVAEQLVSTTTYASALQSQSHEFMNKMHVIYGLVDLEDYEALKHYLADLLKPEKEFAQRLAILVRNPILAGFLSGERIKFAEIKTQLAIEIYPEIPPNKRDEDTQNLIAIYRYIHRFLMEQTLPEEIIETIDYQPGSLTTTYSFAYPKEQLERFEQEFFTSYLARLLENAEATLTWENQQNNWLVLRINVHYEGAEENEPIDY

SEQ ID NO: 56994 - protein, 119 aa, Enterococcus faecalis
MHIADNYRALNTSRERRRMTEHNHDHDHEGHEHITLVDEQGNETLYEILLTVDGQEEFGKNYVLLYPAGIPEDEDVELQAYSYVENAEGTEGDLQQIETDAEWDMIEEVFNTFMAEEEE

SEQ ID NO: 56995 - protein, 140 aa, Enterococcus faecalis
MRIMGLDVGSRTVGVAVSDLLGWTAQGIEIIRINEEEENFGFERLGELVKEYEVTKFVVGLPKNMNNSIGPRAEASMAYGDKIQELFQLPVDYQDERLTTVQAERFLVEQADASRAKRKKVIDKLAAVMILQNYLDAHSR

SEQ ID NO: 56996 - protein, 89 aa, Enterococcus faecalis
MGFTDETVRFDFDDNRKKAISETLETVYRALEEKGYNPINQIVGYLLSGDPAYIPRYQDARNLIRRHERDEIMEELTKYYLANHGIDIK

SEQ ID NO: 56997 - protein, 1728 aa, Enterococcus faecalis
MKKKIVEDFNRKSQHKKWTKRKMLNLAISSGLLFTSLAIPVSIAVTSGTISASAAVLDIELLSNVTSNNDSGTSTSNRWTAANQNQPVNFTVSGGALADASAVFSGQKQAVLVVPPELRGNVAAAGSAAINTNVTIDLSKVTFLTAVLNAANDLTNVITQITSGALGNLTGVDIDLTEVNRQLELVNNIENLGAASFTAPETLAADGSYISAPISDGLGLVLAQNVSNILQDLNAAVQALEAKGTSIPSNLVAAAINAALLPVKGTVNVAVSGALPLLAVGGSGVNELVDASLLGTTTVTLPTTVSTPQNLSNNLDARFVGTVVQTDLLDVNLLATADGVSNIYFAAGTTSEVTAPTITGVTGNSTAGYEVKGTADANATVEIRNAGGTVIGTGTADGTGAFTVTVPAGEAGANETLTAVAKNASGTESTPTTFQTPADEATVTAPTITGVTGNSTAGYEVKGTADANATVEIRNAGGTVIGTGTADGTGAFTVTVPAGEAGANETLTAVAKNASGTESTPTTFQTPADEATVTAPTITGVTGNSTAGYEVKGTADANATVEIRNAGGTVIGTGTADGTGAFTVTVPAGEAGANETLTAVAKNASGTESTPTTFQTPADEATVTAPTITGVTGNSTAGYEVKGTADANATVEIRNAGGAVIGTGTADGTGAFTVTIPAGEAGANETLTAVAKNASGTESTPTTFQTPADPNTPVATPIVETVTGSTTKGYEVKGTAEVGTTIEVRDAAGTVLGTATTGTDGKYTVTLDSGTATANQTLSVVAKNASGTESQPATATTPADVTAPTVDNITGNSGSGYEITGTADPNTTIEVRDPSGAVIGTGTSDANGDFTVTLPTGTTNPGDTLTVIGKDNAGNESQPTEVLVPADATVTAPTVTGVTGNSVAGYQVTGTADPNATIEIRDADGNVIATGTADGTGSFAVNLPAGTANANETLTALAKDPAGNTSTPTTFQTPADEVVAPPSVDKVTGNTTQGYQVTGTAELGTTIEVRATDGTVLGTATTGPTGQYTVTLASGKATAKQTVNVVAKNDTGLESQPTTAMTPADVTTPTIGDITGDSTTGYEITGTADPNTTIEVRNPDGTIIGTTTTDDQGNFTVDLPAGAANPGDTLTVVGKDGDGNESQPTEVTVPEDATVAAPTVTTVTGTTATGYQVTGTAEPNVTIEIHNEAGLVIATGTTDGAGAFTITLPTGTATANEALTAIAKDAAGKESNPTAFKTPADPDAPVATPTVDKITGSTTNGYQVVGAAEVGTTVEVRDADGTVLGMATTGTDGKYTVTLEPGKASANETITVVAKNATGKESQPATATTPVDLATPTIDSITGNSSKGYEITGTAEPKTTIDVRDADGTIIAATTANETGQYTVTLPAGVVTPGETITIISKDGAGNESQPATAVIPADVVLAAPTITKVEGNKANGYTVTGTADPNVTVQFYNSSEQLLASGNTTTGGTFSVHIAAGLATEKETLTALTTDTQGNVSPKTTFMTPADITGEPEIKIAAPTVSSVLGTSKAGYLIKGTAEPNRIIQISNRLLRSVIAVGATDAEGNFAIQLTAGQATAQQSLLATATDGAGHYSTATTFMTPADPTNPGGGNGNTGGNNGNTGGNTGNNGATGGNNGNGSNTGSNPNGGSGLGTTGSGLGSLGNGLGTNGSGYHPKLSTISYGTGNHGKTGYLPSTGEKESSAVTTSLFGAFVALLASMGIIKRKRKN

SEQ ID NO: 56998 - protein, 465 aa, Enterococcus faecalis
MQSATMEFDTIAAISTPPGEGAISIVRLSGEQAVAIANKVYRSGTKDLAKVPTHTIHYGHIVDPQNDQLIDEVMLSVMRAPKTFTREDVVEINCHGGIVVVNQLLQLLLREGARMAEPGEFTKRAFLNGRMDLSQAEAVMDLIRAKTDKAMNVALNQLDGNLSTLIRSLRQEILNTLAQVEVNIDYPEYDDVEELTTKLLLEKAEFVKAQIQQLLTTAKQGKILREGLSTAIIGRPNVGKSSLLNHLLREEKAIVTDIAGTTRDVIEEYVNVRGVPLKLIDTAGIRETEDIVERIGVERSRKALADSDLILLVLNQSEELTEEDRQLLEATKGLKRVILLNKMDLPTKLDPNELQELVPAEEILSVSVLSNTGLDQLEAKIADLFFGGQTGEKDATYISNTRHIALLDQAALSLQEVINGIEAGMPVDLVQIDMTRCWDYLGEIVGDSVQDELITQLFSQFCLGK

SEQ ID NO: 56999 - protein, 632 aa, Enterococcus faecalis
MNQYQAESYDVIVVGAGHAGSEAALAAARMGVKTLLLTINLDMVAFMPCNPSVGGPAKGVVVREIDALGGEMGKNIDKTYIQMRMLNTGKGPAVRALRAQADKHAYATEMKHTIEKEENLTLRQGIVEELIVEDGVCRGVVTSTGAAYRSQAVVITAGTALRGEIIIGELKYSSGPNNSQPSVGLANHLKELGLEIDRFKTGTPPRVKSSTIDYSVTEEQPGDKEPNHFSYSTPDSAYNQNQEPCWLTYTNETTHEIIQKNLHRAPMFTGIVEGVGARYCPSIEDKIVRFADKPRHQLFLEPEGLNTEEVYVQGLSTSLPEDVQTEMLHSIEGLEKVEMMRTGYAIEYDVVVPHQLRPTLETKVIENLYTAGQTNGTSGYEEAAGQGLMAGINAALKIQGKEPLVLKRSDGYIGVMIDDLVTKGTNEPYRLLTSRAEYRLILRHDNADLRLTEMGHEIGLVKEEQYAAYLVKKAAVEAEIARLGKHRIKPTKEVQAFLETKGAAGLKDGILARDFLKRPEISYQEVAQFIPAPEEALDPKVIEQVEIQIKYEGYIKKAMEKVEKLKRMEAKRIPENIDYQAINGLATEAKQKLQKIQPETIAQASRISGVNPADISILMVYIEQGKIAKVQG

SEQ ID NO: 57000 - protein, 161 aa, Enterococcus faecalis
MSFIYVFGALFLTAYFVQIAMGMKQIKHFNQNYQELRQLGKVAIGRRAGKLKAGTIILFAVDSQGKILAARKMQGVTVLAKFHPLPQYVNEDIHYMDHYHPLVQKENKLTQQAMENAREIYLRVELGNYQETQPLTPLNGAKIQWQLWKNKVQTKLKGSVE

SEQ ID NO: 57001 - protein, 292 aa, Enterococcus faecalis
RTSILRKFNWDFNENKIRFLDYDQANVYEAPMTVNKARLMGIINKEGLQYQDVSENTLTKQGQCYLTNDMKLKKYSYILASQPVTRFRNAFFNETEDIQTNEDSQDLTYTSKEERLFAEEKLGKIDFKGTLPEENKRDSIYNQSFSYVKRLGTNMGNLRYFDRTKDSVNYRTFVEGFPVFSNDLKGQVDIRITNNDGAAPSVTINTSVNTIQVPIPSEEEVTLESTEKLIKRLETAGAKKEKIQSAVIGYTWQTIEEVKQVVDLSPEWYVLYNNNWYTATDLVKQLPSLEVG

SEQ ID NO: 57002 - protein, 225 aa, Enterococcus faecalis
MEFMLDTINLEAIRKYQKILPLAGVTSNPSIVKQAGKIDFFAQMKEIKKTIGQASLHVQVVGQTTEEMLEDAQTIVQQLGQETFIKIPVNEAGLAAIKQLKQANYRITATAIYTEFQGYLAIAAGADYLAPYYNRMENLTIDSQKVIEHLAAEIKRTNAKSKILAASFKNVAQINQACQMGAQAVTIAPELVTQGLAMPAIQKAVTDFQEDWVAVFGVETVNELA

SEQ ID NO: 57003 - protein, 590 aa, Enterococcus faecalis
MRYTNGNYEAFARPRKPKGVDDKSAYIVGGGLAGLATAVFLIRDGQMKGENIHIFEELTLSGGSLDGKFIPHDGFVTRGGREMENHFECLWDLFRSVPSLEVEDASVLDEFYRLDLDDPNSSNCRIIHNRGERVPDDGQFTLSKKAQKEIVDLFMTSEDQLIGKKIEDVFGEEFFESNFWIYWCSMFAFEKWHSAIEMRRYIMRFIHHIKGLPDFTALKFTKYNQYESLVKPLLSFLTNQGVDFQYETTINDIQVDIKGATKVARRLLLTQAGKTKEIPLTENDLVFVTNGSITESSTQGDHHTPAPITHELGGSWNLWKNLAKQSPEFGHPEVFCENLPDESWFVSATITWENFDIEPYLSRLTHRKLRTGKIVTGGIITIKDSNWMMSFAMHRQPHFKEQNDQQSITWVYGLLSNKPGNYIKKPIEQCTGQEITQELLYHLGVPEGEIERISEESATTIPVYMPFITSYFMLREPGDRPLVVPNGSKNLAFIGNFADTERDTVFTTEYSVRTAMEAVYQLLEVERGVPEVFASAYDLRVLANSVYYLSDKKKLTEMDMPFVERKMVEHFVKKFEDTYIGDILRENHLI

SEQ ID NO: 57004 - protein, 238 aa, Enterococcus faecalis
MLPEEFRQLLAAKGIELTDQQMTQFDQYFHLLVEWNEKMNLTAITEEKEVYLKHFYDSVSLAFFEDFASDKAICDVGAGAGFPSIPLKIVFPSLNVTIVDSLNKRITFLTELVNQLGLANVSLYHDRAETFGQKAEFRGAFDYVTARAVARLNVLSELCLPLVKKEGYFLALKASKSEEEINEAKPAIATLGGQFQKEVGFTLPITADERHIVVIQKKKETPKKYPRKPGLPNKQPIK

SEQ ID NO: 57005 - protein, 253 aa, Enterococcus faecalis
MTRIISVANQKGGVGKTTTTVNLGACLANLGKKVLLIDIDAQGNATSGMGVPKPDVAHDVYDVLVNEEPITSVVQHTSRENLDIVPATIQLAGAEIELTSMMARESRLKLAIDEVRDMYDFVLIDCPPSLGHLTINAFTASDSILIPVQCEYYALEGLSQLLNTIRLVQKHFNPELKIEGVLLTMYDARTNLGAEVVEEVRKYFREKVYDTIIPRNVRLSEAPSHGLPIIDYDIRSKGAEVYQALAKEVLENE

SEQ ID NO: 57006 - protein, 61 aa, Enterococcus faecalis
MYDLGDIVEMKKPHACQANRWQIIRMGADIKIKCTNCGHIVMMPRRDFTKKLKKVIEKKAD

SEQ ID NO: 57007 - protein, 371 aa, Enterococcus faecalis
MALTAGIVGLPNVGKSTLFNAITKAGAEAANYPFATIDPNVGMVEVPDARLQRLTELVKPKKTVPTTFEFTDIAGIVKGASKGEGLGNQFLSHIRQVDAICHVVRCFDDENIMREQNRDADFVDPLADIDTINLELILADLDSINKRYTRVAKMAKAKDKEAVEELAVLDKIKPVLEEGLSARTIEFTPEEEKIVKSLFLLTTKPVLYVANVSEDEVADPDNNEYVQQVRNFATSENAEVIVVSARAEEEIAELDSEEDKAEFLEAMGIEQSGLDQLIRAAYDLLGLATYFTAGEQEVRAWTFRKGIKAPQAAGIIHSDFERGFIRAETVSYEDLDKYGNMQAAKEAGRVRLEGKDYVVQDGDVMLFRFNV

SEQ ID NO: 57008 - protein, 221 aa, Enterococcus faecalis
MKKAIAECLGTFILVFFGTGTAVLGNGMEGIGTTGIALAFGLTIVAAAYSIGTISGAHLNPAVSIGMWLNKRMTTMELIYYVVGQIVGGLIASFALLSILKGAGKSIENLGQNGVGELSVAGALTVEIILTFIFVLVVMTVTSAKKGNASLAGIVIGLTLTMIHLVGIPLTGTSVNPARSIAPAVFAGGSALSELWIFIVAPLIGGLLAALVAKFVLDTEE

SEQ ID NO: 57009 - protein, 209 aa, Enterococcus faecalis
MTDKKTTEKKETETAATFTEELTAVLEEIKEEPVKEKKKGEIVTIVNETDIQIGEREYRIVKNHRDAFDPERLGERFSEVLARYDYIVGDWGYEQLRLRGFFDTSNRRAAPDQRIDTLEDYLYEYCNFGCAYFVIERTGERKEKTTHRRRRHKKNNRSNAFVEEKSAPANKNSKPVIRTRKEENKKTTTPKQPSPKKSGKGFTIRQREE

SEQ ID NO: 57010 - protein, 355 aa, Enterococcus faecalis
MGKEYHVAVVGATGAVGTRMIELLAETSLPIASVRLLASKRSAGQEIQFKGQPLIVEELVPESFEGIDLALFSAGGSISEKFAPEAVKRGAVVVDNTSHFRMAKDVPLVVPEVNPEALKNHQGIIANPNCSTIQMMVALEPIRQAFGLERIIVSTYQAVSGAGIRAINELKEQAEDFLEGKPVSEWSAEILPAGSDEKHYPIAFNALPQIDVFSEAGYTYEEWKMMNETKKIMGDNKLKVVATCVRIPVISGHSESVYIEVKQADASVSAIQELMAQAPGVILQDEPSEQLYPQALNSVNQKETFVGRIRQDVDVKNGFHLWIVSDNLLKGAAWNSVQIAETLHEMNLLRVPEND

SEQ ID NO: 57011 - protein, 423 aa, Enterococcus faecalis
MLDVKMMRQNFDEVKAKLQTRGVKEEILVEFLRLDESRRDLLVKVEEMKKYRNDVSAEIAQLKRNKEDATAKIAEMKEVGGNIKALDAEINAIDEELRGITTTLPNLPDDSVPVGAGEEENVEVRRWSEPRTFAFEPKPHWEVAENLGILDFERGAKVAGSRFVYYKGLGARLERALYNFMLDLHVYEHGYTEMITPYIVNDTAMFGTGQFPKFKEDVFQLQDTDLTLIPTAEVPLTNYYNNEILDGKDLPIYFTALSPSFRSEAGSAGRDTRGLIRLHQFNKVEMVKFSDAEHSYEELEKMTNNAEEILQKLGLPYRVMALSTGDMGFSAAKTYDLEVWIPAQETYREISSCSNCEDFQARRAMIRYRDENDKVQYAHTLNGSGLAVGRTVAAILENYQNEDGSVTVPEVLVPYMGNLTVIK

SEQ ID NO: 57012 - protein, 831 aa, Enterococcus faecalis
MDELFTESAKAVLAIAQEEAKYFRHQSVGSEHLLLALVLEPNGIAGKTLRQLNTDTEDIREEIEHLSGYGTMQSPMGNNNLYLPYSPRAKQIFAYAGDEAKRLGAQKIGTEHLLLGLLRDEEILASRILVNLGLSLSKMRQLLLKKMGVSEPNGAQRRRNGQNKNAPQGTPTLDSLARDLTKLAREQSLDPVVGRGTEVRRLIQILSRRTKNNPVLVGEPGVGKTAIAEGLAQKIVNREVPEDMQGKRLMMLDMGALVAGTKYRGEFEDRLKKVVDEIYQDGQVILFIDELHTLIGAGGAEGAIDASNILKPALARGELQTIGATTLDEYQKYIEKDAALERRFARIQVAEPTPEEAEEILKGLRSRYEKHHGVEITDEALHAAVQLSIRYLNDRQLPDKAIDLMDESAAKVRLDKADQPSEINELRTEISQLITEKEEAIQNQSFESAARIRQKEKQVMEKLEELIAVKEKSLSGYSTQVTEEDVAGVVSQWTGVPLQQLEKKESERLMELETILHQRVVGQNEAVEAVSRAIRRARSGLKDPARPIGSFMFLGPTGVGKTELAKALAEAMFGSEEALIRVDMSEFMEKYSTSRLIGSPPGYVGYEEGGQLTEKIRQRPYSVILLDEVEKAHPDVFNILLQVLDDGHLTDAKGRKVDFRNTILIMTSNLGATAIREEKHVGFNVKDISKNHELMQKRIMEELKKAFRPEFLNRIDETVVFHSLKQEEIHEIVKIMSQSVVKRMAEQEVKVKITPAAIEVIGKVGFDPEYGARPIRRALQKEVEDRLSEALLSGQIQLGDKVTLGASKGKITLNVRAPKAPKTEAKELQTV

SEQ ID NO: 57013 - protein, 336 aa, Enterococcus faecalis
MEQSFFRELLHYQRPKDNPFRLVFAGLVMFSILFLGYINHQLLISSFGSLGIFTFLYYQPLPLKQLMTRLSVVGSYLFLGNLLGMLSTHIAWLIPIVVALVGFGGRFFFEVYDISKPGAFFGVMVTAMGASTSIPLAKIPFMSGCMLLGIGFSILFALVLHFTEKEISVPLAKRSLRERIYQHPEAPLDSIYYSFVLFFAVYISESLHLQNPYWLVVSCASILQGDNLRAIKQRNIQRIFGTTIGLVISAFLLNLALTTFESIVVITILFVTVEYFIRRNYGLAQFFTTPMALMLSLLVRQQYVITLIQFRFLGIVLGSLLGLSSSVAIHRCSNVL

SEQ ID NO: 57014 - protein, 449 aa, Enterococcus faecalis
MKTYDYIVIGGGSGGIASANRAGMHGANVLLIEGNEIGGTCVNVGCVPKKVMWQASSMMEMMERDTAGYGFDVEIKNFSFKQLVENREKYIDFLHGAYNRGLDSNNIERIHGYATFTGEQTIEVNGTEYTAPHILIATGGRPKKLGIPGEEYALDSNGFFALEEMPKRVVFVGAGYIAAELAGTLHGLGAETHWAFRHERPLRSFDDMLSEKVVERYQEMGMQIHPNATPAKIEKTAQNEYVITFENGESITTDAVIFGTGRQPNTDQLGLENTKVALDEKGYVKVDKFQNTTQNGIYAVGDVIGKIDLTPVAIAAGRRLSERLFNGQTDLYLDYNLVPTVVFTHPPVATIGLTEKAALEEYGEDQVKIYRSSFTPMYFALGEYRQKCDMKLICVGKEEKIVGLHGIGIGVDEMLQGFAVAIKMGATKADFDNTVAIHPTGSEEFVTMR

SEQ ID NO: 57015 - protein, 272 aa, Enterococcus faecalis
MKTSVKFETIFPLTTAPLIQCITNEITCESMANALLYIDAKPIMADDPREFPQMFQQTSALVLNLGHLSQEREQSLLAASDYARQVNKLTVVDLVGYGASDIRNEVGEKLVHNQPTVVKGNLSEMRTFCQLVSHGRGVDGSPLDQSEEAIEELIQALRQQTQKFPQTVFLATGIQDVLVSQEQVIVLQNGVPELDCFTGTGDLVGALVAALLGEGNAPMTAAVAAVSYFNLCGEKAKTKSQGLADFRQNTLNQLSLLMKEKDWFEAVKGRVL

SEQ ID NO: 57016 - protein, 211 aa, Enterococcus faecalis
MREKLKVYLVTGRYDFSDTEFLKRIETACRSGVTLVQLREKEVSTRRFYELAVKVKVVTDAYQIPLIINDRVDICLAVDAAGVHIGDDELPVALVRKLVGSTKIVGVSAKTVARGVEAENEGADYLGVGAIFPTTTKDSPLTSLQTLSEIAAAVTIPVVAIGGIKEENIEQLMGTGVAGVSLVSEIMLAEQITEKVQGLMRVTERMLEARK

SEQ ID NO: 57017 - protein, 396 aa, Enterococcus faecalis
MEKKISPNLTLFALAINAFAIGSTEFISVGLLPMIVKSFHISLSQAGLTVSLYALGVTIGAPLLTILTGKWNRRSLMLGIMLLFISGNLIAAFAPTFIILLVGRILSALAHGIFMSVSTVIAADVVPPSRRASAIAIMFTGLTVATVTGVPLGTFIGQQTAWHMSFLFIASIGLVGLIASYFLVPKNLPIPGKVDIKGITRIFTNKPLVFSFLITAFGYGGTFAAYTYLSPLLENLGFSANAVVIILVVYGVMVAIGNTVGGHWANKKPLDSLVKMFSLLILSLVFLFITVLMDNSLLGLLASLMLGLFAFMNVPGLQLYVVELAEKYVPEDITLASAFNIAAFNIGITVGSMTGGVVTDHLSVTYTPIFGGFIVLIAVLFVLYIRKQEEQKNNYL

SEQ ID NO: 57018 - protein, 263 aa, Enterococcus faecalis
MIDLKKNYQIMGIVNTTPDSFSDGGSYTTVDVAYQHALHLLEAGADILDIGGQSTRPGYEEVSPQVEADRVLPLIKKIRETSLAPISVDTYYPEVAEAAIQAGATMINDIKGLDTPGMAEVLAQYPEVQVVIMHSRKRQSLSLKEELHQFYTEKIEQCQKYGLSLEKICFDPGIGFHKTVAENLQLLKDPNAFRYQDYPLLYGVSRKRTIGALTNEPEPANRDFGSAAASLYAAQQGVEILRVHNVQGLKQTFDVWRALSEKE

SEQ ID NO: 57019 - protein, 220 aa, Enterococcus faecalis
MTFTEQAKDQAQASWQGSFQHPFITELHEGTLSPTIFRYYLIQDHYYLKHFSQLYRLIAAQTQQPRLKKLLLTNAENLALGELAIRETFFEELAITEEEVAATPIAPTAYHYVSHMYRQLIEGTPKTAAASMLPCSWLYQEIGAQLVKQHSPEPLYQRWIETYAGEEAYQHVQEERQLLDQLYEESSPQEQAAMITAFVISSEMEYAFWEMAYTHETWIG

SEQ ID NO: 57020 - protein, 198 aa, Enterococcus faecalis
MNYPEPIAKLIESYMKLPGIGQKTATRLAFYTIDMKEEDANAFAKALISVKRDLHFCSICGNITEEDPCEICQDKNRDRSIILVVEEPKDVMSMEKMREYQGLYHVLHGVLSPMEGTGPEDINIASLIKRLHDDEVKEVIIATNATTEGEATAMYLSRLIKPAGITVTRLAHGLSVGSDIEYADEITLLKAVEGRREI

SEQ ID NO: 57021 - protein, 212 aa, Enterococcus faecalis
MQGIFITFEGPDGAGKTSVLKEVSERLAKESKRKIVTTREPGGIPIAEKIRTVILDPRNDRMDERTEALLYAAARRQHLVEKILPALEAGHLVLCDRFVDSSLAYQGAGRRIGIAPIASINAFATEGVSPDFTIYLDVDSDTGLRRIQENRTQQIDRLDSEGLEFHQRVRHEYLKLAEENPQRIKKIDARMSLELVVEATYQAIIERYPENF

SEQ ID NO: 57022 - protein, 290 aa, Enterococcus faecalis
MQKQKSFDKQTTKGKLYLVPTPIGNLEDMSIRCLNILKEATVIASEDTRNTQKLLNHFEITTPQISLHEHNYKERIPQLITRLLNGETIAQVSDAGMPSISDPGHELVTACLEEELAVIALPGPTAGMTALIASGLLPQPFTFYGFLPRKKKEQKDVLSALKEERPTQIFYESPYRIAKTVATFAEVYGQERPAVICRELTKLHEEYLRGTLGELTEYLAENTLKGECCLLVSGFTGEKETIAAMPAISLKEHVQVLMEEEGRSSKEAIKEVAKLRNVKKQEVYKEYHSI

SEQ ID NO: 57023 - protein, 255 aa, Enterococcus faecalis
MKKIVEVNHVSKTYGRLNNKTEVLDNISFTVDEGEFVGIMGPSGAGKSTLLNVLSSIILPTAGIVRIAGQDILKMRDNQLSDFRRNEMGFIFQSFNLIDTLNVKDNILLPLAVEKVSLEEMDKRLLHVTSILGIQELLSAYPPEISVGQKQRVAAARALITNPKIIFADEPTGSLDSKSATELLKYLAEINLHDDATILMVTHDPYTASFCNRILFIKDGAIFSEVVRQGSRKEFFNRVIDMQATIGGGGRANDF

SEQ ID NO: 57024 - protein, 506 aa, Enterococcus faecalis
MEKLAIGVDVGTTQAKAVAFQANGTVVASSYVRYPLIQETEGMAEQDPETLFQAVVNCIRTVTQQVKNQPIGLISFASAMHGLIAMDAQGRPLTQVITWADTRASDYAEALKETPAAQLFYQLTGMPVHPMAPLYKIRWLQENQPAVAQSAAKFIGIKDYIFYRFFGEYWTDYSSASGMGLFNIHTRQWETSILAYLSIEEEQLPKVAPSTFIFPALAPSWQEMLGVEEETVLVLGGADGPLSNLGLGALGMGVATLTVGTSGALRYIVEEPFLHPQGETFCFALDEQHWVIGGASSNGAVALDWASQTIFAEERQQAIQNGTNLYDPIMAKIATVPAGANGLLFHPYLLGERAPLWNAEASASFIGLRKNHHAGHLARAVVEGICFNLKTILEDLKQLGGPVQEIRATGGFADSPVFRQIMADVLGETLSFTDSTEASALGAVLLGWQGLGQLPNLQAAAQQVLIHETVTPRADQLLVYQELYPVFQETQQVLAQSYQKLAEFRK

SEQ ID NO: 57025 - protein, 155 aa, Enterococcus faecalis
MKFEKTKEILNQLVADLSQFSVVIHQTHWYMRGPEFLTLHPQMDEYMDQINEQLDVVSERLITLDGSPFSTLREFAENTKIEDEIGNWDRTIPERMEKLVAGYRYLADLYAKGIEVSGEEGDDCTQDIFIANKTDIEKNIWMLQAKLGKAPGIDA

SEQ ID NO: 57026 - protein, 506 aa, Enterococcus faecalis
MEKVINMIQTIDEWARKEPQRPVYLTEEKVSTYGELKEKSDNLAAYLAELKTDKSAIVVYGELDFEMIVSFLGASKAGFSYIPIDAHTPKERIELILNVAKPTAVIAVHEWPELATEVPVITAEELTEMMMHAPRHAPALMPVTGASNYYIIFTSGTTGVPKGVQISHDNLVSFTNWLLQDFGLEEGARFLAQAPYSFDLSVMSIYPALALGGSLTPLPNEIINDFKQLFTRLPQLTIDVWVSTPSFIELCLMEPSFDGEHLPALRTFLFCGEELPKPTAEKLAARFPTAHIYNTYGPTEATVAISAIEITQEVLKSVQRLPIGYVKEDTQIYIMEGMSKLPAGEIGEIVIAGPSVSKGYLNNPAKTAEAFFQLDGVPAYRTGDAGKLVDNLLQYEGRLDFQIKLHGYRIELEEVDHHLTNVSYVKQAVVVPKYQGNKVQQLIAYVVPQAHEFSSDFQLTKAIKQELATLTMDYMIPQKFVYVEQLPLTSNGKIDRKGLMNEVNAT

SEQ ID NO: 57027 - protein, 187 aa, Enterococcus faecalis
MNLINQKLFDFECDAYHDGEFTRVSTEDILGKWSIFFFYPADFSFVCPTELGDMQEHYAHLQELNCEVYSVSEDSHYVHKAWADATETIGKIKYPMLADPNGQLARFFGVLDEASGMAYRASFIVSPEGDIKSYEINDMGIGRNAEELVRKLEASQFVAEHGDKVCPANWQPGEETIAPSLDLVGKI

SEQ ID NO: 57028 - protein, 304 aa, Enterococcus faecalis
MKIGVIGLGNIAQKAYLPTYSECRHLAEFVLATRNPETRQKIADQYGFTETVGTIEELIEVKIDACFVHVATKVHGAVVRQLLQAGIHVFVDKPLSEDLAEVKELQALAAAKNLRLMVGFNRRFAPYTEVLKNIPEKQTIFIKKNRINTTRETSFMMYDLFLHVVDTAVYLAEGPLHVVQSKLVEENGHLKRAILQLETEQTTIVCSMDLHSGANTETFEVTSPTGTYRLENLTHLTIQTEEEYQVKEMGDWTPTLEKRGFYQMVTAFIQAIQKPQEQELKQEKVYESHALCEEMLRQQQRHVL

SEQ ID NO: 57029 - protein, 181 aa, Enterococcus faecalis
METFERNWYVLHTYSGYENKVKANIESRAQSMGMGDYIFRVVVPEETEKEVKNGKEKEIVHKTFPGYVLVEMIMTDDSWYIVRNTPGVTGFVGSHGAGSKPAPLLQEEINHILRSIGMSTRQSDLEVALGDTVKIIEGAFSGLEGVVTEIDEEKQKLKVNIDMFGRETSTELDFEQVDNID

SEQ ID NO: 57030 - protein, 266 aa, Enterococcus faecalis
MTTITRISKDKGEFYLLWLSSGEKLRVSEDILVRQRLLKGQELSDTLIEEIKKASSYDVGLQMAMNYLSYQLRSKKEIFTYLKEKEIVPEDRVKIVQRLEELRLLDDAIFSESYVRTAMRTSDKGPRNVAQQLKQKGISEEDIQHGLTFYTLDEQLNVATATAEKAMKRYRTKSFKDALQKMRLHLMQKGFTNEIIDLALESLAFEKDEEQEQQALDKEGERLWRANQRFDFSKKVQKVKQSLFQKGFDYDLIQQFISEKEVEHDE

SEQ ID NO: 57031 - protein, 174 aa, Enterococcus faecalis
MTVYLRKAEPSDLPDILAIIEDGRRTLQKSGIPQWQNGDGPNQEILAKDIDQQTCYILMVEDALAGVGVLCSEIDPAYEAIFNGSWQPHSQTTYTAIHCVALKSSFQGQGLALVLLRSLVTAARLQGATDIRIDTHPQNLAMQHLIKKAGFVYQGDVILDVNDGERYAYQMILK

SEQ ID NO: 57032 - protein, 273 aa, Enterococcus faecalis
MPQFASKAEEKNYYERQASLAEFLTWYHQQELPEYEKPSLTVDMVLLCYNKEADQLKVLLIQRKGHPFRNSWALPGGFVNRNESTEDSVLRETKEETGVVISQENIEQLHSFSRPDRDPRGWVVTVSYLAFIGEEPLIAGDDAKEVHWFNLERHGQHITLSHEDVEITLDLKTAASLGKDTLAFDHSEIIIKAFNRVVDKMEHEPQVLQVLGKDFTITEARKVFAKFLGVDYRSIDHSNFKKAMTQYFEELGERPVGIGRPSKIYQLKTTTGF

SEQ ID NO: 57033 - protein, 231 aa, Enterococcus faecalis
MKIGIIGAMDQEVKILKEKLTDTMSWERAGALFVSGSLGRHEVIVVRSGIGKVASAVTTTLLIHQYGVNMVINTGSAGGIGEGLKVGDLVIADKLAYFDVDVTGFGYAYGQLPGGVPLYFETSEYLRMEIAKAAEKTGLAIRKGLIVTGDTFVDSAEKIAKIKKEFPEALACEMEGAAIGQAASQFNIPFLVVRAMSDTADGEATQSFDEFIDEAGKKSAEMVIHFVENLV

SEQ ID NO: 57034 - protein, 319 aa, Enterococcus faecalis
MTKKLYQWGIVGLGGIAHEFASTFKQETSQLAAVASRTLSKAEQFAADYSIPKAYGSYEELLADETIDVVYIAVPNKQHAEHILKALQAGKHVLCEKAITMNAAELKQALAVAEKNDLILAEAMTIFNMPLYDELRRLMDAGKFGQLKMIQAPFGSYKEPDPKNRFFNPDLAGGALLDIGTYAVSFARWFLSSQPDVLASSMVPFSTGVDEQSVTLLRNKENELATISLTFQAKMPKQGIVAFEDAYITITDYPRADEAIVHYNDGTVETIVSGYSAEAMNYEIYNMVEAIKGTQPNRSLFFTTEVIDILDQMQKLWQN

SEQ ID NO: 57035 - protein, 208 aa, Enterococcus faecalis
MFFTFMRGVVRVILFVINGNAHYENKEKLPKDQNYVLVAPHRTWWEPLYLAVAGSPKKFSFMAKKELFKNPVLRFILKHANAFPVDREKPGPSAIKTPVKILKNSDLSLIMFPSGTRHSSELKGGVALIAKMGRVPIVPSVYQGPLTLKELFKRKKVTVRFGEPIDISDIKKMDKDGLAEVERRMQEAFDQLDKEIDPTFKYESTEKE

SEQ ID NO: 57036 - protein, 378 aa, Enterococcus faecalis
MKFLHTADWHIGKKLHGFDLLAEQREAFEQILAIAKEEQVDAVVIAGDLYDRSVPAVEAVEIFNEMMIQMNLKEHFPVLAISGNHDSSTRLETGGPWFNQTQFHLNTRLEQAFQPIEIDNTQFYLLPYFEPIAARLYFEDETIRTIQAAMEKVVAKMQESFLPNKKQVLVSHFFVAGSEKTDSETKLTVGGLDVVPTALLEPFDYVALGHLHGKNALQAPNARYSGSPVKFSLSEMTQEKGVWLVETEAEVHFQFRALKPLRDIQQLTGSFQQLTDPAFYQEVNRENYLHVQLTDRAIIPNMMNQLRKIYPKIIGLERLNGRETSSGNQKKVVQIEQRSPEEHLHDFFNDVTGEALTEQQAQWVQEELSTLNQLERGK

SEQ ID NO: 57037 - protein, 1045 aa, Enterococcus faecalis
MKPLSLTLKNFGPYINETIDFTKFEDSSLFLISGKTGSGKTTIFDGMSYALFGESSGKLRLGKEMRSTFADPSEATEITLLFKHNEYLYELNRLPEQELFKKRGTGVRKQSAKISLIVKDAQGKELRAYSKRREVDELIQELLHLNANQFAQIVLLPQGEFRTFLIAKSDEKEKVLRNLFGTELYQLFSENLKERLKIANQEIQETQQKIELKTEQLHWSEEPEPTMTLFEKLQLLESQQQEAQQQLLVEREQIATLKQAKQAKEQVRYAIEERQNLQQQKEELLEKKAKQAEQETVIERLKEQIQQLKWSQKQQSLAEKVFEKRSEKQQKEQETKSKQQALMETQQALTDWQAIMSELEEQQPLIAEKQERLQTIQRQLPQYQEYEQLAQQQIAEQANYQAIQKEYESCQQEKITLADKVATAKQFIEQEGTLEKANFECSSVADHWQNFVERWQKNQKAWQKISQNQGELHELTQRFAVEQQQKSAEEAKLQTKKSQWASLQIQRLSLLLEEGEPCPVCGSLEHPKQQTHQEVSLEEIDQAERELTEVEKTVQRFTETLSALGAEKQQKESQLQEQEAAYTEEQEQLAAQFADLQLPLTGLTFSQVTPAEIAEVESQLAKEKQQIAQKLTEISVEKDHLAELEEQVAENSQRFEVLRQQVETMQQSLERITIQQQMIASQLLDATVTYEEMTKQQTLLQEELSAFERQKENVTTQGETLKKEEMILESTLTHLEKEQQTLQQTVAQLESQLNAVLTEQGVTEDQLTEWLKEVPTLESQQEQIALFEQEQTQLTIQLAEIEKKLSSDTFPELSLITTEIEQITQQIEEQEKKYYQLHEKMQNNQQLVQEINAQRTTIEDKFEEVAALQQLADTVNGNNPKKISFERYMLQTYLERVLTVANQRLDRLTNSRYQFELNHEAGSYRNQTGLEINIYDDNSGTVRSAHTLSGGESFIAALALALSLAEVIQEQAGGVLIDALFIDEGFGSLDEEALEMAMEALETIENEGRMIGIISHIGELKARIPQQLQIKSNGNGQSTVHYQLA

SEQ ID NO: 57038 - protein, 431 aa, Enterococcus faecalis
MIDRYTRPEMGAIWTDKNRYKAWLEVEILADEAWAELGEIPKEDVQKIRENASFDVARILEIEAETRHDVVAFTRAVSETLGEERKWVHYGLTSTDVVDTAYGYLLKQANDILRKDLQTFTEIVGAKAKEYKHTVMMGRTHGVHAEPTTFGLKLALWYSEMKRNIERFEHAAKGVEAGKISGAVGTFANISPFVEEYVCEHLGIRAQEISTQVLPRDLHAEYVSAMALIATSIEKFATEIRGLQKSETREVEEFFAKGQKGSSAMPHKRNPIGSENMTGLARVIRGHVITAFENVSLWHERDISHSSAERIIIPDTTILLNYMLNRFGNIVKNLTVFPENMKRNMDATYGLIYSQRVLLKLIDHGMTREEAYDLVQPKTAYAWDHQTAFRPLLDADEKITSVLSKEELDDAFDYHYHLKNVDTIFERVGLG

SEQ ID NO: 57039 - protein, 266 aa, Enterococcus faecalis
FPKSTYMYWQKRLDRTASTQIIEEEIQAIRKKHQHYGYRRITQELKRRGFQVNKKKVQRLIQKLKLQVKAFTKKSRKYNSYKGIVGKIAKNLIRRRFKTSVPHQKITTDTTEFKYFEADNAGIFRQKKLYLDPFMDMYNSEILSYSLSTQPNGKTVMEGLKEAISQTNDCPYRRTFHSDQGWAYQMNVYIQTLKDNNIFQSMSRKGTCLDNSPMENFFSILKQEVYYGKIYSKSNELIEAIENYIYYYNHHRIKEKLNWKSPVEFR

SEQ ID NO: 57040 - protein, 185 aa, Enterococcus faecalis
MAKYSFEFKLKLVHDYLSGQGGLRFLAKKYGFKDSSQISKWINAYKELGEEGLLRSRKNKNYSVQFKLDAIELYLTTELSYQEVANLLKIRNPSLIANWLRTYQKFGIEGLSKQKGRPPTMSKKKRNEPQPLPSERSQVEKLEKENRMLKIENAYLKELRRLRLEDEQKMNESHESFTVSEDTFD

SEQ ID NO: 57041 - protein, 868 aa, Enterococcus faecalis
MNIEKMTTTLQEAIAEAQKVAVTRQHQEIDIAHLWKIFLQPNHFGRNFYTDAGLDVDAFEREVDNALDEYPSVAGGNVQYGQNLSQNLFHLLQEADSLREEFQDEFLSTEIVLLALMKLKNYRLTKYLMQQGITEKELRKNIEEMRGGDRVTSQNQEEQYKALEKYGVDLVQQVKAGKQDPIIGRDEEIRDVIRILSRKTKNNPVLIGEPGVGKTAIVEGLAQRIVRKDVPENLKDKTIFSLDMGALIAGAKFRGEFEERLKAVLKEVKKSDGKIILFIDEIHNIVGAGKTEGSMDAGNLLKPMLARGELHLIGATTLDEYRQYMEKDKALERRFQKVLVKEPTVEDTISILRGLKERFEIHHGVNIHDNALVAAATLSDRYITDRFLPDKAIDLVDEASATIRVEMNSMPTELDQVTRRLMQLEIEEAALKKESDDASKKRLANLQEELADLREEANSMKMQWETEKEEVNAVSNKRAEIDKAKHELEDAENNYDLERAAVLRHGTIPQLEHELKELEEKNAKDNVKMVQESVTENEIAQVVGRLTGIPVTKLVEGEREKLMKLNETLHKRVIGQDEAVDAVSDAVIRSRAGLQDPNRPLGSFLFLGPTGVGKTELAKALAEDLFDSEDHMVRIDMSEYMEKHAVSRLVGAPPGYVGYEEGGQLTEAVRRNPYTIVLLDEIEKAHPDVFNILLQVLDDGRLTDSKGRVVDFKNTVLIMTSNIGSQLLLEGVTPEGTIPEEVENQVMNILKGHFKPEFLNRIDDTILFTPLSLDNVKGIIGKMTAQLAHRLEQQEIVLEITDEAKTWIAENGYEPAYGARPLKRFITREVETPLAKEIVSGRVMPKTKVTISLLDNQLVFENEPIEEV

SEQ ID NO: 57042 - protein, 571 aa, Enterococcus faecalis
MLKRFFGYYRPYRRLFILDFGCAVFAGLLELAFPVAVNQVIDKIMPKGDFRLIALASAGLFAFYIINTFLQFIVVYFGHMLGVNIETDMREELYQHLQTQPFEYYDNQKTGKLMSRLTTDLFEISEVAHHGPEDVFITIMTLAGSFLLMLTIHVKLAIATFILLPFITIALGYFNKKMTKANTDIYDNLGEFNAGIEASVSGIRVTQSFANEPFERKQFNYLNQMYRKSKLYFYKVMGVSSAYNYLLIRLINLFSLIFGAYYTIKGEITEGQFVGFILLANIFIRPIEKVNNMIESYPKGFAGFKRFTEEMDKQPSIKDLPGAVAVSHLEGTIAYKDVSFAYEDGTKVLDHINLKIQPGETVAFVGQSGSGKTTLCNLLPRFYEVSSGEITIDGRNIQKMTLASLRKQIGIVQQDVFLFPGTLRENIAYGNLNATEIDIQQAVKLAHLEHVIQLMPDGLDTIIGERGVKLSGGQKQRVAIARMFLKNPPILILDEATSALDTETEQVIQESLNSLADGRTTLIIAHRLATIKHADRIIVVSDQGILEDGTHETLYAQRGHYRRLYDAQFRT

SEQ ID NO: 57043 - protein, 360 aa, Enterococcus faecalis
MYFFLIKCIIELFTILSLKSGGYLMKTIFSGIQPSGTPTIGNYIGAMKQFIELQNEYNCYFCIVDEHAITVPQEPQKLRQQIRSLAALYLAVGLDPQKATIFIQSEVSAHAEAGWIIQCNTSIGELERMTQFKDKSQKNGRAGVSAGLLTYPPLMVGDIVLYNADLVPVGDDQKQHLELTRDFVERFNKRYAQKNQEILTIPEVKIAEQGSRIMSLQEPTKKMSKSDTNVKGFISMLDEPAVIRKKIRSAVTDSTGVIEYNKEEKPGITNLLNIYSAATGQTVEELVQAYEGKGYGDFKADLAEAVVALLEPIQVRYQELLASEELDMILDEGAENARLVANKTLQRMKNAVGLGRKVRR

SEQ ID NO: 57044 - protein, 219 aa, Enterococcus faecalis
MVEIYLFVNPLGGVCLEIEKEIIQLSVNDKKKIQLRFIPLLNMKTINEFLSRQHIPINDIKRRNRIFEDLYSAALDYKAAQLQGRKKGRQLLIGLQKAVAEDGLAYSPELSEELLLAAGGDIDMYRKDRQSDFVKESFQTDQKVAREMGIKQHPTAVVYNYTCENDFGILVENFENMDEIKQLCRVHPHNEPLLNQGDATFEFKRRSNYHFPNGHLHLL

SEQ ID NO: 57045 - protein, 265 aa, Enterococcus faecalis
MKVAIVHNSEEKSKQVTKQLTTLLEQNQIQIDNRQPELVISVGGDGTLLSAFHRFNHLLNEVSFLGVHTGHLGFYTDWRDYELKELVESLCIHREKSTSYPLLDVRIRFRDGKPDKHFLALNESTIKRGNRTMVGDVFIKDELFERFRGDGLSISTPTGSTAYNKSIGGAVLHPSINAFQLTEIASLNNRVFRTLGSPIVIAHTEWLEIKLQESDDYFVTVDQLDIYQENIASVCYRIADERIHFASYRHMHFWHRVKDAFIGED

SEQ ID NO: 57046 - protein, 297 aa, Enterococcus faecalis
MEFQWTYDKETTQQVKYFLKEQGVSKGLLAKVKFQGGKIQVNGTVQNAIYPLQTGDVVKMTIPDEAEHETLLTDDEPIEIVFEDDHFLVVNKPAGIASIPAQYHPSGTMANRVKGYYKRQNYVNQVIHVVTRLDRDTSGLMLFAKHGFAHALIDQELREKKVTKIYYALVGGAIEQLSEHQLIEKPIGRDLSSLLKRQVIETGQFASTEYWLAKRGAQAAAVRIQLHTGRTHQIRVHFEAIGCSLLGDEMYHGKMDQGIERQALHCMELIFTHPFTKETVHLISPLAEDMKSVDDTL

SEQ ID NO: 57047 - protein, 168 aa, Enterococcus faecalis
MTNHIVLFEPQIPANTGNIARTCAATNTPLHLIEPLGFSTDDKHLKRAGLDYWNDVNITYHKDSAAFLAHVAGKHLHLVTKFAHQTYSEVNYNDGEDHYFLFGKETTGLPETFMRENEEKCIRIPMNDEHVRSLNLSNTAALIVYEALRQQNFPNLELTHHYENDKLD

SEQ ID NO: 57048 - protein, 865 aa, Enterococcus faecalis
MVTLFGEDEEKAFIVGTVQAIFFENPSNFYKVVLVNVTDTNTDYLEKEIVVTGSFGQVQEEEPYRFFGHFVDHPRYGRQFQVDSYQQERPTSASGVVNYLSSDKFPGIGKRTAEKIVEVLGESAIDRIIDDPSVLEEVTVLNEKKRQVIVETIRLNHGMEQVIVGLNRYGFGSQLAFSIYQTYQEETLSVIQENPYQLVEDIEGVGFKRADNIAEQIGIQADSAVRIRAAILHEVFEHSIRSGNTYVQADVLLEEAIRTLEASRPVEISPDQVANEIITLVEHGKIQQEETKLFENSLYFSEWGIGTSIQRLLSRKKEIHYEEEEVQKNIRMIEKRLNIQYGDSQQAAIEEAIKSPLFILTGGPGTGKTTVINGIVSLFAELNGLSLDLKDYTQEMFPILLAAPTGRAAKRMNETTGLPASTIHRLLGLTGREKNPSLTAKELEGGLLIVDEMSMVDTWLANTLLKAIPTNMQVIFVGDKDQLPSVGPGQVLHDLLQINEIPKCELNEIYRQGDGSSIIPLAHEIKEGKLPADFQKNQKDRSFFASDIGHIEEYIRQIVTKAKAKGFTPQDIQVLAPMYRGAAGIDALNKMMQEIFNPNDGKKKEVKWNDTVYRIGDKVLQLVNTPELNVFNGDMGEIVGITLAKDSEDKVDELVLQFDNNEVTYKRNEWNKITLSYCCSIHKAQGSEFRMVLLPMVHQYSRMLQRNLLYTAVTRSKELLILLGEVSAFETCVKNESASRMTMLKERIVNAEQMTLTTRTQLEAYEEGLTADHPFTETETKAVFYETEQQSTKADQIKETDEQLVDTTVQEVSLFADEGEESTSPAEPQKEEQLPENPVLSIQEIQENKINPMIGMAGTTPYQFM

SEQ ID NO: 57049 - protein, 625 aa, Enterococcus faecalis
MNQTANSKKKRYITGFDGIRTIAVIGVILYHLFPQVMRGGYLGVPIFFVVSGYLINDLLRQEWAENQTIDLKGFYVRRMKRLYPALIVMLLSAVSYITLFQQDLLNNIRSVVASSIFYYNNWWQIFKGFSYFDGFATQSPFVHIWSLAVEAQNYLIWPLLFILLERFVRKRGRIFSLVLIGALISVTLMAVLYVPGADPTRVYYGTDTRVFSILLGSALAYVWPSTRLKEEIPEASKKILNGAGLSALVLLVLAFLTLSDHTNFVYYGGMFLISLAATVLVAVTAHPGADMNRWLTNPVFTWIGKRSYGIYLYQFPIMIFYEAKIKTLSDHVFLHSLVEIALILVVSELSYRFIEHPLTRLSYKDVWTQFTEFLRKPWDLREKGTMAFMTVISVIAVFGLIVAPANAKSAQQEQLEKNIAKNQQKIEERKKEVQESGTKNSSTSTESSTKPSESQDVLPTQLTPEQVKKAQNLEITTIGDSVILDGASGLQDIFPKMIIDGEVGRQLYSSISLIGELDKKKMLKNTVLVSLGTNGPFTEAQFDEFMKALGNRKVYWINVRVPTRRWQNQVNSLLSQMDKKYDNLTVIDWFNYSNAHDDWFYDDRVHPNVAGGEQYTHFIAEKILQ

SEQ ID NO: 57050 - protein, 202 aa, Enterococcus faecalis
MENGFLFLDEMLHGVRWDAKYATWDNFTGKPVDGYEVNRIIGTKAVALALREAQIHAAALGYGLLLWDGYRPKSAVDCFLRWAAQPEDNLTKEKYYPNIERAELITKGYVASQSSHSRGSTIDLTLYHLDTGELVSMGSNFDFMDERSHHTAKGIGNAEAQNRRCLRKIMESSGFQSYRFEWWHYKLIDEPYPDTYFNFAVS

SEQ ID NO: 57051 - protein, 311 aa, Enterococcus faecalis
MSFASDVKKELTGLEVHREHAKAELAALIRMNGSLSLVNQQFVLNVQTENAAIARRMYSLLKDHYHAQAELLVRKKMKLKKNNVYIVRLKQDTQKILADLDIMDGVVFNGNVSNEIMGNAQKMRSYLRGAFMASGSVNNPETSRYHLEIFSIYEEHNNDICKMLNYYDLNARTLGRRNGYICYLKGAEKIADFLTLIGATNSMLKFEDVRIVRDMRNSVNRLVNCETANLNKTIDAASKQIENIQFIESTVGLTSLPEKLQEIAELRLEYPEVSLKELGEMIPSGAISKSGINHRIRKINEFAEKLREKSA

SEQ ID NO: 57052 - protein, 331 aa, Enterococcus faecalis
MKTYRIRKPKIVVVGGGTGLPVILKSLRNQSVDITAVVTVADDGGSSGELRSSINNMTPPGDLRNVLVALSDMPQLYEDIFQYRFDKSDSHFANHAIGNLIIAAVSEMRGSTYEAIQLLSKMMHVDGRIYPSSERPLTLHAVFKDGSVAVGESKIALDRKTIDHVFVTNTHGEEQPRAARKVVKAIEEADMVVLGPGSLFTSILPNLVITEIGEAIKQTAAEVVYICNIMTQKGETEHFTDADHVRVLNEHLQAQFVDTVLVNTEKVPENYMDPEIYDEYLVQVKHDFQGLREEGCRVISTDFLELRDGGVFHDGEKVVEELFRIVFGTKY

SEQ ID NO: 57053 - protein, 939 aa, Enterococcus faecalis
MANDKIVIHGARAHNLKNIDVTIPRDKMVVVTGLSGSGKSSLAFDTLYAEGQRRYVESLSAYARQFLGQMDKPDVDSIDGLSPAISIDQKTTSKNPRSTVGTVTEINDYLRLLFARVGHPICPNDHIEITSQSVEQMVDKVLELPERTKIQILAPVVVKKKGQHKKVFEMIQREGYVRMRVDGETYDVSEAPELEKNKKHDIAIVIDRIVVKEGIRSRLFDSFEAALRLAEGYAIVDVIGQEEMLFSEHYACPYCGFTVGELEPRLFSFNAPFGACPDCDGLGVKLEVDKDLVIPDPTKTLREGAIVPWNPISSQYYPQMLEQAATSFGIDMDTPFEELPADQQEIILNGSGEKNFHFHYENDFGGVRDVEVPFEGILKNIKRRYHETNSDFTRDQMRLYMTELTCRSCQGYRLNPQALAVKINGTHIGEVSELAIKNAVQFFEGVSLSEQETTIARPILKEVEDRLTFLKNVGLDYLTLSRAAGTLSGGEAQRIRLATQIGSNLSGVLYILDEPSIGLHQRDNDRLIDSLKKMRDLGNTLIVVEHDEDTMMASDYLIDVGPGAGHLGGEIVAAGTPEEVAKNPHSLTGQYLSGKKVIPVPKERRKGNGKAIKVTGASENNLKNVSVEFPLGEFVAVTGVSGSGKSTLVNQILKKALAQKLNRNSNKPGKHKSITGYEAIEKIVDIDQSPIGRTPRSNPATYTSVFDDIRDLFAQTNEAKVRGYKKGRFSFNVKGGRCEACRGDGIIKIEMHFLPDVYVPCEVCHGKRYNSETLEVHYKGKNISDILDMTVEDAVEFFKHIPKIHRKLQTIVDVGLGYVTLGQPATTLSGGEAQRMKLASELHKNSNGKNFYILDEPTTGLHTDDIARLLLVLERLVEAGNTVLVIEHNLDVIKSADHVIDLGPEGGDGGGTIVATGTPEEVAKVKDSYTGYYLKRVLK

SEQ ID NO: 57054 - protein, 245 aa, Enterococcus faecalis
MTEKILVEHLVKKYGDNTVLNDINVSINEGDVVCVIGPSGSGKSTFLRCLNQLEEASSGDIIIDGANLTDKNTDINQVRQHIGMVFQHFNLFPHLSILENIVLAPTDLGRLSKDEAEKKALELLERVGLADKKDAYPDSLSGGQKQRVAIARALAMNPDIMLFDEPTSALDPEMVGDVLGVMKDLAKQGMTMVIVTHEMGFAKEVANRVMFIDGGNFLEDGSPEQVFENPQNPRTKDFLDKVLNI

SEQ ID NO: 57055 - protein, 267 aa, Enterococcus faecalis
MDFNMDMFRLDGKVALITGAVYGIGFEIAKSLAAAGATIVFNNLTQESVDEGSANYKAEGIEAKGYVCDVTDEKAVQAMVKQIKEEVGSIDILVNNAGIIKRIPMTDMSATDFRQVIDVDLNAPFIMSKAVIPEMIEKGGGKIINICSMMSELGRETVSAYAAAKGGLKMLTKNIASEYGQFNIQCNGIGPGYIATPQTAPLRELQENGERHPFDQFIVGRTPAARWGDPVDLAGPSVFLASQASDFVNGHVLYVDGGILAYIGKQP

SEQ ID NO: 57056 - protein, 316 aa, Enterococcus faecalis
MKYQVLLYYKYTTIEDPEAFAKEHLAFCKSLNLKGRILVATEGINGTLSGTVEETEKYMEAMQADERFKDTFFKIDPAEEMAFRKMFVRPRSELVALNLEEDVDPLETTGKYLEPAEFKEALLDEDTVVIDARNDYEYDLGHFRGAVRPDIRSFRELPQWIRENKEKFMDKKIVTYCTGGIRCEKFSGWLLKEGFEDVAQLHGGIANYGKNPETRGELWDGKMYVFDDRISVEINHVDKKVIGKDWFDGTPCERYINCANPECNRQILTSEENEHKHLGGCSLECSQHPANRYVKKHNLTEAEVAERLALLEAVEV

SEQ ID NO: 57057 - protein, 1004 aa, Enterococcus faecalis
MKKRVVMTIAGIMGGTFTSSAVALAQTKTSVEERGPVQESTISIPDSEILAEEKEVAATIESTTTTSTIKTTSDSLEKALEATTSETSSTESGSASQSSASQHRKEIETEETSLKAQTTSTVLTGMIGTSQWSLDPTSGELTIGPGVFSDDVSSAFDSISNVKKVTFSGPVKAGKSLKSLFSSWFALLSIERLDYLDTSQVTDMSYMFTNCTGLQTLDVSNFDTSQVTNMSMMFYNCRGLQTLDVSNFETSQVTDMSYMFDACSGLQTLDVSNFETSQVTDMSSMFDACSGLQTLDVSNFDTSQVTNMRGMFFLCTGLQTLDVSNFDTSQVTDMNNMFAGCKALQTLDLSNFNTNQVTDMAGMFSSCDKIQTVNVSNFDTSQVTNMRGMFSHCWELQALDVTKFDTSKVTDMSDMFYGCKELQTLDVSNFDTSQVIYMSDMFGECSGLQTLDVSNFDTSQVIYMSDMFGECRGLQTLDVSNFDTSQVINMSSMFADCRGLQTLDITNFDTSQVTNMSSMFADCRGLQTLDITNFDTSQVTNMSNMFDGCRGLQTLDVSKFDTSKVTGMIYMFRDCSGLQTLDVTKFNTSQVTYMWNMFSGCSGLQTLDLSNFDTSQVTNTDEMFDNCDALKKITLGAKSIFGTKTNTNLPSIADTSLYTGRWIGVNTSNTYSDSNTFMSNYDGSVPDTYVWEKASVLNSTLEPSSVRVHSESEVEWTWKITNSSSKSAENVYSDITLPEGLKIDKNSVKKNNLPVSVDDINGMNNLGTLSSNETVTFTFKTIVSGKPDKWLELMGKVTWEDNGIRTVNSSNKVKIIDEEQKDKGNQTNDLELLSVPVGFRYGILNKSNTPQTIHLNARNYQTHTNVVTDGFYTRLRDDRTKDNGWKLTAQLSDFSDETNSTVLTNSGIALKMENMKIESIKNRDTPQESIDQNPTGTPSTVSTNETLISGQAAKTLINAQANEGHGTWQLRIPFDKVSLTVPANTGEINKNYTATLTWSLDDTP

SEQ ID NO: 57058 - protein, 311 aa, Enterococcus faecalis
MTEVVKIYQLVENLSLEVVYGDEESLNRTIKTGEISRPGLELTGYFNYYSHDRLQLFGSKEITFAERMMPEERLLVMRRLCAKDTPAFIVSRGLEIPEELITAAKENGVSVLRSPISTSRLLGELSSYLDGRLAVRTSVHGVLVDVYGLGVLIQGDSGIGKSETALELIKRGHRLIADDRVDVYQQDELTVVGEPPKILQHLIEIRGIGIIDVMNLFGASAVRGFMQVQLVVYLEAWEKDKKYDRLGSDDAMVEIANVDVPQIRIPVKTGRNVAIIIEVAAMNFRAKTMGYDATKTFEERLTRLIEENSGE

SEQ ID NO: 57059 - protein, 309 aa, Enterococcus faecalis
MSKIVIALGGNALGNSSKEQLAKAQTAAKSIVDLIEQGHQVVIAHGNGPQVGKIRLAFEETSQSPEDVVPFPECTAMSQGYIGYHLQQAIDEELVARNLGEQPVVTLITQVVVDPKDPAFTKPTKPIGGYYDEETAKQLMAETGNVYQEDAGRGWRRVVPSPKPIDIYEKVSLRTLVDAGQIVIACGGGGVPIAYDGPVYHGVDAVIDKDFAAAKMAELIEADVFVVLTAVEHVFVNFGQANQQALTDVTVTAMQQYIEENQFAPGSMLPKVEAAISFAESKPNRQAIIGLLELASEAIKGESGTRITQ

SEQ ID NO: 57060 - protein, 458 aa, Enterococcus faecalis
MEGKKKFSLTSAILSVICVVFVAEAAAPVAAIGNSQFFWWIFLLIAFLLPYGLISSELGTTYIGEGGIYDWVTKAYGHRWGARVSWYYWINYPLWLASLAVMTPELLTTITGIKFSTPMMIIVELIFTWIVVWISFYPVSDSIWILNGAAVIKMVLAVLIGGLGLYVALTKGVANEFTLKSMLPTFDLRSLSFISVIIFNLLGFEVICTFADDMENPKKQIPQAIVAAGLVIAAIYIFSAFGIGVAIPTDQISTGSGMMDSFKLLTGSTEGWFIMLMAFLFLLTLFGNMISWSLGVNNTACYAAENGDMPKFFEKRSKKNDMPIGAALMNGIVASVVIVLAPILPNQDLFWAFFSLNVVLFLLSYIPVFPAFYKLRKIDPDTPRPFKVNGKPGFLKVLVVLPMIMIIISLIFTAVPLDFSPAALNEKLPITIGAIIFILFGEVIIYVKKIKKGTKENG

SEQ ID NO: 57061 - protein, 298 aa, Enterococcus faecalis
MKVKKAVIPAAGLGTRFLPATKAMAKEMLPIVDKPTIQFIVEEALASGIEDILIVTGKAKRPIEDHFDSNVELENNLKEKNKTDLLKLVEETTDVNLHFIRQSHPKGLGHAVLQAKAFVGNEPFVVMLGDDLMEDKVPLTKQLMDDYEQTHASTIAVMKVPHEDTSKYGIINPEKEIEKGLYNVENFVEKPKPEEAPSDLAIIGRYLLTPEIFDVLENQKPGAGNEIQLTDAIDTLNKTQRVFAREFKGERYDVGDKFGFMKTSIEYGLTHPEVKDNLREYIINLGAQLAKKEQPKEK

SEQ ID NO: 57062 - protein, 420 aa, Enterococcus faecalis
MNSAFFEELKARGLVYQVTDEEALQKQLNEESVKLYIGFDPTADSLHIGHLLPILMLRRFQQNGHVPIALVGGGTGMIGDPSFKDAERSLNTLDTVKAWSESIKGQLSRFIDFEDEKNPAILANNYDWLGELSLIDFLRDVGKNFTINYMMSKESVKRRIETGISYTEFAYQLLQAYDFLKLYETEGCLLQLGGSDQWGNITSGIELLRREQEVQGFGLTMPLITKADGTKFGKTEGNAVWLDAEKTSPYEFYQFWINTDDRDVVKFLKYFTFLTLDEIATIEEEFTANPGQRAAQKALAKEVTTLVHGEAAYHQAVKISEALFSGDIQSLTAEEIKQGFKDVPTYEVQPEDQLSLVDLLVTSKIEPSKRQAREDVQNGAIYVNGERRQDLAAELTETDKIEGQFTVIRRGKKKYFLLKY

SEQ ID NO: 57063 - protein, 297 aa, Enterococcus faecalis
MLLGSHVSMSGKKMLLGSAEEAASYGSTTFMIYTGAPQNTRRKPIEEMNIEAGQAFMKEHNLSNIVVHAPYIINLGNTIKTENFGFAVDFLRQEIERAQALGATQITLHPGAHVGAGPEAGIKQIVKGLNEVLWKEQIPQIALETMAGKGTEIGRTFDELAAIIDGVTLNDKLSVTLDTCHINDAGYNVKDDFDGVLVEFDKIIGLDRLKVIHVNDSKNPMGSHKDRHANIGFGTIGFEALNGVVHHEKLTALPKILETPYVGEDKKNKKAPYGFEIAMLKNQTFDPELLEKIQGQN

SEQ ID NO: 57064 - protein, 865 aa, Enterococcus faecalis
MHTKRGELLMQTTEEMQSGDGRRGRLRIFFGFAAGVGKTYGMLTEAHELLMMGKHVVVGYIEPHDRPDTNRLLEGLPQIPPKNIFYKQMVLTEPDIDQIIQQKPEIVLIDELAHSNAEGSRNRKRYQDIDELLNAGIDVFTTVNVQHIESLNDIVEEVTGIEVKETVPDTFLRQATIRVIDVEPDELIERLEQGKIYANENAKRALKNFFIPQKLDQLRGLAIQRASDHINRISGKTIGIQSKLLTVVNDAFPKMTEKCIRWTARLAQGLVVDWTVIQVRTQENTPTNIPLADKLGAEVISIEEDDSFETIVEFAKMTGVTDIIMGKNLRQPWYEKIFIEAFDDRLLKRLKDTELHLIPFNEEKRSLFFKTRKVIEGGGKDLVIAIGGVFLATVVTELMQYIHVGDQNLMLIYISFVLLVARTTSGYFWSSLSSILSVLSFNWFFVEPLYSLTVYKQGYPFTLLLMLVVALMSSNLMIRLKKQADTSMKKEHQMEILYELNKRYVLVESRKQILDISATYLSRLLEREVIIFDRQVKTESVHCINEKKSILNNEDEAAVAFWAAKNQKEAGNGTDTLNGAKGFYLPIAAGRKTLAVLGIERNADLDLENDQLNYLKLVLTQIAVILEQTELKDEKEQVELENEREKVRSNLLRAVSHDLRTPLTVISGIAETLGIGNDLKEETQRKLLKDIQEESQWLIRMVENLLSITRINMDTMKVNKTAEPVEEVIEAVYKHLRKVYPDGQVDIHLPEEVIFIQADPILIEQALFNLIENAFRHGENDLPVKLNVYQEKEQTVFEIENHGEIPLKQFQKIQSNLSGTNEVPVDSKNGLGIGLSIVKTIVHAHNGKMEMTIGRGKTLVRIYLK

SEQ ID NO: 57065 - protein, 108 aa, Enterococcus faecalis
MIERRVSMAITEEQVKHVAKLSKLSFSEEELADFTNQLDKIIDMVELLEEVDTTGVPFTSNVNESINVMREDVATPGMDRKELMRNVPESENGYIKVPAIMDNGEAGA

SEQ ID NO: 57066 - protein, 253 aa, Enterococcus faecalis
MKPVIVKNVRIGEGNPKIVVPIVAPTAEDILAEATASQTLDCDLVEWRLDYYENVADFSDVCNLSQQVMERLGQKPLLLTFRTQKEGGEMAFSEENYFALYHELVKKGALDLLDIELFANPLAADTLIHEAKKAGIKIVLCNHDFQKTPSQEEIVARLRQMQMRQADICKIAVMPQDATDVLTLLSATNEMYTHYASVPIVTMSMGQLGMISRVTGQLFGSALTFGSAQQASAPGQLSVQVLRNYLKTFEQNK

SEQ ID NO: 57067 - protein, 676 aa, Enterococcus faecalis
MKKIYQWAVGQSFKKLDPRQQVKNPVMFVVYLGALITTILCFYPMGIPLWFNISITIFLWLTLLFANFAEAVAEGRGKAQADSLKQAKKEVMTYKINSLEDIKEENFIELQSSDLKRNDLVYVRAGEQIPADGDVIEGAASVDESAITGESAPVIRESGGDRSAVTGGTTVVSDYLVIRVTSENGQSFLDKMIAMVEGTQRKKTPNEIGLQIFLITLTIIFLTVSITLVPFTDFSSQLSGKGEALSLVIVIALLICLAPTTIGALISSIGIAGMSRLTKENVIAMSGRAIEAAGDVDVLLLDKTGTITLGNRRASDFLPVHGVSEEQLADAAQLSSLADETAEGRSIVILAKERFNLREREFQQSEVKFIDFSAKTRMSGIDYRGDVIRKGAADTMKKYVQSKGEDYPSECDKIVDKIARAGGTPLVVIKNNRVMGVVYLKDIVKNGVKEKFADMRKMGIKTIMITGDNPLTAAAIAAEAGVDDFLAEATPENKMNLIREYQEKGHLVAMTGDGTNDAPALAQADVAMAMNTGTQAAKEAGNMIDLDSSPTKLLQVVQIGKQLLMTRGALTTFSIANDIAKYFAVIPVLFYSIYPQLDRLNIMGLGSPLTAILSAVIYNAVVIVALIPLALKGVRYQEKPASQILSHNLLIYGLGGIIAPFIFIKIIDLILSLIIL

SEQ ID NO: 57068 - protein, 752 aa, Enterococcus faecalis
MTQKHALVQGMNPRQEEAVLHTEGPLLVMAGAGSGKTRVLTHRIAYLIEEKEVNPWNILAITFTNKAAKEMKERVNKLLETGGEDVWVSTFHSMCVRILRRDVDQIGYNRNFTIIDPSEQKTLMKRILNDLNIDSKKYDPRSILGTISNAKNELQTPEKVAEMQGSLYEEIVAKCYEAYQKELRKNQCMDFDDLIMNTIRLFNEQPDTLAFYQNKFHYIHVDEYQDTNHAQYTLVNLLAARFKNLCVVGDADQSIYGWRGADMQNILDFEKDYPDASVILLEQNYRSTKNILAAANDVIKNNRNRREKELWTENIDGEKIVYYRGDTERDETQFIVSQIQKEMRENDRIYGDFAVLYRTNAQSRVVEEMLLKSNIPYTMVGGHKFYDRKEIKDILAYLSLIANPDDSISFERIVNEPKRGIGKSSIEKLRLFADTHGWALLEAAQNVDLANISGKAGKELGNFGMMIQDLTKTVPYLTITELVKETLQRSGYREALMAQNNLESQARLENLDEFLSVTQEFDKRFEAQNNDDPNGEETKLADFLTDLALVSDLDNLEESSSQVTLMTLHAAKGLEFPVVFLMGLEEGVFPLSRAMLEESELEEERRLAYVGITRAEEALFLTNAYSRTLYGRTQYNRPSRFLEEIEAERLMKQGAAANLQKAPARTFDPKVFKPSASKPAYTQPATKSVSNKVASGGEKVSWQAGDKVQHKAWGVGTVVRVGGSAKDLELDIAFPEKGIKRLLAAFAPIEKI

SEQ ID NO: 57069 - protein, 305 aa, Enterococcus faecalis
MIYTVTLNPSIDFIVHVDHLQIGDLNRMTNDFKLPGGKGINVSRILKRMETESTALGFLGGFTGSFIADWLKKEEIQTNFTPVSADTRINIKLKSDTETEINGLGPALTNEEIQELKQAVSRVQAGDIVVLSGSTPASLRKGFYEELIQIVKEKGAEFVIDTTGEDLMNALSQKPLLVKPNNHELAELYHTTFTSIEDILPYGHRLLEEGAQHVIISMAGDGALLFTTEGVYRSNVLKRPLKNSVGAGDSMIAGFIGNFSKTQDPLEAFKWGVACGSATAFSDDLASEDFIQELIHEVTIEKISE

SEQ ID NO: 57070 - protein, 640 aa, Enterococcus faecalis
MNINDLLIKDVMIMDLQATDKKGAIDEMVQKLYDGGRISDIDTYKEGILKREAQTSTGLGDGIAMPHAKNSAVKEPTVLFAKSKKGVDYEALDGQPTYLFFMIAAPEGANDTHLQALAALSRLLIDPEFVGKLKEAETPEAVQALFQAAEDQKEAEEKAEQEQTTPAPESNRKYIIAVTACPTGIAHTYMAEDALKKKAKEMGVDIKVETNGSEGIKNRLTAEDIARADGVIVAADKKVEMNRFDGKKLVNRPVSDGIRKTEELINLAISGEAPTFHGSDSAASDQEDSAEGSIGSRIYKDLMNGVSHMLPFVIGGGIAIALSFMIDQFIGVPQDQLANLGNYNDVASWFNQIGGAAFGFMLPVLAGFIASSIGDRPGLVAGFAAGALANAGGAGFLGALIGGFLAGYVVVLLRKVFKGLPKSLDGIKTILFYPVFGLIITGLLMLVINIPMKAINDALNHFLLGLDGTNAALLGALLAGMMAIDLGGPVNKAAYVFGTATLASTVAEGGSVVMASVMAGGMVPPLAIFVATRLFKNKFTKDQQDAGLTNIVMGLSFVTEGAIPFAAADPLRVIPSFVVGSAFTGALVGAFGIKLLAPHGGIFVVFLLSNPLLYLLFILIGAIISGIVYGLLKKPVEVPA

SEQ ID NO: 57071 - protein, 527 aa, Enterococcus faecalis
MREKLLIGSFWLSFFNIVCKILGFIYLIPWLKFMGTIHNQQTAQAIYNVAYLPYALFLSLGTAGFPSGIAKKIAELNINGNKNQIKELFKSGLIVMEIIGILSALLMFIFAPTLSKISPIVDHTAGITAIRSLCFSLLIIPILSALRGYFQGLNYSFPFGVSQLLEQLVRVVCILVGTYLIRVQFNGSILSAVILSTFASSIGGIVAFLYLLFIGKKRNLFQLKDFYFLPLKSISHMKGLAIDIIKESLPFVYVGSAISILQLIDQFSLKVLYSLFFPQSSLSELQTLYTLASANPNKLAPVLLGIIGSITISALPLISTVKSKPELLQGTSQILRLAFTFLLPTSIGMIILCNPLNTLFFGFNLDGSRYLSATIISTSLLGIFTIVLSILQALSFHKKAMQITSITLLLKLIIQIPCIYLFKGYGLSIATIICTMFTTIIAYRFLSRKFDINPIKYNRKYYSRLVYSTIVMTILSLLMLKIISSVYKFESTLQLFFLISLIGCLGGVVFSVTLFRNKFISKLGKLF

SEQ ID NO: 57072 - protein, 435 aa, Enterococcus faecalis
MVYFPKIEKIKYEGTNTKNMYAFRHYNSEEIIMGKTMKEHLRFAVAYWHTMTQDGSDPFGKAVNKRSWLGESPMETAKKRVIAFFEILEKLDVEYFCFHDIDIAPEGNSLKEFFSNIDEITDLIKEKMDETGIKLLWNTANMFSNPRYVNGAASTNNANVYAIAAAQVKKGLDVSKKLGGENYVFWGGREGYETLLNTDMKFEQDNIARLFKMAIFYGEKIGHKPQFLIEPKPKEPSKHQYDFDAATTMAFILKYGLEKDFKLNLEANHATLAGHTFEHELNVARNYGALGSIDANQGDVLLGWDTDEFPTNVYDVTLAMYEILENGGIEPGGINFDSKVRRSSFEMEDLLLAHIAGMDTFARGLKSAMKLKEDRFFEDLKEQRYSSFKKGIGAKIISGKENLESLTNYALKNDEPIIESSHIEYVKNILNDYLY

SEQ ID NO: 57073 - protein, 427 aa, Enterococcus faecalis
MKTLIKNGKIIKKENQLIEAALWLENGVIHAIGESFDEADFEQVFDANGQLITPGLVDVHVHFREPGFTYKETIKTGSKAAARGGFTTVCAMPNLNPVPDTAEKLSEVYDLIQKDAVVKVLQYAPITEELRSEVLTNQKALKEAGAFAFTNDGVGVQTAGTMYLAMKEAAALNMALVAHTEDESLLFGGVMHEGEVSKKLGLPGILSATEASQIARDITLAKETGVHYHVCHVSTEESVRVIRDAKKAGIHVTAEVSPHHLILVDEDIPGDEGFWKMNPPLRGLADRQALIDGLLDGTIDCIATDHAPHGLEEKQQSFLNAPFGIVGSETAFQLIYTNFVETGIFTLEQVIDWMAVKPAEIFGLNAGTLTIGAPADIAVFDLATAAPIDAEAFESMAVNTPFTGWTVKGKTLMTFVDGALAWSEEAQ

SEQ ID NO: 57074 - protein, 359 aa, Enterococcus faecalis
MKRLLILEDGTVFEGKAFGAEGNVVGEVVFTTGMTGYQEAITDQSFNGQMITFTYPLVGNYGVNRDDYESIAPTCKGVIVKEHARVASNWRQQMTLDEFLKRKGIPGISGIDTRALTRKLRSAGTMKGSIIDAVDDLPHAFDQLKATVMPKNQVAQVSTTKPYPSPGIGRNVVVVDFGLKHSILRELSKRQCNLTVLPYNTTAEEILELSPDGVMLTNGPGDPKDVPEAIEMIQAIQGKVPIFGICLGHQLFSLANGADTYKMKFGHRGLNHPVREIATGRIDFTSQNHGYAVDEATIDPEKLLVTHVEVNDGTVEGVRHRDYPAFTVQYHPDAAPGPHDGLHLFDEFMELMDAWKEQN

SEQ ID NO: 57075 - protein, 1060 aa, Enterococcus faecalis
MPKRTDIKKIMVIGSGPIIIGQAAEFDYAGTQACLALKEEGYEVVLVNSNPATIMTDKEIADHVYIEPITLEFVSRILRKERPDALLPTLGGQTGLNMAMELSESGILDELNVELLGTKLSAIDQAEDRDLFKQLMEELEQPIPESEIVNTVEQAVAFAKRIGYPIIVRPAFTLGGTGGGMCDTEEELRQIAENGLKLSPVTQCLIEKSIAGFKEIEYEVMRDSADNAIVVCNMENFDPVGIHTGDSIVFAPSQTLSDYEYQMLRDASLKIIRALKIEGGCNVQLALDPHSFNYYVIEVNPRVSRSSALASKATGYPIAKLAAKIAVGLTLDEMKNPVTGTTYAEFEPALDYVVSKIPRWPFDKFEKGARELGTQMKATGEVMAIGRNIEESLLKAVRSLEIGAYHNELAELSHVSDLELTKKMVHAQDDRLFYLSEAIRRGYSIEELQSLTKIDLFFLDKLLHIIEIETALESHVDNVAVLKEAKQNGFSDRKIAALWGQTEQAIADFRRANQIVPVYKMVDTCAAEFESHTPYFYSTYEVENESNVSKKPSVLVLGSGPIRIGQGVEFDYATVHSVKAIQAAGYEAIIMNSNPETVSTDFSVSDKLYFEPLTLEDVMNVIDLENPIGVIVQFGGQTAINLAEPLTKQGVKILGTTIEDLDRAENRDLFEQALQELAIPQPPGDTATSAEEAVVIADRIGYPVLVRPSYVLGGRAMEIVENQKDLEDYMRHAVKASPEHPVLVDSYLLGQECEVDAICDGETVLIPGIMEHIERAGVHSGDSMAVYPPQYLSQEIQATIADYTKKLALGLNCVGMMNIQFVIHENRVYVIEVNPRASRTVPFLSKITGIPMAQVATKAILGEKLTDLGYQDGLYPESKQVHVKAPVFSFTKLQKVDTYLGPEMKSTGEVMGSDYYLEKALYKAFEASGLHLPSYGAVLFTIADETKEEALEIAKRFSAIGYSLVATEGTADFLAKHQLPVKKVTKISNPEGETVLDVIRNGNAQVVISTMDKNRSSANQDGFSIRREAVEHGIPLFTSLDTANAILKVLESRAFTTEAI

SEQ ID NO: 57076 - protein, 524 aa, Enterococcus faecalis
MTINQKEAVDSRRTFAIISHPDAGKTTITEQLLLFGGAIRQAGTVKGKKTGNFAKSDWMEIEKQRGISVTSSVMQFDYQDKRINILDTPGHEDFSEDTYRTLMAVDSAVMVIDSAKGIEAQTKKLFQVVKKRGIPIFTFINKLDRDGREPLELLEELEELLDIESYPMNWPIGMGKGLEGLYDIYNERVELYRPENNGGERFIPLKDGDIPSDLPLHNNSVYQQVLEDVELLVEAGDEFSEEKIARGDQTPVFFGSALTNFGVQTFLETFLQFAPAPHAHKTEEGGEVSPYEKEFSGFVFKIQANMNPAHRDRIAFVRICSGVFERGMDVTLGRTGKKVKLSNVTQFMADARENVTEAVAGDIIGVYDTGNYQIGDTLYEGKMNVQYEELPSFTPELFMKVTAKNVMKQKSFHKGIYQLVQEGAIQLYKTYLTEEYIIGAVGQLQFEVFQYRMSNEYNAEVVMTPMGSKIARWINPEDLDERMSSSRNILARDRFDQPLFLFENQFAERWFADKYPDVELKSLM

SEQ ID NO: 57077 - protein, 459 aa, Enterococcus faecalis
MNNADPESQSLIAQLLLLVVLTFINAFLAAAEIAVVSVNKNRVEQKAEDGDAKAQKLLKVLQDPNNFLSTIQVGITLVNILSGASLAETLSSRLAPVLGGGAAAKSLASIIILALLTYVSIVFGELYPKRIAMNKSEEVAQLTSGAVRFLGVIARPFVWLLSASTDLLSKITPMTFDDADSKMTRDEMRYMLETEGVLENEELEMLQGVFSLDTKVAREVMVPRTDAFMVDIQDDVQENINLILGENYSRIPVYSEDKDKIVGILHTKTLLKAARNLGFENIELGAIIQEPLFVPETIFIDDLLYELKRTQNQMAILLDEYGGVVGLATLEDLLEEIVGEIDDETDEVENLYTQVADNEYLVQGRMLIDEFNEVFETDLHMSDVDTMAGYLITALGTIPDEGEKPSFEVGNIKLTAEEMEGTRLLVLRVHFYDEETVDEEPEENRRFFRKEMEDDEPRR

SEQ ID NO: 57078 - protein, 210 aa, Enterococcus faecalis
MTKVAKKIAKDLLDIEAVFLNPNEPFTWASGIKSPIYCDNRITMSYPAVRKEIAEGLAAKIKETFPEVEVIAGTATAGIPHAAWVADILGLPMVYIRSKAKDHGKGNQIEGRISEGQKMVVIEDLISTGGSVLEAAEAAEREGATVLGVAAIFTYELPKGTANFADKQMTLLTLTNYSTLIDAALEANYIEEKDVTLLQEWKKDPENWGK

SEQ ID NO: 57079 - protein, 377 aa, Enterococcus faecalis
MENKEVIIIGAGAAGVGMGVALKDFGINNFAILERKQVGNSFIKWPEQTRFITPSFTSNGFGMPDLNAIAIDTSPSYTLGEERLSGKDYAKYLQLVSEEYKLPIKTNCKVQSIKKEKTGYLLETTKGFIYAEYVIFAMGEFSFPNKSSIKGAYKNSLHYGEINSWIEIKGDKQTIIGGNESAIDAAIELAKLGKRVTIYTDTLGLNIRDADPSKRLAPRTRQRFFDLRVNQKKLDSIKIYTTTKVKKIEKKSTSYILITENGKSLPVENIPILCTGFKNGTKSITASLFKYKENGEVLLNDFDESTIAKNIFLTGPNVRKGNTIFCYIYKFRQRFAVIANEIARRKHITIDEKKLSYYKNQSFYLDGCSGCEVRCSC

SEQ ID NO: 57080 - protein, 233 aa, Enterococcus faecalis
MQIIRVANAEEGGKKAFELIKEGMNNGAKVLGLATGSTPETLYKEMTASDVDFTEMTSVNLDEYVGLGGEDEQSYRYFMNKHLFDKKPFKETFVPNGKAEDLDAASAEYEKIIDAHPVDIQILGIGQNGHIGFNEPGTPLDSLTHVVELTESTINANKRYFDKVEDVPTRAVSMGIGSIMKGKKMILMAYGEAKAEAIKGMIDGPVTTDMPASALQNHQDVVVIIDDAAASKL

SEQ ID NO: 57081 - protein, 259 aa, Enterococcus faecalis
MEFQLDKDWRLQPIKGATGQTYMGIKETEKVFIKRNTSPLLAALSKEGLAPKMIWTKRTANGDVLTAQEWLEGRLLHADEIGKRNDVIDVLYQLHHSNLLKDMLKKIGGEVCTPLTMLKEYKRQLPKELKRNSYLKEVITYLYNHLPEYPETSYVAVHGDVNHRNWLVSNNYLYLVDWDSVMVADPAVDLGMILSHYVPRSGWNQWLLSYGLIPNESTVQRIYWYGLFSFLQEIVRHHQEGERRAMTAEILQLKRMFSI

SEQ ID NO: 57082 - protein, 272 aa, Enterococcus faecalis
MNYIYLINEHYPLLTKSERKVADFILNSGESIIYSTMNDIKTKANVGDATIIRFCQKLGFSGFSDLKIEIAKEDFSKKKEQPSSGKYHDEVAKSLIEVLQSTSCLINEEKLTKAIQLINQASSLYIFGVGSSGNTSLDLESMFLRVGIQAKAVLDPHYQAQVASLLTDRDLVIIFSLSGKTKDTYDSLKIAKNNGAKILAITNYIHSPIGKSADLVLQTAIEEFLNGGSLAGKISQLYICDLLVHEYEQNNKINSLDLREKVLRSIIDKRIE

SEQ ID NO: 57083 - protein, 112 aa, Enterococcus faecalis
MEMEKTNRMNALFEFYSTLLTEKQMNYMELYYADDFSLGEIAEEYEVSRQAVYDNIKRTEKILEEYEKKLHLYSNYVVRKEFLEQLQQYVQETYPKDSEIKKYIEQIQEIEE

SEQ ID NO: 57084 - protein, 250 aa, Enterococcus faecalis
MEYTIKKMASLSGVSARTLRYYDEIGLLQPARINSSGYRIYGQAEVNRLQQILFYRELDLKLDEIKEILEQPDFNVEQALYEHQQKLLEKRNEIDRLLASVQQTLHHYKGEINMSDQQKFEAFKQQKVQENEEKYGKEIREKYGNETIEQANKKYLNLTEKDMQAMQNVEKDLFSKLAMYQKSPKLTSQLAQEIFQLHKDWLMYSWSSYSPEAHKGLGLMYVGDERFTSYYEQHGAGFAEALNAIIQNYA

SEQ ID NO: 57085 - protein, 314 aa, Enterococcus faecalis
MKKLRELTVEELFESFVLIKNADVRVAKNGKKFIAFTFQDTSGTIDGKYWDASEDEITRFTAGNVVLLNGKREVYQNKPQVKILHMRLATAEEPSQPSLYMERAPLKKEEMVEEINQVIFEITNAHWNRIVRYLMTKYQQEFYEFPAAKRNHHAFANGLAYHTVSMLRLGKAIAKEYTEINTSLLYAGIILHDLGKVLELSGAITTEYTVAGNLIGHLVLVDEEITKACLALKIDDREEDVVVLRHMVLAHHGLLEYGSPVRPRIMEAEILHQIDTMDASIQMMLGAIRQTQPGEYTERIFGLDNRSFYVPKDK

SEQ ID NO: 57086 - protein, 903 aa, Enterococcus faecalis
MKLLAVEIVGFGKWQQQKITFESGNQLLYGANEVGKSTLYQFIQAMLFGFPTKGKRKRDYAPKNGGSYGGRLWLAHPVFGEVQVERFKEKNKGQAIIYYQQQMGDEKTLQQMLHPLTKKLFQEVFTFQQEQLITSDKLTEEELQTSLLAIGVSGSQQLLTYRNAYFKEAQKIFKGKGQQPLLNQKLAAYQELKEQIQEKEAQQQTFQQLEETIRETEQQRVTLQQQLKETQQDLLQVAEQQRHFPLYEEWQSLPEETENVVLVKEDQVQLEETFQEYMYLDKERQRLTKELSLQSEALDVPEGYAFYLEQEALIQQLLNQRYDMQQLMTESEWMTQTFEQNRQEMVLLENEWSWSPERPPQLFYDNETVQKWRQQQVAYTQALQKGQEQKAFLASQIENLEDQLTDFEKAHAAFFGEATRAQKAQKTSQPLWLLLGSILVLLGFFLPSPLKWGLVLVGVSFIAKEVLSYATRKEASSDEVKEEWQTKLSQLDYLNEQFQQALNQEREAQLQVEQLEQAVAEQAQVHQLGKMQQIDTLMNQRELITRYLLLVQTNEELMSQLKENQQKRQVFEEQIFPLMTHLPLQGKSLSEKLHFLEGFAEEMEKVRFAQEYQADGYLKQQLRELKTKQQEALTRIQPLLIRYRILSIADVPSRIQQLTTQQAQVGRGQELATQLGNLFPEAVTEATLKDRSLQLAQQQALEESQLDKIQEQYQALIYEKQQLMTDGTLDELYQRQAILKAEIKELAQRWSGYQLAGQLLMDLLTELSEQQLPSLLQYASSYFALLTNQRYQSIQVAEGQLVAVTKEQEMFYLHELSTGTKDQLMMAVRFAFLAVQGEQLICPIIIDDGWLHYDHQRKAQLAELFTKFGQKQQVICFSSDQEMVSYYQDLQQRVIALEGGSVK

SEQ ID NO: 57087 - protein, 411 aa, Enterococcus faecalis
MKLLHTADLHMDRSFEGLTGIPTALAKRLREANQQLLMNIVTVAIREAVDLVIFAGDTFHQSQTSISMQAQLMAALEQLKQAEIPVILTFGNHDYYKKDRYWFSFPDNVFLFEKEMVETLYFETKAGEQVAVSGFSYEHPWIDENKALEFPIKQAESDIHIGIYHGDTSRKAQQNYAPFTWKDLKATGYNYWALGHIHQPQIVSEQPLIVYPGTPQGHTKKEQSLQGVAVVTLSQNQATVQFEKVAEIDWTNEEVSLAQCRDTQSVLSYLETSLLTKWQAHQQQQLMALTLKETQHLDVTVVQAIVNGELLSYLQQQLLQKTQGDFFVYRLILQAEEPTKEPIYLAASPNLLTALEKTYLDPVIFEDTTKELLRYPEFAGIFSMDEQWRLESLRLAHEQINEDFTIQEDPL

SEQ ID NO: 57088 - protein, 770 aa, Enterococcus faecalis
MKKSNYQWQLQTKTELPVEFIEQLKKEEINPLIGQLLWHRNIRTEEALRKFLHPTIEDIYDPFLMHDMEKAVARIQQAVEAGEQILVYGDYDADGITSTTVMKEAIELVGGMVQYFLPNRFVHGYGPNKDVFAEQIEQGVQLIVTVDNGVAGHEAINYAMAQGVDVIVTDHHELPEQLPEAYAIVHPRHPQGDYPFGDLAGVGVAFKVATALLGELPIELLDLVAIGTIADLVSLTDENRTFVKMGLQMIQTGDRIGLDVLLQEAGVKKEAVSEESIGFTIGPRLNALGRLGEAAPGVELMTTFDEEQALEIAKYIDQQNNERKDIVTTIAKEALDLFDPNAPVHILAKQGWHEGVLGIVAGRIMQETGKPTIILAIDESGTTAKGSGRSISALNLYEALNEVREQFTHFGGHHMAAGMTLPVENIPFVQEHLAHFIEKNQIDMANGQELLISESLAVSQATTTFIDQLRILAPFGTDNTVPTFVFKEITPTQIRQIGADNAHLKFQMNQEGAQLDAIAFQMGPQADELAQGTADVAGQLSINEWNGRKKPQLMVTDFAVLGRQLFDFRGKNNQTKPIPSEATAYLLFDEKNQKFISDPTANIIVWSNQEELVEAVSQNQIEQLVFVDCPVEAITVKEIVEATEIQRIYMMFISPEEAYLNGMASREQFATLYKFILQQKEVNLRSQLSKVANYLNIQEKLLIFMIQVFFDLGFVTIESGVLNSIEKPDNRPLTESQVYQQRLKKIKTEEFLLYSDCQTIQQWLWNEEDK

SEQ ID NO: 57089 - protein, 217 aa, Enterococcus faecalis
MEKTHFSKKYLIVNEVLNAVTHGIGAGLSIAGLVILLVKGARLGSPIHVVSYAIYGSMLILLFLSSTLFHSLIFTRAKKVFQVFDHSSIFLLIAGSYTPFCLISIGGWLGWTLFSLVWLIAIVGIVYKSLTLHKQETVKNISTIIYIVLGWLCIIAARPLYESLGFTGTALLVAGGVSYTLGAAFYSLKNVRFMHVVWHLFVMLAAILMYFSVLFYT

SEQ ID NO: 57090 - protein, 324 aa, Enterococcus faecalis
MCTAITYVSKDHYFGRNFDYEISYNEVVTITPRNYKFSFREVGNLDHHFAIIGIAAGIADYPLYYDAINEKGLGMAGLNFSGYADYKKIEEGKENVSPFEFIPWVLGQCSTVDEAKKLLKNLNLVNINFSDELPLSPLHWLLADKEQSIVVESTKEGLRVFDNPVGVLTNNPTFDYQLFNLNNYRVLSTRTPKNNFSDQIELDIYSRGMGGIGLPGDLSSVSRFVKATFTKLNSVSRSSEYESISQFFHILSSVEQQKGLCDVGDEKYEYTIYSSCCNLEKGIYYYRTYDNSQITAVDMNKENLEKDSLIVYPMVETQQINYAN

SEQ ID NO: 57091 - protein, 505 aa, Enterococcus faecalis
MQALIETFFARKEEYLQALIEHMQLSFISLLFAALIAIPLAIYLTSHRKLAESLLQVTGIFQTIPSLALLGLLIPLIGIGRPPAIVALVIYALFPILQNTYTGLTEIDPSLEEAAEAFGMSKKEKLFKFELQMALPFIISGIRTATVLIIGTATLAALIGAGGLGTFILLGIDRNNLSLIFIGALSSAALAVLFNYGIHWLEKANGRRLIIGGTILGLLLGGSFFWNQQTSSKEKQLTIAGKLGAEPDIIINMYKALIEENSDIQVTLKPNFGKTTFLYNALKSDEIDLYPEFTGTVIETFLKNPPQLDNQPQVVYEAARAGLKKQENLTLLKPMRYENTYAVAVKRSFAKAHQLKTISDLQKISNQLKAGFTLEFIDRQDGYKGLQEKYHLNLNVQSMEPALRYQAINNGEVNVIDAYSTDSELRQYDLVTLEDDQALFPPYQGAPLIKTATLEKYPELAEILNKLAGKISEEEMSEMNYQVNVEGQDPSIVAKDYLKEKNLLK

SEQ ID NO: 57092 - protein, 471 aa, Enterococcus faecalis
MTIDWTKEVEARKDDLLEDLQNLLRINSERDDAQATPEAPFGPGPVAGLKHMLAYGERDGFTVKNVDNYAGHIEYGEGDETLGIFGHMDVVPAGDGWETDPYEPVIKDGKIYARGASDDKGPSMAAYYAMKIIKELGLPVSKKIRFVVGSDEESGWGDMDYYFQHEEAPDFGFSPDAEFPIINGEKGNVTIRLTFRGGNGADYKLESFKSGLRENMVPGTADAVVTAASADEAASLAASFETFIKQEAKISGNAELSDKTVTFHVVGKGAHGASPQSGINAATFLATFLNDYSFAEGAYSFINTIAEFIHEDFYGEKLGVAFEDEKMGKLTMNAGIVNFDPENPENSLVTLNFRYPKGTSAEELQAKVQTTVGETVTATQGDRNQEPHYVPVDDPLVATLLQVYEDHTGEKGQEQIIGGGTYGRLLKRGVAYGAMFPGYTDTMHQANEFMELDDLFRAAAIYADAIYRLAK

SEQ ID NO: 57093 - protein, 549 aa, Enterococcus faecalis
MINQPNSVDQPILTNQEKMVKGSAWMTASNIISRMLGAIYIIPWYAWMGEHGNEANSLFSMGYTIYALFLMISTAGIPGAIAKQTSHYNSLNEYKISRQLFYRALQLMGGLGVVFAIVMYLASPALAALSGGGPELVPTMRSLSLAVLVFPSMSVIRGYFQGNQEMMPFALSQIVEQVARVFYMLLTAFIIMKVFEGNYVTAVTQATFAAFIGMLASFAVLGYYMYKQKPLFDYLEEHSANEHEIAPKELLIETFKEAIPFIVVGSGVTVFKLVDQFTFSNFMRLFTDYSDTQLRELFGIFNANPDKLTMIVVALATSISATGLPLITEAVTLKNHRELARLISNNLQLFVFVMLPATFGMIVLAQPLYTVFYMPDALGTSLLVQACYASLFLGLYMLVSNMLMGMYENRDAMRYLGIGLAVKLIVQFPAIRLFEVYGPLLATMIGFTVSCVLILRRIRQVTRFNYKLTLRRTLLMFCITVIMMIIALIFRQFLYLFLDPTRRFQAFIIVVIVAAAGGAFYGYSVLKIRLADRLLGKNAAKLRAKFNIK

SEQ ID NO: 57094 - protein, 184 aa, Enterococcus faecalis
MKKKRDYVGYLMYFLKILVPAIVAVFILRGFFLIPVRVDGHSMQKTLNQGDMIVMEKFSAIKRFDVVVFKTDTGSILIKRVIGLPGEAVRYENDQLYVNNQPIAEPYLTKNRKKDHETMPYTTNFDSKELLMQEKLPKDSYFVLGDNRRMSKDSRSFGAIHADQILGKAQFVYYPLTHMKIIPK

SEQ ID NO: 57095 - protein, 199 aa, Enterococcus faecalis
MKSIKTILLGTTLAAGLGLFLGTDANAESLYTVKAGDTLSTISHQFAGDNSLIQKIASDNKLPNLDLIFEGEQLVIRSEKEVANTPAPAVEVAPVQQVVEQPVAQPVQQEVQQPVAQEVAQPAAPAASSDAKEWIAQRESSGSYDATNGQYIGRYQLSASYLNGDYSPANQERVADQYVAGRYGSWDAAKSFWLANGWY

SEQ ID NO: 57096 - protein, 278 aa, Enterococcus faecalis
MLTLAVRAHDVGTKISPVELAKKIAETNITSIQFALGISYPEYASAAVLSPGLGSQLKNIFEDEKITISVLSCYINLIHPDLEEREKRLHQFETYIRYDSMFGAKIVATETGSIYETIYYTEDNYTEEAYEEVLFSVRRLCREAEKYGIIVGIEPGINHPIHTIEKMQRLIDEVASTNLGIILDPTNLIRVDIDKTYLEIVEEAFECFGEKIVAFHLKDFIIRNQQIFPVAIGEGQVPLTETIQFLNKHKPGLFTIFEETPFEKIASAYQKVSQYHSI

SEQ ID NO: 57097 - protein, 103 aa, Enterococcus faecalis
MIKKAFCMQVYPDQHAEYQRRHEKLWPEMRQMLKEHGAIKYQIFLNPETSTLFGYLEIEDEARWEQIALTPINQKWWNYMEDIMETNPDCSPMTAELKKVFEL

SEQ ID NO: 57098 - protein, 428 aa, Enterococcus faecalis
MTTITQKYEEAKEKYASIDVDTEAVLEKMADVKISMHVWQGDDVRGFLSEDELSGGISVTGNYPGVARSPQQLRQDLEKAFSLIPGKHKLNLHAIYLDTEERVDLNELEPKHFEPWVTWAKENGLGLDFNPTFFSHPMYRDGFTLAHPNPQVRDFWIEHGKRSRRIAEYFGRELGQVAVNNFWVPDGFKDNPVDRLTPRKRLMASLDEIFSEEIDPAYTVDAMESKLFGIGSEAYTVGSHEFYMGYGLTRNKLICLDAGHFHPTEVISNKLSSLSLFGEGMLLHVSRPVRWDSDHVVIMDDELQEIAKELVRNDLLGKTHVGLDFFDATINRVAAWVIGTRNTQKALMKAMLEPTNVLKEAELIGDFTTRLALTEELKDFPFADIWNYYCQENHVPIGLDWLTDVQEYEKVILPTRQLPTGKDSCRFS

SEQ ID NO: 57099 - protein, 290 aa, Enterococcus faecalis
MDYWEKADYSWSDDSKRHILTPSSKSRTLFYYIQEIGQFKASRPYYTERAHLPSYLIKFTLNGTGELRYRYHTYSLQRGDLFFIDCRDYQYYQATSEDPWEMDWIHFEGGNSGAFFQEFMKNGSPVFSTNQLPEDNPIHLIIQQLLQLQDLQHAQTDYQSSVLIHQLLNELLLQKYRQDFTYETIPSLVLEMKAYIDQHFKETISLEDLAQLFHLNKYQLNKEFSKYIGLPPIKYQISKKISYSKDLLRYSNQTVKEIAVDVGLENYAYFSRLFKKRTGLTPSQYRKSGF

SEQ ID NO: 57100 - protein, 138 aa, Enterococcus faecalis
MIKTSAVGRLTKSSELRVTSTGKAVANFALACKRERLDKEGNAQTTFIQCVIWGKPAEVLAKYTQKGSLIAVNGELQSRSYDDQQGQTHYVTELVVAGFEFLESKETVQNREQKQQMPEMANAEPFYGMDDMEPPAYH

SEQ ID NO: 57101 - protein, 200 aa, Enterococcus faecalis
MHSIFKKGHPEAPVFVLLHGTGGDETSLLPIAQELNKQATVLSIRGDVSENGMNRYFKRLAEGHYDLEDLEKRGEALHKFIQQAANEHQFSLDKIIFIGYSNGANIAIQLLLTHPDSYHQAVLYHPMFPVELTNQPDLTDTSVLLSLGEHDPIVPLPESMRVIQLFQNHGATVQEVWTQSHQLTYQEIKETQTWLAHLSS

SEQ ID NO: 57102 - protein, 142 aa, Enterococcus faecalis
MNQQQEALKAYIGLLRTSHRLEQLAKQDVTCYDLNITEFSVLELLLHKGPQTIQKIKEKILIASSSTTYVIDQLHKKGYVTRTPSEKDRRITYVELTEAGKTLIEEIFPTHAKRIAEAFEQLSSEELTLLQKTLRKITNETK

SEQ ID NO: 57103 - protein, 281 aa, Enterococcus faecalis
MVQALPSNIGIQQVTLKVADLDKMVNFYTKTIGLKLLKQGEGRAWLAPQGTNDAILVLKELTAGEENQGTTGLYHIAFLLPTRKDLGNMLLWLLQENVQIGAADHGYSEALYLSDPENNGIEIYWDKPEEVWDIRPNGEIIGVTEELDGDSLAAEADGHWLGISEGSKIGHIHLKVADLDATETFYKNLGFGLKSNFGQQAKFFAAGQYHHHIGTNTWSGKQLPTIQENQFGLENYTFRLPTAADLEIVQANAEEAKLHFIAKDHLLALEDPSGMIIQFTY

SEQ ID NO: 57104 - protein, 469 aa, Enterococcus faecalis
MAEQTDLLILGGGTGGYVAAIRAAQKGLNVTIVEKYKLGGTCLHKGCIPTKALLRSAEVFDTLKQAASFGIETEAASIDFSKIQQRKEGIIEQLHKGVEGLCKKNKIKILAGEGAILGPSIFSPVSGAVAVTFNDPTREEEIIVPKNVIIATGSSSKTLPNLPLDEEFILSSDGMLELEELPESIAIIGGGVIGVEWASLLNSLGVNVTIIEFLDRLLINESATISKELKKRLEQRGINILLGSKVQEAKVTGQKVQVEVAGQETLTVDKVMVAIGRQPNINKLGLQNTSVKYTDKGIEVNEFYQTTEGHIYAIGDCIDTLQLAHVAMKEGELAVQHLLGETVEPLNYTNVPRGVYTNPEIASVGYTRETLPAEKEVVIGTFNFNGNGKSLVYGETDGFIEVIRDKKTDDLLGVSMIGPHVTDLIAEASTAMYLDAAPIEIGEAIHAHPTMTEVLQEAALDTYGLAIHK

SEQ ID NO: 57105 - protein, 335 aa, Enterococcus faecalis
MKKRKVLFTAVMVLAGLQLLSGCGKTEASANDTVVLRYAYASNSQPVIDSMKKFGELVEEKTDGKVQIEYFPDGQLGGETELIELTQTGAIDFAKVSGSALESFSKDYSVFAIPYIFDNEKHFFKVMDNQALMQPVYDSTKKLGFVGLTYYDSGQRSFYMSKGPVTSPDDLKGKKIRVMQSETAIKMVELLGGSPVPMGSSEVYTSLQSNLINGAENNEFVLYTAGHGGVAKYYSYDEHTRVPDIVIMNEGTKERLTAKQEQAIEEAAKESTAFEKTVFKEAVEEEKKKAQAEYGVVFNQVDSEPFQKLVQPLHESFKNSSEHGELYQAIRQLAD

SEQ ID NO: 57106 - protein, 262 aa, Enterococcus faecalis
MEFKMNDFQLDGKVALITGAVYGIGFEIAKSLAEAGATIVFNNLSPESVEQGLENYRAAGIEARGYVCDVTDEEQVQAMVAQIKEEVGSIDILVNNAGIIKRIPMVDMSAEEFRQVIDVDLNAPFIMAKAVIPDMIEKGHGKIINICSMMSELGRETVSAYAAAKGGLKMLTKNIASEYGQYNIQCNGIGPGYIETPQTAPLREPGHPFNEFILGRTPANRWGTPADLAGPAVFLASNASDFVNGHILYVDGGILAYIGKQP

SEQ ID NO: 57107 - protein, 781 aa, Enterococcus faecalis
MDKKSLIKAALLLLVGCFFVFTQTTSVNAAPKPDENKVIVTEPTTNVDTIYDTYKDNAFELMTKEKEKDSAFGVKEAITNASAAVKTFVWAGVKGLGEFNAVMVKTLFSMDIITAIKQPIMNLTSSIATNMLGIAGTIGIAFVFVILGVKFIGQQRYKRFFGIFLMTILIFTGLSVLKDANTSNSLFDMMFSVDKEVETAFVNINPVLGDVSVPMTEKGKDKNGNEVEQKLSADQRAKSAGNLIASRVFYTNVYEPYLLMNYGTSDVNKIRKKTVKYKDKEYDRINLLLDNDMNSEENNKLMEEVVNYESKDLKNRSIMYYNNWTNTFYGLFYLVVNFIQTVVYFLLSFLRLIIAVIQLFLLPLLPLLLFAGLFLTETNVFANYFKTFGMTIFMKGMVGFATIFFASFLSLGFQLSNQTENVWQKILTILIYLLTPLGLYVFRKFFANLVTGRVSLSDGVGFIGNPFGTEANMRRAAKEQKQENKERRKQAQEERKAAIKKRQEEARKHGKAETGLKQRPLNKEQEKRSALRRELKPRPQHKAPNAIEKAQEGLRQAHEKGRMQEQKSEEQLKRQQHESARQKEYEKDRLKKQESLKKINDQSDESTNLTALRNQNRRTGQRSKKRETGHQTLMKRQGEKVLQPTNKPKDMKKQVVARSPRRTGQPTTRQNIQPKVAAQTVKRSGGTLGSNPAYRRPEVRKKMDQVKQVTQVDVPQTHSTPQRVQSKVNEPITRMNRHNTPIIKKEKKTKQPPVVRRERKKPGTQKITNKPKGVRQPRARK

SEQ ID NO: 57108 - protein, 152 aa, Enterococcus faecalis; identical to SEQ ID NO: 56869

SEQ ID NO: 57109 - protein, 661 aa, Enterococcus faecalis
  MISC_FEATURE (11)..(11): X=any amino acid
  MISC_FEATURE (19)..(19): X=any amino acid
  MISC_FEATURE (326)..(326): X=any amino acid
LKNQVYQKKNXFRHIVKYXEDVRLDERLWQLTRIGKTSFNISGQGAEVAQVAMAMAFDPQKDYFLPYYRDMTRVLGLGHDLQRYFNGFFWKRSGSFFPGRQMPNHYGSKEHNIVSFSSTVSTQMPLATGVGYAAQLQKADFVALTTTGEGSANQGEVQEAMNFAGVKKLPVIFVVENNEYAISVPIEEQYANKRMADRAKAYGFEGVTVDGSDFTEVYLAFKEAVKAARGKKGPKLIELMVSRLTSHSADDDQSVYRSKEEIEEMKKNDAVKLFEKQLLEEGYLTDEDIAKIDEEIRAEINQATDEAEAMPDPVPTSILEEVYAKXEKRRRNIMAEMTYLEAINLGISEEMARDEKVVIFGEDVGGDKGGVFGVTKGLAAKYGDERCFNTPLTEGLIGGLAVGLGLMGYRAIGEFQFADYILPATNQLLSEARTMRYRTKGDWTAPIVYRTPYGGGVRGGLYHSQSTEKVFCGQPGLRVVTPSNPYDAKGMIKAAIRSDDPVIFYEHKRLYRLLKDEVPADDYIVPIDKANVVRTGSDLTVISYGMTLQLALAAAEKLAAEGIDAEIVDVRSLYPLDRETLVAAAKKTGKVLLVTEDNKEGSVMSEIAAMISEDALFDLDAPIQRLAGPDCPSMPYALPLEREFLINEEQVLAAMKELAEF

SEQ ID NO: 57110 - protein, 432 aa, Enterococcus faecalis
MATKEIKMPHLGESVTEAAIVQWLVKPGDSVKRYDPLMEVVSDKVTTEVPSDFDGVVKEFLISLDTDVPIGTAVMTLETEETTEETEVATLAPVKEASAEQAQEHETAETTSTATSHQKNNGRYSPAVLKIAQEKKIDLTQVTGTGRDGRITRKDVTNFTPTQARTPEKTVSPGTSPSISEEPVASQNESAATASPTETSTDKIVSADPVRKAIAKKMVQSVNEIPHAWLMVEADVTNLVQLRNSLKDEFKQQEGLSLSFFPFFAKAVIQALKKNPKINTSWDDGSIIYHKDVNLSIAVTTDEHLYVPVIQQADNYSIAGLAKEINRLAQEVRQGTLASKEMQGGTFTLNNTGTLGSVQSMGIINHPQAAILQVESINKRLVPTADGGFKVADMVNLCLSIDHRILDGQQAGKFLRDVKDNLAKYNADTDIY

SEQ ID NO: 57111 - protein, 283 aa, Enterococcus faecalis
MTIQWFPGHMAKARREVSEKIKYVDIVFELVDARLPLSSRNPMMDQIVQQKPRLVLLNKGDLADNDQNKKWQHYFQKKGYQTLVINAQQNKGINKIVPAAKEALKEKLAREQAKGLKPRAIRAMCIGIPNVGKSTLMNRLVGKKIAQTGNKPGVTKGQQWLRSGSQLELLDTPGILWPKFEDEEIGKKLALTGAIKDQLLHLDDLAIYGLEFFARFYPQRLTERYGLTEEELFLPAPEQLMLISQKRGFRDDYNRASEMIILEIRSGKLGTYTLDRWEELGDE

SEQ ID NO: 57112 - protein, 255 aa, Enterococcus faecalis
MAKESIQAIKEALLTVTDATDERLASWREDERSGVQQAIKQWERRQLAKEKEWQLFKEMSQFEEAAYKKGHRLIAGIDEVGRGPLAGPVVTAAVILPKDCQLLGLNDSKKLSAKKRETLYNQIQEQAVAIGLGIADQGVIDQINIYQATKQAMKMAIDDLAFTPDYLLIDAMQLDVPQPQESLIKGDARSISIAAASIIAKVTRDRLMEEYDELYPGYGFKNNAGYGTKEHLLGLEKYGVTPIHRRTFAPIKDMI

SEQ ID NO: 57113 - protein, 384 aa, Enterococcus faecalis
MNAVHFGAGNIGRGFIGEILAKNGFHITFVDVNETIIQALKERKSYTIELADASHQQINVENVTGLNNMTEPEKVVEAIAEADLVTTAIGPNILPRIAELIAQGIDARAEANCQKPLDIIACENMIGGSTFLAEEVAKYLKNPAYAEQWIGFPDAAVDRIVPLQKHEDPLFVQVEPFCEWVIDDTNRKAKEIQLEGVHYVADLEPYIERKLFSVNTGHATVAYTGALLGYQTIDEAMQDALVVAQLKSVLQETGKLLVAKWNFDEQEHAAYIEKIIQRFQNKYISDAITRVARTPIRKLGAQERFIRPIRELQERNLVSPHLLAMIGIVFNYHDPEDEQSRQLQEMLDQESVDTVIAEVTGIEDPETVKNIKQNVERYARPQVA

SEQ ID NO: 57114 - protein, 145 aa, Enterococcus faecalis
MENLTNISIELNQQFNTKEEAIRFCGEKLVEAGCVEPAYIEAMIERDQLLSVYMGNFIAIPHGTEEAKKLVKKSGICVVQVPEGVNFGTEEDEKIATVLFGIAGVGEEHLQLVQQIALYCSDMDNVVQLADALSKEEITENLAIA

SEQ ID NO: 57115 - protein, 277 aa, Enterococcus faecalis
MAIKAIVMDIDGTLLTSEKKISPKTRQALVAAQKQGLSLILASGRPTNGMRPLADELEMAHYNGHLLSYNGACVTHHGSQQQLFNQTISKSLSQQILEHLKQFDVIPMINDETFMYVNDVFHNTLHLETGDFNIIEYESRGGNFQLCEWRDLAARLNFPLNKILIAGEPAYLQKYHEAIYAPFKETVTAAFSAPFYFEFTAKNIDKARSLEKLTLQLGIAAEEVIAFGDGHNDYTMLEWAGTGIAMENAVDELKSIATEVTLSNDNDGIAVALTNFL

SEQ ID NO: 57116 - protein, 132 aa, Enterococcus faecalis
MKKILTYGTFDLLHYGHINLLKKAKQQGDYLIVGLSTDAFNLEKKKQSYFSYEKRKQLLEAIRYVDLVIPETSWKQKVSDIAEFKIDTLVMGDDWQGAFDFLEVETTAKVLYLPRTPEVSTTQIKKELYYSE

SEQ ID NO: 57117 - protein, 248 aa, Enterococcus faecalis
MKSKVRTEYIGGLPVDVLTHQEIMDDLESYLKAKEKMIVTSVNPQISLLAFEHPEVKLYLKRATHRIADGIGVVKASKLMGGSIRERVTGIDVMDNFLEYANQHKERIFLYGAKQEVVEAAAKNIQRQYPGIVISGILHGYTKKKQQEIVEQINKAEPRFVFVALGSPKQEIFLEQTIDHLTANVFLDVGGTFDVLAGSVKRAPEFYINHNLEWLYRCLTMKRYDRLMQIPKYIYLTIKYRNNKSRGQ

SEQ ID NO: 57118 - protein, 270 aa, Enterococcus faecalis
MKKILFASLFSATLLFGGSEISAFAQEIIPDDTTTPPIEVPTEPSTPEKPTDPTPPIEPPVDPVEPPITPTEPTEPTEPTTPTEPTTPTEPSEPEQPTEPSKPVEPEKPVTPSKPAEPEKTVTPTKPTESEKPVQPAEPSKPIDVVVTPTGELNHAGNGTQQPTVPIETSNLAEITHVPSVTTPITTTDGENIVAVEKGVPLTQTAEGLKPIQSSYKVLPSGNVEVKGKDGKMKVLPYTGEEMNIFLSAVGGILSVVSGFVIFKKRKAKV

SEQ ID NO: 57119 - protein, 89 aa, Enterococcus faecalis
MKQDIHPNYQPVVFMDSTTGFKFLSGSTKGSSETVEWEDGNTYPLLRVEVTSDSHPFYTGRQKFTQADGRVDRFNKKYGLKDENANPDA

SEQ ID NO: 57120 - protein, 430 aa, Enterococcus faecalis
MSDYLTMAELENSTLKDIYAYAKEFKIPYYSQMNKKELSLAVIRAQAEKQGFFFMEGILDIVSQDGYGFLRPINYGPSAEDIYISSSQIRRFGLRNGDKVAGKARPPKESERYYGLMHVESVNGKDPEEAKERPHFPALTPLYPEKQLTLETTAGRLSTRMIDVFAPIGFGQRGLIVAPPKAGKTSVLKEIANGITENHPDVELILLLIDERPEEVTDLERSVKGDVVSSTFDQQPQNHTRVAELVLDRAMRLVEDKRDVVILMDSITRLARAYNLVVPPSGRTLSGGIDPAAFFKPKRFFGAARNIEEGGSLTILATALVDTGSRMDDVIYEEFKGTGNMELHLSRELAERRIFPAIDIKKSSTRKEELLMTPEQLEETWKLRNNMSGDSLEYTDQFIKMLKRTQNNQQLFEVFHDVSFGKQIKRNPKR

SEQ ID NO: 57121 - protein, 692 aa, Enterococcus faecalis
MAYKYLVIVESPAKAKTIEKYLGRNYKVVASVGHIRDLPKSKMGIDIENNYEPHYISIRGKGDVIKSLKAAAKKAEKVYLAADPDREGEAIAWHLAYLLGLDLKDKNRVVFNEITKEAVKAAFKEPRTINVDLVDAQQARRILDRLVGYSISPILWRKVKKGLSAGRVQSVALKMIIDRENEIREFKPEEYWSIDGNFQKGRKKFKANFWGVDGKKKKLPNAEAVKEITSRIDGKDYDVTKVEKKERKRNPALPFTTSSLQQEAARKLNFRTRKTMMVAQQLYEGIALGKQGTVGLITYMRTDSTRIADSAKAEAAEFIEKTYGDEFSAHGGRKAKNTQGAQDAHEAVRPSSVLRTPDEMKKYLDKDQLKLYTLIWSRFVASQMTPAILDTMKVTLQQNGVTFIANGSKVKFKGFMQVYVEGRDDGKEDKENILPELVEGDVVKSVDIEPKQHFTQPPARFSEATLIRTLEENGVGRPSTYAPTLETIQRRYYVKLTNKRFEPTELGEIVNSLVSEFFPQIVDTHFTATMETDLDKVGEGQEKWVEVVDRFYKPFEKELTNAEEKIEKIQIKDEPAGFDCELCGHPMVIKLGRYGKFYACSNFPDCRNTKAIVKEIGVTCPVCHEGQVIERKSKKNRIFYGCSRYPECDFTSWDKPVGRPCPKCGQYLVEKKVKGGKQVVCINGDYEENVQK

SEQ ID NO: 57122 - protein, 430 aa, Enterococcus faecalis
MKKIVINGNRPLKGEVTISGAKNSVVALIPAAILADSPVTLDGVPDIQDVHSLIEILEIMGAKITFENNTLIIDPTEVVSVPMPKGKINSLRASYYFMGSLLGRFGEGVVGLPGGCYLGPRPIDLHIKGFEALGAHVTNEHGAMYLRTDEAGLQGTRIFMDMVSIGATINVMLAAVKAKGKTIIENAAREPEIIDIATLLNNMGAKVRGAGTDVIRIEGVEELHGCRHSIIPDRIEAGTYLAMAAAMGEGIKVRNVIYEHLESFIAKLQEMGVKMTIEEDMIEVHPSHDLKMTTVKTYPYPGFATDLQQPLTPLLLKAQGTGEIIDTIYAQRNKHIPELVRMGADASVEGNMIILNGPNQLHGAEVVASDLRAGACLVTAGLMAEGTTTIYNVEYILRGYDHIIEKLTALGADIQMLETEEQEGPFEVDQ

SEQ ID NO: 57123 - protein, 435 aa, Enterococcus faecalis
MTKKVTIIGAGLAGSEAAWQVANAGVPVDLYEMRPVKKTPAHQTENFAELVCSNSLRGNSLTNAVGVLKEEMRRLNSIIIGSADQTAVPAGGALAVDRDSFSETITEKIKSHPLITIKNEEITDIPEGIVIIATGPLTSESLSQKIQEFNGSEGFYFYDAAAPIIDKSTIDMDKVYLKSRYNKGEAAYLNCPMTEEEFNAFHEALVNAEVVPLRTFEKEKFFEGCMPIEVMAQRGIKTMLFGPMKPVGLEDPKTGKRPYAVIQLRQDNAAASLYNIVGFQTHLKWGEQKRVFRMIPGLENAEFVRYGVMHRNSFMNSPELLKPTYQSKKRDDLFFAGQMTGVEGYVESAASGLLAGINAARLAKGEEPIEFPRETTLGSMAYYITHAEGKHFQPMNANFGLFPELPERIRDKKERYEAIANRALDVQAQVIQSLD

SEQ ID NO: 57124 - protein, 299 aa, Enterococcus faecalis
MEEKNWPELFARYLIVERGYSEKTKKAYQEDIQHFFSFLKTSGNDNYLTVEHLDVRAYLSELYDQEYSRNSISRKIASLRSFYQFLLKNEAIQENPFSYVHMKKKQLRLPRFFYEKEMDALFESAQGEQPLDLRNQALLEVLYGTGIRVSECANLTVDAVDFQASVLLVHGKGNKDRYVPFGSFAQDALKDYLENGRALLMTKYQKKHPYVFVNHHGEQITPTGIEYVLNQLIKKSSLNAEIHPHMLRHTFATHLLNNGADMRTVQELLGHANLSTTQIYAHVTKESLQKNYRTFHPRA

SEQ ID NO: 57125 - protein, 182 aa, Enterococcus faecalis
MVESQFHSTTICAVEKDGKFAMAGDGQVTMGESVVMKGTAKKVRRIYNDEVVVGFAGSVADAFTLEEKFEGKLNEYNGNLTRAAVELAQEWRTQQSMQKLEAMLIVMNKEEMLLVSGTGEVITPDDGILAIGSGGNFALSAARAMKNFGDKEMPAKEIAKNALNIAADICVFTNHNIIVEEL

SEQ ID NO: 57126 - protein, 217 aa, Enterococcus faecalis
MKIVILLLVAYLLGSIPSGVWIGKLFFKKDIRQFGSGNTGTTNTFRVLGKPAGITVLLMDILKGTLATSLPYLFGLQGVNPLFFGVAAVLGHTFPIFANFKGGKAVATSAGMLLAYSPTFFIYSALIFVICLYLTSMVSLTSMISAVLITLSTIILPFTVPAILPTFNWLLTVIAIALTTFIFVRHRENIQRIKNGTESRLSFGLRAKKIKKKAVNK

SEQ ID NO: 57127 - protein, 473 aa, Enterococcus faecalis
MRSAESIRYCVALAFFLLEESKMKKSSKVALIFAFLVSIFVPVAAFADEIGDVVAPTGIMALVVIIPLIVVLVLLFMKVDMIIAGLIGGVLAMLIGGIGLEEANKQMLEAIPMMLGITVPIINSAVAMAVFKAGSYSAALTLAKRGTKGKVEYVSAFIVILLAAATYMSGIGGGSAMVIAPLAFAAVGVVPELIAAMSLAAAVSFTTSPASLESSIVSKLGDISVGSYVSTMRPYWLFFVALAIVLAFWGTKHRNVGFKESADDEFDKKSNGELFKITLPAIFLLFAVIFGPIVNDLIGFAFFTPLVYMILTLVLIFLCTDFSMNKSVEAMVDGSTYILTRLFQVGIFLAFINVIAQTGTFAVIAGVAENAPAFIVVPVAILTGILIGIPAGAYVGSVLTLVLPVAVSLNFPPLALGFVAMGVGLGSQMSFVNITMQALSSGFQIPILDVVKGNVKWLSIASVLLLVIGLIFG

SEQ ID NO: 57128 - protein, 157 aa, Enterococcus faecalis
MITLAQAEVGKVYTVESVQADIQTKKHLNNLGVVAGQAVVLVNYQNQNGIVLLHNSRIALTDTILQAIHVEERSANEKVWVSLDTLKVGERATIVGIHGQGAVKRRLMDMGLTKGTVIFIRKVAPLADPIEINVRGYELTLRKSEAELILVEKEESE

SEQ ID NO: 57129 - protein, 194 aa, Enterococcus faecalis
  MISC_FEATURE (75)..(75): X=any amino acid
MNVKIFSKNNCIQCKMAKRFLSENNIAFEEINIDAQPDAIDWLKEQGFQSVPVITSEATTVVGFRPDQLKQLASXDELVYFSVTGQTRRFIKKLDLPAYELEPANPFFEINEPFILVIPTYDAEITEVVNDFLDYKSNQELLVGVAGGGNRNFAELFVYTAKDIARDYHVPLLYSFEFSGTDEDVETFKKVVEE

SEQ ID NO: 57130 - protein, 719 aa, Enterococcus faecalis
MSLKEIKDVSYFKLNNEINRPVDGQIPLNKDKEALAAFFKENVEPNTRKFSSAEEKINFLMKEDFIETEFIEKYSMDFIEKLYAFLDEQHFQFKSFMAAYKFYSQYALKNNAGTEYLETYEDRVAFNALYFADGDEELALTLADEMIHQRYQPATPSFLNAGRKRRGELVSCFLVQVTDDMNSIGRSINSALQLSRIGGGVGITLSNLREAGAPIKGYDGAASGVVPVMKLFEDSFSYSNQLGQRQGAGVVYLNVFHPDIEMFLSAKKENADEKIRVKTLSLGVIVPDKFYELTRNNEDMYLFSPYSVEREYGVPYSYVDITKEYDNLVANPNIRKRKIKARDLENEISKLQQESGYPYIINIDTANKNNPIDGKIIMSNLCSEILQVQTPSVINGKQEYEVLGTDISCNLGSTNIVNLMESPDFGKSVRAMTRALTFVTDASEIDVVPTIQNGNRLSHTIGLGAMGLHTFFAKNHMEYGSEESLDFTDIYFMLLNYWTLMESNQIAKERNQVFHNFEKSDYASGAYFDKYIEGNFTPKFDKVKEIFKDIQIPTAEDWAALRDAVKKDGLYHQNRLAVAPNGSISYINDTSASIHPITRMIEERQEKKIGKIYYPAPYLANDTIPYYTSAYDMDMRKVIDVYATAQQHVDQGMSLTLFMRSEIPEGLYEWKETPKQTTRDLNILRHYAFNKGIKSIYYIRTFTDDAEEIGSNQCESCVI

SEQ ID NO: 57131 - protein, 321 aa, Enterococcus faecalis
MATYYEAINWNAIEDVIDKSTWEKLTEQFWLDTRIPLSNDLDDWRTLSDLEKTTVGYVFGGLTLLDTVQSESGMDQLRNDVRTPHEEAVLNNIQFMESVHAKSYSSIFSTLNTKKEIDDIFEWTNTNKHLQYKAERINEIYKNGTPLEKKIASVFLETFLFYSGFYTPLYYLGNNKLANVAEIIKLIIRDESVHGTYIGYKFQLGFNELPEDEQDKLKDWMYNLLYELYENEERYTEELYDDLGWTEEVKTFLRYNANKALMNLGMDPLFADTANDVNPIVMNGISTGTSNHDFFSQVGNGYLLGTVEAMKDDDYLYGLDK

SEQ ID NO: 57132 - protein, 428 aa, Enterococcus faecalis
MDKKVEKIQEKVRLFYKKHQRNTTIVVVISLSMILILGMAAWYEGKGISYEAKQTALREKQHALQKKRDDILAGKMTEASTQTTINNFSKQEITGENELVTITGTNGQLNINDANIYVSDNAGIVSNQLKQKMFQLNQQLLENANGAQFMLITVPALPSGESVESYSNKIANQLGVGDREKNNGVVFLMAIEDRESRLEVGYGLESILTDSYADDIINNEEVKEAFRDEDYNTGLNKIIDQVSAAINSKTAQVDNELTNIQTELNTNTTKRNVLLMASIAGMLICAVYILQILRTRKLVKKMYQDYLNCLPTKAVLNNSEQTKKVLNKMKKTSFYCLYLNGATLFATKGKIRRATKRGSLLSIYPNAKKQSFGRLLVGDTLYSYDGSVLTYAYLNSQYNPSNHSSSGSGSGGSFGGGSFGGGGASGSW

SEQ ID NO: 57133 - protein, 454 aa, Enterococcus faecalis
MILKTKLFGKVYQFTSVKEVLAKANEEKSGDKLAGVAANSAEERVAAKVVLSELSLNDLFNNPVVDYDEDEVTRIIIDQVNMRIFESIKHWTVAELREFILSSETTDFDIKRISRGLTSEMIAAVCKLMSNMDLIVGAKKINIEKTANTTIGRPGTFSNRLQPNHPTDNVDGIMASVMEGLSYGAGDALIGLNPVDDSTESVKRILNKFEEFRSEWEIPTQTCVLAHVTTQMEAMRQGAPTGLVFQSIAGSEKGNTAFGLNAEILAEAQDLALHSGQAAGPNVMYFETGQGSELSSEANFGADQVTMEARCYGLAKKFDPYIVNTVVGFIGPEYLYDSKQVIRAGLEDHFMGKLTGISMGCDVCYTNHMKADQNDMENLAMLLATAGCTYIMGIPHGDDVMLNYQTTGFHETATIRETLGLRPIKEFEEWMEKMGLMENGKLTSRAGDASVFIK

SEQ ID NO: 57134 - protein, 1003 aa, Enterococcus faecalis
MLHTVILKNNYQDSINLMLLTNKINALDGVTMSQIMMGTDANKDILNNTNLLTDEANSASANDMMIVVDSEKENIMEEVMPAIDEFLDDLSAKGTSEEAQAATSWSEAFDLLPEANVALFSIPGEYGAPEMERALKNDLHVFSFTDNVSIEDEVRLKKLAHEKGLLMMGPDCGTGIISSIPIAFTNVVSPGNIGVVGASGTGIQEVTTIIDRLGGGVVHAIGTGGRDLSDKVGAITVKDAIVALENHEPTDVITVISKPPAKEVRDEVVELLQSISKPVVAIFLGEKPTSHEGKVYLAHTLEETAKIAVDLANDVAVKKNYFEALAKPAVPTLPEDKVVKGLYSGGTLASEAGMLISEALDLGGLVKAEGYVLKSHGYEVIDLGDDMYTQGRPHPMIDPDVRIEKIREYAQDEKTGIILFDVVLGYGAHEDMVGALLPAIEEARATAKEAGRDLYFVATVCGTTKDPQNYQSSVDRLKEGGVLVAESNTKAVQLALLLKGIEISEDDKEVVAYNGPTVDVPKPGEKVMELLTTKPRIINVGLQSFTESIVDYGGETVQFNWRPRANGNKKMIKILDALEDYSEQIEAENHKVTDKIKNAQPFLVDVVPAKSVIPELNDDAQKTLLHAGPPIQWSEMTGPMKGACIGAALFERWADNEEDALKIFEAGEVRFIPCHHVKAVGPMGGITSGNMPVFVVENRLEGNEAYCILNEGIGKVLRFGAYSQEVVDRLDWIKDVLGPTIAKALKLSEEGLNLNVLIARSITMGDEFHQRNIAASLNFLKELSPLIIKTDIPEDQKYEVIKFLADTDQFFLNVMMATGKAIVDGARKDTNGTIVTTMTRNGVNFGVRIAETGDQWHTAPVNTPKGLYFTGFSEEDGNPDVGDSAITETVGVGAMAMVAAPGVTRFVGAGGFEDALATSNEMAKICEGNNPTFSIPTWDFQGTCLGIDIRKVVELGITPIINTGIAHKNAGVGQIGAGTVRAPLGCFEKALEAYAEKLGITVE

SEQ ID NO: 57135 - protein, 778 aa, Enterococcus faecalis
MPTANSGSRAARHASNTSSKSSYKKKTQPPKKKKRLVLKIFLGLLIAGMVAFLAGVGLFWFYARQAPKLEDDKLNATVSSKLYDINNEIFEDLGAEKRELIQPNDVPQLLKDAIVSVEDRRFYKHIGVDPIRIIGSALSNVKNGGLQGGSTLTQQLIKLSYFSTKESDQTLKRKAQEAWMAVRLEREKSKEEILTYYINKVYMANGFYGMETAAENYYGKHLSELDLPQTALLAGMPQAPNSYDPYTKPDTAKERRDVVLYTMYDNKKISKAEYEKAKATPIDEGLVPLKASDDNRKVVDNYVKEVINEVKAKTGKNVYTDGLDIYTNLDMNAQKQLYDIVNSDQYVAFPDDKMQVASTVIDVASGQVRAQIGGRHIPDDVQLGNNLAVNTQRDVGSTVKPIMDYGPAIENLNYSTGRLMVDKPTKYPGTDIDVFNSDLTYQGVITMRRAIMGSRNTTAVQTFDEVGKENIMPFIKGLGIDYKNLEASNAISSNTSDVDGDKYGISSLKLAAAYAAFANNGIYNKPYYVNKVVFNDGTSVDYQPDGKRAMKDSTAYMMTDMLKDVLNGGTGFNGAIPGLIQAAKTGTSNYTDEDLARMGTTEKGIAPDSTFVGYTTHYAVSVWTGYNDRNTPIYQEYYGIASDVYREIMSYLSQNVSNDDWVQPDSVVRVGNELYVKDAYEVPNVQVLPSTTSSAPQPESSSTVESSSTKEAESSSSSSSESAPSSSEAPPSTEQPASSSSAEQPATSEQPPEPSSSSSQEPPQPPESSSKPDENKAA

SEQ ID NO: 57136 - protein, 283 aa, Enterococcus faecalis
MSTTFPLHTESFMLLDSGCLTNSDYFLPFALTDVLTTFSGMQHQPIIHFWQLDQAMILGMKDTRVPHLKEGIASLQENDYSVVVRNAGGLGVIADSGILNVSLILPNNSEHKLSIDAAYELMWAWLRQSFPEKEIDAFEITTSYCPGTYDLSIGGQKFAGIAQRRVKDGISVMIYISVNGNQLARGEVVRDFYLAGLQEQFGENGYPPVDPAVMANLETLIETPLTIDAVKTRLIEALPQQFEKSIDPNLTEPIITSEWFQTNLTVQLEKMAQRNALIKGEIL

SEQ ID NO: 57137 - protein, 450 aa, Enterococcus faecalis
MNVVKFGGSSLASAPQLQKVLQIVKEEPRRTFVVVSAPGKRTPQDIKVTDLLIQYYQRYLNNEEIESTISAIIRRYEDLFDELHLDKAVLADIAISIRQLATLPKENNAFLFDYFLASGEDNNAKVVASFFKQNGLDARYISPKELGLLVTPEPGNARILPKALEKISVYRETQQILVIPGFFGYTEAGEICTFSRGGSDITGSIVAAGVQADLYENFTDVDGIYVAHPGIIEQPQTIQELTYREMRELAYAGFAVLHDEALMPAYRANIPVVIKNTNNPHHPGTLITTSRKVKHAPVVGIASDQGFASIYISKYLMNRELGFGRRLLEVLEKLALSYEHMPSGIDDITIVLREDQLTTEIENRLMAQLQEVLAPDELRITHHLSMIMIVGEGMRQRIGVTAESTMALAKEKINLEMINQGSSEVSIMFGIKKEQEEKAIKALYRTFFHD

SEQ ID NO: 57138 - protein, 124 aa, Enterococcus faecalis
MKMAHTCVRVKDLEASLDFYQKAFNFEESRRRDFPENKFTLVYLTLPGDDYELELTYNYDHEAYDLGNGYGHIAISTDDLEGLHEKHQAAGFTVTDLKGLPGTAPSYYFVVDPDGYKIEVIRER

SEQ ID NO: 57139 - protein, 274 aa, Enterococcus faecalis
MTLDKTKKLANGNEMPRLGLGVWRVEDGSEATNSVKWALEVGYRLIDTAAVYKNEVGVGEGIRQSGIPREEIFVTTKLWNEDQGYENAIKAFDKSLEKLGLDYVDLYLIHWPVAGKYKESWKALEEIYASGRAKAIGVSNFHQHHLEDLLTEANVVPMVDQIELHPTLTQEPLRKYLAENKIAVEAWSPLGQGNLLSEPVLVKIGEKYGKSAAQVIIRWHLQNDIIVIPKSVHEKRIQENFAVFDFELTPEEITAINQLNKDHRFGADPDNFDF

SEQ ID NO: 57140 - protein, 306 aa, Enterococcus faecalis
MLILGLASTETVDSSAPDLAEATVKKVSALQRFWNNINWDAIVATLIEKSLSILFLIFLFFIIQRIGKYLIDRTYANYSKKQHFSESRLKTLHTLIINAFQYTLFFFFIYSLLTIVGVPVGSLLAGAGIAGVAIGLGAQGFMNDLITGFFIILEQQMDVGDYIRLLALNIEGTVTSVGLRTTQIKAVDGTVHFIPNRNITTISNLSRANMQVLIDVRINPEEGYEKICEVITEVNETLKEKYIESIQTEPDIFGMVDLGNGNFAVRTTMYVLNGKQFAVKEEFLAQYIKALTEAGFTIPNTPIIAK

SEQ ID NO: 57141 - protein, 236 aa, Enterococcus faecalis
MNNKAIIQAMKQRVYEANLALPKLGLVKLTWGNVSEINRSLGIIVIKPSGVKYQEMTKEQMVVTDLKGQLLETNALKPSSDLPTHLYLYQKMPEIGAIAHTHSLNSVTWAQAGRALPPYGTTHADAFYGAVPCTRALSESEIKENYEEETGKVIVETFHEQELDPLAVPGVLVYGHGPFTWGMTPEKAVENSLILDEICSMARLTEIINPDVEPIDHFLLDKHYLRKHGISAYYGQ

SEQ ID NO: 57142 - protein, 451 aa, Enterococcus faecalis
MIRHDSRAPKELRKITIETNVFKHPEGSVVISFGDTKVICSATVEEKVPPFLRGGGTGWVAAEYSMLPRATNTRNIRESAKGKLTGRTMEIQRLIGRSLRAVVDLEKLGERSIVVDCDVIQADGGTRTASITGAFVALRLAVNHLLMTGALAEDPIKEHLAAVSVGILPDGYCVLDLDYAEDSNAAVDMNIVMTESGEFVEIQGTGEEATFSGDELNAMLFYGKTGIEELIAYQKEALYALASEEVPSQDSEEKVIVIATRNPGKAKEFSSIFGEKGYTVKTLLDYPNLPDVEETGRTFEENARLKAETIAEILQKPVLADDSGLIVDALGGMPGIYSARFAGEPTNDASNNAKLLHELTGVPKEKRQARFHCTLVFAEPKKESLVVEAEWPGEVGTIPRGEGGFGYDSLFYVPELGKTAAELSGEEKNKVSHRGQAVAKLKEQWEEWLKK

SEQ ID NO: 57143 - protein, 324 aa, Enterococcus faecalis
MSKNFWATLPKPFFVLAPMEDVTDVVFRHVVKEAGAPDVFFTEFTNSDSYCHPEGKDSVRGRLVFTEDEQPMVAHIWGDKPEFFREMSIGVAEMGFQGLDINMGCPVPNVAERGKGSGLILRPEVAAELIDAAKAGGLPVSVKTRIGFTEMAEMEAWITHLLEQDIANLSIHLRTRKEMSKVDAHWEVIPQIMAIRDRVAPQTTITINGDIPDRQKGLELAEQYGVDGIMIGRGIFKNPYAFEKEPKTHTPQELLGLLRLQLDLQDKYAELVPRSIVGLHRFFKIYVKGFPGASDLRAQLMNTKSTDEVRQLLATFETEHGVLD

SEQ ID NO: 57144 - protein, 324 aa, Enterococcus faecalis
MGIPITIVSGFLGAGKTTLINHALAQSPFPKEEIIIIENEFGQTGVDHALLLQTTERIIQLNNGCMCCSLRGDLLASLSAILEVYQEEQQPIAQVILETTGIADPQPIIQTILTTPHIKNHFYIDSLLTVVDGHHWQQQLQEAEAIKQLALADRLFFSVKEPADSTQLPTFQETLRTINPFADILSFQANEPLLASDFFQLNKFTATLTEHEMTHSPHEHAHEHHHHTFHSLTLTASSAINEPLFTRWLDWLMYTHQEKLYRFKGILALQEHDLAIAMQGVNQQVAFQMTNQPPQETTIVLIGKELETKKIQETFQTLNKIATP

SEQ ID NO: 57145 - protein, 89 aa, Enterococcus faecalis
MAKKSKIAKAKKQQAMIAKYAPIRQALKEAGDYEGLSKLPKDAHPSRLKLRDQTDGRPRGYMRKFGMSRIRFRELAHQGLIPGVKKASW

SEQ ID NO: 57146 - protein, 348 aa, Enterococcus faecalis
MTLQAQLEALRDNTLKEIAQVATLKELNQIRVETLGKKGPITEVLRGMKNLSPEERPVVGGFANEIRDLLTEAIEARKVVLENEALNAALKEESLDVTLPGKQMPQGTRHILTQVMEEIEDIFLGMGYQVVEGYEVESDHYNFERMNLPKDHPARDMQDTFYISDEMLIRTHTSPVQARTMEKHDFSKGALRMISPGKVFRRDTDDATHSHQFHQIEGLVVDKNVTMGDLKGTLEVMMKKMFGEDRKIRLRPSYFPFTEPSVEVDVSCFKCGGAGCNVCKHTGWIEILGAGMVHPDVLQMSGIDPTEYSGFAFGLGPDRVAMLRYGVNDIRNFYQNDLRFLNQFKVKE

SEQ ID NO: 57147 - protein, 1196 aa, Enterococcus faecalis
MSVQFIRGTAVADLEAPLIQATKQWLEEDAQHEVFYLVPNHIKFEQEIQVLQKLRQLQTTTSDSITSTRLQVFSFYRLAWYYLQHTPFYSADVLSDAGAAMIFRKILVEAEEELQIFRGEINKPGFIQQLFQLYQEMREGNIEIAELYPFLEKQTENPKGQDLQLKFQDLTLIFTRFQLQMSQYGYESAEIIQHLSEYLQTVDLSNVQFVISGYQQFTARELKLIEVLMAQAGSVKVALLLDKQYPHDLPDPRSLFYEAGQTYHQLYQLARQKQIPILSDYVEKKEVLITNPDLQGLNDYWIQSQEHLPPLSTADWRGDGLFLWRAENVKEELTHVATEIRRLVVEEGYRYKEIQVLTRDLDCYENLLEPIFAEHEIPVYVDRDMAMDRHPLVEWIESLFAIHSYNYRYRDVLRFLRTELFMPMNQLATSEESLTDWLNQRNAWRRKVDITENVVLAYGYEGYYWSQEKDWEFIRYDFEAEEQEDVATMEEESNAIRQSLQRLLPSYFQAMISAKTGLEAATVFYHFLLQSGVATQLKMWRLQAIEAGQLETARNHEQTWDALMSLLDEYVTVYGESSFDFTTFQEIFVSGLEGLHYSKVPTAIDQVQVRAMDLTRPGAAKVTFAIGMTEEIFPQKIENKTLLSDEERQTINDTLTENQYLRGTTGRKIAQEPYVAYLVFSSARERLYLTYPSVKDTAQEVKPSPYFKNIQKDLNLPVFEKNETTIFDDETTSLAHISTYRTLIGELTRLKRQRKETQEGLLPFWLNMEKALMNQSIAPLAKQVFESLTHQNIPEKIDEVLAEPLYGKDIYTSVSRMESFYRCQYQYFSRYGLRLKERDVFGLSPAATGEFFHEALDQFFKLLIMNQRNLSELTDQEVNLLAEEVLNSILGDARFSVLTTSSRMNYIRYQLSQTIKKVSWALKRQSQRSGMTTVQTEVLFGQIAAKKGISGLELPLKNQGKIHVRGKIDRIDQLVTPESTYLGVIDYKSSHRKFNMTEAYYGLAMQMLTYLDVALMDAVQLVGQEAKPAGSLYLHVHNPTLSYEGKDDIEQQMLKKYQFDGLLMKDPDLLDHLDTSLQAKQSSLLFPIEESAKEQIKPGRRQEDKFVTEPELGALLSHNRNKFIEAGNQIIGGEVQLNPAYQGKERIACRYCPFRSVCDFDVMLKENNYHRIENLSKEEIMARLLNKDEEGATEDE

SEQ ID NO: 57148 - protein, 182 aa, Enterococcus faecalis
MSLKSKELIKTVVFFACLALGLFLLRQFVFTPVVVRGHSMDPTLADGERVITLKNTEINRFDIITFPAPDEPDKNYIKRVIGLPGDTIAYKDDTLYINGKEVDEPYLDEFKKALTDGQPLTGDFSLKEKVPADSYFVLGDNRRNSKDGRVIGFIHKKDILGEVKFVMWPFSRFGPIPEVSKQ

SEQ ID NO: 57149 - protein, 589 aa, Enterococcus faecalis
MVELFILMMERVGLIILLAFLLVNVPYFKRVLLSREKMSSKVQLILIFGLFAIISNFTGIEIAKNQIVPNNLLTYLSSNASIANTRTLVIGVSGLVGGPIVGSAVGLIAGFHRVIQGGGHSFFYVPASLIVGLIAGFLGSRMAKQTVFPSAGFSAIVGACMEMIQMIFIFFFSGDLSDGATLVRFIALPMILLNSVGTFIFMSILTTTLKQEEQAKAVQTHDVLELAAETLPYFREGLNKNSSKKVAEIIKHYTKVSAISMTNSHQILAHVGAGSDHHIPELEVITELSREVLRTGRMTIAHAKEEVGCSDPNCPLQAAIVIPLFSHQQIVGTLKMYFTDPAQLTHVEEQLAEGLGTIFSSQIELGEAEVQSKLLKEAEIKSLQAQVNPHFFFNAINTISALMRKDSEKARKLLLQLSKYFRGNLQGAVQTTIPVSQELEQVKAYLSLEQARFPNRYQVTFDVEEAVASEKVPPYAIQVLVENTIKHAFGSRKENNQVRVVVKAKQHKLHVDVYDNGQGIPEERRLLLGKTTVTSEKGTGTALENLSRRMANLYGSEGCFLIENLETGGSHVHLEIPMEQEELDARINR

SEQ ID NO: 57150 - protein, 242 aa, Enterococcus faecalis
MHVLIVDDEPLAREELSYLVSQHPQVTSVAEADSVAEAMEEMMDQKPDLLFLDIHLTDESGFDLAEKLTHLKKAPYLVFATAYDQYALKAFQVNAKDYILKPFEEEKITQVIEKASKEMGQAVPENTAEKGPKSEAIPIQGEDRIYLVAPEDIYLVSVEERQLSIFVDQQVYKMTGTLNSIEQKLPATLFIKTHRSFILNRTKIQEIQPWFNNTLQVILTNGSKVPVSRSYVKEFKEKLGLS

SEQ ID NO: 57151 - protein, 1616 aa, Enterococcus faecalis
MKKKIAVLLATCLLVQPFLSVSAWAIEGEQQTERTQTQPKTAETSTSEATKESSAHSTEQSSMTESSAITEKVTTSSTETKPSEEQKQITLTFETTDQALFLNDAKSYQVVKEKNQPLRTEELPKWANSEENATFVGWSYQGKTYTNEELLQLEFSEDTQLTAVFKQKLTRMARAVSIDQSIADTIAPADKTKVIVVPSPAGDGAAYKEYASTEAGLKEALFDLYQQGNNGDFTLYIGNNITTSAATTAKVIPDTVTASNMTFYALQGKVNHLVITGNSADPISMDQTAPTGSKTLGFNQNIYFGSNITLRNLNYTGTNMYLNGYSLNLNGGSSGNGLTVYGGTDTGDVSGNPTLTVNSTGTGTWNFYGGNQNGGNLAGNPTIVINNTRSGLNTLSGGANIGTVTGNTSLVVNDSGGRIASIYGGGYGTNATNTANVTGNVSTKVAITNAATGFQLSTYYGGVQYGNIGGKVTNDISGYGRWYTAGQRFIGGSSRGDIGTNRATDGITTNLNTQLYSAGRADFEGGNQYSGTIIGDITNVVTAGTNSAGGINDFNGGAGNNVSKFNKSQIGASNEATYDAYTPQQRAELAKSAAAFKVFGNISSKLVSGSFNNGAIYSTAAGRGGYIEGNTTIEVGTANGDGSLGGDGMAYSGAKPTSLDYSTTDKSRGYSSGWDIVGGGGYPASNDTWDIYIKGDTKTVLNNTIARWTYGGSFSGVVEGNTSNTLNGGIADTLEGTGYQAARVYGNGQTIVNNGQVDWFLSGGGWNDAKNVGNVGVTVYEGVINASMGASYGASGGHTITGNSDNRIYGGNFSGTPRTGANGFSGGITNAGSLLGNAKLLIDLRNYNGEFKLPGNTYITGGRPYGQNTTLGTDESNTITLNIFTKTGVESLNGASIYGDGGTNAAYTKNGKITMNIQAAGSSIGNLYATQYSNISGGKILRDVTANVQGAVSINGLSGGSSTDNFTNAIVNASSNKVAFNFGTNVDGTNNYQTEPLNATGLGVVNFTELNVTNGIKLMANGGNIKNGVSATAANHSTTYNEFGSIHLSKNAGIGITNTANLISASKLTVQDHATLETIPGTGKVNIADFEAVDPTKDELLWIKPTTDTTALVDSTGTWFGNVKAYQVLTINPTVNNATKLTPTTFHGIEKATGKTFIGDNDVTKGANGYGIAIPGSIIDYEVETPGIVAGAGTISHDVKEVKAGNAPLTLQAWGTEVAGQKVQKGRLMIPTSSALTPTLSFLPDEVTGSWLHQGTVKSSEVGSAIEQIPEQKDTTPLSWKATNMNYSYQVKVQFSNKVELSGQSVIVTEDEAAQLTTVDKVVEMLGAKGRPFFKTSLKETDLPQIQAPLAEKTVSRTHDIQLEAGTSGDNLQNKTVHLVVVKNESILAKDRSFALYATSAHLKLKEANGLTNSDELAQWTQATVIFADGRANQTPSLDAATFQAIQQAKPEELAKTVPANYQFTEAGETLNKKVNVSISGELTLEKVPKTIDFGKQKISAKPEVYWPTLSDDLVVQDTRGSESTPWKLNVQVTNPLTNGTDQLEDLSLVTDKGEFLLNKGDTVVTENEGSGSGSYTINQGWGAANQRGLKLSVPVEKQKVGEFKGTLSWSLVMAP

SEQ ID NO: 57152 - protein, 244 aa, Enterococcus faecalis
MKKTVLAVVGIVGFSGVLATQQAFAEDINVNYTSNGAITFEPDTDPTKPVNPTNPDEKVEPEDPTDPTGPKPGTAGPLSIDYASSFQFGAQKITSDTKDYYAQIQTFKDGTTGPNYVQVTDKRGTQEGWTLSAVQNGQFKTAQNEELVGAALSIANAGVTSIVDAAYAPTPTAAHTFVPGTEVELVKAEDGKGMGTWVYRFGKDATEGATAVKLNVPGKAIKLAKEYRTTLTWTLKSVPTNVGG

SEQ ID NO: 57153 - protein, 253 aa, Enterococcus faecalis
MKVSIFSTCVVDLLFPNVGQAMVEVLERYGCETVLPTSQTCCGQPTYNSGYVTESTTTLKNQIDSFDGADYVVGPAGSCVGMMKEYHKFLADDPIYGPKAQRLAERTYEFSQFLYRVLGVKDVGATLHGKATYHRSCHMTRILNERESPFVLLDHVKGLEMIPLGHLENCCGFGGTFSVKMPAISEQMVTEKMNDVIDTGAEILISADMGCLMNIGGKFNRDGKKIKIMHIAEVLNHEVDEARMDQPQIISVG

SEQ ID NO: 57154 - protein, 450 aa, Enterococcus faecalis
MSETQQTTLKKQLSSRHITMLALGGAIGAGLFKGSGEAIGIAGPSVLIAFLIGGAVLFIVMSGLGKLVLDGGDTHHGLSGLVRPFLGAHSADFIDWVYYSMWTINIIAEAVAAASFLQLWFPNIPAWFFVFILAILTTLINLYSVRLFAETEYWLAFAKISVIILLIIFGVYLVGQQMLGSGVFPTLQSITDHGGFAPHGMKGIVNSLLVVIYSYGGSELIAITVSEADDPKKAIPKAIRGVMGRIISFYIIPLFLLLIIFPWNTLAGTTVSPFVMVFEKMNIPFAADIVNFVIILALFSSINSGVYASSRLLYFRLKDKKGPMSKLGVLNKHQVPQRSVFFCASVLYLGVILSYFVGDELFGYLAGSLSYTVLLIWILISAAAFVLSLKRGSLFEKSINLLALIILGLIFIGILFTNSLGVTLLTGLLYFVIFFSYRKKNDSFLLSDES

SEQ ID NO: 57155 - protein, 888 aa, Enterococcus faecalis
  MISC_FEATURE (771)..(771): X=any amino acid
  MISC_FEATURE (773)..(773): X=any amino acid
EYDVSVTSEKITVEDSAKESTEPEKITVPENTKETNKNDSAPEKTEQPTATEEVTNPFAEARMAPATLRANLALPLIAPQYTTDNSGTYPTANWQPTGNQNVLNHQGNKDGSAQWDGQTSWNGDPTNRTNSYIEYGGTGDQADYAIRKYARETTTPGLFDVYLNVRGNVQKEITPLDLVLVVDWSGSMNENNRIGEVQKGVNRFVDTLADSGITNNINMGYVGYSSDGYNNNAIQMGPFDTVKNPIKNITPSSTRGGTFTQKALRDAGDMLATPNGHKKVIVLLTDGVPTFSYKVSRVQTEADGRFYGTQFTNRQDQPGSTSYISGSYNAPDQNNINKRINSTFIATIGEAMVLKQRGIEIHGLGIQLQSDPRANLSKQQVEDKMREMVSADENGDLYYESADYAPDISDYLAKKAVQISGTVVNGKVVDPIAEPFKYEPNTLSMKSVGPVQVQTLPEVSLTGATINSNEIYLGKGQEIQIHYQVRIQTESENFKPDFWYQMNGRTTFQPLATAPEKVDFGVPSGKAPGVKLNVKKIWEEYDQDPTSRPDNVIYEISRKQVTDTANWQTGYIKLSKPENDTSNSWERKNVTQLSKTADESYQEVLGLPQYNNQGQAFNYQTTRELAVPGYSQEKIDDTTWKNTKQFKPLDLKVIKNSSSGEKNLVGAVFELSGKNVQTTLVDNKDGSYSLPKDVRLQKGERYTLTEVKAPAGHELGKKTTWQIEVSEQGKVSIDGQEVTTTNQVIPLEIENKFSSLPIRIENTPCKMANKXTXQRRLLRCKEKMLKEVTKLWQLKKTDTTGLSYFKISEPGEYRMVEQSGPLGYDTLAGNYEFTVDKYGKIHYAGKNIEENAPEWTLTHQNNLKPFDLTVNKKADNQTPLKGAKFRLT

SEQ ID NO: 57156 - protein, 348 aa, Enterococcus faecalis
MADDRKVALDAALKKIEKNFGKGSIMKLGEKADQKISTIPSGSLALDVALGVGGYPRGRIIEVYGPESSGKTTVSLHAIAEVQRNGGTAAFIDAEHALDPQYAEKLGVNIDELLLSQPDTGEQGLEIADALVSSGAIDIVVIDSVAALVPRAEIDGEMGASHVGLQARLMSQALRKLSGSINKTKTIAIFINQIREKVGVMFGNPETTPGGRALKFYATVRLEVRRAEQLKQGTDIVGNRTKIKVVKNKVAPPFKVAEVDIMYGQGISQEGELLDMAVEKDLISKSGAWYGYKEERIGQGRENAKQYMADHPEMMAEVSKLVRDAYGIGDGSTITEEAEGQEELPLDE

SEQ ID NO: 57157 - protein, 858 aa, Enterococcus faecalis
MPQKTKNTPMMEQYLSIKAQYKDAFLFYRLGDFYELFYEDAINAAQILELTLTSRNRNADDPIPMCGVPYHAAQGYIDTLIEQGYKVAICEQVEDPKTTKGMVKREVVQLVTPGTVMNSKGLEAKDNNYLTAVLTDGNQFGFAYVDLSTGELKTAVLADEEGVLNEASALQTKEMVLGSGIPESLKENLSLRLNIIFSTQETVEENAEFSFLTNELINPLEIEITGKLLSYLSVTQKRSLSHIQKAVEYQPDHFLKMDHYSKFNLELSQSIRTGQKKGTLLWLLDETKTAMGGRLLKQWLDRPLIQERQIKARQEMVQSLLNAYFERLDLQAALTNVYDLERLAGRVAFGSVNGRDLIQLRTSLEQVPTIRQLIVGINQGEWDDLLVDLNPVEDLVALIATAINEEAPLQITEGKVIKDGYNDQLDEYRDAMRNGKQWLAELEAKERQETGIKNLKIGYNRVFGYFIEITKSNLANLEEGKYERKQTLANAERFITPELKELERLILEAEEKSVELEYQLFLAVREQVKTNIDRLQTLAKTISAVDVLQSFATISERYQYVRPTLRSNTKNLAIVEGRHPVVEKVLGHQEYIPNSIRMNPETDILLITGPNMSGKSTYMRQLALTVVMAQIGCFVPAESAEMPIFDQIFTRIGASDDLIAGQSTFMVEMMEANQALRHATPNSLILFDELGRGTATYDGMALAQAIIEYIHREVQAKTLFSTHYHELTVLDETLKGLKNIHVGAVEKDGEVVFLHKMMEGPADKSYGIHVAKIAGLPSPLLERAATILSALEAEETTIPISVHHEEVSEVHEETEQLSLFKEVSTEELSVIDTLKKMNLLEMTPLDALNMLHQLQKRI

SEQ ID NO: 57158 - protein, 710 aa, Enterococcus faecalis
MGKIQELSEQLANQIAAGEVVERPASVVKELVENALDAGSTQIDIFIEEAGLKTIQIIDNGEGIAKEDVLNAFKRHATSKIHTRDDLFRIRSLGFRGEALPSIASVSEMIVETATAEEEEGSYVILKGGKVEENRPAALRKGTKMTVSNLFYNTPARLKYVKTIQTELANIGDIVNRLALSHPKVAFRLVHDGHKMMSTTGNGDLKQTIAGIYGISTAKKMLKIEGKDLDFTLTGYVSLPEVTRASRNYLSTIINGRYIKNFALNKAIVAGYGSKLMVGRFPIAVLEIEMDPLLVDVNVHPTKQEVRLSKEKDLMALIEQAIQEVLSQEQLIPNAADNLRFKKKLPPEPKAEQMEIPLSTEQPAVKQRPGSLSYNPATGRFYAEHATDETPASSAPEAVNQTERAVDPMDDPFAPPVPESTSVAEETSAYETSSAAADSANHWETASNEQQVIAEETKITEVPDSEPSLRSSEAADEVFQEEMKLHPEFDANSAASQRELKQALNKLEEERPTERFPELEYFGQMHGTYLFAQSKDGLFIIDQHAAQERIKYEYFREKIGEVSDDLQELLVPIVIDYPNSDALKIKEQKETLAEVGIHLEDFGQNSFIVRAHPTWYPAGEEESIVREMIDMLLTTGSVSVKKFREATAIMMSCKRSIKANHYLNEQQARVLLKDLALCENPFNCPHGRPVLIHFTNSDMERMFKRIQDPH

SEQ ID NO: 57159 - protein, 237 aa, Enterococcus faecalis
MNKFHDIFLELEQQIVQGDYQPGDLLPSENQLVETYNVSRETIRKALNLLINAGYIQKKQGKGSIVLNFKKFNFPISGVTSYKELQQTQHIESHTHVVSLEEIPVERNLAQLTGWTEGAPVWRLVRQREIEGEVDILDIDYLIKEIVPELPKHRAEDSIFDYLENDLGLAISYAQKEITVEPLTEMDKQLIGEVEGNHVVVVRSIMNLEDTRCFGYTESRHRLNKFKFVEFARRRKL

SEQ ID NO: 57160 - protein, 434 aa, Enterococcus faecalis
MIKKDYAQIKETLYTETLENGLKVYLLPKNDFQKTYGLFTTDYGSIDNTFVPIGQEEMIEVPDGIAHFLEHKMFEKEDGDVFQKFGQQGASANAFTSFTKTSYLFSTTDQVTQNLETLLDFVQSPYFTKETVEKEKGIIGQEIQMYLDDPNWRLFFGILGNLYPKHPLHIDIAGTVASIAEITAEDLYTCYNTFYHPSNMTLFVVGKMDPEALMAFIRENQAAKEFPAAQPIRRHFPEETAADIVKESAIEMTVTRAKVLVGLKGLDEVPTTGRDLMKYQVTVNLLLQLLFGNTSQNYLALYDEGLLDDSFSYDFNLDRSFHFADIGGDSEQPEVLAERIEAILLSATTSPELTEENLSLLKKKMIGKYFQSLNSLEYIANQFSQSLFGETTLFDKIEVIESIQLADVRQVAETFIREEGLSRFYMYPKGETEQ

SEQ ID NO: 57161 - protein, 288 aa, Enterococcus faecalis
MASVNIGETLKEARLQKNISIDELQQMTKIQKRYLEIIEQNDFESLPGTFYVRAFIRQYASAVGLDGNQLVDIYDGKEPAIVEEPKPVYEELEGSRKQLHDEEKQSSWLLRNLPAIAFSLIGLAIAVVVLYIMWQDQKAEPIIQTPATSASVEKPKESSQAPESSTQSSTPPSSSSEPEKKTAVAVVSDANNQVTATVKDANSPINITFKGTEGSCWIGVMVDGNYTYQHTLQAGETQTTALPANAANATLILGASNNVAIQVDGADLTLEKTPVLIRKDVTLGITYR

SEQ ID NO: 57162 - protein, 192 aa, Enterococcus faecalis
MNLPNKLTVLRIFMIPIFIIIVSVPMDWGTISFGDTTLAVTQLVGAIIFAVASFTDWLDGKIARAQGLVTNFGKFADPLADKMLVMTAFIVLVGQGKVPAWIVAIIVCRELAVTGLRLLLVEHGEVMAAAWPGKVKTATQMVAIILLFINNIPFSALHLPLDQIMLYACLIFTIYSGVDYFAKNKDVFKGSM

SEQ ID NO: 57163 - protein, 141 aa, Enterococcus faecalis
MKFSKIMVGVEESPDALKAFHYAIQKAKEEQAELVIVSILEEKEINVYQSLDKNYWQEQLAKLEKQTEKYQQEALANGIDKVSVIVNEGNPGELIINKLIPLNKPDLLIIGSKSTSKLKSFFGSQAAYMARYAPISVMIIR

SEQ ID NO: 57164 - protein, 532 aa, Enterococcus faecalis
MKNSEEHEPKQRHHLIEYANGPSLEEINGTIDVPKNMSFWKTLFAYSGPGALVAVGYMDPGNWSTSITGGQNFQYLLMSIILISSLIAMLLQYMAAKLGIVSQMDLAQAIRARTSKTLGIVLWILTELAIMATDIAEVIGGAIALYLLFHIPLGLAVFITVFDVLLLLLLTKIGFRKIEAIVVALIVVIFVIFAYQVALSNPVWGDVIKGLVPSAEAFSTSHAVNGQTPLTGALGIIGATVMPHNLYLHSSVVQSRKIDRKDKTDIQRALRFSTWDSNIQLTMAFFVNSLLLIMGVAVFKSGSVKDPSFFGLFDALSNPAVMSNSILAHIAGSGILSILFAVALLASGQNSTITGTLTGQIIMEGFIHMRVPIWLRRMVTRLLSVIPVLICVLMTSGKSTVEEHIAINNLMNNSQVFLAFALPFSMLPLLMFTDSRVEMGEHFKNSWLIKLLGWVSVIGLIYLNMKGLPDQIEGFFGDNPTASQITLADNIAYVIIALVILLLVWTVVELYKGDKRYAQQLAAMEQQVEEVK

SEQ ID NO: 57165 - protein, 122 aa, Enterococcus faecalis
  MISC_FEATURE (26)..(26): X=any amino acid
  MISC_FEATURE (106)..(106): X=any amino acid
MLSAFIPSLHSYPAMPLAEQLVHQRXVHPGPLVLRTAPLKFPTPATDRDRTVSRRSEPSSRAALMGEQPNPWDRLQPQDATSRHRGAKPPRRCGLLGEISLLSPGXLLSVERWPFHAEPPDH

SEQ ID NO: 57166 - protein, 135 aa, Enterococcus faecalis
  MISC_FEATURE (22)..(22): X=any amino acid
  MISC_FEATURE (79)..(79): X=any amino acid
  MISC_FEATURE (128)..(128): X=any amino acid
GTGISTCCPSPTPIGLGLGPDXPWADEPSPGNLSHTVDRILTCLFATHTGILTSKRSSRPHDRPSTPLERSPTTTLMVXSTASVICLAPVHFRRRVTRLVSYYALFKWWLLLSQHPSCLCNPTSFSTXHIFWDLS

SEQ ID NO: 57167 - protein, 294 aa, Enterococcus faecalis
MKSMTGFGKKTIQNENYQLDIEVKSVNQRFLDIQLRMPKELNAYELVIRQVIKRTLKRGRVEVYVNLQKIGNNQKEVRVQWDLIDQLLTSVDQHLKEKYPEATFDAGDTVNHLLKQNDFVEIVEAEIVDQTFEPFLVQAFEAAIASLDQSRVQEGTQIKQVLLDYVAVLTQSIQELQAFVGVFEQEYRQRFEAKLNEWLGSQVDETRLLTEMAILLEKGDIHEELDRLDIHIDKLHQLLDETEPVGRELDFLIQEMNREVNTIGSKSSPIEIKNSVVQMKTTLEKIREQIQNVE

SEQ ID NO: 57168 - protein, 459 aa, Enterococcus faecalis
MAEKIPKKLKRSVRYVALETIERVDKGGAYSNLLLNEMMTKSELSEKDGRLFTELVYGTISRKLLLEYYLTPFVKKPQKVDNWVKNLLILSLYQLLYLDKVPDHAVINEAVEIGKRRGNPGIGKFVNGVLRAFQRNGAPSLAAISDPVDRLATEISMPRWLTEKLLAQLGEEETRQLGLSLFEKSHASGRVNTRFISREEALEELQETGIAAKESQLSPYGVVAEKGYLAGSELFINGCLTIQDESSMLVAPSMQIEPHHRVLDACAAPGGKTTHIATFLEAEAGGRVTSLDIHAHKIKLINENAQRLHVADVVQAEKLDARQVAEEFPAETFDRILVDAPCSGLGLMRRKPDIKYHKTANDFQNLPKIQLEILESVAPTLKQWGIMVYSTCTITPEENQEVVAAFLAKHPEFEKIEIVANENVQAVVKEQELVLYPHQYMTDGFFICCMRKVSSNEVK

SEQ ID NO: 57169 - protein, 718 aa, Enterococcus faecalis
MIEIGKKLNGRYHIIGSIGSGGMANVYLAHDLILDRDVAVKVLRFDFQNDQAAIRRFQREALAATELVHPNIVSVYDVGEEDGLQYLVMEYVKGMDLKRYIQTHFPIPYSTVVDITQQILSAVAMAHEHRIIHRDLKPQNILIDEHGTVKITDFGIAIALSETSITQTNTMLGSVHYLSPEQARGSMATNQSDIYAVGIILYEMLTGNVPFDGESAVTIALKHFQEEIPSVKMFDPGIPQSLENVVRHATAKDPSDRYKTANEMAEDLYTSLSASRLNEPAWEPTALLGETKVLTPIPEDIAEPEETTPVEVPEDIADDILAEQPPKKNRKKLWIGLAIAALISLAIGGLAFAMSGGKDVEVPDVTNETKADASQALKSAGLKVDSETKKIPDDKIEEGKVVKTDPEAKSSVKKGRSVTLYISSGTEKIEMADYTKESYESAVEALKKLGFSEDQITTKKEYSDSVSTDSIIKQKPAAGKKVDPKKDNVTLTVSQGPETVTLPSYAGYSYENAVNALAQLGISDSQITRVDQASDTVEPGLVITQDPAPGGTVTPKNGQVTLYVSKGSDKVTLSDYSGISYDNAVSRLIALGIPESQIKRVDEESDKVEKDTVISQEPASGTAVDPKNDTITLHVSKGSDSVTVPDISGYSPKAAEDSINNAGLKINEQGLSGSGDGQVVERTSPSAGSKVKKGDSVTVYYSKANDSKSTTSESSTSN

SEQ ID NO: 57170 - protein, 357 aa, Enterococcus faecalis
MKKLQSLFIGIIAIIVILFFGVRQLEKASGMAGADTLTIYNWGDYIDPALIKKFEKETGYKVNYETFDSNEAMYTKIQQGGTAYDIAIPSEYMIQKMMKAKMLLPLDHSKLKGLENIDARFLDQSFDPKNKFSVPYFWGTLGIIYNDKFIDGRQIQHWDDLWRPELKNNVMLIDGAREVLGLSLNSLGYSLNSKNDQQLRQATDKLNRLTNNVKAIVADEIKMYMANEESAVAVTFSGEAAEMLENNEHLHYVIPSEGSNLWFDNIVMPKTAKNKEGAYAFMNFMLRPENAAQNAEYIGYSTPNKEAKKLLPKEVAEDKQFYPDDETIKHLEVYQDLGQEYLGIYNDLFLEFKMYRK

SEQ ID NO: 57171 - protein, 337 aa, Enterococcus faecalis
MLKLDKIQANKIVEKLMADIPYNINIMDERGKIIASGDSARIGERHRGAERAINERKNIEIYKDTSLEKKGTNEPIILNNHILGVVGISGEPDEVRKFTKLVRSIVLLLTEELNTQQEREKKKKQKNQFIQHLMHVDSSYSEALKLEALELYNLQLDDQNHCVLTKDKRLLSSYYPGHEIFEWENCYLVITSEPPQITKPVTEYLVISSEKATIQQMVQEAQNTYLLLSFLQLEKAKFYQAEDFFIQGIFNFPFHIELDFFETIQTIYDEYYETVIFFANHNLNINETSQVLHIHRNTLNYRLKRIHELTGMDPKVWQDFWKLFYYFAYCFKERFEK

SEQ ID NO: 57172 - protein, 62 aa, Enterococcus faecalis
MAKVCYFTGRKTSSGNNRSHAMNSTKRTVKPNLQKVRVLIDGKPKKVWVSTRALKSGKIERV

SEQ ID NO: 57173 - protein, 642 aa, Enterococcus faecalis
  MISC_FEATURE (333)..(333): X=any amino acid
  MISC_FEATURE (334)..(334): X=any amino acid
NEQLLEVSGLETAFRIKDDYYNAVDDVSFELKKNEILAIVGESGCGKSTLATTIMGLHDPNHTKITGEILYNNLNLTTFNETLYNKVRGNDIGMIFQDPLSALNPLMRIEDQIKESLTYHTKMTAQQKQARAIELLDQVGIPNPERVGKQYPHELSGGMRQRVIIAIAIACKPPILIADEPTTALDVTIQAQILDLLKDLQEETGSGIILITHDLGVVAEMADRVAVMYAGQFVEVATAEELFSHPKHPYTRSLLQSIPQENSDEEELHVIEGIVPSLTKLPRKGCRFAPRIPWIDASEHEENPTLHEVAPNHYVRCTCYKHFHFRDGEGEAXXQKIIQIKDLKVHYPIRSGFFNRITDHVLAVDGVDFMIEQGKTYGLVGESGSGKSTTGKAIIGLEKITNGEIIYQGQDVTKPRSRKAIGYNKDVQMIFQDSMSSLNPKKRVLDIIAEPIRNFERLSDQEEKKKVKSLLDIVGMPEDALYKYPHEFSGGQRQRLGVARAVATSPKLIIADEPVSALDLSVQAQVLNFMKNIQQEYGLSYLFISHDLGVVKHMCDNIAIMYKGRFVEIGTRQDIYTNPQHIYTKRLLSAIPKIDVANREAHKEERRRVEQEYRENHKDYYDENGRVYNLHAISPTHQVALK

SEQ ID NO: 57174 - protein, 648 aa, Enterococcus faecalis
MILLQANQVARHFGSETLFENIHLEIATKSRIALVGRNGAGKSTFLKIIAGIDAPDSGTIAKNKTATLGYLAQNTGLESDKTVWEEMTKAFADILEMEQRMRELETKISEMEPTTSVYEGILKEYDQLQHTFSEKNGYGYENEIRSVLHGFGFDESFYTKDIQTLSGGQKTRLALARMLLQKPDILILDEPTNHLDIETLSWLESYLPSYAGALLIVSHDRYFLDKVVNEVYELSRKKMTHYKGNYSKYLELKAEQLASEWKAYEKQQEEINKLEDFVAKNLVRASTTKRAQSRRKVLEKMDRLDRPQGDEKSAHFLFDSEKVSGNVVLQVEDAAIGYDQEHILSEPIHLDIRRKEAIALVGPNGIGKSTLLKSIIDRIPFIKGSKTFGTNVSVGYYDQEQANLHGNKTVLAELWDEHPTTPEKEIRSILGGFLFSGDDVEKTIPLLSGGEKARVALAKLAMDRDNFLILDEPTNHLDIDNKEVLENALIDYEGTILFVSHDRYFINRIATKVVELSEKGSKLYLGDYDYYLEKKQEEEEIAALLANEEAAKKPEPVTAKNTFYQNKEQQKLLRTLQRKITQVEENLAQLDTTIAQLEAQMSQPDILENHVELLALNQQLDEVRQQQDELLEQWENFSLELEEMENNN

SEQ ID NO: 57175 - protein, 541 aa, Enterococcus faecalis
MAKEIKFAEDARAAMLRGVDVLADTVKVTLGPKGRNVVLEKSFGSPLITNDGVTIAKEIELEDHFENMGAKLVSEVASKTNDIAGDGTTTATVLTQAIVREGLKNVTAGANPLGIRRGIELATKTAVEELHNISSVVDSKEAIAQVAAVSSGSEKVGQLIADAMEKVGNDGVITIEESKGIETELDVVEGMQFDRGYLSQYMVTDNDKMEAVLENPYILITDKKISNIQDILPLLEQILQQSRPLLIIADDVDGEALPTLVLNKIRGTFNVVAVKAPGFGDRRKAMLEDIAILTGGTVITDDLGLELKDTTIENLGNASKVVVDKDNTTIVEGAGSKEAIDARVHLIKNQIGETTSDFDREKLQERLAKLAGGVAVVKVGAATETELKELKLRIEDALNATRAAVEEGMVSGGGTALVNVIGKVAALEAEGDVATGIKIVVRALEEPIRQIAENAGYEGSVIVDKLKNVDLGIGFNAANGEWVNMVEAGIVDPTKVTRSALQNAASVSALLLTTEAVVADKPEPAAPAPMMDPSMGMGGMM

SEQ ID NO: 57176 - protein, 494 aa, Enterococcus faecalis
MDYTYADDSLTLHTDMYQINMMQTYWELGRADLHAVFECYFREMPFNHGYAIFAGLERLVNYLENLTFTESDIAYLREVEEYPEDFLTYLANFEFKCTVRSALEGDLVFNNEPLIQIEGPLAQCQLVETALLNMVNFQTLIATKAARIKSVIGDDPLLEFGTRRAQELDAAIWGTRAAYIGGADATSNVRAGKIFGIPVSGTHAHSLVQSYGNDYEAFMAYAKTHRDCVFLVDTYDTLKAGVPSAIRVAREMGDKINFLGVRIDSGDMAYISKRVREQLDEAGFTEAKIYASNDLDENTILNLKMQKSKIDVWGVGTKLITAYDQPALGAVFKLVSIEGEDGQMKDTIKLSSNAEKVTTPGKKQVWRITRKSDKKSEGDYVTLWNEDPRQEEEIYMFHPVHTFINKYVRDFEARPVLQDIFVEGKRVYELPTLDEIKQYAKENLDSLWEEYKRDLNPQKYPVDLSTDCWNHKMNLLEKVRKDVKHLTETVNKEA

SEQ ID NO: 57177 - protein, 275 aa, Enterococcus faecalis
MTTLQEKIIQELGVLPTIDPKEEVRKSIDFLKAYLTKHPFLKTFVLGISGGQDSTLAGRLAQLAMTEMREETGDMSYQFIAIRLPYGEQADEADAQAALAFIQPDVSLRVDIKPAVDAMVGSLENAGVQISDFNKGNMKARQRMITQYAVAGENAGAVIGTDHAAENVTAFFTKYGDGGADILPLFRLNKRQGKALLKELGAPEALYLKIPTADLEDDKPLVADEVALGVTYDAIDDYLEGKKVSETDQQTIENWYKKGQHKRHLPITIFDDFWK

SEQ ID NO: 57178 - protein, 1192 aa, Enterococcus faecalis
MYLKRIEITGFKSFADKTIIEFEDDVTAVVGPNGSGKSNITEAVRWVLGEQSAKNLRGGKMNDIIFAGSEGRKPLNIAEVTVTLDNSDHYLALDYSEISVTRRLKRTGESDFFINKQACRLKDIQDLFMDSGLGKESFSIISQGKVEAIFNSKPEDRRGIFEEAAGVLKYKQRKKKAEQKLFETEDNLSRVQDIIYELEDQLVPLAAQADAAKKYLALKEELTEIDVNLTVTEIQEAKAIWETKTQELTAIEEKLAGASKQVHDLEGKLVRLRSKRNRLDEQIETEQQQLLQVTEALKQAEGQKNVLIERSKHTSQTASEYEETLAETAEKIVRYREELQTLETAIAEKTAQRQTLKEALALATKDVEKYSKSSKELMEELRSQYVEVMQEQANTANDLKYLERQYQQETAKNQQSLAKHEALEEQMVEALAMKETLEKEQKVAKQGLQEQLEEYTALKATLEAKRERLAQRQNDMYQAMNQVQQAKARQKSLQEIQENYAGFYQGVKAVLRHKNQLTGIVGAVAELIEVPKEYTLAIETALGGAAQHIVVENEKDGRAGITFLKQQHSGRATFLPLTTIKPRSVSAMVQNRLAGAPGFVGIASELVRYPEQVQTVIQNLLGVTILAADLTSANQLAKLVNYQYRVVSLEGDVMNPGGSMTGGANKRGNQGSLFSQAQELQTITEQMTQLETQLRSVEQEVQALSQEVKTATERAEMLRSAGEQNRLKQQEIDNKLANQTETITRLTKEKRLFEYESRELHQFLTEYQTKKATLTEQQANLTATKERLDAEMKQVEQEASQMETFKAQAQERLTTVQAEQAVAAEQCAHFARQKQDKQEQLDELLIRETAIRQQLQQLSSHSSDHQLTEEGLAAQVAQLAEKQTALQTSLQTARSQRQALQEEVDELDTKLAEENKRQQQYLADKTQIEVLKNRAEMQLDSSLSYLQEEYSLTFEAAYEAYFPIDDLAQAQQTVKRLKQEIERLGPVNLSAIEQFEQVDERHQFLVSQRDDLLNAKEQLFETMDEMDQEVKERFKEVFEAIRGQFKVVFPNMFGGGRAELVLTNPEDLLNTGIEIEAQPPGKKLQHLSLLSGGERALTAIALLFSIIRVRPVPFCILDEVEAALDEANVARFGHYLSEFEDGTQFIVVTHRKGTMEAADVLYGVTMQESGVSKIVSVRLEEVKEGGAIEKSN

SEQ ID NO: 57179 - protein, 154 aa, Enterococcus faecalis
MPKGEGKLIAQNRKARHDYSIIDTVEAGLVLQGTEIKSIRNGRINLKDGFARIRNGEAFLYNVHISPYEQGNIFNHDPLRTRKLLLHKKQINKLIGETKNTGITLVPLKVYIKDGYAKVLIGLAKGKKQYDKREDLKRKEVDRQISRTLKNNRR

SEQ ID NO: 57180 - protein, 518 aa, Enterococcus faecalis
MAIKAEEISALIKEQIENYQQQLAVEEVGTVTYVGDGIARAHGLENAMSGELVEFSNGSYGMAQNLETNDVGIIILGDFETIREGDKVQRTGKIMEVPVGEALIGRVVNPLGQPLDGLGEIKTDKTRPVEATAPGVMQRQSVAEPMQTGLKAIDALVPIGRGQRELVIGDRKTGKTSIAIDTIINQKGQDVICIYVAIGQKESTVRNQVETLRKFGALDYTIVVTAGASQPAPLLYIAPYAGTAMGEEFMYNGKHVLIIFDDLSKQAVAYRELSLLLRRPPGREAYPGDVFYLHSRLLERAAKLSDELGGGSMTALPFVETQAGDISAYIPTNVISITDGQIFLESDLFYAGTRPAVDAGLSVSRVGGSAQIKAMKKVAGTLRLDLASYRELEAFTQFGSDLDAATQAKLNRGRRTVEILKQKLHAPLPVEKQVLILYALTHGFLDSVSVDKILHFEQDLFDYFDGKHADLLETIRTTKDLPDTDALDAAITEFSEMFAAANNSGDSAKEALEKIDNA

SEQ ID NO: 57181 - protein, 323 aa, Enterococcus faecalis
MQEPLFLQPVFQEKIWGGNRLHTLFGFDLPSDKIGEDWAISAHPHGVSTVLNGEFKGKKLDELWADHQELFGHAGGAVFPLLTKILDAEDDLSVQVHPDDAYGQKHEGELGKTECWYIIDAEPGAEIIYGHHAKTKEELAEMIEEGRWDNLLRKVPVKKGDFYYVPSGTIHAIGSGILILETQQSSDTTYRVYDYDRTDDQGKTRELHIQQSIDVTTVPAKDPDLSIQQENQGQSSIVTYVKTDFFNVYEWRVSGILKVKKQAPYTLATVIEGVGRLITEDAAKADVATFDLKKGDSFIFPTDIPSWRFEGDLTIIASEPGSR

SEQ ID NO: 57182 - protein, 324 aa, Enterococcus faecalis
MQKVIIDCDPGIDDTLALLYALASPELDVQAITVVCGNVPVEIGVENVFKCLEKVNRLDIPVYQGAASPLKRPFVSAQDTHGMDGLGETYFPRTSKIQAQALSAADYLAQTFQQATDCSIIALGPLTNIALGLKKEPLLGRNLQRFVSMGGTFKSHGNCSPVAEFNYWCDPDAAAWVFEKLGAKIEMVGLDVTREIVFTPTILNYCQRLNPKMGNYLAEITQFYFDFHWKYERILGCVINDPLAVAYFIDPTLCQGFSSYGQIVPDGIAMGQSMIDQYHFQQQPANCHVLTTVDSQQFFVKFLSILLNVQIDEIERDFKNLRMG

SEQ ID NO: 57183 - protein, 230 aa, Enterococcus faecalis
MVSKELVVCHLYGNLLNTYGDNGNLLMLKYLTEKMGVTFRSEIISIYEPFDPEKYDLVFVGGGQDFEQLIISEDIQNKKEALTSYIENDGVLLAICGGYQLLGHYYVGAQGEKIKGIGALDHYTLSQDNNRFIGDIEIYNEEFDETYYGFENHNGMTFLGEGERPLGTVKQGKGNNGQDNGEGVVYKNVFGSYFHGPILARNKNLGIRLIRTALEKKYGEPIAIPETLYK

SEQ ID NO: 57184 - protein, 450 aa, Enterococcus faecalis
MGIRSHLAIAAGKTSQWVLQTFFKGGSSYPGKLALKIDPKILDTLAKDYEIVVVTGTNGKTLTTALTVNILRQEFDEVLTNPTGANMEQGIVSTFLNAKAKKGQKKFAVLEIDEASLSRVTKYIQPKLFVFTNIFRDQMDRYGEIYTTYRLIMEGAAAAPEATILCNGDSPIFNSKETVNPRKYYGFNHLPPKEQLAHYNTDGVLCPKCNHILHYKMITYANLGDYYCPNCGFKRPELDVQLTEMVRMDNTSADFVIDGEEYGIAVGGMYNVYNALAATAVAEYYQVAPDKIRAGLAYDEKVFGRQETIKVGDKECTLVLVKNPVGLNQVIDMMGLAPYSFSLVSLLNANYADGIDVSWIWDGNHEAFADMDIPKVIAGGDRHEDMALRLKVAGIPEEKLLEIADLEQVISEIKTLPTDHVYILATYTAVLQLRKSLTAQGYIQGGMNGV

SEQ ID NO: 57185 - protein, 444 aa, Enterococcus faecalis
MLLIGNGRLITRDAQNHFFENGCVAIDGQVVKQVGTTEELKQAYPEATFIDAKGGVIMPGFINMHNHIYSTFARGLSLTNYHPKNFMDILVDQWWRIDRALTLEDTYQSGKVAYLDSIRNGVTTVFDHHASYGEITGSLTQLSNAADELGIRTCLCYEVSDRDGEQKMREAVQENAAFIKASSLRNDDMQKAMMGMHAAFTLSDASLELCAANTPDGIGYHIHIAEDLADVHDSLKKYGKPIVNRLFDLGILGKQTMAGHCIHIGPHEMELLRDTDTMVVTNPESNMGNAVGCPPAMRMFNEYGILMGLGTDGYTNDVTESYKVGNVIHKHHLADPNAAWAEIPTMLFDNNPQMANRYFKTKLGVLEPNAAADVIIVDYHGPTPMTKENYNMHILFGMNGGMVTDTVINGEIRMRNREVQGIDEEKVWHDAQTQAQSFWKRVNQ

SEQ ID NO: 57186 - protein, 1001 aa, Enterococcus faecalis
MSDIMHPISIEALLNWIFSEYQQDGTIFGIRKFYHADPTKTISLFGEKMETPCGPAAGPHTQLAQNIIAAYLTGSRFFEVKTVQILDGEDLPVSKPCIAAADECYNVEWSTELRVPQAYDEYVKAWFVLKLLSKEFELGDPNGFIFNMSVGYDLAGIQSPKIDRYINEMQNAEGTPIWAECQAAAKKYLSYFKKVDDLYIEAISPKVCHSITLSTLHGCPSDEIERIAAYLLSEKGLHSFIKCNPTMLGYEYARQTMDELGFDYMVFDDHHFKEDLQFEEAVPMLQRLQLLANSKNLSFGVKITNTFPVTIAANELPGDEMYMSGRSLFPLSISLAQKLSEAFDGKLQISYSGGADIFNSKEIFDAGIWPITMATTLLKPGGYQRMNQVANVLSAAEYPQMVHVNLDKLAQVVEKAKTQARYQKSIKLPESTKLRKTVPLTDCYIAPCRSDGGCPINQDIPAYLRYVSEGNYLKALQVIVDKNPLPFITGTICAHPCMTKCTRQFYEESIHIREVKLEAAEHAYDELLTTLEKPQPKENAPKTAVVGGGPAGISAGYLLAREGMPVTVFEKSETIGGVCSQIVPEFRISMESVQKDVQLAEFMGAEFRTGQEAPSLAELKNQGYTNVIYAIGAWKHGVLRLESGRALNSLEFLKANRENPTINPYGEQIVVVGGGNTAMDCARAATTLPGVKKVSVVYRRNKRNMPADEEELYLALEDGVDFLELLSPIKHENQQLTCEKMVLGERDASGRRRPIGTGEMIDIPADTVIAAVGEKVDTEFYQALGIHTDNYGKVVSNQETLETNIPGVYVIGDANLGPATIVEAIADATKAANNICLVHNHHYEKDNLNSDVAFVRNKRGILVTDEMSCSQASRCLECSTICESCMDVCPNRANIVVYVEGKPQIVHVDRMCNECGNCETFCPYASAPYKDKFTLFNSEADFYDSTNSGFYVQNPVDKICLLRLWGTVSTIQLTDQGLDVPEDLIALMVTMIEEYAYCMQA

SEQ ID NO: 57187 - protein, 314 aa, Enterococcus faecalis
MGKRVVVALGGNALGNNLTEQMTAVKQTSKAIADLIEAGYEVILSHGNGPQVGMIQLAMEEFSFNNPQYPVVPLSMCVAMSQSYIGYDLENALQEELRQRNISKAVTTVVTQVVVDENDPAFKKPTKPIGRFMTKEEAEQLVKEKNIQVMEDAGRGYRQVVASPKPKNIVELLTIQTLVDAGQTVIAGGGGGIPVIQEGNRLKGVNAVIDKDFCSERLAEQVDADLLVILTAVEKVCINFGKENQEALGNVSTEKMKQYAQEGQFAPGSMLPKVEAAIKFAESKPGRKTLITLLEKAKEGLSGKTGTLIENKES

SEQ ID NO: 57188 - protein, 471 aa, Enterococcus faecalis
MNHTRLLWLAQRKSDRFIRKNFSSIQIIVAYYILMTVISYLLFCLPIFREPDSHVPFIDLFFLAISTVSVTGLTTVDINSVFNDRGIVLLEVLFQVGGLGIMMISTVFFILSKRRITLKQRQLIMTDMNQPRLSGIVRLIRTTFLILIWFQVIFGSLFSLYFYISGYYTNWRDAIFYGFYQAISAVTNSGFDISGDSIIPFAHDYLFLLAIMFLIFIGGIGFPVLLEIHEWLHFKKKNFRKKKRGLPFRFSLFSKIALLAFIVLFIGGTILIYLLEKDHLFLTMNESGRWVSSMFYSMTTRNAGLQINDLGDFQITTLIIFSVLMFIGCSPSSVGGGVRTTTVAIIGLYLLAFLKSEDDISVFSRKIDDDDVKKSIVVFMLSLIMCFFAVVFLSATENLPLISIIVEVASAFGTTGLSLGITDDLTTVGKLMIALLMFIGRIGMLYTLMIFVPKETRDLGYEYPSEKIIIG

SEQ ID NO: 57189 - protein, 194 aa, Enterococcus faecalis
MAQLFFKYGAMNSGKTIEILKVAHNYEEQDKPVVLMTSGLDTRDGVGKVSSRIGLRRDAIPIFEETNVFDLINDLSYKPFCVLVDECQFLNKHHVIEFARIVDELDIPVMAFGLKNDFRNELFEGSKYLLLYADKLEELKTICWFCHKKATMNLHYIDGNPVYEGDQVQIGGNEAYYPVCRKHYFHPKTVNEEQ

SEQ ID NO: 57190 - protein, 357 aa, Enterococcus faecalis
MYDQLQSIEDRYEELGELLSDPAVISDTKRFMELSKEEANTRETVEVYRRYKQVVEGISDAEELLSENLDAEMAEMAKEELSDLKKEKEVLEDRIKILLLPKDPNDDKNIIMEIRGAAGGDEAALFAGDLFNMYQKYAEAQGWKAEVLEANVTGIGGYKEVIMMISGDNVFSKLKYESGAHRVQRVPSTESQGRIHTSTATVVVMPEAEEVEIELADKDIRVDIYHASGAGGQHVNKTASAVRLTHLPTGIVVAMQDERSQLKNREKAMKVLRARVYDQIQQEAQSEYDANRKSAVGTGDRSERIRTYNFPQNRVTDHRIGLTIQKLDQILAGKLDEIIDALVLYDQTSKLEEMQNG

SEQ ID NO: 57191 - protein, 277 aa, Enterococcus faecalis
MAKRYFEVLNWASSFLEAQGKEGYAIHYVFLERKGWDKTQWLLHMQEEMPQEEEEQLKTDLAQLLTDYPAQYLLGQAEFYGHSFIVNEHTLIPRPETEELVERCLKANPDTPLTVVDVGTGTGAIAVSLKLARPNWRVIAIDLSEEALTVAKQNAQALGAGIEFYHGNGLQPVASEKIDLLISNPPYISEQEWYLMDASVRTYEPKTALFAENNGLALYQQLIHESQTMLKADGKIYFEIGFQQGAALQELLSAAYPQKTIKIEKDLSGNDRLAIAE

SEQ ID NO: 57192 - protein, 412 aa, Enterococcus faecalis
MDYKTYDPDLWNAIAREEERQENNLELIASENVVSKAVMAAQGSILTNKYAEGYPGKRYYGGCEFIDIVENLAIDRAKELFGAKFANVQAHSGSQANTAAYLSLVEPGDTILGMDLSAGGHLTHGSPVNFSGKTYNFVSYGVDPSTEVIDYDVVRILAREHRPKLIVAGASAYSRTIDFKRFREIADEVDAKLMVDMAHIAGLVASGLHPNPVPYADIVTSTTHKTLRGPRGGLILTNSEELAKKVNSSIFPGIQGGPLEHVIAGKAAAFKEALDPSFAEYSQQVIANAQAMTKVFNQAPEARLISGATDNHLLLIEVTGFGLNGKEAEAILDSVNITVNKNSIPFEQLSPFKTSGIRIGTPAITSRGFKEEDAVEVAKLIVQVLKDPENTAVHDEVKAAVAALTKKYPLYN

SEQ ID NO: 57193 - protein, 209 aa, Enterococcus faecalis
MGKFQVIDHPLIQHKLTMIREKNCGTKVFREVVNEIAMLMAYEVSRDMPLEDVVIETPMGKSTQKTLSGKKVAIIPILRAGIGMVDGILELIPAAKVGHVGLYRDEETLQPHEYFVKLPEDIASRQLFVVDPMLATGGSAIMAIDSLKERGASNIKFVCLVAVPEGVKALQEAHPDVDIYTAALDERLNEDGYIVPGLGDAGDRLFGTK

SEQ ID NO: 57194 - protein, 382 aa, Enterococcus faecalis
MGSTMSLFIYEVLIRLFMTFILSLLLTPLVKLLAFRIGAYDAPGERRINTKNMPTAGGLAIYIAFASSCLLIFRSIIPQDYIWPIILAGGMVVLTGLIDDIKEITPMKKTIGILLAALVIYFVAGIRIDFVTLPVVGMIDLRWFSLPLTLLWILAITNAVNLIDGLDGLASGVSIIGLTTIGITGYFFLHAKTVYIPIVIFILVASIAGFFPYNFYPAKIFLGDTGALFLGFMIAVMSLQGLKNATFITVITPMVILGVPITDTVYAIIRRLLNKKPISSADKMHLHHRLLSLGFTHKGAVMTIYALALVFSFVSLLFSYSSTVASILLIVFCLIGLELFIELIGLVGEGHQPLMYLLRILGNREYRQEQMKKRLGKHSKRK

SEQ ID NO: 57195 - protein, 228 aa, Enterococcus faecalis
MNNRGLASFFDFSQIDISKLQEKTIETLYMTGISIIVVAILGLILGLLLFETSGRKGILSRLLYWLVAIFVNIFRSIPFIILIVLLIPFTKIILGSMSGVKGSLPALIISAAPFYARMVEIAFREVDKGVIEAAKAMGANRFQIIWKVLLPESLPALVSGLTVTTISLVGYTAMAAAIGAGGLGSLAYQDGFQRGQNTVTLVATICILIIVFAIQWLGDTVAKKIDKR

SEQ ID NO: 57196 - protein, 272 aa, Enterococcus faecalis
MKKRTLWSVITVAVAVLVLGACGNKKSDDSVLKVGASPVPHAEILEHVKPLLEKEGVKLEVTTYTDYVLPNKALESGDIDANYFQHVPFFNEAVKENDYDFVNAGAIHLEPVGLYSKKYKSLQEIPDGSTIYVSSSVSDWPRVLTILEDAGLITLKEGVDRTTATFDDIDKNTKKLKFNHESDPAIMTTLYDNEEGAAVLINSNFAVDQGLNPKKDAIALEKESSPYANIIAVRKEDENNENVKKLVKVLRSKEVQDWITKKWNGAIVPVNE

SEQ ID NO: 57197 - protein, 271 aa, Enterococcus faecalis
MLRFFPQKNKYVEEASQYAFDKEGQIPQHIAIIMDGNGRWAQNRRLPRIAGHKEGMDTVKKITKHASHLGVKVLTLYAFSTENWKRPTDEVNFLMQLPVDFFDTFVPELIKENVKVNVMGYQEFLPSHTQDAVKRAIEQTKDNTGMVLNFALNYGARAELLTAMKQIAAEVSEKAYTADEITEETIADHLMTGFLPTELRDPELLIRTSGEERISNFLLWQIAYSELFFTKALWPDFSGDTLETAIASFQNRNRRFGGLKETTETEGSDPQ

SEQ ID NO: 57198 - protein, 266 aa, Enterococcus faecalis
MRQRVITAIVALIIFIPIIWYGGFAIEIAAVALAVVGVYELFRMKGLTLLSFEGVLSALGAVFLVIPTIKWLNFLPEMQTNFILFYVTVMLLLGASVISKNTYTIEEAGFPVIVSLYVGMGFQNFISARSAGFEVLLFALFIVWATDIGAYLFGRRFGRHKLMPDVSPNKTIEGALGGILSAVVVAALFLVFTANKGLFPYPMPVMLVLTVLFSIVGQFGDLVESSIKRHYGVKDSGNILPGHGGILDRFDSLLFVFPIMHLCGLF

SEQ ID NO: 57199 - protein, 389 aa, Enterococcus faecalis
MKKFLENSIHQAIKACFFFLGKLPKKKLFIFESFHGKQYSDNPRAIFEYIRDNCPEYQCIWAVKKGYEMPFVEENVPFVKRLSWRWLWLMPRAQYWVFNTRMPAWMYKNQTTIYIQTWHGTPLKKLGLDIETVKMPEHETESYKLEVIQEAKRWDYLISPNAYSTRVFRQAFHYEGEILEIGYPRNDLLVCENKDKIAFSVRNQLGLAANKKIILYAPTWRDDESIRKGAYRFTNHLPVEQLLEIDSSIVILTRLHYLIAESFDISAFGSRVIDVSSYPDINQLYLIADLLITDYSSVMFDFALTKKPMLFFMYDKEKYQNSTRGFYFDPTAILPGKIVTDTDSLVTSVKNVLFSKTEQEQRLYVQFFREFCLENQDATRQLISEILKR

SEQ ID NO: 57200 - protein, 488 aa, Enterococcus faecalis
MEKQKEVQKEYEEYQYMLDTETWKKELSQFKLSSSEKISKNPKVSIIIANYNNAPYLKKMMDSLVQQTIGIEQLQVMFIDDCSTDHSLKVIEPYLERYPNIEIYQLLENTGGAHGPRNVGIVNARGEYSVFLDADDWYDLNALKYLSDLLDDSHDDFAVSGLIQSTDGHLMLKSKPYYVDGSFKNRSIQELPAEFYGWLGPQAIMLRTSLIHNNNLHFVNQRVADDVLFFYEAMRFSKTITQGERLTTYLNRDADNESLSKSINRTFMLSWLRALSYINQQFPDDLSKERMLARRLEWLIYDFCIRRNTGYPFSKRRLQDFKVQMDQYLGELNFDPSPYFRSDVRQIIWTFLQTNDIDGLYWFIQCQSIRWVLVNRFGYVSKTERSYYYPRLLKRFPAVRMNAYAEATQREGNTLSLNVYTHQKITGFEIKELKNPFETRQRLAFKKISETSYQVELPEKFSNKESRFTIVFDNYLEIGVKDFSKFFA

SEQ ID NO: 57201 - protein, 234 aa, Enterococcus faecalis
MITALIIAGGVGKRMGQEIPKQFIMVEEKPIIIYTLESFQKHPLIDRILVVCKKGWEQTLDAYAKEYHIDKLQWIIPGGNSGQESINNGVNFLKEHSNPEDTIVIHDGIRPLVDELVLSDVIVKCQEYGNAVTSLPYNEQIFVKETEETTRQYINRETLRRVSTPQAYKFEKLTWAYEKAFRENIGISESSYTNTMMVDLGETLHFALGSDKNIKLTTQDDLQLFKGFLKMKEE

SEQ ID NO: 57202 - protein, 248 aa, Enterococcus faecalis
MTDIIAHRGSKGTHPENTCIAFREAVRVGAEGIELDVHLSKDGYLIVMHDETVDRTTDGHGEIQQLTLNELKQLDAGSWFQKNPSVQCVPTLEDVLNCLVEEQFNGFLNIELKTDIIHYEGIEKKIVQQMKQKNWPFRYLYSSFYFPSLVKLKKADPKTEIAFIYESAEDLSQAGPAFALVDSLHPKMSWVLAHEKELITIGKPLRPWTVNRMEEMENCFQLKLAGVHTDFPEEAKFARQNWQEEGET

SEQ ID NO: 57203 - protein, 446 aa, Enterococcus faecalis
MTRKAKTAEEIKHIAEEENVRFLRLMFTDIMGTIKNVEVPVSQLDKVLDNKMMFDGSSIEGFVRIEESDMYLYPDLSTWMIFPWESDHGKVARLICDIYNPDGTPFAGDPRGNLKRALADMKELGFTSFNLGPEPEFFLFKLDENGEITTDLNDKGGYFDFAPTDLGENCRRDIVLELESLGFEVEASHHEVAPGQHEIDFKYADVVDACDNIQTFKLVVKTIARKHGLHATFMPKPLFGINGSGMHCNMSLFNEEGNVFYDESGEMGLSQTAYHFLGGLLKHARAYTAVCNPTVNSYKRLVPGYEAPVYVAWSGRNRSPLIRVPESRGLSTRLELRSVDPSANPYLTMAVLLQAGLDGIRNELTPPPAVDRNIYVMNEEERQHAQIEDLPSTLHNAIKELRKDQVMIDALGRHIFANFVEAKRMEWAAFRQTVSEWEREQYLELY

SEQ ID NO: 57204 - protein, 387 aa, Enterococcus faecalis
MRKASQKSWFNGLLSLLFALLLFFNANATGNNPSNSGSSQTYSETLNNIPVQVQYDKDKYYVSGFEESVNVHLRSANRIQLNMESNADTRNFQVVADLTKLPLGTSEVPLTVRGLSSAVTAEIEPKTVTVTIEKRVTKKFDVEAQLSDNIEKEGYKVKNISVDPKTVEVTTGEETAKAIDKVIAPVSSAKQTIDTIKQTVNVQALDAKGQVLSIENPAPQVKVTVGLTAPTKDVPLNVSMTGTPPAGIAHYNYSLSTYQVRVSGPQSILDTLESIEVPVDISDIRKETKQSVTIPVNGEYVVTPDEVDVSLTPVYNQQQSSNTNETSGEPASSTTVGSGSQAVQPSTSSQVESNTSETTSEGSTVESTTAGSTENTENQVTKENQNG

SEQ ID NO: 57205 - protein, 322 aa, Enterococcus faecalis
MVESAKKFLRKVPIPICGLILGMVSLGNLLYSLGYATIGTIYCVLGSLLMILVILKIIFTMKHALSTLDDPIIASVSPTFTMALMVICVFLDRIFTNAAWINVLWIGAVILHFILMIYFVAVHIFPTKIELEHIYPSWFITFVGIGVIPNTSQLFINELGKIVFWVALFFYLLLLPILIKRITKSKEMPESTIPLLTIMTAPGSLCLAGYISMGGHLYMPLVVFLLILSQCIYGIVVVNLYKIMQVTFYPSYAAFTFPLVISATALVKVKPLFAEKVGLTSLLNILSTFELLLAVAIVSYVFIRYCIFLFQRENNTKKVELN

SEQ ID NO: 57206 - protein, 450 aa, Enterococcus faecalis
MGKYFGTDGVRGIANKELTPELAFKLGRYGGYVLSQHEDSSRKPRVLVGRDTRISGEMLEQALIAGLLSVGIEVFQLGVISTPGVAYLTRLQKASAGVMISASHNPAEDNGIKFFGADGFKLVDDQEAEIEALLDAEEDTLPRPSAEGLGSLDEFPEGLLKYSQFLVQSIPGDLADMTVCLDAANGATATAVNRVFADLETDFYTMGTSPNGLNINDGVGSTHPEALAEMVVEKGADAGLAFDGDGDRIIAVDELGRIIDGDKIMYICAKYLAEKKRLKKDTIVTTVMSNLGFHKAVEEIGLKDVVTQVGDRYVVEEMRKNDYNGGEQSGHMIFLDYNTTGDGMLSGIQLLNVMKQTGKKLSELADEVTIYPQKLVNIRVTDKNGAMEVPAIKAVVEQAEAEMNGEGRILVRPSGTEPLLRVMAEAPTQEKVDYYVDKIAEVVRAEIGVE

SEQ ID NO: 57207 - protein, 426 aa, Enterococcus faecalis
MLIYLTKKDCELFDMDQFSTLTEQEFTTFAMTHPAGNFLETPEMKHLLERRGWHCEYVGVKREGQLIAACILSKKKVKIGYAFDIDGGILMDYTDKKCVEAFFTGLKKYVKKNDGLYLTFTPNKQICLRDFNGGEVEKVNQETFDYFTSIGFEHQGFDVHNFDGAPRWLFVKDMAGLTEEDLWKSYGKDAKYDIKKTWEYGVTIRELRYEELPLFKKLTEETSARRNFEDKDLAYYQAVYEEFGERAKFMVAELNFATYLENLHEKLRKLQETLNEVNEALIANPKSRKKNNQKREFEDEVRTVRKRIDEAKEMKTSDEPEILAGALFIVHPQEVVYLFSGTYEKYKQYYAPYLIQHKMLTYTVENNIPKYNFYGVDGIFDGSDGVLKFKQSFGGHVEELMGNFQWKAKPMKYALYHALKTIKEKV

SEQ ID NO: 57208 - protein, 330 aa, Enterococcus faecalis
MTLNGIDISSWQSNINVGKEGVPADFVIVKATGGTGYINPDCDRAFQQAISSGKKVAVYHFANEVGLEGTAEQEAEFFLKNIKGYIGKAVLVLDWESTNKGDVAWAKRWLDYVQGKTGVKPMFYTYTNVLQSYNFSSIAKADYGLWLADYGANNPQGYSQPTPPPVPYWNFISMYQYTSNGQLPGWNGRLDLNVFFGDRSMWDKYANPKSNPTPAPPVPPKPKRRYGYRVDDLQFVNGIWQVRNDVLGQPDFDWTENGINVAYIDKIDPATGENMPDQELKVGDYFAFQPSSVGIITEQYSLNGKTISHVQFPDEFIWLYTESVGKLIYG

SEQ ID NO: 57209 - protein, 277 aa, Enterococcus faecalis
MKKFSKLIGLIGVLAFTIAGCASGSVKDTKTETVKLGVVGTKNDEWESVKDRLKKKNIDLQLVEFTDYTQPNAALAEKEIDLNAFQHQIFLDNYNKEHGTKLVSIGNTVNAPLGIYANKLKDITKIKDGGEIAIPNDPTNGGRALILLQTAGLIKVDPAKQQLPTVSDITENKRQLKITELDATQTARALQDVDASVINSGMAVDAGYTPDKDAIFLEPVNEKAKPYVNIVVAREEDQENKLYQKVVEEYQQEETKKVIAETSKGANVPAWETFGKK

SEQ ID NO: 57210 - protein, 366 aa, Enterococcus faecalis
MSINEIIMYIMVLFMIIGGIDKCIGNKLGLGEQFEEGIMAMGSLALSMVGIITLAPVLANLLSPIVVPVYELLGADPAMFATTLLANDMGGFALAQQLANDPQAGLFAGAILGAMMGPTLVFTIPVALGIIQKDDQQFLATGVLSGIITIPFGLLAGGLTAGMPLSLIIPNLIPIIIVAALIILGLWLAPKGMIKGFQIFGQGVVIVAIFGLVVGAIQLLLGITVIPGIAPVTEGIEVVGGIALTLAGAFCLVAVITKVFNKPLMKLGKVLGMNEVAAAGMVATLANNIPMFQMLKDMDNRGKIINIAFAVSASFVLGDHLGFTAGVAKEMIFPMIVGKLVGGITAIFVAIFMANRMLGKPETEVK

SEQ ID NO: 57211 - protein, 685 aa, Enterococcus faecalis
MAKKINNEYNDASIQVLEGLEAVRKRPGMYIGSTDSRGLHHLVYEIVDNAVDEALSGYGNEINVTIQKDNSICVADSGRGMPTGMHASGIPTVEVIFTVLHAGGKFGQGGYKTSGGLHGVGASVVNALSKWLEVHIVRDGVEYMERFEDGGKPVGTLKKIGKTKKRNGTSVTFLPDDTIFSTTNFSYEILAERLRESAFLLKGVKITLTDERGEEPKEEVFHYEEGIKEFVAYLNEEKDTLTPVVYFSGAKEGIEVELAYQYNDGYSENVLSFVNNVRTKDGGTHEVGMKTSMTKAYNEYARKVGLLKEKDKNLEGSDFREGLAAVLSIRVPENLLQFEGQTKGKLGTPLARTVVDNVVGEQMGFYLQENSEMSQSLIRKAIKAREAREAARKAREESRNGKKRKKGESLLSGKLTPAQSRNPKKNELYLVEGDSAGGSAKQGRDRKFQAILPLRGKVINTEKAKMQDILKNEEINTMIYTIGAGVGPEFSIEDCNYDKIIIMTDADTDGAHIQVLLLTFFYRYMKPLIEAGKVYIALPPLYKVSKGTGKKSVIEYAWTDGELAEVIDKVGKGYMLQRYKGLGEMNAEQLWETTMDPETRTLIRVRIDDAAQAERRVTTLMGDKVEPRRKWIEQHVQFTLEEDGSILDRSEEDTSAPTGESLLDAEKTKEAEQTDDTEISLFDIE

SEQ ID NO: 57212 - protein, 374 aa, Enterococcus faecalis
MADNSKTRVVVGMSGGVDSSVTALLLKEQGYDVIGIFMKNWDDTDENGVCTATEDYKDVAKVADQIGIPYYSVNFEKEYWDRVFEYFLAEYRLGRTPNPDVMCNKEIKFKAFLDYAMQLGADYVATGHYAQVETDENGVVHMLRGIDNNKDQTYFLSQLSQAQLAKTMFPLGGMEKSEVRAIAERAGLATAKKKDSTGVCFIGEKNFKEFLSNYLPAKKGNMVTEDGEIKGQHDGLMYYTIGQRQGLGIGGGGKTQEPWFVIGKDLTTNTLYVGQGFHHEKLYATHLEASEVHFTVDTPMPKEFDCTAKFRYRQADIPVHVSLSEDGTKATVTFKEPARAVTPGQAVVFYDGMECLGGGLIDRAYQDEKELQYV

SEQ ID NO: 57213 - protein, 412 aa, Enterococcus faecalis
MYELIKSKIFRPRQPWEKNLLVLWFGTFMAGIGFSLVMPFMPLYINTLGTFTHQQLNFWSGITFSSTFLVTTIVSPWWGRLADRKGRKLMLLRASLGMAIVISLMGAVTSVYQLIGLRLLQGVFSGYISNATALVATGTPKEKSGQVLGTLATGSVTGTLLGPLLGGVTASIFGYRPTFFITGTILLLVFVLSLVFVHEEFVPIEKNQAASGKQILKKLEHPHVILGMFITTLIIQASNNSISPIISLYIQQLLGGHGNVTLISGVIASIPGIATLIAAPRFGRLGDRIGSERILTIGLILAIFVYLPMAFVQNVWQLAMLRFLVGISDACLLPAVQTLITRYSPSDAAGRIFSYNQSFQATGNVIGPMIGSSVSAAFGYRGVFISTSCLVLLNLLWVRRSTAELKKEKNDD

SEQ ID NO: 57214 - protein, 254 aa, Enterococcus faecalis
MTTPVTGRIHSTENFGTVDGPGVRFIVFTQGCRMRCQFCHNPDTWKIGSGGRVVTTDEVLEEALRFRSYWGEKGGITVSGGEPLLQMDFLIDLFKKAKAQGIHTTLDTCGKPFTREEPFISQFDELMKYTDLLLFDIKHIDNEQHKLLTTQSNDNILEMATYLSEIDKPVWIRHVLVPQRSDYDEYLIRLDAFIKTLNNVDKVEVLPYHTMGKYKWEELGIPYPLEGIEPPKNDRVENAKKLLHVEDYQGYLAR

SEQ ID NO: 57215 - protein, 308 aa, Enterococcus faecalis
MSKILVFGHQNPDTDAIGAAISFAYLQKELGKETEAVALGTPSEETQYALDYFNIEAPRVVTEAASETNQVMLVDHNEFQQSISDIAEVNILAVVDHHRIANFETADPLYYRAEPVGCTSTIIYKMFKENNVTIPAQIAGMMVSAIISDTLLFKSPTCTQEDIDAAHALADIAEINLEGYGLDLLKAGTNLSDKSAEVLLDLDAKSFPMNGKTVRVAQVNTVDLAEVLDRQAELEAAMAAENAANNYDLFVLIITNILDSDSELLAIGAEQAKIEAAFNVTLVNNRAFLPGVVSRKKQVVPQLTEVFN

SEQ ID NO: 57216 - protein, 693 aa, Enterococcus faecalis
MVAKQLIIAEKPSVAKDLSRVLGANQKNKNYYEGPNVIVTWALGHLLGLKMPEDLNKEWQTWQMETLPMIPKNLGIKPLPKTGHQLKAIKQLANRKDVSEAVIATDAGREGELVARWILEYVRFNKPVKRLWISSQTDKAIKDGFKKIRPAKDYDNLYYSALARAKADWLVGLNVTRALTVKYQDNLSAGRVQTPTLAMVRQQEKTIEQFKPQTYFTISLSVESEKAKMTQKNPYALKERQEAEQLVKELSKQKGLVTDIQEKVKTENAPLPYDLTEIQREANQRFQFSAKKTLSLVQSLYETHKIVSYPRTDSKYLTTDMKGTMKERLQAIADFSPEVKGYLKNGAVVKQQKVFQNAKVTDHHGLIPTEQRPRYEKLSNDEQKIYQMIVQRFLGLFAEPNQTKQTKVTVAFGKETFVFHQNKVVVAGWKTTAEQPLSTVQWQKGMTVAPNFTINKELTSPPKPLTEGTLLGKMEKHSLGTPATRAEIIEKLIKSELMERTNSGLSVSAKGKQLLDLVNPSLVTPELTEKWEKSLEAIASGQQKSQLFLKDIEEDTKKLVREIKQSEKKYQDFSITQKKCPDCGSNLREKNTKDGKIYVCTNQECSYRRRKDPKVSNHRCPQCHKKMVIIEGKNGRSFKCKFCSITEKIPDKKERKQKMTKHEERRLMKKYSQPDEPEESALAQALKAAMNQE

SEQ ID NO: 57217 - protein, 326 aa, Enterococcus faecalis
MNTFWKSFPDVERSLTETCELIEQTLHTRNEDIEEALVTLARSGGKLLRPAFFFLFAQLGDEEKQEKQQLLKIAASLEILHMATLIHDDIIDDSPLRRGAVTIQSQYGKDVAVYTGDLLFTEFFTLIADAMNGSEFMKINAQGMKRLLLGELDQMSHRFDRRMSIPAYLRSVNGKTAELFSLSCLEGAYFGHSSKEVQRLAKRIGRHIGIAFQVYDDILDYTADTETLKKPALEDLSQGVYTLPLLFAYQAAPDVFSPYLDKGRAITLEEAAEVAALVNDYHGVTEAQAFAKKVTNKAITDIQQLPDGTAKETLLSLTELLLHRSF

SEQ ID NO: 57218 - protein, 478 aa, Enterococcus faecalis
MKNQHLTTSQGSPVGDNQNSLTAGEFGPVLIQDVHLLEKLAHFNRERVPERVVHAKGAGAHGIFKVSQSMAQYTKADFLSEVGKETPLFARFSTVAGELGSSDTLRDPRGFALKFYTDEGNYDLVGNNTPIFFIRDAIKFPDFIHSQKRNPRTHLKSPEAVWDFWSHSPESLHQVTILMSDRGIPLSFRHMHGFGSHTFKWVNAAGEVFFVKYHFKTNQGIKNLESQLAEEIAGKNPDFHIEDLHNAIENQEFPSWTLSVQIIPYADALTMKETLFDVTKTVSQKEYPLIEVGTMTLNRNPENYFAEVEQVTFSPGNFVPGIEASPDKLLQGRLFAYGDAHRHRVGANSHQLPINQAKAPVNNYQKDGNMRFNNGNSEINYEPNSYTETPKEDPTAKISSFEVEGNVGNYSYNQDHFTQANALYNLLPSEEKENLINNIAASLGQVKNQEIIARQIDLFTRVNPEYGARVAQAIKQQA

SEQ ID NO: 57219 - protein, 310 aa, Enterococcus faecalis
MTKGYVKSVTELIGQSPVVKLKRMVPEGAADVFVKLEFFNPGGSVKDRIALSMIQQAEADGRLKPGQTIIEPTSGNTGIGLAMVGAALGYPVKIVMPDTMSIERRKLMQAYGADLLLTPGAEGMKGAIAKATALAEEHGYFMPLQFNNPANPMVHEQKTGKEIVDVFGKRGLDAFVSGVGTGGTVTGVGHELKRIFPDIEIVAVEPTESPVLEGGEPGPHKIQGIGAGFVPEVLDTTVYQKVAAVSSEDALETARLMGPKEGILVGISAGAAIKAAIDLAVELGAGKRVLALVPDNGERYLSTALYEFPE

SEQ ID NO: 57220 - protein, 656 aa, Enterococcus faecalis
KTDQLGVNTIRTLSIEAVQKANSGHPGLPMGAAPMAYALWTKHLKVNPTTSRNWVDRDRFVLSAGHGSAMLYSLLHLSGYNVTIDDLKNFRQWDSKTPGHPEVHHTDGVEATTGPLGQGIAMAVGMAMAEAHLAATYNRDSFPIMDHYTYAICGDGDLMEGVSQEASSMAGHMKLGKLIVLYDSNDISLDGPTSKAFTENVGARYEAYGWQHILVKDGNDLDEIEAAIEAAKAETDKPTLIEVKTVIGYGAPKEGTSSVHGAPIGEEGITAAKAVYGWEYPDFTVPEEVAARFKETMIGEGQKAEEAWNEMFKNYEHAHPELAKQFKEAFANQLPEGWEQELPKYELGTSAASRVTSKETIQAISKVVPSFWGGSADLSASNNTMVAAEKDFEPGQYEGRNIWFGVREFAMAAAMNGIQLHGGSHVYGGTFFVFTDYLRPAIRLAALQKVPVTYVLTHDSVAVGEDGPTHEPIEQLASVRCIPNVHVIRPADGNETVAAWRIAMTSTETPTILVLSRQNLPVLEGTLEHASDSVQKGAYVLSPQKGEQPAGILIATGSEVNLAVEAQAKLAEEGIDVSVVSMPSFDLFEKQSAEYKESVLPKAVTKRVAIEAAASFGWERYVGTEGKTITIDHFGASAPGGLVLEKFGFTPENVVN

SEQ ID NO: 57221 - protein, 164 aa, Enterococcus faecalis
MLAAIWAQDEQGVIGKEGKLPWHLPNDLKFFKEKTIHNTLVLGRATFEGMGCRPLPNRTTIVLTSNPDYQAEGVLVMHSVEEILAYADKYEGVTVIGGGSVVFKELIPACDVLYRTMIHETFEGDTFFPEIDWSVWEKVATVPGVVDEKNLYAHDYETYHRNDK

SEQ ID NO: 57222 - protein, 315 aa, Enterococcus faecalis
MEEAYLALGKKILEEGHFKEDRTGTGTYSLFGYQMRFDLAKGFPLLTTKRVPFGLIKSELLWFLKGDTNIRYLLERNNHIWDEWAFERYVKSADYQGPDMTDFGHRVLQDPAFAEQYKEEHQKFCDAILNDAEFAEKYGELGNIYGAQWRHWETKDGSFIDQLANVIEMIKTNPDSRRLIVSAWNPEDVPSMALPPCHTMFQFYVNEGKLSCQLYQRSADVFLGVPFNIASYALLTHLIAHETGLEVGEFVHTLGDAHLYQNHVEQMQEQLSREVRSFPTLVLNPDKASVFDFDMEDIKVEGYDPHPTIKAPIAV

SEQ ID NO: 57223 - protein, 631 aa, Enterococcus faecalis
MSVKELKVTDLTKTYGEKTLFDHLSFLIHEKDRIGLIGINGTGKTSLLNIIAGVDSGDGDLAAIQQPSDYQIGYLSQNQTFDENITIAEAVFQGDSPIIKAVKNYELALAALSENGLDEGVQRRYTQAEEAMNKQDAWTADTNAKIILQKLGIPTLEKKIGELSGGQLKRVSLAQVLIEAPDLLLLDEPTNHLDYETIEWLENFLNNYRGAVLMVTHDRYFLDRVTNRIFELSFGKLYEYKGNYETYVMEKAERERVAVEQEEKRKRLFKQELAWMRAGVQARGTKQQARIDRFQDLKENLHQVQTNGTLEADFATQRLGKKVLEIKEGNYAIDHKQLLKDFNLLIQANDRIGITGKNGAGKSTLLNILAGRIPLESGLYSIGETVRIGYYTQQNEEMDPNQRMIAYLQEAAEEVKRSDGSSVGVAEMLERFLFPRFMHGTLIGKLSGGEKRRLYLLKLLISQPNVLLLDEPTNDLDIDTLTILEDYIQTFKGAVIAVSHDRYFLDKTMDKLLVFQGNGQILSFYGTMSEYLANQKEQEKVKEKPLNKPVKEASTEKKEKTKLTYMEQKEWATIEEDITQLETKLETLTEEMNHQGDDFVRLQELQEAVTATEQLLEEKMNRWEYLSEYAD

SEQ ID NO: 57224 - protein, 684 aa, Enterococcus faecalis
MEFTFLIIVFALSITFSNIFNRIVPVIPLPIVQIIVGVLIGLTKMGQEIEFEPEVFLVMIIAPLLFREGELINLKAMMKNFGMILFLAFFGVLITLVGVGWTLHMILPTLPLAACFAFGAALGPTDAVAVGSLSGRIDIPERSMNILSGEGLINDASGVTAFQFALAALLTGSFSPVEAAGTLVISSIGGAVVGIVLVLLKQQIVHLLETAVAKDVTGYLLIELLLPFIAYLISELIGVSGIIAAVIAGIMQASSLKKVSLFEAELSNVGESIWSLIEFTLNALVFLFLGIELSQVFSPIWIDQQYSNWFLLLVVLIISAVVFLIRFLAIFSVYTLQHGLKKVKNAMNEMLILTFGGVKGTVSLATIFILPTAINGEHFKERPLLLFITACVILVTLIGGILVLPFLTDSETEVENEESVEIDLLRDVIDVLKQQNEENPRGEMNAVIENYQDRLKELYTEQLSAERKQEVQELRTLIVSIERDGLEESLKQGEISVRSYRMYQRLITRMQRSIAKQLLSIVGFWLLFARQIISILLHPKLFFNRGEASEEEKELRNEELENIRQVFLRNSQVILKSLDNLRGVYDDDLIDFFIDGRLDLAHKFEKGEFIDSYIVHTETDYVKDLLLGFQEERRMIDHYEQSERISIIEANELRKNVNLLESYSISGEVNNVPLKRFVKNFNKE

SEQ ID NO: 57225 - protein, 390 aa, Enterococcus faecalis
MSRVDRYKHIHEKSRPAEHKKTFNPRKSMGEHREEEPEELAESLQEPVYEDSYTEDSRRSERRHQTDSGGGNGSDQPPRGKKDKKPKKKRKKSKTKRFFKWLVILLILLFAYSTVMFLKGKSAAEHDDSLPQEKVETFNGVKSSNGAKNILILGSDTRGEDAGRADTIMVLQLNGPSKKPKLISFMRDTFVDIPGVGPNKINAAYAYGGAELVRETLKQNFNLDTKYYAKVDFQSFEKIVDSMFPKGVKIDAEKSLNLDGVDIEKGQQVMDGHVLLQYARFRMDEEGDFGRVRRQQQVMSAVMSQMKNPMTLLRTPESLGKLVGYMSTDVPVSFMLTNGPSLLIKGKAGVESLSVPVPDSWNFGESSYAGSILEVDEQKNADAIEKFLNE

SEQ ID NO: 57226 - protein, 828 aa, Enterococcus faecalis
MESKTFDIEGMSCASCAQTIEKATAKLPGMAKASVNLATEKLSVTYDQTEVTEEEIKEAVSDAGYKAISPAQQRTFAIEGMSCASCAQTIEKAVNQLSGVQQAIVNLATEKLVVSYDDHQVTSAEIIKAVTDAGYQATEEVAAGATADQDREKKQKHIAEMWQRFWISAVFTVPLLYIAMGHMVGLPLPDFLNPMTHAMTFAMVQLILTLPVLYVGREFFTVGFKALFKGHPNMFSLVALGTSAAFVYSLYGTVMIFLGDTSFTMALYYESAGVILTLITLGKYFEAVSKGKTSDAIKKLMGLAPKTAHILRDGVEIEVPVDAVQLDDIVIVRPGDKIPVDGVIVSGSSSVDEAMLTGESLPVEKKVGDAVIGASINKNGSFQFKATKVGKETALAQIIQLVEDAQGSKAPIAQLADKISGVFVPIVIGLAVLSGLAWFFLGQESWIFALTITISVLVIACPCALGLATPTAIMVGTGKGAENGVLIKSGDALETTHKIQTIVFDKTGTITEGKPVVTDILVADSALSEAELLTLAASAEQGSEHPLGEAIVGAAKERQLPLAEGSDFSAIPGHGIRVTVNERVLLLGNIKLMKEEAIELSTFVQQADRLAEEGKTPMFVAKDGSFAGIIAVADTVKDSSQTAIARLHKMGIEAVMITGDNKRTAEAIAKQVGIDRVLSEVLPEDKALEVKKLQAEGKKVAMVGDGINDAPALAQADVGIAIGSGTDVAMESADIVLMRSDLMDVPTAVELSKATIKNIKENLFWAFAYNTLGIPVAMGVLHLFGGPLLSPMIAAAAMSFSSVSVLLNALRLKGFKPSTVKRTSGSQK

SEQ ID NO: 57227 - protein, 388 aa, Enterococcus faecalis
MRFITAGESHGPELTAIIEGLPAGLPLSSEEINRELARRQGGYGRGGRMKIEKDQVRITSGIRHGKTLGSPVTLIVENKDWKNWTSVMSVEPVPEKQKKIRRVSKPRPGHADLVGGMKYQHDDLRNVLERSSARETTMRVAIGAVAKKLLAELDIQVAGHVAVLGGIEATIPENLTIREIQERSEQSAVRVLDPSVEEKMKELIDQTKKNGDTIGGVVEVLVGGVPAGLGSYVQWDRKLDAKIAQAVVSINAFKGAEFGIGFEMAQRPGSQVMDEIVWDESTGYTRTSNNLGGFEGGMTNGMPIIVRGVMKPIPTLYKPLQSVNIDTKEPYKASVERSDSTAVPAASVVCEAVVATEVAKAMLEKFDSDSFEQMKEAVKRYRLYTQNF

SEQ ID NO: 57228 - protein, 341 aa, Enterococcus faecalis
MIVIMKENATEKQMKQVIDLVTGAGLTTQTSQDNGKTVIGLIGDTEKLVEAELTALEGVEKSVRISLSYKLTSRLFHPENTVVDVNGVKIGDGSMTMMAGPCSIESLDQIRECARIAKAGGATILRGGAFKPRTSPYAFQGLEEEGLKYIRQAADELDMQVITEVMDEANLELVAKYSDILQIGARNMQNFKLLQAVGKTGKPIGLKRGIAGTIDEWLNAAEYIAAQGNFNVIFIERGIRTYETATRNTLDLSAVPLIKKLSHFPIIVDPSHGVGIWDLVPPMARAGVASGADGLIVEIHPDPANAWSDGPQSLNEKTYLRMMKEVHIIEKAMKEINALED

SEQ ID NO: 57229 - protein, 288 aa, Enterococcus faecalis
MKEITGATRLAGLFAKPSQHSISPLIHNTAFQNLGVDARYLAFDVGQETLPQAIEAIRTFHMLGANLSMPNKVAAVSYMDELSPTAQLVGAINTIVNKDGKLYGDSTDGTGFMWSLKEKKVDVFQNKMTILGTGGAALSIIAQAALDGVKEIAVYNRKSAGFNDSQKKLANFTERTNCVIHLNDLADTEKLAKDVAESVLLVNATSVGMHPHAHSSPIENYAMIQPKLFVYDAIYNPRETQLLKEARLRGAETSNGLDMLLYQGAAAFEQWTGQKMPVSVVKRKIENR

SEQ ID NO: 57230 - protein, 476 aa, Enterococcus faecalis
MSILKNDFLWGGAVAAHQLEGGWDQGGKGVSVADVMTAGAHGVPRKITAGVLPDEHYPNHEAIDFYHRYQEDIQLFKELGLNCFRTSIAWTRIFPNGDEETPNEEGLRFYDALFDECLKNGIEPVVTLSHFEMPYHLVTKYGGFRNRQVIDFFVKFAEVCFTRYQKKVKYWMTFNEINNQANYEEDFAPFTNSGIAYQEGEDREAIMYQAAHYELVASARAVKIGHAINPDFQIGCMIAMVPIYPYSCNPEDMMMSVSAMQKRYWFTDVHVRGHYPSAIQCYLKRKNISLDVTEEDLTDLANGCVDYIGFSYYMSFAVKGAEKAPTFDYNEAKDLVRNPYVATSDWGWQIDPMGLRYAMNWFNDRYELPLFIVENGFGAIDELEPDGTINDTYRIAYLREHIEMMKEAVAYDGIDLMGYTPWGFIDLVSASTGEMKKRYGFIYVDKDNDGHGTLERRKKKSFAWYQQVIATNGEEL

SEQ ID NO: 57231 - protein, 403 aa, Enterococcus faecalis
MTDFEDKQVANNETMEDAMNSVQEVSVGDIVKGEVLAIEDKQVVVGIEGAGVEGVVPAKELSTLPVEDVHELVKVGDVLDLVVITSIGKDKENGSYLLSKRRLDAKKVWEEIEQDFQAGKVIEAPVTNVVKGGLVVDVGVRGFVPASMVEDHFVADFSEYKGQTLAFKIIEIEPSENRLILSHKAVVEAEKESKKEELLSSLHDGDVVEGKVARLTDFGAFIDLGGVDGLVHVSEIAHQHVGKPSDALTVGEDVQVKILSINPEEGRISLSIKETLPGPWTDIETKAAAGTVLDGTVKRLTSFGAFVEVFPGVEGLVHISQISHKHIATPHEVLHEGDQVQVKVLEVNPEEHRIALSIKALEPKPESQEEPKEEQEYELPEENTGFTMGDILGDALSDAKEEE

SEQ ID NO: 57232 - protein, 226 aa, Enterococcus faecalis
MGKISIAIDGPASSGKSTVAKILAKQLNYVYCDTGAMYRAITYLALQNQIDIQAEEPLVALCVNHTISFQQAENGQRVFIDGHEVTEAIRQPDVTNAVSAVSKHAKVREEMVALQQKIGQAGGVVMDGRDIGTAVLPKAEVKIFLVASVEERAERRFKENQEKGIETDFETLKAEIERRDYLDSTREVSPLVQASDAVKIDTTGLTIEEVVAAIQNVIKQKGFELF

SEQ ID NO: 57233 - protein, 250 aa, Enterococcus faecalis
MFLQNKNVVVMGVANKKSIAWGCAKALKDQGANVIYTYQNERMKKQVVKLADENDLLVECDVASDASIQAAFETIKNEVGTIDGLVHAIAFAKKEELSGNVSDITRDGFLLAQDISSYSLLAVTHYAKPLLNPGSGIVTLTYLGSERAIPNYNMMGIAKASLETAVKYLAFELAADKIRVNGISAGAIKTLAVTGVKDYDQLISISNERTPDKTGVTIEEVGNTCAFLVSDLASGVVGDIIYVDKGVHLT

SEQ ID NO: 57234 - protein, 163 aa, Enterococcus faecalis
MAKKIYYAQQEWQNDHYYLGVTDAGLAFVGSANQSIEELKNWYPQAQLEASEKKTAPYKEALISYLNQHSTTFACPIDIEGTPFQKEVWQALQEIPYGVTMTYQEISEKIGRPRAVRAVGTAIGKNPLLMVIPCHRVIGSKGQLTGYRGGLAMKQALLTFEQS

SEQ ID NO: 57235 - protein, 247 aa, Enterococcus faecalis
MKNRTKSRWKKIVLGIGLFLAVLVIGLTIFIKNSTYQATDSALKISQSATQEKNYDYYTNGQKNDTALIFYPGALVAPASYSEWAQEVATKGYDVYVVHFPLNLAVLAPNAAEQIIKDHPQQNFVLAGHSLGGVMASRFVAENEQRIKGMIYLASYPDEKGALNKKNLPVLSITATNDGVLNWTSYQKAKQFLPKDTQYVSIEGGNHAGFGNYGVQKGDSKATISNEQQQTEISQLIVAWLQSRPNK

SEQ ID NO: 57236 - protein, 72 aa, Enterococcus faecalis
MQSRLVPEKCIACGLCQVYAPNIFDYDDHGIVLFKDEPHARQQFIPENERENVLKAYRKCPTRAIEISKNEC

SEQ ID NO: 57237 - protein, 238 aa, Enterococcus faecalis
MERLQKAIAHAGVTSRRKAEELIVKGRVKVNGQVVKELGTQVSKQDTVEVDGVPIYQEEYGYYLFYKPRGVISAVSDDKGRKVVTDYFTDVTERIYPVGRLDYDTSGLLLLTNDGSFSQKLTHPKHEVDKVYVAKIKGVPTKRDLLPLAKGIRIDGKRTAPANFQILSADIKTGSSVVELTIHEGRNHQVKKMFQAVGFPVQKLKRERYGELTLQGLRPGQYRDLTKKEISQLLNQAK

SEQ ID NO: 57238 - protein, 432 aa, Enterococcus faecalis
MLDKLTVWIENHLAGPMAKIANQRHLRAVRDGIIATLPLIIVGSFFLIIAFPPLPESWGITQFLTSNAATILLPYRMTMYIMALYATFGIGASLAKSYNLDQVSGGILATIAFLLTLVPVAIPEEASKAAGVSGFVLPMANLGGAGMFVGIVTSIIAVEIYRVTDKSKFKITMPDNVPPAVARSFESLTPTLIVMLLIGSITYYLGFDWHTFVGNLVGPLVQAADSLLSVLLLVFLTTFFWFFGIHGASIVGSLARPLWLQLLEENTTAKAAGEALPRIAAEPFYQWFIWIGGAGATIGLAILLAFRAKSEYGSKLGKAILAPSIFNINEPVIFGVPIVLNPILMIPFIFAPMVLATIAWFATKLGLVSEVVFTAPWTLPGPIGAFMATGGDWRAAVLNIVLILVAILIYYPFFVAYDKNELAKEQGKQIEE

SEQ ID NO: 57239 - protein, 368 aa, Enterococcus faecalis
MEKETSKKYEAAVAAFIKENKPKGTVVYDDLANQLATPYTLDAEAMEKLIQKVEDAGISVVDENGDPSEHSLKKDEKEAEKAQAEDLSAPTGVKINDPVRMYLKEIGRVQLLTAAEEVELALKIEEGDQEAKQRLAEANLRLVVSIAKRYVGRGMQFLDLIQEGNMGLMKAVEKFDYRKGFKFSTYATWWIRQAITRAIADQARTIRIPVHMVETINKLIRIQRQLLQDLGREPTPEEIGAEMDLPTEKVREILKIAQEPVSLETPIGEEDDSHLGDFIEDQDATSPAEHAAYELLKEQLEDVLDTLTDREENVLRLRFGLDDGRTRTLEEVGKVFGVTRERIRQIEAKALRKLRHPSRSKQLKDFLE

SEQ ID NO: 57240 - protein, 631 aa, Enterococcus faecalis
MRTMAQRIPQEVIEEVRHRTNIVDIIGQYVQLKKSGKNYMGLCPFHEERSPSFSVAEDKQIFHCFGCGKGGTVFNFLQEIEGISFPESVKRVADLEHLSVDFDWSEPREVADTPENQQRRSLLQLHSKAAELYHHILVNTKIGEPALNYLLERGLTQELIETFQIGFAPQKRDFLSQVFKNEQLDETLFEPSGLFVQRDNGTFLDRFYQRIMFPINDPQGNVIAFSGRLLKTADFPGDEMPKYLNSPETTLFNKRETLFNFDRARKEIRKENTVLLFEGFMDVIAAWQSGVKSGVASMGTSLTNEQIRRLERVAKEVVICYDGDNAGVQATNRAIQLLQENSHFDLSIVSIPEKLDPDEYVRKYGAEAFQNLANHGRETVFSFKMNYHRLTRNMNNEKEQLDYVNELLRELTNVQSPLERDRYLNQIAQEFQLSVHSLEEQFNQLKQEQRSVQRQERQQFYQDEMMPPPMEEPVFEENHVQNKLPLTQVQKAERSLLFRLMNEQGVRQTIQQLPDFSFAHDEYQELYFLLESYATLHQSFDIADFINFLQDNQTKQLAIEIAYQNLSEESSEREVADLLHVIALSSIAEAIEQKKIQQQEAKRVGNQQLEAELTMEIIQLARQLKAQRTFT

SEQ ID NO: 57241 - protein, 298 aa, Enterococcus faecalis
MEDYLVKALCYKGSIRAYAISATETVSEAQRRHDTWSSSTAALGRTLIGALLLGATLKGDDKLTVKVQGNGPAGAIIVDSNGRGETKGYIKNPHVSLKLNATGKIDVRGAVGNEGIFTVIKDLGLKETFSGQTPIVSGEIGEDFTYFMAVSEQVPSAIGLGVLVDTDESVKAAGGFMIQVMPGADESTIDFIEQRLAEVPPISQLLENGETPEQVLYRLLGEDEVEILEKMPVQFKCDCSKEKFATALIAVGIDELNAMIDEDHGAEAVCQFCNNKYHYSEEELIELRDEAIRNTKQK

SEQ ID NO: 57242 - protein, 726 aa, Enterococcus faecalis
MMSIRRTGMNKKNNGMKNGLYYVLVVLAMVMVVYFIFGNNNQQSPDIDYSTFQQQLEDGKVKDMTIQPTNGVYRIEGQYKEKQEVKDTGGLSLWGSTQASSKGFTTTVLPSDTTLAGIQDAAQNNKVKLVVKEQSTSGAWLSLLFSFLPLVIIFFFFYMMMSQQGGGGGGGGRVMNFGKSKAKEADKKANRVRFSDVAGAEEEKQELVEVVEFLKDPRRFAELGARIPAGVLLEGPPGTGKTLLAKAVAGEAGVPFYSISGSDFVEMFVGVGASRVRDLFETAKKNAPAIIFIDEIDAVGRQRGAGMGGGHDEREQTLNQLLVEMDGFDGNEGVIVIAATNRSDVLDPALLRPGRFDRQILVGRPDVKGREAILRVHAKNKPLADDVDLKVVAQQTPGFAGADLENVLNEAALVAARRNKKKIDASDVDEAEDRVIAGPAKKDRVINKKEREMVAYHEAGHTIVGLVLSRARVVHKVTIIPRGRAGGYMIALPKEDQFLMTKEDMFEQIVGLLGGRTAEEIIFGVQSTGASNDFEQATGIARSMVTEYGMSDKLGPVQYEGNHQVFVGRDYGQTKAYSEQVAFEIDQEVRRILMDAHTKAHEIIEAHREQHKLIAEKLLEYETLDAKAIKSLFETGKMPEGADSDYPSEKEAQTFEEAKRALEEKEAQKQVEEKQDFEEAKKELHDEAEEVKVESEQTEKEVQSEEKKDSDSNSEYDRNNYEDRYK

SEQ ID NO: 57243 - protein, 500 aa, Enterococcus faecalis
MADVADVAAKHKQIGGLGITNGLFLGSSFILRKKEGRTMFWQFYKRGKEQGFWQPHQTIVVAVSGGVDSMALLTLMEQVAEKEQLQLVVAHVNHQLREASAQEAQYLATYCQQRELTYYETRWEDPEKQRNLEAKARTFRYEFFKEVMEIEGAAVLMTAHHLDDQAETILMKLIRGTNFSHSAGIKERRPFATGELIRPLLIYPKEELYQFAQRQAFVYFEDETNQTNEYLRNRLRNQVLPLLKQENPQFLDQIASFSNEQRFAQEFIQEQIEPQLSEAVEPTKQGWRIPLKRLLKETPAYQHFFLTAFFQKTLVPLGVSLNQRQMTQILKVLNDERQPQGSVMLEQQWQLAKSYDWLCLEQKQAALREEVTHLLVPGAGIYLSETEWLGLIATDKPFPLPEEINQWTGQLLAIPLTTATPLTVRHRQSGDRITLKPGFTKKLSRVFIDQKVPNEARESAWVITDEQEEIIWVPKFANSYLSIPLETDKIHYRLLFKTKE

SEQ ID NO: 57244 - protein, 87 aa, Enterococcus faecalis
MRLDKFLKVSRIIKRRTVAKEVADKGRIQINGVLAKSSSTVKIGDLVKIQFGNRILEVEVLQLNDSTKKEDATKMYEIKSETRVSEE

SEQ ID NO: 57245 - protein, 665 aa, Enterococcus faecalis
MKAYMQRMGRSLMLPVAVLPAASLLVGIANWIVGTIGASPATTFLMNGGLAILNNLALLFAVGLALGMSKDKDGSAALAGLVAYLVPKTVLAPASIQAIKGFKDIAEVNPAFNSMDNNVFVGIVAGLVAAAMYNRFSGVKLPMALSFFSGKRLVPIMSAISMLAISAVLFFFWPVVYNGLVAFGKGISSLGFVGAGLYGFFNRLLIPTGLHHALNSVFWFDVAGINDIGNFLAGQQALDTGKAIVGQTGMYQAGFFPVMMFGLPAGAFAIYQCARPEKKKVTASLMLAAGFAAFFTGVTEPLEFSFMFVAWPLYVLHAVFTGISLAFAAFMHWTAGFAFSAGFVDFFLSLKNPVANHPMMLVVQGLVFAAIYYFGFRFAITKFNLMTPGREEGDGEETPDVAEGDNKFASLARRIYDGLGADANVTSIDNCTTRLRLTVKDTGKVDQAKIKATGVPGVKVIDDTNIQVIVGTEVQFVADEMQRLYNHQAPATPVKETPVSQSVVEEKAPVSTKETELYSVANGKVIPISEVPDDVFSAKMMGDGFAVVPTDGEVSTPVAGKITSIFPTKHALGIQTDSGIEVLLHMGLDTVELQGGPFTLHVEEGQVVKQGDKIATIDLAALEQAGKKSDLIVVFTNQDIVAQYDLQKAGQTTSMNDVIGNVTVK

SEQ ID NO: 57246 - protein, 194 aa, Enterococcus faecalis
MEGMFVKKMAVYCGASLGNEPIYQQAAVALAAWMKENHYDLVYGGGNVGLMGTVADTLLAEGGEVIGVMPTFLMEREIAHNGITKMHTVSDMHARKKKMIELADVYLALPGGPGTLEEISEVISWGRVGEHMNPCILYNVNGYYDLLAAFFDKMVETNFLTEADRAKIFISDSLEEIGAFIDSYEPPMIRQYKK

SEQ ID NO: 57247 - protein, 451 aa, Enterococcus faecalis
MQKKLVWRDYLYVGSMLFGLFFGAGNLIFPVHMGQEAGASVFLANLGFLATGIGLPFLGVIAMGVSKSSGVFDLASRINRRYALIFTLLLYLTIGPFFALPRLATTSFEIGLAPFVPKDLQWLVLAGFSALFFLAVWLFSRKPSKILDYVGKFLNPLFLALLGILIVLAFVKPLGHVASAAVGENYISSPFFKGFTEGYNTLDALASLAFGIVVVSTLRNMGVEKPGDIAKGMIKSGAFSVVLMGIIYTLLAYMGTMSIGAFPISENGGIALAQIANYYLGLPGSILLAFIVVLACLKTGIGLSTAFSETFEEMFPKVSYQKFLAIVVILPAIFANVGLTNIIQFAVPVLMFLYPLAITLMLLVIISPIFKHRREVYQATTYITLIAAVLDALNSAPAFIKDTAFVTTLLEKAGQYLPLFTIGMGWVVPATVAFLISWVWVMISKKDPILD

SEQ ID NO: 57248 - protein, 289 aa, Enterococcus faecalis
MDIRFKQVDFTYQPNTPFEQRALFDINLTIQDGSYTAIVGHTGSGKSTLLQHLNALVKPTKGQVTIGERVITPETDNKNLKPIRKKVGIVFQFPEAQLFEETVERDIAFGPKNFGVSDEEAKKLAKKMLDLVGLDEKYLQHSPFELSGGQMRRVAIAGVLAMEPEVLVLDEPTAGLDPKGRKEMMEMFSRLHKEHNMTIVLVTHLMDDVANYADHVIVLEKGQIVRAGAPQEVFQETQWLKEKQLGVPTAAEFAEKLVAKGFSFEQLPLTADQLADQLLKKMQEAGEAK

SEQ ID NO: 57249 - protein, 279 aa, Enterococcus faecalis
MQPIIELNNIQFNYQPEDASPALKDVSFSIQQGEWVAIIGHNGSGKSTLAKTINGLLLPAAGTIKVGGKELNEANVWDIRRMVGMVFQNPDNQFVGSTVEDDVAFGLENQGIPRDEMVERVHDALERVRMLDFAKREPARLSGGQKQRVAIAGVVALRPDIIILDEATSMLDPEGRAEVIATIQKIKEESNLTVISITHDIDEAANANRILVMRQGQLTNEGTPEKIFSAGEALVEMGLDLPFPEKLKVALKERGVVVPTNYLTEEGMVDWLWTSVLNK

SEQ ID NO: 57250 - protein, 315 aa, Enterococcus faecalis
MKKIGLFVLLLLFSLLSLVIGVKDIALSQLFQLDAQQQFVLFTTRVPRTLSLIIAGSTMSISGLIMQQLTQNKFVAPSVAGTTDSARLGILVAMLFFPTAPFLYRTAIAFIFALSGTLLFLALIRLLPSKNQVMVPLVGVMFGNILGSIATFFAYQYQLVQNMSAWLQGNFSTVMKGNYEWLFLMIPLWFVIYLFAYHFTVVGMGEAFANSLGVHYQRIQFLGLTLVALASAIVLLMVGNIPFLGVVIPNLVSLRYGDHMKNTLWLTGICGSLFLLICDILARVLIAPYEIPVSVVVGTLGSILFILLLLRGRKQ

SEQ ID NO: 57251 - protein, 117 aa, Enterococcus faecalis
MQMSEQITSAKATAKTVRTSPRKARLVIDLIRGKSVADAISILKFTPNKSAGIIEKVLMSAVANAENNFDLDVESLVVSEAFVNEGPTMKRFRPRAKGSASPINKRTSHITVVVTEK

SEQ ID NO: 57252 - protein, 251 aa, Enterococcus faecalis
MIQMSDVSKKYGDKFVVSDIDLPISEGKLTAFIGPNGAGKSTLLAMMSRLIPKDTGEIYLDKQEVKTWKQSAFSQKIALLKQANGVQLKLTVRELVNFGRFPYSKGRLKSADHEKVTEALEQLGLTEMAEEYIDTLSGGQLQRAYIAMILAQDTDYILLDEPLNNLDMNYAVQMMQILKRLVDELGKTILIVLHDINFAASYADEIVAMKGGKLYAHGATEEVIQTSILNDLYEMNIRICEIEGKRFCLYH

SEQ ID NO: 57253 - protein, 406 aa, Enterococcus faecalis
MEKLVERFLTYVKVNTRSDANSQTTPTTVGQVVLAKMIETELHELGLADVHYNEQNGFLTARLPGNQPAAKSIGLIAHLDTADFSAENIRPQVITNYDGQDVLLNQEQGIVLSVAEFPNLKEYQGETLITTDGTTLLGADDKAGIVEILAAVEYFLAHPEVARGDVWLAFGPDEEIGRGADQFDAPNFPVAFAYTIDSGRVGHFEYETFNAAQAVITIEGTSVHPGTAYGSLVNAIKLGEQLDQSLPQKEVPEQTRGNEGFYLLNKFTGSIEKAELVYIIRDHDQENFQARKQFLEKQVQRLNALADKPRLTITFQDQYYNMKEIIEKDWTPVELAVQAMESCDIEPIITPFRGGTDGSKISFMGIPTPNLFTGGENFHGQYEFITVESMAKAVQTIIAIIRLNAN

SEQ ID NO: 57254 - protein, 167 aa, Enterococcus faecalis
WFLLVVAVLLIRHYVFSPAAVNGSSMEPTLHNNDRLWVTSIKKPQRFDIIAFPSPRNGQRVAKRLIGLPGETVEYRDDTLYINGVSLSEDYLASAKRNVSKNENYTQDFTLETLEATQSLTVPEGMYFVLGDNRPRSDDSRYFGFVKQASVEGVLTFRYYPLDKIGF

SEQ ID NO: 57255 - protein, 267 aa, Enterococcus faecalis
MKSGSPLFEQIDKSIDKKVNLFSNSFSRYAVRAMLACLFLTLGTAVAFAIAIKGEGISHSLGKMLYAFMFSWSLVMILYMNAELGTSNMLYMTVGVYRKKVNFSLAAKILFTCILFNLIGGVLFGFLVSLTVPFQDLPKDSFFFTSIAGKLEKTTLQILVEAMFANIVVNTAVLVSMRMKDDAGKVAAIIFIIFIFAFLGFEHVIANFPALSLAYFASNGAIEAFTAGNVVHNLFWAFIGNFIGGGLIMGLGYAWLDKDNKNLTYFD

SEQ ID NO: 57256 - protein, 336 aa, Enterococcus faecalis
MKGISGFYRHQWQVLLVCLFLLLGTMLLSLMFGATSVSIQTIIDSFTHFDATNQAHQVIQTVRLPRILGAAFVGASLAVSGALAQGITQNPLADSGLLGINAGAGLGLALVFAFLPQASYWWLLVVSFLGAGVSVALIYYLSNHSIRGASPMRLTLVGAGISALFLSFSQFLAIQFNLSQELTFWFLGGVSVISWAQLKIVVPIFLGAFALAILISPSVTILRFGDDATIGLGRNPQRIRLFASITILLLSGLSVALVGSVSFVGLVVPHVMRTVSGENYRRLIPFSALGGALLVLVADLIARMVNPPFETPFGIITALIGIPFFLYLFRKGGKLG

SEQ ID NO: 57257 - protein, 266 aa, Enterococcus faecalis
MNYLEAEDLTTGYGRQVISEALNCSFEAGTITSIIGPNGCGKSTLLKTLARILPAEKGKVFIKNQELQHFSSKEVAQELAILSQTPENTIDLSVFDLVSFGRYPYQSGWKSVTTEDQEYIQWALELTGLTELARESVAILSGGQRQRVWIAMALVQDTDILILDEPTTYLDPAHQLEILNVLKRINQEHQKTIVMTIHDINLASRFSDRVIAMKEGKIINEGTPQEVITVTGLADVFAIQAEISYHSQTQRPLVLSYELMEMELDG

SEQ ID NO: 57258 - protein, 169 aa, Enterococcus faecalis
MIRKEYLKYVTPILLFFLMLIDAHLTKSFETWTSNVYFASSHLLLLAFMFAVPNFSKRYLLITSLILGFICDSYYIGIIGIYTVALTISVMLMYTFKEVIQTNLLTGFFGIVIFTTLYELIAVLIQVAFHLADVSPILFITRVLGPTLLLNMVWYVILSYPLKKLFSVK

SEQ ID NO: 57259 - protein, 156 aa, Enterococcus faecalis
MVTVLFVCLGNICRSPMAEAIFRQKVQQAGLESTIQVFSAATSHWEVGSQPHKGTRKILEQQGISYQGMRATQIQPSDFKKYDYIIGMDTNNVADLKALAPQEEQPRIHLFMEVVAGKETMDVPDPYYTGDFEETYRLVEAGTSEWLKKIKAQLKD

SEQ ID NO: 57260 - protein, 244 aa, Enterococcus faecalis
MRPKEKKRGKNWLINSLLVLLFIIGLALIFNNQIRSWVVQQNSRSYAVSKLKPADVKKNMARETTFDFDSVESLSTEAVMKAQFENKNLPVIGAIAIPSVEINLPIFKGLSNVALLTGAGTMKEDQVMGKNNYALASHRTEDGVSLFSPLERTKKDELIYITDLSTVYTYKITSVEKIEPTRVELIDDVPGQNMITLITCGDLQATTRIAVQGTLAATTPIKDANDDMLKAFQLEQKTLADWVA

SEQ ID NO: 57261 - protein, 256 aa, Enterococcus faecalis
MEVTFIKVLLMFLIAFFAYMHSWFGSTMWNRPIVVAPLVGLALGDLDTGIKLGATLELVFMGAFPVGASNPPDFVSGTIIATAYVIMSGQSISSAVVLAVPIATLVLLIDNLQMTFLLTGASHLADKEAKRGNIQGVERIQLIAGVGNKVLLALIVALGFYLGVPFIEKVLSYVPDFITHGLDIAAGIIPAIGFAMLARMMVTKKMIPFLLLGFLFAAYLKISVVGIALFGIVIVLLYMNMSDGQTREAVVDDNEF

SEQ ID NO: 57262 - protein, 206 aa, Enterococcus faecalis
MIFAYNKEHVGDVLLVIVADDQGAENQVKRVGDVARVSLVEAPETVVAWNIFNASALLGDINGTGQVTLTDEQIEKVNTAIKDAGFSETLEKDDTPKIVVGFVKSCKKHPDSDHLSITQTEVDNGEILQIVCGAPNIKAGQKVVVAKPGAMMPDGLMIWPGVLRGEESFGMICSAKELRLPNAPAKKGILELPFDAEVGSAFAVGE

SEQ ID NO: 57263 - protein, 440 aa, Enterococcus faecalis
MHLLGGYFMQRKDVTPNSDKKSLLQKFGIGLAGGLLGGALILGGAYSGIIPTPNGGNNAATTTSTNHGDTKVSNVSYNVSSDVTKAVKKVQNSVVSVINMQSASNNSSADDPFGGLFGGNEGTQDSSGNNGNDLEAASEGSGVIYKKDGKTAYVVTNNHVVDKAQGLEVVLSDGTKVKGELVGTDAYTDLAVIKISSDKVDQVAEFGNSSKITVGEPAIAIGSPLGSDYANSVTQGIISSVNRNITNKNESGETININAIQTDAAINPGNSGGPLINIEGQVIGINSVKIVQSTSQVSVEGMGFAIPSNDVVNIINQLEKDGKVTRPALGITMSDLTGISSQQQEQILKIPTSVKTGVVVRGVEAATPAEKAGLEKYDVITKVDGQDVSSTTDLQSALYKKKVGDKMEVTYYRGSKEMKATIDLTIDKSALTQQNNRSNQ

SEQ ID NO: 57264 - protein, 159 aa, Enterococcus faecalis
MKIKLVTVGKLKEKYLIQGINEYLKRLNSYAKMEIIEVPDEKAPEKLSDAEMLQVKEKEGQRILGKINDNEYVFVLAINGKQLSSEEFSKEIEQLGISGKSNLTFVIGGSLGLSDSVLQRSNQQISFGRLTYPHQLMRLVLVEQIYRGFRIMKGEPYHK

SEQ ID NO: 57265 - protein, 539 aa, Enterococcus faecalis
MFKKYTQMIRDEFKGYNQKKMKKDFLAGLTVAAVALPLALAFGVSSGATAAAGMITAIIAGIVIGSLSGGFYQISGPTGAMAAILMSIAAVHGMQGILLATFLAGIFLLLAGILRLGSLTSFIPSPVITGFTSGIAIIIALGQLDNFFGVRSEGHNLIEKISSYRSLGFDLSIPTTVMSILVVLGLVFFPKKWNAMIPASLVMIILATLATVVFQLPVATVGKIPTSIFSDTRLELGSLQLSAFQDILVPSISIAMLGMIESLLCGASAGRMTGKPLDSNQELVAQGIGNLILPFFGGVPATAAIARTSVVIKSGAQTRLAGIFHAVFLLLSMLLLSPVMSKIPMPALAGVLVVTAWRMNEWSVIKEFFQKRFHTALCLFFLTMVATVIFDLSLAIVLGVLAGCLFFIAKSAVITINVEEVDWSRMGLVPTDCTENWVVVYLSGPLFFMSSERLKQTLLQLETKSGVVFSMRGVPSIDSTALDILEEFCLAAEGRGQQVQFAALQPEVEKMIRTIQGNQEKEYHFSVAEFLQTVHVAEQ

SEQ ID NO: 57266 - protein, 150 aa, Enterococcus faecalis
MTDILREIGMIARALDSISNIEFKELSLTRGQYLYLVRVCENPGIIQEKIAELIKVDRTTAARAIKRLEEQGFIYRQEDASNKKIKRIYATEKGKNVYPIIVRENQHSNQVALQGLSEVEISQLADYLVRMRKNVSEDWEFVKKGNTRNY

SEQ ID NO: 57267 - protein, 170 aa, Enterococcus faecalis
MGEIKQLTIEDAPALQEISIETYTDTFGPYNTPENMQAYLVEAYNLEKLQKELANPHSDFYFIFVDNQLAGYMKLNRETAQTEPMGPEKLEVERLYILPAFKGKKLGTQLLELAEEKAREFGKKALWLGVWEHNDAARAFYKTIGYRYYSQHSFFMGDDEQTDFILLKEL

SEQ ID NO: 57268 - protein, 498 aa, Enterococcus faecalis
MEKNVSQVTAQEETALKARGYNEDLLPSSPKQRTMGARNFFTLWMGSIHNIPNYAAVGGFIFLGLSPLQVMLAVVLSSFIVATFMNLNGVAGSKYGIPFAMHLQSTYGSLGAKLPGFLRGCVAAIAWFGLQTFTGSLALLIILGKFWPNFLEIGGSFQFFGLRLPELMAFTLFWLLNVAIGFGGSKILNRFTAILSPLIYVVIIGLTIWAIRAGGGLTPILSYQVSGAIRSVNPLVAYLIIFNSVVAVWSAPGASVADFTKNARSTRAQVVGQTTGLVVGYGIFAFSSVVILLGGSLYFGIQEWNILNIIDRLDNVAVVVLAMSVFLLTTISTNATGNIIPAGYQLAALFPKKMTYKKGVMIASVISFLIMPWKLMENADSIFIFLNAIGAVLGPVAGVMIANYYFVQKQQIDLNALYVDKHKKEEANPFYGLNKPAYVATILALVLSLSGQFIPQVKIIADISWFVGFATGFVLYLVLKKWTWDSKKVKETAYQEGK

SEQ ID NO: 57269 - protein, 402 aa, Enterococcus faecalis
MYQQPNFVRRTIMTPGPVEAHPSVLRQMGQPILGQFDPEFLQIMDEVREMIKVPFATKNQQAFAIDGTSRSGLEAGLFALIEPGDKVLVPTYGRFAYLLGEICERARAEVIYLEKDWLAPFEQTTVIEAIKEHQPKIVAMVHGETANAQMQPLDQIGAFCRENEIFFVVDMVATYGGVETKVDDWKIDIAVAGTQKCVSVPSGLSLITYNQRVADYLAGRYQKELGLGADARNERFIQSNYLDLSQLEKYWGPERLNHHTEATTMIYGLHEGLRLLLQEGMENVYARHRKNNRILVESLQKMGLEIFGKLDTKTPTVIPVVIPEGIDGEKVRSLLLDHFKVEIASSFGDLKGKIWRVGNMGYSSREDNVLHFLSAFETVLKHQGYQFEGGSGSTHALAEYLN

SEQ ID NO: 57270 - protein, 388 aa, Enterococcus faecalis
MKKSGQKKRNKKVWFGIGAAVVVVGFIGAKTVFSSKEVEPEYTTYTITEMASLKLDGQVSFLDTRDIFFDPSLGKIAEINVENGKEVKKDSPLLTYNNSDIQATETEQANAVNRNNLQVQQAQENVNLATQKYNEALNKVAAAKQKLNTAKEAEEKETLNAEIQQLNEAVSAANSEVAQANQALQLANSDAVGAANTLEQTRGKVNTVVTAPIDGQVTVDASAMSSTDKPVIKIATQKKNIQGKVTEYDYDKLQTGEEVTVTTVGSGKSAPGKIVSIAQTPIAKNEGNPVVSYQFTVEGDFPWAEGLSTSIAVPQKQMIIPTAAIQKEGQKEFVYVYKAGKAKKTPIETETNLGRKVVKSGLNWKDQVIANPNKELKDNQDVQVAAND

SEQ ID NO: 57271 - protein, 471 aa, Enterococcus faecalis
MKKRALLGVTLLTFTTLAGCTNLSEQKSGEKQTEVAEAKATESEKASVKNVIFMIGDGMGNPYTTGYRYFKANHSDKRVPQTAFDTYLVGQQATYPEDEEENVTDSASAATAMAAGVKTYNNAIALDNDKSKTETVLERAKKVGKSTGLVATSEITHATPAAYGAHNVSRKNMAEIADDYFDDQIDGQHKVDVLLGGGSELFARKDRDLVKEFSQAGYGHVTDKKSLNENQDDKILGLFAPGGLPKMIDRTEEVPSLADMTEAALQRLDKNEKGFFLMVEGSQIDWAGHSNDIVGAMSEMQDFEAAFEKAIDFAKKDGETLVVTTADHSTGGLSLGKGDQYNWLTEPLHAAKRTPDFMAEEIIKNGNVEKTVTEYIDFQLSEAELKAVKTASESKDVEKIAQALRKIFDERSNTGWTTGGHTGEDVNVYAYGPQAEAFSGQIDNTDQAKIIFGLVDGTGQKAEIKDKGIGK

SEQ ID NO: 57272 - protein, 634 aa, Enterococcus faecalis
  MISC_FEATURE (193)..(193): X=any amino acid
  MISC_FEATURE (207)..(207): X=any amino acid
  MISC_FEATURE (210)..(210): X=any amino acid
LVTQLSTIGGVVQQNTVSIPNLSANEWGKQLFQQRQVIYSETERQALIFLLTYSEIEELSVYHYQNFLDVSKGTILADIKKVRHQLATENIALSYERKRGFYLEGDEFRIRRFGKNWLARLLQQKSGTFALFCWLSQHQMSQYAKIRDGIQLAVQEAQLQLVPSRLDEISYFLAFSQKRLGKYGTVVGLRTSXFSPYALIPSVIVFXVIXLGPVANVETESLFFTICLMTALQGELRDTKLEFLLDISGEIIRKMELLAVVQFEQPRELLMNVYYHLVPAYFRISYGFYLPNVLIKDIRQSYRSLYHLCEQALAPLEKLTKRSIPSEEIGFFTILFGGEIFGQKNEQRQEKLKALIVCPSGISSSLILQSELRRLFPMIEFKETNAVREIENVSEKSYDIIFSTVPIETAKKVYLTKPIMSSLEKNQLMHQVQSDWLLPGISMPDVKDILDALKPYISLKKGVTEAQLYRVLHRKMNKILEKEEDLRPMLSELLTTETVQVLPEVADWRAGITEAAKPLLKNGSITEKYIDAMIQKVESFGPFIHICPDVALPHARPEDGVNQLGMSLLKIQKSVDLLEDPKHEIHLFICLAASDNETHLRALSSLTKILSKKESLHRLVAAETVPEILSIIQE

SEQ ID NO: 57273 - protein, 455 aa, Enterococcus faecalis
METLLNLFVSIVSQPAILVSLIALLGLVLQKKKFSDVVQGTLKTFVGFLVLIGGAGLLANSLTPFAEMFQTALNTQGVVPSNEAVVAIALQQYGTPTALIMLVGMVVNILLARFTRFKYIFLTGQAMMYVSCLTAVILVGAGFSVSLPMILLGGLFEGTLLTVTPALCQPFMKQITGNDKVAMGHTGNIGYAASGFIGKVFGNKEKSTEDIKIPKSFGFLRDSTISIMILMSIVYVILALLAGTGYVEHELSNGENAIIFSLIQAGTFTAGFVVVLQGVRMVLGEIVPAFQGIAKKLVPNSKPALDVPIIFPYAPNAVLIGFFVSFIVGTISMLAMVGLNTTVIIPGVVGHFFCGAAAGVFGNSTGGSRGAILGAAFNGLLISWLPLFILPVLGDLQLASSTFADTDYLIPGLFLGKLGEAGPSLLVGGIIAFVVVVLLASAVLTMREKKVAEEN

SEQ ID NO: 57274 - protein, 131 aa, Enterococcus faecalis
MKKTKVINSDISRVIAQMGHFDKLSIGDAGMPVPRTTEKIDLAVTNGVPSFMEVLNNVLEELAVQRIYLAEEIKTENPDMLAAIETRLPETPISFIPHTEMKQELNNCHAFIRTGEMTPYANILLESNVVF

SEQ ID NO: 57275 - protein, 585 aa, Enterococcus faecalis
MKKTKIVCTIGPASESVDMLVNLINAGMNVCRLNFSHGDYEEHGARIKNIREAVKITGKRVAILLDTKGPEIRTNDMENGAITMKIGDSVRISMTEVLGTNEKFSITYPELINDVNVGSHILLDDGLIDLEVTDIDRDANEIVTVVKNEGVLKNKKGVNVPGVSVNLPGITEKDANDIRFGIGQGIDFIAASFVRRASDVLEITKILEEENATHIQIIPKIENQEGIDNIDEILKVSDGLMVARGDMGVEIPTEDVPVVQKALIKKCNALGKPVITATQMLDSMQRNPRPTRAEANDVANAIYDGTDAVMLSGETAAGDYPLEAVQTMARIAVRTEETLVNQDSFALKLYSKTDMTEAIGQSVGHTARNLGIQTIVAATESGHTARMISKYRPKAHIVAITFSEQKARSLSLSWGVYATVADKPSSTDEMFNLASKVSQEEGYASEGDLIIITAGVPVGEKGTTNLMKIQMIGSKLVQGQGVGEEAIIAKAVVAATAEEAVAKATEGAILVTKTTDKEYMPAIEKASALVVEEGGLTSHAAVVAIAQNIPVIVGAADATSLINNDEVITVDPRRGIVYRGATTAI

SEQ ID NO: 57276 - protein, 320 aa, Enterococcus faecalis
MKRIGILTSGGDAPGMNAAIRAVVRKSIFDGIEVYGINYGFAGLVAGDIRRLDVADVGDKIQRGGTFLYSARYPEFATEEGQLKGIEQLKKFGIEGLVVIGGDGSYHGAMALTKRGFPAVGIPGTIDNDIPGTDFTIGFDTAINTVLESIDRIRDTATSHVRTFVIEVMGRNAGDIALWSGVAGGADEIIIPEHDFDMKNVAKRIQEGRDRGKKHCLIILAEGVMGGNEFADKLSEYGDFHTRVSILGHVVRGGSPSARDRVLASKFGSYAVELLKEGKGGLCIGMLDNQVVAADIIDTLENNKHKPDLSLYELNHEISF

SEQ ID NO: 57277 - protein, 267 aa, Enterococcus faecalis
MKKLIAIDLDGTTLNAQSLISPKTEQTLKKAIDNGHYVSIATGRPYRMSHQFYQQLGLTTPMVNFNGALVHIPEKKWDLESEANIERDLVFDILAQKKELQLDFVAAENKETFYIDTLDGFDPKFFASKATLDNLLTAKNLRTNPTSMMVRTTPNQAEKVADTLTKQYGDYIDVRTWGGPMPILEMVAKGIQKAHGVDQVANFLSVKPADIIAFGDEHNDEEMLSYAGWGVAMNNATDKIKSVANDVTEKTNDQDGLADYLENYLDL

SEQ ID NO: 57278 - protein, 270 aa, Enterococcus faecalis
MKKEIIVYTISDSLGETSQKLLAAASAQYPDISFLNRYNFSFVTTEEELLEILKDALKDKALVVSTLVSKQLITAAKEFSERTGLLYLDLMAPFFELIQAKAGVDPIEEPGRRHQLDRAYFDKISAIEFAVKYDDGKNPQGFLDSDILLLGVSRTSKTPVSMYLANQGYRVSNLPLIPEVPLPPILEEMDPQKMIGLVCSPETLGQIRSSRLASLGLGNETSYTNVERIEQELAYAEEIFAKYGIPVIDVTAKSVEETAFLIKEKLDERN

SEQ ID NO: 57279 - protein, 106 aa, Enterococcus faecalis
MDGQQNLEAIMGLIMYGGNAKSDAMEAIAAAKSGDFELADKKIADAEESLVHAHHSQTGMLTEEAKGNNMQVTLLTVHSQDHLMTAIAFTDLAKEIIDLYRRIDNE

SEQ ID NO: 57280 - protein, 442 aa, Enterococcus faecalis
MEKKQLKREITTFGALSTVMGTVIGAGVFFKAASVVGHAQSASLAIFAWVLGGALTICAGLTSAELATAIPETGGAVKYIEYTYGKLAGFLLGWAQSIIYYPANISALSIIFSTQLINLFHLSANLLIPIAILAGTSITIINLLGTKIASLVQSTTLVVKLIPIALISLVGLFTPGQVAVSLFPVETTANTGFLVAFSGALVATMFAYDGWLGVGNVAGEMKRPERDLPKAIIFGLLLITLIYALINFVFLKTLPIEQIAGNLNAASDASVAIFGPIGGKIVTIGILISVYGALNGYTMTGIRIPYALALDNLMPFSRQFQKLSKRFVVPYVAGIFQLAVAIIMMFFGTFDLLTDMLVFVMWLFNLLIFLAVFILRKREPELKRPYKVPGYPIIPIIASLGGIFILVTTSITQPILALIGIGITLLGIPVYLVNKQKTKPKT

SEQ ID NO: 57281 - protein, 322 aa, Enterococcus faecalis
MTENVKKLAHQLIEWGVLHGAQDVYFLPNDTEIAISFRTGMQRTLYTQVSAEIGEKLIFHFKFIGGMDVGERRKAQLGATTYLIGETKQRLRLSSVGDFQNRESLVIRFLHRFGEQAEHFFFPHQLNEIEASCQKRGLYLFSGPVGSGKTTTMYRVAKQRSGEQQVIAIEDPVEIEEKQFLQLQTNEKIQLTYEALIKVCLRHHPDILIIGEIRDGETAQAVIRAALTGHTIFATIHARNLLGVQRRLIELGGPEHELAECLQGIIYQQILTTTINKEQVAGILYDYFFFKEAVIKSSWQKNLRKAWAYGFITEKTYFQAIE

SEQ ID NO: 57282 - protein, 332 aa, Enterococcus faecalis
MIHLGVIGTNWISHQFVAAALETGAYDLTAVYSRKLATAQEFGSRYGDVEYAIDLETFFGIAHMDTVYIASPNSLHFEQAKQAILAKKNVIVEKPAFSTPDEMAEIIELANKNRVYFFEAARNIHEQSFQKIAELLPLKNQILGANFTYMKYSSRYDQVLEGKEPNIFSPHFSGGALADLGVYLVYAALGWFGVPNESHYFASKIATGVDGLGTIILRYDQFDVTLNTGKISDSFAPSEIYFENGTLILDSVNAISSAEYHDRAHEERDVLDIQVADNPMIEEARDFAAVLNNPTDKYWGTKYEEWVELARNVNKVVTDLRHSAGIIFDADK

SEQ ID NO: 57283 - protein, 507 aa, Enterococcus faecalis
MNEKVALFTIFGGTGDLAKRKLYPSLFRLYKKGLLAERFAVIGTARREWTDEYYREIVRETIQDLNPTAEEATEFSSHFYYQSHNVNDTEHYNTLKELSDRLNEQYHLEGNHVYYLAMAPQFFGTIVNHLKSQHIISEEGFDRLIIEKPFGSDYESAYELNEEIRAAFPEQDIFRIDHYLGKEMIQNISAIRFANNIFESQWNNRYIDNVQITFAESLGVEDRGGYYDHSGALKDMVQNHILQVVALLSMEPPVAFSEKEIRTEKVKALRAIRLYSEEEALQNFVRGQYGEGQLADQTFAAYRDEPNVAETSSTETFVAGKFLIDNFRWSGVPFYVRTGKRLTEKGTRINIVFKQVPINVFKDDTCEECDKTDLPPNVLTIYIQPTEGFSLTLNGKEIGQGFNTTPVKLDFRQSAEMTENSPEAYEKLLLDCLNGDSTNFSHWDEVAQSWRIVDIIRHAWDKTDVSFPNYAAGTMGPQAAFDLLEKDGFTWEWQPDNWYRDRGQLDQ

SEQ ID NO: 57284 - protein, 233 aa, Enterococcus faecalis
MALTPLDIQNKDFSTKMRGYNQDDVDDFLDQVTRDYEDALQKNRELEKSLKHAEEKLQYFNELKDALNQSIIVAQDTADKVKSSANKESEMIITSADNQAKETLVEAERKSNAMIADAEAKSTQILAEAIERARQLAGETEDLKKKTRVFHQRLSLMLETQLEQVKSEEWEEILKPFSSYVGDKHTAVKEILDEQDLDNENETVVNSEENTDAVVEKKPVIEVTEETIEEESK

SEQ ID NO: 57285 - protein, 374 aa, Enterococcus faecalis
MWKISNENDIFKKRKPLPPKKSEESQPELTPWQKQNQEYLKKQAEEAASKGENEQAEVTITLQEQSQEEPQQHLPQETVEEEEHFADRLPNVKKTRNKRLYRRLAFILTCLGTAILVALYFVSPLSRLSEVTVSGNKSVESQAIIQQSKLETGSGLWEQYSNRNYFSANIQKKFPIIKKANIKLNGINSFKIDIQEYQIVALAATKGGYHPILENGKTLAETTKAAESGKPIFENFKEDKLIPELMASYNKLPQEIKQGISEIKYAPSKTNKDLINVYMNDGNRVIVNISDLSEKMAYYSQVAEQMDKPGIVDMEVGIFSYPYEKESEETGSEVSEDSAVENQEVVDPNAGVATDEANNGTPTNGENQEVQQAE

SEQ ID NO: 57286 - protein, 322 aa, Enterococcus faecalis
MRQMMTEEFRHYTVLLKETVDGLQVKPDGVYVDCTLGGAGHSEYLLTQLNEHGHLYAFDQDQKALAHAKTRLQKYVDKGQVTFIKSNFRNIKEELAEHGVFHVDGILYDLGVSSPQLDEAERGFSYHQDAPLDMRMDQDAPLTAREVVNTYSYSELVKIFFRYGEEKFSKQIAREIERVREKQPIETTGELVEIIKTAIPAPARRKGGHPAKRIFQAIRIAVNDELGAVEESLEQAIDLLAKNGRISVITFHSLEDRIVKTMFKEYSTVQDLPPGIPVVPEEFQPELKVITRKPILPSDSELSENNRSRSAKLRIAEKIKSR

SEQ ID NO: 57287 - protein, 143 aa, Enterococcus faecalis
MLMGEYQHNIDAKGRLIVPSKFREELGEKFVVTRGMDGCLFGYPLNEWSQLEAKLQEMPLAKKDARTFVRFFYSAATECEIDKQGRINIPANLRTHASLEKGCVVIGVSNRIEIWSDERWHAFSDEAEENFDELAETMIDFGF

SEQ ID NO: 57288 - protein, 249 aa, Enterococcus faecalis
MEQAIQLLQQSLDTSFLDAYIENGENILDDFQVRVLDGVPNPETVKQLETLYHTIKKIDLAPEDVRRLSQLLLLKGTRKEQLQANHQLTPDGIGFLFVYLVEQLTNKSEPLKILDPASGMGNLLLTVLLNLETAGYKVSGYGVDIDETLLAVSSVNNAWSQANIQLFHQDGLQDLLLDPVDLALSDLPIGYYPNDERAKGFAAAAEEGHSYAHHLLMEQAMKYVKPAGFGLFLIPTNILETEQSEFFKN

SEQ ID NO: 57289 - protein, 293 aa, Enterococcus faecalis
MTNFSQQHLPLVEKVMVDFIAEYTENERLKEAMLYSIHAGGKRLRPLLVLTTVAAFQKEMETQDYQVAASLEMIHTYSLIHDDLPAMDDDDLRRGKPTNHKVFGEATAILAGDGLLTGAFQLLSLSQLGLSEKVLLMQQLAKAAGNQGMVSGQMGDIEGEKVSLTLEELAAVHEKKTGALIEFALIAGGVLANQTEEVIGLLTQFAHHYGLAFQIRDDLLDATSTEADLGKKVGRDEALNKSTYPALLGIAGAKDALTHQLAEGSAVLEKIKANVPNFSEEHLANLLTQLQLR

SEQ ID NO: 57290 - protein, 425 aa, Enterococcus faecalis
MQQPLAYRMRPRHLDEVVGQQHLVGPGKIIRRMVEAKMLSSMILYGPPGTGKTSIASAIAGSTNYAFRMLNAATDTKKDLQIVAEEAKMSGTVILLLDEIHRLDKTKQDFLLPHLENGRIIMIGATTENPYITINPAIRSRTQIFEVKPLTETDIQQAIQEALTDSTRGLGDYPVHLEEKALQHLTRATNGDLRSALNGLELAVKSTPKNEQGEIKITLPIIEECVQRKALTHVKDGDAHYDVISAFQKSIRGSDVDAALHYLGRLVEAGDLPIICRRLMVIAYEDIGLGNPAAAARTVTAVQAAEKLGFPEARIPLASVVIDLCLSPKSNSAVTAIDAALADIRQGSVGDVPDHLRDAHYAGAKELNRGIGYQYPHNFENGWVNQQYLPDKLKEARYYEPIDIGKYEQALHQQLKRIQEWKQKK

SEQ ID NO: 57291 - protein, 162 aa, Enterococcus faecalis
MNYSQKMKMEKRMSKTELTRHEIREKALQALFPLDFNADLTKQDAIDYALAYDNREIVSEDGEDLVPTYLDLLVGGVCSRKAELDEVITNHLGNNWSMQRLAKIDIVILRLAIFEMLYVSDVPNIVALNEAVELSKKYSDDRSRKFVNGVLSNVMKEIDSEA

SEQ ID NO: 57292 - protein, 250 aa, Enterococcus faecalis
MQRYFMKEDYQEKDLYKVADENYHHIVRVMRMTPNDRCYLVFQNKTAILAEIVEIDSTSVYFKEISKEEMDKELPIEVTIACGLPKGDKLEWIVQKGTELGGNQFIGFPAKTSVVKWDHKKRAAKEKRLQKIATEAAEQSHRQQTPSVSLVEKTQEIIAQFDSYDTVLVAYEESAKQGEKSQLAQVLSTCQPGARLCVLFGPEGGFAPQEIEQFLQAGAKLCGLGPRILRAETAPLYLLSVVSYQMELLN

SEQ ID NO: 57293 - protein, 737 aa, Enterococcus faecalis
MPKEEILTGPAVIKIVSTYMGPEHVELVQKALTYAEKAHEGQVRQSGEPYIIHPIQVAGILAELHMDPHTVATGFLHDVVEDTDVTLDDLKEEFGEDIAMLVDGVTKLGKIKYKSHEEQLAENHRKMLLAMAQDLRVIMVKLADRLHNMRTLKHLREDKQRRIAQETLEIYAPLAHRLGISRIKWELEDTALRYINPNQYYRIVNLMQSKRDEREAYVAEAVEDIRLATEDLEIYAEIYGRPKHIYSIYRKMKDQKKQFNEIYDLLAIRVIVDSIKDCYAVLGAIHTRWTPMPGRFKDYIAMPKANMYQSIHTTVIGPKGNPVEVQIRTHEMHQIAEFGVAAHWAYKEGKAEKIETDELTKQVDWFHEIIELQDESYDASEFMQGVKEDIFSDKVYVFTPSGDVTELPKGSGPLDFAYSIHTEIGNKTTGAKVNGKMVQLDYVLKNGDIIEVLTSPNSFGPSRDWLKMVKTSKAKNKIKRFFKEQDREDNIIKGHDAVIKYMTEIGFTPKEFLTKNKMAEVLDKFKFQTEDDLFAAVGYGEVSAQVVCNRLTEKERREQELERQRQEAEELLNQPAKKESEKMKVRHEGGIVIQGVDNLLIRLSRCCNPVPGDEIVGYITKGRGVSIHRADCPNVQHQEELAQRLIEVEWEDTEHSRKEYAADLEIYGYDRSGLLSDVLQVISSMTKNLVGVEARPSKDKMAQIHVTVKIQNLSHLKTIVDKIKSVPDVYSVRRTNG

SEQ ID NO: 57294 - protein, 333 aa, Enterococcus faecalis
MTVKVGINGFGRIGRLAFRRIQDVEGIEVVAINDLTDAKMLAHLLKYDTTQGRFNGTVEVHEGSFNVNGKEIKVLANRNPEELPWGELGVDIVLECTGFFTSKEAAEKHLTAGAKRVVISAPGGNDVPTIVYNTNHETLTGEETVISGASCTTNCLAPMAKALHDNFGVVEGLMTTIHAYTGDQMTLDGPHPKGDFRRARAAAANIVPNSTGAAKAIGLVIPELNGKLDGAAQRVPVATGSLTELVTVLDKEVTVDEVNAVMEKAANESYGYNTDEIVSSDIVGMTYGSLFDATQTKVMTVGDKQLVKTVAWYDNEMSYTAQLVRTLEYFANL

SEQ ID NO: 57295 - protein, 630 aa, Enterococcus faecalis
MYGKNKVGIELQMSVGEYRKIKVKSIVMKNLVYLAVLLIGIYLGMSFLKRFERTYSAPTDDVVVKINQNHLFVSDNAQILNEEVINNVQKINQELSKTETKPQLMVITVEQVPENETIESFTNQIGNKLGIGNKLYNNGVIYLVAVKDRQARLEVGYGLEEIIPDSLTDEITDSTVKDFYKLKDFNAGIHIVTTRIKELLTTDTMSKTTSLPKVSFLQKIWLYLLGIGRSLKPWLIIVFIIVMLYFLWELRNAGKELSARLALVDMANRYKEDVAMFYNGGISSKAIVLGEQSVEFKAAKARLEKNILYPENSKKEIIIPAYYDMDFAFGEVTPKKFIYNYVAQWKDLRSSSMCACFWKVNQPWIYLPRFWIGEVYWEKVPEKKLPACRISGINDNLISAYLKIILFPLSILLKHPFLVSVTLIIYVQVSLSEQSFPSTVFTLITEILTFLEDEDSLVPMVSLVYFLIPVFFLFGYIKSIGVGLQNRLHLDSMIRRFLKEIQQVSSEKSKSLKQLANDLDNQQYKIEKKLLRKKIREKKITNKKASKSFYPIRFIKTTYPEYYDMRFAYGNVSIAKFLASSRSDRQLKKTSMYANRHDWWVTSNEGSSDDGSGDSFGGGSFGGGGGTSSW

SEQ ID NO: 57296 - protein, 336 aa, Enterococcus faecalis
MAITVKDVAKKAGVATSTVSRVINDHPSISESTKKKVRKVMDDLGYVPNMTARNLGKRISSAIGVILPPLDSKERLGNPFYLEIMEAINEEARLYDMTTAIATAKSFDVLLENVKRMHLQKQVDGFILVYSDSKDPVIDYLDENNIPFTLIGQPYQHETEIVYVDNDNQLLGKQATEFLIENGHKNILFVTNTTHESLYFERYFGYQKAMMMQGLTVLPSVALEKPEDYMAFDDILHQNNATALVVIDDIFALRTMQLAQIYGYQVPETLSIISFNNSIFSTLTHPYLTSIDIDTSELGRMAMKKLYELIHEELTNGVRLVIPHKLIKRETVIPIH

SEQ ID NO: 57297 - protein, 393 aa, Enterococcus faecalis
MKNTRNTVPSLLIIILLVGFPQISESIFTPILPALSSAFNIHDSVAQLTMSIYFVAFAVGVLFWGILSDTIGRRPAMLLGILCYLIGNIGLFLSPTFPWLLFFRLIQAFGASVGSVITQSMMRESFNDLQRGKIFAQTSAALSLSPAIGPLVGGLVQTYFGYQHVFSTLIVMAVLLLFYSFYRLPETFHLGNTLTKAPFWSVAKRLSFDSKVWCYGLLIGGINGLLFSYYAEAPFIFINHFGFSSVQYGFLGLVLAVSSILAAVLINWLLGYWSAEKIAFAGLLLSIFAACCLLIMTQFETIIGLILFIFLFFLGINITLPNALSMALKGYESVIGTASGIFSFVYYLFVSFFTYLISYFHNGTIWVLPLYFLSFACLLAFSYYVIVYRKTLK

SEQ ID NO: 57298 - protein, 327 aa, Enterococcus faecalis
MELFDSLKFKVVRRNIKIVFPEATDPRILGAAARLKSDELVEPILIGDPTDIANAAMARGINTSNFIIINPNDYEKWDEMVEAFVERRNGKATKEDAEKILKDVNYFGTMLTYMGIADGMVSGAIHSTGDTVRPALQIIKTKPGVSRTSGAFLMIRGRDQERYLFSDCAINVNPTAQELAEIAVDSAKTAELFDIEPKVSLLSFSTKGSAKAPEVTKVAEATKIAQELAPEYAIDGELQFDASYVSSVAQLKAPNSKVAGEATVFVFPDLQSGNIGYKIAQRLGNFEAIGPILQGLNKPVSDLSRGANEEDVYKLSIITAAQTLMND

SEQ ID NO: 57299 - protein, 501 aa, Enterococcus faecalis
MAEEKYIMAIDQGTTSSRAIIFDKKGNKIGSSQKEFTQYFPNAGWVEHNANEIWNSVQSVIAGSLIESGVKPTDIAGIGITNQRETTVVWDKATGLPIYNAIVWQSRQTTPIADQLKEDGYSEMIHEKTGLIIDAYFSATKVRWILDHVEGAQERAENGELMFGTIDTWLVWKLTGDTHVTDYSNASRTMLFNIHDLDWDQEILDLLNIPRVMLPKVVSNSEVYGLTKNYHFYGSEVPIAGMAGDQQAALFGQMAFEPGMVKNTYGTGSFIVMNTGEEPQLSKNNLLTTIGYGINGKVYYALEGSIFVAGSAIQWLRDGLKMLQTAAESEAVAKASTGHNEVYVVPAFTGLGAPYWDSQARGAVFGLTRGTTREDFVKATLQAVAYQVRDIIDTMKEDTGIDIPVLKVDGGAANNDFLMQFQADILNTAVQRAHNLETTALGAAFLAGLAVGFWKDLEEIKAFQEEGQQFEPIMAEEEREDLYEGWQQAVAATQQFKRKNK

SEQ ID NO: 57300 - protein, 239 aa, Enterococcus faecalis
MGTSMMTQLFGEFFGTMILVLLGDGVCAAVNLKKSKAFASGWVVIALGWGAAVTLAVYMSGYMSPAHLNPAVTVAMAITGNFEWGMVLPYIVAQVLGGFIGGLVVWLAYLPHWNITEDKGAILGTFATGPAVRNYPANVLTEIIGTFVLVFGLLAFSQNDLAAGINPMLVGILVLGLGLSLGGPTGYAINPARDLGPRLAHQIIPVKTKGDSDWAYSWVPIVGPILGASLAAVIYLFTI

SEQ ID NO: 57301 - protein, 295 aa, Enterococcus faecalis
MTDYKEIATPSRTKEILKKHGFSFKKSLGQNFLTEPNILRKIVETAGINQQTNVVEVGPGIGALTEQLAMNAAQVVAFEIDDRLIPVLADTLSRYDNVTVVHQDVLKADLVETTNQVFQEKYPIKVVANLPYYITTPIMMHFLESSLDVAEMVVMMQKEVADRIAAKPGTKAYGSLSIAVQYFMEASVAFIVPKTVFVPQPNVDSAIIKLTRRATPAVTVTNEKEFFKLTKASFQLRRKTLWNNLTHFYGKDEQTVAWLKESLAEAEIDPSRRGETLSLEEFARLSNALEKNKPV

SEQ ID NO: 57302 - protein, 194 aa, Enterococcus faecalis
MKEKMKVAEIIVVEGKDDTRRIQEVVAADTIETIGSAINDEILTQIEHAQETRGVIIFTDPDYSGEKIRKTIMEVVPDAKHAFLSRKVAVPKKNGGSLGVEHASDEAIIEALKKVVTPVQADEDYQEIPRQTLVEYGLIAGANAKKYRELLGDDLRIGYTNSKQLVKRLSMFRITEAELKESMTRILKELANEE

SEQ ID NO: 57303 - protein, 256 aa, Enterococcus faecalis
MIFDTHTHLNAEQFNDDIPETIAHAQELGVTEMAVVGFDEPTIEKSLLLSQEYANIYSIIGWHPTEAGSYTPEVERRLQEQLTLPKIVALGEIGLDYYWMEDPKEVQEKVFRRQIAIAREMNLPFSVHTREALEDTYRILKDEKISDIGGIMHSFSGDAEWMKKFLDLGLYISFSGVVTFKKALDVQEAAMAVPLERMLVETDAPYLAPVPYRGKRNEPGYTRYVVEKIAELRQLTFEEVAEQTRVNAHRLFRIDK

SEQ ID NO: 57304 - protein, 417 aa, Enterococcus faecalis
MYDNTDNNGTVRCSFCGKTQEEVKKIVAGPGVYICNECIDLCKEIIDEEFYDEAVRELTDVPKPQEILNVLNEYVIGQERAKRTLSVAVYNHYKRVNQSETAATQDDVELQKSNICLIGPTGSGKTFLAQTLAKTLNVPFAIADATSLTEAGYVGEDVENILLKLLQSADYNVERAEKGIIYIDEIDKIARKSENVSITRDVSGEGVQQALLKILEGTVASVPPQGGRKHPHQEFIQIDTTNVLFIVGGAFDGIETIVKNRLGEKTIGFGKTNSALNEEESIMQHIIPEDLLKFGLIPEFIGRLPVMAALDKLTNDDLVRILTEPKNALVKQYQKLLSLDDTKLEFEPEALKAIAAKAIERNTGARGLRSIIEEIMMDVMFDVPSDESIEKVIITKMAAEGTGKPTIIYNKKDKEAV

SEQ ID NO: 57305 - protein, 319 aa, Enterococcus faecalis
MKIGLRTVKTAISAALAMIIAEKLGLLYAPSAGIISVLSVTSTKKTSVMTGIYRLLSLALATILAYICFTFLGFTAIAFGIFLLLFIPAAVYFQLSDGIVVSSVLVTHYLVEKNLSWAIIGNEFLLMSIGVGLALLANSYMPDTEKRLREDQEVIETMFRKILREMALHLNNAAGERNLVMHCADLKTFIRTGETWAKNHAENQLLSTNTYYLEYFAMRKMQSNILKNMLELLEDITVDAQQVRYIQQLLEYTAETFAENNDGQEIMNRIKTVYETYRTKPLPQTRSEFENRARLFQFLQLFQSFIQVKADFAKLQLDK

SEQ ID NO: 57306 - protein, 445 aa, Enterococcus faecalis
MGNQENKLYHFVGIKGSGMSSLALVLHQKGYNVQGSDVEEYFFTQRDLEKSGVPILPFNADNIDKDMIVIAGNAFPDTHEEIARAIELGAEVIRYHDFIARFIEPYTSIAVTGSHGKTSTTGLLAHVLSGINPTSYLIGDGTGHGEPDADFFAFEACEYRRHFLAYSPDYAIMTNIDFDHPDYYKSIEDVFSAFQTMAHQVKKGIFAYGDDKYLRQLESEVPVYYYGVSEEDDIQARNIQRTTEGSSFDVYHKDDFVGHFVLPAFGHHNIMNALGVIAVAYFEKLDMQKVAEEMLSFKGVKRRFSEKKVSDMIIVDDYAHHPAEIKATIDGARQKYPDKEIIAVFQPHTFTRTIALMDEFAEALDLADEVFLCNIFGSARETQGEVRIEDLGEKIQKGGQVITEDNVSPLLDFENAVVVFMGAGDVQKFEQAYETLLSNTTRNVL

SEQ ID NO: 57307 - protein, 453 aa, Enterococcus faecalis
MKEKKTEKMLNYANGPSLEEINNTVEVPKNASFWRTLLAYSGPGALVAVGYMDPGNWITSIAGGAEYKYTLLSVILLSSLVAMLLQSMAARLGIVTGMDLAQATREHTSKRTGVALWVVTELAIMATDIAEVIGGAVALQLLFGFPLLIGVLITTFDVLLLLLLTKLGFRKIEAIVSCLIAVIFFVFAYEVALADPNVGEVLRGFIPDTKIATDKSMLFLALGIVGATVMPHNLYLHSSIAQARKFDRNDDVEKAKAIRFTTWDSNIQLTVAFVVNCLLLILGGALFYGTNSELGKFVDLFDALKNPDIVGNIASPVLSILFAIALLASGQNSTITGTLSGQIVMEGFIHLKMPLWARRVLTRLLAIVPVIICVIIYGGSETAVEDLLLYTQVFLSIALPVSIIPLTMYTSDKKLMGQFANPAWVKFLAWIIAIALTLLNLFLIYGTLTGLTN

SEQ ID NO: 57308 - protein, 174 aa, Enterococcus faecalis
MTDYLNVGKIVNTQGIKGEVRVISKTDFPEERYQKGAMLLLFQEKKAPIELVVKSHRKHKNFDILSFEGHPNINDVEKYRDGILKVAKDNLAELAEDEFYYHQIIGATVYDETGSELGKIKEILSPGANDVWVVQRPKKKDLLLPYIEGVVTKVDVENQRIDVDIPEGLIDDEN

SEQ ID NO: 57309 - protein, 449 aa, Enterococcus faecalis
MSHIQLDYSKLAPFVADHELEYMQTQVTAVDKALREGTGAGNDFTGWIDLPENYDKEEFARIKKAAAKIQSDSEVLVVIGIGGSYLGARAAIEFLTHSFNNLLSKEERKAPQIFFAGNSISSTYLADLINVIGDRDFSVNVISKSGTTTEPAIAFRVFKELLINKYGKEEANKRIYATTDRAKGAVKVEADAEGWETFVIPDDVGGRFTVLTPVGLLPIAVSGADIDRLMEGANDARKEYGATSDLKENQAYQYAALRNILYRKGKTTEMLINYEPGMHYFSEWWKQLYGESEGKDGKGIFPAAADFSTDLHSMGQYVQEGMRNLFETVVKIENPRHSISIPEQNEDLDGLGYLQGKEIDFVNTKAFEGTLLAHTDGGVPNMIVKVPTMDAYSLGYVMYFFEIAVGISGYLNGVNPFDQPGVEAYKRNMFALLGKPGFEELAKDLNARL

SEQ ID NO: 57310 - protein, 448 aa, Enterococcus faecalis
MDAKQYVKNIQEKIHQLDQGQTEYLQAVDEFLPTVEGFLEKNPQYIEANVLGVLIEPERIFQFRVPWQDDQGNWHVNRGYRVQYNSAIGPYKGGLRFHPSVNLSVMKFLAFEQIFKNSLTGLPIGGGKGGSDFDPKGKSDAEVMRFCQSFMTELQKHIGPSTDVPAGDIGVGAREIGYLFGMYKRLRNYDAGVLTGKPLGYWGSQARTEATGYGTVYFVKHLLADKNDTFEGKKVAVSGSGNVAIYAMEKATELGATVITCSDSSGFVYDPEGIDVALVKELKEKNRERISKYVETRKGATYYDKESVWNFETAYDIALPCATQNEINEKQAAILVKNGVKVVAEGANMPCTLEAVAVFAKSAVIYCPGKAANAGGVAVSALEMSQNAERLAWSFEKVDGMLDQIMQNIYETCRDTANEYQARDNFVLGANIAGFEKVAAAMLSQGLV

SEQ ID NO: 57311 - protein, 387 aa, Enterococcus faecalis
MKKFDVIIVGAGTSGMMATIAAAEAGAQVLLIEKNRRVGKKLLMTGGGRCNVTNNRPAEEIISFIPGNGKFLYSAFSQFDNYDIMNFFESNGIHLKEEDHGRMFPVTDKSKSIVDALFNRINELGVTVFTKTQVTKLLRKDDQIIGVETELEKIYAPCVVLTTGGRTYPSTGATGDGYKLAKKMGHTISPLYPTESPIISEEPFILDKTLQGLSLQDVNLTVLNQKGKPLVNHQMDMLFTHFGISGPAALRCSSFINQELTRNGNQPVTVALDVFPTKSFEEVPAKQLTEKQRLSFVELLKDFQFTVTKTLPLEKSFVTGGGISLKEVTPKTMESKLVNGLFFAGELLDINGYTGGYNVTAAFVTGHVAGSHAAEIAEYTYLPIEEV

SEQ ID NO: 57312 - protein, 299 aa, Enterococcus faecalis
MLEVKELVKTFGDFKAVDHVSFTIPDGKILGLIGQNGAGKTTTFRLILNFLTQDSGSVLWNGQPLNEKEYNIIGYLPEERGLYPKITIEDQLIYFASLRGKTKKEIEPKIDFWMEKFQVKGKKTDKVKSLSKGNQQKVQLIATLIHEPKLIILDEPFSGLDPVNAELLKDGIIELKNQGSCVIFSSHNMDNVEKICDHLVMLKNGRMVLDGQVHEIRQQFGRTKLFLESPLSVEEVAATAGVKEAHLRQDGVLEATLENAEVGKVLFDKATANGYIPMFNQQPPTLEEIFKMKVGGQDE

SEQ ID NO: 57313 - protein, 788 aa, Enterococcus faecalis
MNQRILSTLGFDKVKQQLLQFIVTAQGTNEVSELLPIADENKIQSWLNETQDGLKVQRLRGGIPIPKLENIQPHMKRIEIGADLNGIELAQVGRVLSTTSELTRFFDELSENEVDFERLYMWREQLEVLPELNRQLKQAIDDDGYVTDEASPALKAIRQNIRRSEQTIREELDSIIRGKNARYLSDALVTMRNERYVIPVKQEYKNIFGGVVHDQSASGQTLFIEPKQILEMNNRLRQQQIAERNEITRILAELSAELVPYRREITHNAYVIGKLDFINAKARLGKELKAVVPEISQANHVVFKQARHPLLNPEKAVANDIVIGEEYQAIVITGPNTGGKTITLKTLGLLQLMGQAGLPIPVEEESKMGIFTEVFADIGDEQSIEQSLSTFSSHMTNIVSVLKKVDHQSLVLFDELGAGTDPQEGAALAIAILDSLGAKGAYVMATTHYPELKVYGYNRAGTINASMEFDVDTLSPTYRLLIGVPGRSNAFEISKRLGLDNSIIEAAKQIMDGESQDLNEMIEDLENRRKMAETEYLEARHYVDESAALHKELKEAYQVFFEEREKELQKARKEANKIIAEAEENAETIISDIRKMQLESGQQGGVKEHQLIDAKTQLSQLHHEETKLAKNKVLKKAKEQKKLKAGDEVIVNTYGQRGTLLKDNGKGQWQVQLGILKMNVSEEDMTPVAPQKEAKPRVTTVRSAESSHVGTQLDLRGKRYEEALAEVDQYIDAAILAGYPQVTIVHGKGTGALRTGITEFLKNHRSVKSYEFAPQNQGGNGATVVKFQ

SEQ ID NO: 57314 - protein, 266 aa, Enterococcus faecalis
MSKQKKAVFLLSLFSLVALIAACTNQPQKETVSTKKEEITLAAAASLESVMEKKIIPAFEKEHPDIQVTGTYDSSGKLQMQIEKGLKADVFFSASTKQMNALVAEKLINKKSVVPLLENQLVLIVPNQDQAKWHDFSDLKKAQMIAIGDPASVPAGQYAEEGLKALGAWSYVEKHASFGTNVTEVLEWVANASAEAGLVYATDAATNSKVAIVAAMPEAVLKKPIIYPVGKVAASKKQKSADAFLNFLQSQQCRKYFENIGFKLTK

SEQ ID NO: 57315 - protein, 160 aa, Enterococcus faecalis
MFKVGIVTLSDRCFQGLAVDQSGPLIREQLPALYQVTKQTILPDEENQLVELLQEWSKTCDLILTTGGTGLSERDRTPEATLRVAERIIPGISEGLRQLSLEKTPFAMLSRGVSVQRGRTLIVNLPGSPKSVTEHLHFLLPVLPHALDLITNKKIIHDEE

SEQ ID NO: 57316 - protein, 321 aa, Enterococcus faecalis
MKDAFNREIDYVRLSLTDRCDLRCTYCMPATGLCFLKKEQLLTDDEIIFLLRILAKEDIKKVKLTGGEPLVRPNLLSLIKRIKQISGIEKVTLTTNGMKLAREAQGLKEAGLDGINISLDTLDPEEFREITRVGQLRNVLAGLEQAIDVGLPNIKINTVARKELSEATIVELAEIAKKETVHLRFIEMMPIGLGKEHPGKQQEEVEAILTKYYGTLQPYQKPLGNGPASYYALKDFKGKIGFISALGHCFCETCNRIRITADGHLKTCLHSADGYSLKEALAMEQTAELLGIIKSGIACKPEKHLFLEQQGEQRFMSQIGG

SEQ ID NO: 57317 - protein, 380 aa, Enterococcus faecalis
MKLLNNRSEKIRNILVPVLSVIMGFLLGAIIMVIFGYDPVAGYQAMFETAFQGKKSIGEIFVTAAPLIFTALGFSVANSAGFFNIGLSGQALCGWVASIWVALSMPDAPRMIALPVAIIVGAVAGALAAAIPGFLRAYFGTSEVIVTIMLNYILLYTGNHIANNVMKPSIMANKGITKMIGANASLRSPFLTSISDGSRLNIGIFLAFIFLILVWFLMKKTTLGFEIRSVGLNPFASEYAGMSSKRTIILSMMISGTLAGLGGAVQGLGTFQNFFIQNTSLSIGFDGMAVSLLGAGSSIGILLSALLFGMLKLGGQGMPLIAGVPTELVDVVIAAIIFFVGISYLIRFLLAKASGSKKEVAIVETIEAAPDKNNQEGGDI

SEQ ID NO: 57318 - protein, 220 aa, Enterococcus faecalis
MELNRMIDHTILKPEATEAAVQKIIDEAKEYNFFSVCINPCWVAFASEQLADTDVAVCTVIGFPLGANTPEVKAYEAADAIKNGANEVDMVINIGALKSQQYDYVRQDIQGVVDAAKGKALVKVIIETALLTDEEKVKACELAKEAGADFVKTSTGFSTGGAKVADIRLMRETVGPDMGVKASGGVHNAEEALAMIEAGATRIGASTGVAIVSGATGEGY

SEQ ID NO: 57319 - protein, 433 aa, Enterococcus faecalis
MRMVDIIEKKRDGHQLTSEEIQFIINGYTDGSIPDYQVSAFLMAVFYQDMTDEEITQMTLAMVHSGEIVDLSSIEGIKVDKHSTGGVGDTTTLILAPLVASVGVNVAKMSGRGLGYTGGTLDKLEAIPGFKVELTEERFIQLVNDTKVAVIGQSGDLAPADKKLYALRDVTATVDSIPLIASSIMSKKIAAGADAIVLDVTTGEGAFMKDLASARRLAETMVRIGKLANRQTMAVISDMSQPLGEAIGNSLEIVEAIETLQGNGPEDLVEMCYVLGSQMVVLAKKAETLDEARALLEEALTSGRALAKFKEMIENQGGDSSVVDQPEKLLTATYQFDLPAKETGVVQKIVANEIGVAAMLLGAGRATKEDTIDFAVGLKLHKKVGSPVEKGESLLTIYANREDVTEVEQLLYKNIEIGPTGEEPILIHDIITE

SEQ ID NO: 57320 - protein, 335 aa, Enterococcus faecalis
MKLTIKEIADMAGVSVTTVSQILNNKGSRFSEKTRNKVLAVVAENHYKPDYFASNVINRHSKTIGMIVPDVTDFFFSKVIEGVETYLNSLGYMILLCNSKHDSEQAMQYVSELIHRSVDGIIFATPNVLPENHILKDRREHPIPVILVDRGINPRDSGRLIVKEYEGAYQAVHHLIQQGHQHIGMLRESAGYYRLTERVTAYQHALQDNNLPFRPHYVCAGELNLHGGYAAAKEVLKNEEITAIFCGNDEMAMGAYQAIEEAGKKIPDDISVVGFDGLEISEYLVPSLTTVYQPSFDIGYYAAKFLVEAIADPTGKVPNKVFDATFIARKSTKPI

SEQ ID NO: 57321 - protein, 400 aa, Enterococcus faecalis
MIELEEAREKMTQHMKSQCETEEVALLDSLGRISGETIFAETAIPHFPRAGMDGYAVRAVETRGATAESPSCLKVVGSLVAGDSMFYCNQTNNCAIKITTGAFIPTDFDAVVPQEWTDFGQDHVKIFRSVTAGQNYAEIGEDIAFQQKILAKHQQINSRMIGLLAMQGIDKVVVLKRMKVGILATGSELVSLEEPLSVGKIYNSNLYMLAAFVKASGNEVIHLDHCSDDPEELAKRLIEISPKLDVLITCGGVSVGEKDNLPLAIKRIGGTELFHFVNMKPGTPVMGSQFQETLILSVSGNPFAAMVNLHLFYWTLLATFFNCVELNLKERTVILAHELTPSRLRRFYRAKEIDGTVNLVTKSHLSSNLSNTLETNCLLEQPAGVLLKKGALVKVYYWQT

SEQ ID NO: 57322 - protein, 906 aa, Enterococcus faecalis
MKTKLHTQTVTLSIDNQEVTVPKGTTILEAAKGLGVEIPTLCHLKELAPDGSCRMCVVEVEGGRRGGLTTACTAHCQEDMVVATHSEKVADSRRFILDLLLSNHKLECFSCGKNGDCQLQQYALDYGIDVTSFTEGKRMPCHQEDTSNPFFSYDPEKCIMCRRCARVCQLRQGRDVLSIANRGFETKMMPSYGQAFDQSICESCGNCVSSCPTGALTAKDTKEYRKWETQKIPTTCPHCGTGCQMNLLVKNNRLVGVEPLDGPANKNLLCVKGKFASYKFVGSGDRLTEPLIKRNGIFEPASWEEALTLVSSKFNEIKAENGPDALAGFSCSRATNEDNYVFQKMVRAAFGTNNVDNCARVCHSASVHGLAQTLGSGAMTNPIADITEDVDMILLVGSNPEEAHPVIGAQIRQAIQRGTQVVVVDPRKINLVKDSALHLQVQAGTNVAFANGMMHVILKEGLADRHFIEERTEGFLDLEKMVADYTPEKVAEICHIHPEDLIQAARMYAKAEKAPIIYCLGVTEHSTGTEGVMSMSNLAMLVGKVGKPGCGVNPLRGQNNVQGACDMGCMPYDFPGYQKVNNPEVIDKFEKAWHVPLNRNTGLTSTKVLPAATAGSVKGLYIFGEDPIVTDPDTGHVRQALESLDFLVVQELFMTETAAYADVVLPGISYAEKDGTFTNTERRVQRVRKAVEPRGQAREDYEIFCEVMTRMGYPCAYESAKEIMEEISAVTPSFGGINYERLEKESLQWPCRSLTDPGTPIMHVGSFARGKGLFKAIPYKQAQELPDEEYPYLMSTGRMLYHYNTRAMTGRTEGINQIANHSYIEINAVDAQALGIQEGDKVEVHSRRGKIETYAAVGNRVFPQEVFMTFHFPDGNVNEITNAVFDDIATIPEYKVCAVAIKPVNK

SEQ ID NO: 57323 - protein, 432 aa, Enterococcus faecalis
MLKRNQPMLLERMGKMQSATDVAEYCKYDGFDGLKRAISLSDEEILNELDIAHLRGRGGAAYPLGKKWRHLYHAKGTTKYIVCNADEGEPGTFKDKVLLSEDPLSVIEGMIIAGYLFSAKAGYIYMRGEYRRIQKTFQEALDNARQAGFLGENILGIEGFNYDITIISGAGAYICGENSALLNSIEGKTGRPRVKPPHLADVGLYLQPTLVNNVESFASVPVILREGGQAFLEMGTADGGGTKLICLSGHIKNRGLYEVNLGTPLEEIIYGEQYGGGSATGRALKFIHFGGQSGPIGAVATLRDCLYSYEDLWAHDLSVGSGAIVVMDDSVNVVDYLVHVAAFFAHESCGKCTPCRLGTTRILELLSKFNRNEATASDLPRLEKMLTHVTRLSACGLGQSVANPMKSALALFPEEFETTAETEIYATSKGGW

SEQ ID NO: 57324 - protein, 162 aa, Enterococcus faecalis
MCALSLIEKEAIILENDADPQRILNILIELQFASEEGYIDQETAQLVAEHLHLTEARVYEIVSFYAILKTEPQAKYVLKICNSTPCHYTGGAMVAEVLETILEVPENQPTPDGLFMYHSIPCIGACDLGPVIKIKDTVFSQLTEEKIYQLIQHLQNDCYEGL

SEQ ID NO: 57325 - protein, 409 aa, Enterococcus faecalis
MYENLLPRFLRYVKTETRSDATSTTTPSTQTQVAFAQTLKKELEELGMSDVIYNETNGFVIATLPSNVEKDVRSIGFIAHMDTADFNAVNVSPQIVENYDGESTIPLDKEGKFTLNTKDFPNLKNYRGETLITTDGTTLLGADDKSGIAEIMTAMEYLINHPEIKHGTIRVAFGPDEEIGVGADKFDVAQFNVDFAYTMDGGPVGELQFETFNAAQAEITIQGKNVHPGTAKNTMINALQLGIDFHNALPADEVPEKTAGEEGFYHLAAFAGTPEEATMTYIIRDHNREIFEARKAKIKEIQQTLNAPFDEERIKVDLFDQYYNMREVIEKDMSIVEIAKQAMEELSIQPIIEPVRGGTDGSKISYLGIPTPNIFAGGENMHGRFEFVSLQAMEKATNVIIKIAELNAK

SEQ ID NO: 57326 - protein, 202 aa, Enterococcus faecalis
MANHYYTENPELAHDLESWSFPLRGRTFQFTTDSGVFSRGTVDYGSRVLIDAFEWENLPAGRLLDVGCGYGPIGLSLAAATGRLVEMVDVNQRAVGLAQMNAQRNQITTVDIHSSNVYETLNETTYAAIVSNPPIRAGKKVVHGILTGALPLLKVGGTLTVVIQKKQGAPSAEKKMAEVFGNVEIVTKDKGYYILRSVKEAE

SEQ ID NO: 57327 - protein, 195 aa, Enterococcus faecalis
MRKIVLFGDSITAGYLDEAVSPVLVDLVKRDIAAMGLEEVAVINAGMPGDTTEDGLKRLNKEVLIEKPDEVVIFFGANDASLDRNITVATFRENLETMIHEIGSEKVILITPPYADSGRRPERPQTRIKELVKVAQEVGAAHNLPVIDLYKAMTVYPGTDEFLQADGLHFSQVGYELLGALIVREIKGRLKPKQA

SEQ ID NO: 57328 - protein, 520 aa, Enterococcus faecalis
MTNVADLTSVEKIIVLDFGSQFNQLITRRIREFGVFSELLSHRTTAEEIRKIAPKGIIFSGGPNSVYDKDAFSIDPEIYELGIPILGICYGMQLMTHNLGGKVEPAANREYGKAELEILGDATLFQGTPAKQTVWMSHGDLVTEIAPGFEKVGTSNDCPIASIEDANRKFYGVQFHPEVRHSEYGNDLLRHFAFDVCGCTGDWSMENFIDMEVAKIREQVGDKKVLLGLSGGVDSSVVGVLLQKAIGDQLTCIFVDHGLLRKGEAEQVMESLGGKFGLNIIKVDAKERFLSKLAGVSDPEQKRKIIGNEFVYVFDDEATKLAGEEGVSFLAQGTLYTDVIESGTETAQTIKSHHNVGGLPEDMQFELIEPLNTLFKDEVRALGTELGMPDAIVWRQPFPGPGLGIRVLGEITEDKLQIVRDSDAILREEIAAAGLDRDIWQYFTVLPGIRSVGVMGDGRTYDYTVGIRAVTSIDGMTADFARIPWDVLQKISVRIVNEVAHVNRIVYDITSKPPATVEWE

SEQ ID NO: 57329 - protein, 452 aa, Enterococcus faecalis
MRQVPSFKQFQFQPFINEALAEKGFEEPTEVQEKLIPIIKKGKSVIGQSQTGSGKTHTFLLPLMDKVKPTIDEVQIVITAPSRELANQIYQEAQQLARFSQPEIRVSNFVGGTDKQRQLNKLKHQQPHVVIGTPGRILDMMNEQALKVHTAFAFVVDEADMTLDMGFLAEVDQIAGRLPEKLQMLVFSATIPEKLRPFLKKYLENPVIEHIKPKAVISETIDNWLISTKGKNSNKIIYQLLTIGHPYLAIVFANTKQRVDEITDYLKDQGLKVAKIHGDITPRERKRVMRQVQNLDYQYVVATDLAARGIDIEGVSHVINAEVPHELDFFIHRVGRTGRNGLNGTAITLYSPADDEAITQIEQLGVSFKPKEIKNGEIVETYDRNRRTKREKSREELDPTLIGLVKKKKKKIKPGYKKKINWAIEDSNKKKRKIERRQKDRSARKAKKNSSN

SEQ ID NO: 57330 - protein, 477 aa, Enterococcus faecalis
MEKIKSYQEDSEVQKNRWWILVSVAMFTFMSTLDSSIVNIALPTISKEMSVPMNQAEWVVSIYLMVVCACLLLFGKIGDSFGKIKVYRIGTVIFTIGSLLCGFNQSLSFLLFARVVQSIGASMTMATNSGIITEVFPLNERGRALGAVGAFVSLGAIAGPGIGGLILSNFSWSYIFWINVPVGLVTILIGEKFLPKDITKTKEKIDFSGFACIAIAIMTFFGGIFLGQESGFGSLQSYLLFIIAVIALGLFIMVERKRKSPLIKFAIFKNKIFTLSLLSAVLIFASNFFVNVVIPFYLQDARKLSASYAGLLMMVFPLLMVVGAPLSGYLTDKIGPGILTFGGLLLLCCTSLMYMFLDMNSPIWYYVIATAIMGLGNALFQSPNNTMVMSSVEKQDLGVAGSMNSFARNLGMVIGIALSTTILYRGMSEAYGERVTTYLANRPDIFIVGMRETFFVAFLLCVAAFILTILRFRKTTK

SEQ ID NO: 57331 - protein, 66 aa, Enterococcus faecalis
METGTVKWFNSDKGFGFITAENGNDVFVHFSAIQGDGFKTLEEGQAVTFEIEEGQRGPQATNVTKA

SEQ ID NO: 57332 - protein, 282 aa, Enterococcus faecalis
MKKMIIIALFSTSLLAGGSSVSAYAQESEGNLGETTGSVLPDEPNVPTDPITPSEPEQPTEPSTPEQPSEPSTPTEPSEPSKPTDPSLPDEPSVPTEPTTPSKPEQPTEPTTPSVPEQPTEPSVPEKPVEPNKPTEPEKPVPVVPEKPVVPQQPEQPTDVVVKPNGEIATGESTQQPTVPIETNNLSEVTHVPTVTTPIETASGEAIVAVDKGVPLTQTADGLKPIKSEYKVLPSGNVQVKSADGKMKVLPYTGEKMGIIGSIAGVCLTVLSGILIYKKRKV

SEQ ID NO: 57333 - protein, 803 aa, Enterococcus faecalis
MKTVVIIDALRTPIGKYKGSLSQVSAVDLGTHVTTQLLKRHSTISEEIDQVIFGNVLQAGNGQNPARQIAINSGLSHEIPAMTVNEVCGSGMKAVILAKQLIQLGEAEVLIAGGIENMSQAPKLQRFNYETESYDAPFSSMMYDGLTDAFSGQAMGLTAENVAEKYHVTREEQDQFSVHSQLKAAQAQAEGIFADEIAPLEVSGTLVEKDEGIRPNSSVEKLGTLKTVFKEDGTVTAGNASTINDGASALIIASQEYAEAHGLPYLAIIRDSVEVGIDPAYMGISPIKAIQKLLARNQLTTEEIDLYEINEAFAATSIVVQRELALPEEKVNIYGGGISLGHAIGATGARLLTSLSYQLNQKEKKYGVASLCIGGGLGLAMLLERPQQKKNSRFYQMSPEERLASLLNEGQISADTKKEFENTALSSQIANHMIENQISETEVPMGVGLHLTVDETDYLVPMATEEPSVIAALSNGAKIAQGFKTVNQQRLMRGQIVFYDVADPESLIDKLQVREAEVFQQAELSYPSIVKRGGGLRDLQYRTFDESFVSVDFLVDVKDAMGANIVNAMLEGVAELFREWFAEQKILFSILSNYATESVVTMKTAIPVSRLSKGSNGREIAEKIVLASRYASLDPYRAVTHNKGIMNGIEAVVLATGNDTRAVSASCHAFAVKEGRYQGLTSWTLDGEQLIGEISVPLALATVGGATKVLPKSQAAADLLAVTDAKELSRVVAAVGLAQNLAALRALVSEGIQKGHMALQARSLAMTVGATGKEVEAVAQQLKRQKTMNQDRAMAILNDLRKQ

SEQ ID NO: 57334 - protein, 468 aa, Enterococcus faecalis
MVVGDFAIELDTVVIGAGPGGYVAAIRAAEMGQKVAIIEREYIGGVCLNVGCIPSKALIAAGHHYQEAQDSSTFGVTAKGVELDFAKTQDWKDNTVVKSLTGGVGMLLKKHKVEIIEGEAFFVDENTLRVIHPDSAQTYSFNNAIVATGSRPIEIPGFKFGGRVLDSTGGLNLKEVPKKFVIIGGGVIGAELGGAYANLGSEVTILEGSPSILPTYEKDMVKVVTDHFKKKNVTIVTSAMAKEAVDNGDSVTVKYEVNGKEESVEADYVMVTVGRRPNTDDLGLEQAGVEIGERGLIPVDNQGRTNVKNIFAIGDIVPGAALAHKASYEAKIAAEAISGKKVAVDYKAMPAVAFTDPELASVGMTVAEAKEAGIEAKGYKFPFAGNGRAISLDKTEGFMRLVTTVEDNVIIGAQIAGVGASDMISELALAIESGMNAEDIALTIHPHPSLGEITMDTAELALGLPIHI

SEQ ID NO: 57335 - protein, 539 aa, Enterococcus faecalis
MAYQFKLPDIGEGIAEGEIVKWFVKPGDTINEDDTLLEVQNDKSVEEIPSPVTGTVKNIVVPEGTVANVGDVLIEIDAPGHEDNDAAPAAPAQEQTPAQPAAVPTTEAAGGFFQFKLPDIGEGIAEGEIVKWFVKAGDTINEDDSLLEVQNDKSVEEIPSPVTGTVKNIVVPEGTVANVGDVLVEIDAPGHNSAAPSVAAPATDAPKAEASAPAASTGVVAAADPNKRVLAMPSVRQYAREKDVDITQVTATGKGGRVIKADIDAFVSGGSQAAPATEAAATEAAPKAEAAAPKAAPKAFTSDLGEMETREKMTPTRKAIAKAMVNSKHTAPHVTLHDEVEVSKLWDHRKKFKDVAAANGTKLTFLPYVVKALTSTVQKFPILNASIDDAAQEIVYKNYFNIGIATDTDHGLYVPNVKNANTKSMFAIADEINEKAALAIEGKLTAQDMRDGTITISNIGSVGGGWFTPVINYPEVAILGVGTIAQEPVVNADGEIVVGRMMKLSLSFDHRIVDGATAQKAMNNIKRLLADPELLLMEG

SEQ ID NO: 57336 - protein, 325 aa, Enterococcus faecalis
MAQKTMIQAITDALALELEKDENVLIFGEDVGNNGGVFRATEGLQEKFGEDRVFDTPLAESGIGGLAFGLALQGYRPVPEIQFFGFVFEVFDEIVGQMARTRYRMGGTRNMPITVRAPFGGGVHTPELHSDNLEGLIAQSPGVRVVIPSNPYDAKGLLISSIRSNDPVVYLEHMKLYRSFREEVPDEAYEVPLDKAAVTREGTDVSIITYGAMVREAIKAADSLAKDNISAEIIDLRTVAPLDVETIINSVEKTGRVVVVQEAQKQAGVGAMVVSEISERAVLSLEAPIGRVSAPDTIFPFGQAENIWLPNAKDIEAKAREIVEF

SEQ ID NO: 57337 - protein, 321 aa, Enterococcus faecalis
MDIISYERVIQQLSFSEAIQVMKRCFAELQKGKISQSERHVEVLPDGKNQNLFALMPAYLGKNRFFGAKIITAFPENPQKNLASHLGQILLFDSSTGRPVAMMDANAITWLRTAAVSALATDYLAAPKAKSIALIGAGQQASSHLAALQSVRAIEKVFIYDRTAERARKLIAKQQHNYPECTFIGCSSVQEAVQEAEIICTLTSSQDAFLEEKDVLPNAHINAIGTFTPTSRELTSDLVKNSQVFVDEYAAALKESGDLLIPISEGAFSAEKIVGSLGELVTGKVKLKAEQKGRTIFDAVGLAVEDLCCAEYIYQKIQGEN

SEQ ID NO: 57338 - protein, 147 aa, Enterococcus faecalis
MNSLPIFEKAVGTITLLSEEKQNAEYEGFLCQVNESQQLIRSRLAKKTPKKEGYFVAFWEKNQQNQNEAFDATEAPEMLAIVIADQEKQGLFLLPKECLIQQKILKTHQQKGKMAARFYPSWCQNLNQTAKKTQKWQLTYFTDLSKY

SEQ ID NO: 57339 - protein, 371 aa, Enterococcus faecalis
MAKAKKQKPIDFKELMAKVDADFPTFQILDQDGKIVNEDLVPDLSDEELVELMTRMVWSRVLDQRSTALNRQGRLGFFAPTAGQEASQLASQFAMEKEDYLLPGYRDVPQLVQHGLPLREAFLWSRGHVAGNYYAEDLNALPPQIIIGAQYIQAAGVALGLKKRGKENVVFTYTGDGGSSQGDFYEAINFAGAYQANGVFIIQNNGFAISTPREKQTAAKTLAQKAVAAGIPGIQVDGMDPLAVYAIAKEARDWSAAGNGPVLIETLTYRYGPHTLSGDDPTRYRSKEMDDEWVQKDPLTRFRKYLTDKGLWSEAKEEEIIEKTKEEIKVAIAEADKAPKQKVSDFLKNMFEVQPQTIKEQIAFYEAKESK

SEQ ID NO: 57340 - protein, 879 aa, Enterococcus faecalis
MTTTLEEKKMMNKKTMDMRKATKDQELRKLALLSERELMMELRTSEKGLSNEDAEKRLEEFGPNEVSAQKPTPAIILFLSAFKDPFVYVLALLMVVSTLTKDFEAAIVMGVMILASVLIAFIQEYRSQKASLDLKELIENTAAVTREGITKEIPMDEIVPGDIVTLATGDMIPADAVLIWTKDLFVNQSSLTGESMPVEKFVDAGVDRQQTEVSALDMQDLVFMGTDVLSGQGKAIILKTGQHTFFGDIAKNATTQRGKTSFDLGLAKVSKFLLRMVMILFPIVFLINGLTKGAWGEAFFFAIAVAVGLTPEMLPMIVTSNLAKGALSLSKHKVIVKELAAIQNLGGMDVLCTDKTGTITEDRVVLVQHLNPLGDLSDEVLNLAYLNSSYQTGWKNLMDIAVINFYEEHQWKTPFKNVTKIDEIPFDFSRRRLTVVVNADDHQLMITKGAVEEMEEVCTHAQINGEIVPLSTAVREELRRVNVQMNKQGMRVLAVAVKKDVHKEAVYSVEDEKEMTLIGFMGFLDPAKESAVSAIRSLHEHGVNVKVLTGDNDIVAKKVCKDVGIEVSHVLLGSQIEAMTDEELRAQVEETNLFAKLNPMQKSKIIELLQAKGHTVGFMGDGINDAPALRKADVGISVDTAADITKDASSIILLEKSLNVLESGVIEGRKVFSNMMKYIKITISSNFGNVFSILVASAFLPFLPMLSLQLLIQNLIYDVAQLTIPWDNVDEEELLSPVRWETNGLAKFTVCIGPVSSIFDILTYLVMWFVFSANSLATQHLFQTGWFMVGLVSQTLVVHMVRTRKIPFIQSRASMPVMLSSLGAILLGFLIVATPIREVFDFVKLPANYWPWFFGIIIAYMLTVEVAKRLYIKITKEWI

SEQ ID NO: 57341 - protein, 537 aa, Enterococcus faecalis
MDQWWKNAVGYQIYPRSFKDSNGDGIGDLQGIIEKLPYLKELGVDFLWLNPIYTSPNVDNGYDIADYQGIQPEFGTMEDFQELLDQAHQLGLKIILDLVVNHTSDQHPWFVEAKKSLDNPYREYYLWADATPDRMPNEWQSFFGGSTWTYDEGTKQAYFHVFAKEQPDLNWKNPKVREEIYAMIRWWLDLGIDGFRLDAISHIQKEPWDFKITTNPWAPFMNVKGIEDYMLDLKVIFAEYDIMTVGEASGVSSKKAVEWTNDAGYLNMIFELEHNVREGKPGEERLNILGYKKVMARWQKHLGTEGWNALYVENHDNPRINSILGNETSHSAKAIGTIALLLRGTPFIYQGQEIGMVNYPFQQIDELDAKDSHNHYRLLIESGYDAKQALKEVAHWTRDHSRTPMQWTSQEASSFTSGHPWLAIHPNFKEINVADQETDAQSVLNYYKKLIALRKDNPVFTDGQFELLAPNHPSVFAFLRKTTEATALVIVNLSGEKCQFDLPNKLLGRKWQQLLGNQDFTVKKRMQLAPYQAGVFQ

SEQ ID NO: 57342 - protein, 588 aa, Enterococcus faecalis
MNTAAIYHRPESEFAYLYTEETMHIRLRTAKGDIASVQLVQGDPYLLGKEKWYQQSLTMEKLVSTELYDYWFIALSAKFKRLSYAFTLVGADGLRAFYGEHGIYPLEEKYLEMANNYFRMPYFHEIDRFKAPEWVKETVWYQIFPERFANGDLANDPEGTLPWGSKRPDRQDFFGGDLQGVLDHLDYIEDLGVNGLYFCPIFEAFSNHKYDTIDYLKIDPAFGDGATFKRLVEECHRRGIKIMLDAVFNHMGDTSPQWQDVLKNGQDSIYADWFHVNEFPASYEESADFEEASNITYDTFAFTPHMPKLNTANPEVQAYLLEIARYWIEEYDIDAWRLDVANEVDHAFWKKFRQTCDDAKEDFYILGEIWHSSQSWLQGDEFHAVMNYAYTDAIMGYFVKQELSLEKMLSEMNNQLMLYRQQTNQMQFNVLDSHDTPRLLHETKEDKELMRQVLAFTYIQPGVPCLYYGDEIGMTGDMDPDCRRCMVWEENQQDLDLKEFVKSLIALRKKYAAVFSGGTIDWTGTSFETGLIRLACRLEEQTIYGIFNTGQETQFVDRTDREVLLSSSIEIASEQIMVLPKGFLLYQA

SEQ ID NO: 57343 - protein, 416 aa, Enterococcus faecalis
MKANWKKILMGGILLSASAVLLTACGGAEKTKAENESGSANKAAGDVKLWVDTEYMGVFKKVVADFEKENPDIKVNLTAGNSADAKKDIAKDPKAAADVFMMPHDQIGQMAEAGLIYPNTKYEKEVKENNIDSAVAGVTWKDKVYAYPYAVESQVLYYNKDTYSPEEIKTWKSLTEKGKIGTNFGEDGANYIFGPLFMSNGDYLYGENGEDPKGTNFNNQQGIEVLQWIADQKNNPGVIQSNTEALSNLGSGKTDAFLSGPWSKNDVEKALGDKMGAAAYPTIDFGNGEKQMKAFLGVRSFAVNQQTQAPLAAMTLANYLTSEKAQMTYFKEIGFVPSNKKLQTNEEITQDTVAKAILEMAQPTHSVVMPKIPEIVSFWPAMDAVINDTYKGNIKPADYQAKLDKLVQDTSKEAKE

SEQ ID NO: 57344 - protein, 340 aa, Enterococcus faecalis
MMKAALIHKYGQKELAIEEVPLPTIHDNDVLVKIIAASINPIDLKTKDGKVKMLLDYQMPLILGSDFAGIVVSVGKNVQNFRLGDAVYGRVPKNRVGTFAEYIAVDQAAVAMKPKNLTFEEAAAIPLVGLTSYQALHDIMNVQPGQKVLIQAGSGGIGTIAIQLAKLAGAYVATTTSSKNKEWVQALGADEVIDYRTQNFEEVLSDYDYVFDTMGGTILEKAFSVVKPQGKVVTLSGIPNERFAKEYGLPLWKQWAFKIATRKIHRLEQATDVSYHFLFMRPDGEQLALLTEFIEQGKLQPIIDRVVPFSQIQEAVDYSLTGRAQGKIVVKIAELINMDG

SEQ ID NO: 57345 - protein, 226 aa, Enterococcus faecalis
MKKILVVLTNVSRYHGTEEPTGLWLGEATEFVEEVTKAGFSVDYVSPQGGYVPLDPRSMKYVDSSIMAVYESADFQERALAHSLSLEEIEPDEYAAIYFTGGHGVMWDFPDNPQLQAITRSLYEQGKYLTSVCHGIAGLLNVKDASGNYLIADKTITGFTTAEEILAMKKAVVPFLNETIAKEHGATFAKKRPYKEFAYQDDRIITGQNPFSVRAVARLLIQQLSK

SEQ ID NO: 57346 - protein, 483 aa, Enterococcus faecalis
MAEKKKKNKKQLSSFSILFIILIVLGIVTVLLNGQPFTPREIDGKMVDHVVGAKLSDIIMAPFNGFKDAIEINIFILVLGGFLNIVTQTGALEAGIQSVVKKLKGNELKIIPILMILFSIGGSTYGMAEETIPFYGLLSATMVAAGFDTFVAVGTVLLGAGSGVIGSTVNPFSTGVAMDALRGIGIQPNTGIILIVGAILWAASTSYSIFIVMRYAKKVKADKGSTILSLQEQEDMEKTYGQAASKEMPFTNRHKKILMVFAFCFVIMIVSLIPWNDFGVTIFKGWTSVLTGNSFGDWYFGDLAMWFFLLGIIAALIGRFTEKETIEAFIDGAKDMLSVVLIIVVARGASVLMSKTYLDSFILDKAAGLLQGLSPVLFVIGAFVLYLGLSFLIPSTSGLAYVSIPVMGALAKNIGLSPEVMVMIFASGCGLINLITPTSGVVMGGLEISKVQYATWTKFMAKPMIVLGLINLIILIGAMLLFS

SEQ ID NO: 57347 - protein, 310 aa, Enterococcus faecalis
MGKKMVVALGGNAILSNDASAHAQQQALVQTSAYLVHLIKQGHRLIVSHGNGPQVGNLLLQQQAADSEKNPAMPLDTCVAMTQGSIGYWLSNALNQELNKAGIKKQVATVLTQVVVDPADEAFKNPTKPIGPFLTEAEAKEAMQAGAIFKEDAGRGWRKVVPSPKPIDIHEAETINTLIKNDIITISCGGGGIPVVGQELKGVEAVIDKDFASEKLAELVDADALVILTGVDYVCINYGKPDEKQLTNVTVAELEEYKQAGHFAPGSMLPKIEAAIQFVESQPNKQAIITSLENLGSMSGDEIVGTVVTK

SEQ ID NO: 57348 - protein, 339 aa, Enterococcus faecalis
MNSVFQGRSLLAEKDFSRAELEYLVDFSIHLKELKKKGIPHHYLEGKNIALLFEKTSTRTRSAFTTAAIDLGAHPEYLGANDIQLGKKESVEDTAIVLGSMFDGIEFRGFSQEVVEDLAKYSGVPVWNGLTDQWHPTQMIADFMTVKENFGRLEGITLVYVGDGRNNMANSLLVTGAILGVNVRICAPKELFPSDEVVNYAKEFAKESGAELMITDDVAKGVKGANVLYTDVWVSMGEEDKFEERVNLLKPYQINMAMLEKTENMDGDLIVLHCLPAFHDTKTQYGEMVAEKFGITEMEITDEVFRSKYGRQFEEAENRMHSIKAIMAATLGNLFIPRV

SEQ ID NO: 57349 - protein, 380 aa, Enterococcus faecalis
MKKMKYKYPRIKPIYPLYQLNKERFRVGAQLGITIEFDDDEGQFWTLSNLLDGVRSFDEVVTEMKRKYPELTVKDIEEGIDFLNDEGLIEETFPGRMIEDRYLANVNYFSRYCKADDDRFEIQEKINNLKILLLGLGGGGSNILTLLAGLGPKMIRMVDYDRVEASNLGRQLLYREADIGEKKTVVAKRAINEMNSNINVETVDKKIIDVNDVVELTEGIDIIVCAIDEPPFLIHRIVNEAIVKVGLPCVFGASQVSRGRVYTVIPQKTGCFDCMNLNFSKNDPKFVEQFVGFRNIQFAPPSIAYGPGIFQLTASIVDELIRVVTRYAEPKSLGTQYEINYEDGNSFTHKTWPRFESECPTCGKGDVSQWEIFQYYQEKK

SEQ ID NO: 57350 - protein, 235 aa, Enterococcus faecalis
MVQNIPIYIQIHDKIKEDIEKGVWSIGDRLPSERELALKFDVSRMTLRQAIQTLADEGILERKIGSGTYVARKKVQETMTGTTSFTEITLSQNRVPSSRTVSYFVAKPSSSEMEKLQLGPEDSILRMERIRFADDIPICFEVASIPYSLVSQYGKSEITNSFYKTLEAKSGHKIGHSNQTISAVQASEQIAEYLEIKRGDAILRVRQVSYFENGLPFEYVRTQYAGSRFEFYLEK

SEQ ID NO: 57351 - protein, 304 aa, Enterococcus faecalis
MTEQFILTSNDQQTQLNVRHWPCPSPKAVVQLIHGMAEHIQRYDEFARFLNQLGFTVIGHDHLGHGESVQPNAPIYGFFGEQGPENVVTDIHQVKQWAVNRYPQLPYFMMGHSMGSFALRNYLQDYPVTVQGVIFMGTGTSPLPLTAALPFIKKMAEKQPKKPAPFIDKLAFGSFSKKFPEASSFNWLSKNQANVADYENDPLMGFVFTNNGFATLFSLVKRANQRNWYQAIPKELPILIISGAEDPVGDFSKGPAKIQKQLKHAGFQHVTLRLFPTLRHEILLETEKATVFQEIGHWLTDLTN

SEQ ID NO: 57352 - protein, 1415 aa, Enterococcus faecalis
MVMRAGIDVGSTTVKLVFLNKQNQSIFTKYERHFSDVKAATERILKEGLARIGADQPVTMSITGSGGMGLAEVLGIPFVQEVIACTRTVETIIPETDVAIELGGEDAKITFFDGALEQRMNGSCAGGTGAFIDQMAVLLKTDANGVNELAKNYQTIYPIASRCGVFAKTDVQPLINEGAAKEDIAASIFQAVVNQTIAGLAAGRKIKGKVAFLGGPLFFMSELRKRFVETLAIQTEDVIFPEQPQLFVAMGAALYSEDAAECTLEELIQRLVNSQATDLQPSDTLPPLFNSAEDLADFRERHAQAQATEKPLSQHTGVTFLGIDAGSTTTKVTLIDEDGHLLFSFYGNNQGQPLETTMTVLKSLYQQLPEEVFIGKAAVTGYGEQLIKNALKVDIGEVETMAHYKAANHFQPGVDFILDIGGQDMKAMTIKNGVLSSIQLNEACSSGCGSFIETFAQSLKYNVKDFALAALESQAPVDLGSRCTVFMNSKVKQVQKEGASVGDISAGLSYSVIKNAIYKVIKVRRPEELGEKIVCQGGTFYNEAVLRAFEKISGREVVRPSIAGLMGAYGAALIALDAYEIGEETTLLSLEELAAFTSEKEFTHCGLCENNCQLTVTVFSDGRQFITGNRCERGARIKIKREERKVNLVDYKYRKLFKYRPLRENKAFRGRLGIPRVLNMYENYPLWHTFFTDLGFRVELSPRSNKQIYEQGLETIPSDTVCYPAKMAHGHIQALIDAQVPIIFYPGVVFEQQETVEADNHFNCPIVQSYPDVIRNNVDAIREGQVDYRNPYLNLANEAAVAKVLAENFADLGISLEEIQTALHHGYQELAAFKKEIQEKGEETLAMLTEKGQRGIVLSGRPYHLDPEINHGIAEVITQEGFHVLTEDSISHLGDVQNLRVVNQWVYHSRLYAAAKVVAKTKNLELVQLNSFGCGLDAVTTDQVEEIMDRSGKIYTVLKIDEGANLGAIRIRLRSLKAAVNEREKQQFVPHMQMEEPEKIVFTKQMKKTHTLLLPMLSPIHQSGLVDVALQASGYHVVCLPAQDKEAVNVGLKYVNNDACYPAIISIGQLVEALESGQYDLDNVSVLMTQTGGGCRATNYIPLLRKALNDAGFSQVPVVSVSMGNKGVESNPGFKFTLPMIKRLVVAFLYGDLFERVVYRTRPYETEKGMVDQLHQDWLKRVEANVRNGSLTQFNHFMKKIIRTFDEIPLQEIKKPKVGVVGEILVKYSPTANNDIVRLLEEEGAEAVVPDIVGFMNYSLYNQIWKYENMGMSKQSKRLAEFAIKIIELVEKPMDKALRKSVRFDGIHSIYDMAADASKILSIGNHTGEGWFLTAEMIELLKHEVNNIVCMQPFGCLPNHIVGKGVVKELRRQYPQANIAAVDYDPGVSLVNQLNRIRLMMATANKLLKEENVKR

SEQ ID NO: 57353 - protein, 423 aa, Enterococcus faecalis
MLDMKKIRQNVEVVQKKLKTRGVDEEVLLRFLALDEGRRALLVKVEELKKHRNQVSGEIAQLKRAQKDASQQLLNMQEVSEQIKVLDQEVVHLQEQCTAIAERLPNLPHESVPVGADEAANVEVRRWSTPKTFSFEPKPHWEIGEALGILDFERGAKVSGSRFLYYKGLGARLERAVYNFMLDQHVNEHGYTEVIPPYLVNSKAMFGTGQFPKFKEDVFQVAESDLTLIPTAEVPLTNYYNNEILDAQELPIYFTALSPSFRSEAGSAGRDTRGLIRLHQFHKVEMVKFSDAEHSYEELEKMTNNAGDILEKLGLPYRVITLSTGDMGFSAAKTYDLEVWIPAQKTYREISSCSNCEDFQARRALIRYRDKTGHVQYAHTLNGSGLAVGRTVAAILENYQNEDGTVTIPEVLRPYMGGLTKID

SEQ ID NO: 57354 - protein, 297 aa, Enterococcus faecalis
MYLSIEEFIDKAEKTGKKISDLMIEQEMERSQKSYEEIWTQMGQNLDVMDAAVKRSQEGAGVFSPTGLTGGDAARLKKYRAAGKTLSGDLMMSAVQAALGTNEVNAAMGVVCATPTAGASGTLPGVLTAIKNTLNLTRDQQIRFLFTSSLFGMVTANNAMIAGAVGGCQAEVGSASAMAAAAAVEAAGGTPRQSSEAFAMALGNLLGLVCDPVAGLVEIPCVKRNTVGAGNALIAADMALAGIVNKIPADEVVEAMNKVGRQLPRELRETGLGGLAGTATGQRMKNEIFEKVKFTIV

SEQ ID NO: 57355 - protein, 49 aa, Enterococcus faecalis
MRQNIILECVETGERLYLTSKNKRNNPERIELKKYSPKLRRRAIFKEVK

SEQ ID NO: 57356 - protein, 186 aa, Enterococcus faecalis
MRKRLKLLLILVLFFLFFPLAHTLITMQGVVSLPFYLLPFTNYPYIGNSMAQFLFWISGCLLTLLFIILIIVLFYPKAHNCIEKKTDSGKIAVQKKAIENFVLIAAKEEPFIVDPTVKSVIKKKKIKIYIQGKIRKAFQTGERQTAFIRKVNTNLNELFGAEQIILTEIIFKDYHEKNTKTKSKVL

SEQ ID NO: 57357 - protein, 172 aa, Enterococcus faecalis
MNKLPLLILLLGGVLLVSGCQSHKEENKSSKVSTEETTVIETVAREQSKESFTSEATKKQTETTKLEEPDHVKLLEAYGNAYANFTSINDRNEKLKPLMTEKCIKKNGIDVKTGVALVSVGKVTTIYKNDQHEYALLLDCEQNGTQTRVLLLAKVKNNKISEMTYNSVKQEY

SEQ ID NO: 57358 - protein, 1426 aa, Enterococcus faecalis
MKQTKWQRLATIGLCSSLVINAFSGATAVAETITIESSPTVASSAKEATSASSATPESTESSQETTETSREEVTQETVEQEDTTEIAQEENLLEPSGIQAKIMPRAFVWAATGTTNRTTVRLNDVVDYRMKLENITTDDTNSDIVGPIRIESKLAAGMTRPTSVIIKVGPEEQNVVIGEGSHNANSGGEYFVWTESTRTVTAFINRLHGRTSGNTGYIKTLYFQTRITSGTHNEKKYIDSTIRFNGFGAVNRRNEMTYVDRFSGNLGLKGNLKFYDEDGVASKEQMSLSINPVLFKSTNSRVEGTLLRYPLTMTNAGSGLYRFDTGLKNIGTSNGGSWFFFSNDIAINFATATTNRIDKIVLAPPKATLPDSRTGVMTSRAYTSTTYTRSNYDISTYNFTKATGKTWRITNRSSNSGVSTNIMFSNNLVGTTGQFNKGNSGATINYYIYYKKLYENFVNSNGQKITPPSGFTQGKRTVINSEAYTFKQSGTLPDTYQADGKTYKFKGWYKGKTKPNTLTTTKAPSYAVTYNNDDDLTVVYEEIEFFDFPALTYQFGFVDESGKRVDASTIGLTYDKWRGELLTNNVNDWKTVSLEKGQVAPTKNNLKEIAYPAQSLEILSDRSTQYSAANLTFTLPKYYGKISVYNKSGTFDAGYLFPNIQNNNSSEPSVEGLHKNLSSWFELKKSGNQSFVFNKPIPAAPIDVQVPAYLREIVYNPDLISNTAVYYVIDKPVYYYLTNRKVTENFVDTSGAKITPPTGFTQGKQTAITSDPYTFKQAGTLPDTYTTGGKTYKFKGWYKGKTKTEPLTTTKAPSYGVTYNDNDDLNVVYEEVTAIYPGFYAQFVDEQGKAFTNSLTLSENYTEFLRKTGTTVFETKGAFYPMVGKRDATVTNKYKIETTSSVAVPNNYWTAMPADIANRGYALNNLDITNQMKYVDKIETTDTHTTMYDYTGVSDIGGKPNNASQTELNPIDKTFVKQTDNTFAIKSIWGNGTFSHIVPKMLLLAESGSFSRLFGFDGTPDYKQTVNYKVTRKQVTENFVDANGAKITAPTGFTQGNKIPMTSNTFKYTAAKALPATYTAGGKTYTFQGWYKGKTKPNTLTTSTTPTYNTTFDGNDDMTAIYKEEVPKASVALTRTTAETVTSGGNVTWRATITNTSQAPLTTATIKKSTAWTTGLAAPTAMIVTPAGGTAKTVPVTATTWTNGVSLGTDIPVGKSATVQFTTKATGTAGQVLRAGITTSGNYSGVSTSATVRVKDNDQAIVTPTAEGFISVPTFNFGQVGVAGSTQQHSLKKAADYYGNGTRNPYLRIKKTQANWSLTAQLSQPKSATDSLPTATRLLLGAAPVSSFSNYNQPTELKNAVGTTSAISLNANNTATRIIANQQFTGSNIYQLDFTFNNVKLEVPANQGVKGQQYQAAITWNLVTGP

SEQ ID NO: 57359 - protein, 44 aa, Enterococcus faecalis
MKRTYQPNKRKRQKVHGFRKRMSTKNGRRVLASRRRKGRKVISA

SEQ ID NO: 57360 - protein, 127 aa, Enterococcus faecalis
MLSLLISVKKLFSSFLGILKKEDTRALFFLLATTLLSGTIFYSTVEKLSPLDSLYLSFMTLTTIGYGDVHPVTDLGKIFTMIYATVGLGIMAMFISVVAKSYLYSKQSHHHHHHKNKEHSAEKSSEK

SEQ ID NO: 57361 - protein, 56 aa, Enterococcus faecalis
MKFFRSVADEMKQVTWPTKKQLRKDTLVVIETSILFAALFFIMDTVIQTAFGWILK

SEQ ID NO: 57362 - protein, 197 aa, Enterococcus faecalis
MNKLFAYEGWYYRIFSFIANLIIINFLFLITCITGIFSGVGLIALYRTIYRLYREKDIPVLRTFWTALKNNIMRGFILTGVLFAAFLLGGIVVTSLFKIATSLGFLAIFLLSFVALFLTSFLFLFSVFNWSVKKTLGETVYVVLSNSANAIILFILPLLTFVFFYKLNLFLYIALGFGTTAFLQVAFFQKVLGVEHE

SEQ ID NO: 57363 - protein, 122 aa, Enterococcus faecalis; identical to SEQ ID NO: 57165
  MISC_FEATURE (26)..(26): X=any amino acid
  MISC_FEATURE (106)..(106): X=any amino acid

SEQ ID NO: 57364 - protein, 177 aa, Enterococcus faecalis
MEMYQVIRYFLNEMEKKIWHALLTLVLFCLYISIFDVPFTIKNTFIGRLLFPKAFMNAGSANLIFYLISFFGFLWSIFIFAYLLNKTRLKLLNKTFPYLLEILEVCILPLVILFAYIYIYLRVHGEGFSYIRESLLQQELTYSMKWFLCLGSLAPLFFFLSTLNLTKRVRQKKDMES

SEQ ID NO: 57365 - protein, 135 aa, Enterococcus faecalis; identical to SEQ ID NO: 57166
  MISC_FEATURE (22)..(22): X=any amino acid
  MISC_FEATURE (79)..(79): X=any amino acid
  MISC_FEATURE (128)..(128): X=any amino acid

SEQ ID NO: 57366 - protein, 149 aa, Enterococcus faecalis; identical to SEQ ID NO: 56892
  MISC_FEATURE (68)..(68): X=any amino acid
  MISC_FEATURE (107)..(107): X=any amino acid
  MISC_FEATURE (126)..(126): X=any amino acid
  MISC_FEATURE (134)..(134): X=any amino acid

SEQ ID NO: 57367 - protein, 49 aa, Enterococcus faecalis
MRQTITLACAETGERLYLTSKNKRNTPEKLQLKKYSPKLRRRALFTEVK

SEQ ID NO: 57368 - protein, 63 aa, Enterococcus faecalis
MVEWIKQYAVPLIGGLVGLVFAILFLSIGFFKTLLVVLLTGLGIWLGLYLEQTGIVKNYFHHK

SEQ ID NO: 57369 - protein, 432 aa, Enterococcus faecalis
MDVMIVLQKKANMLLESYVREIYSDKLYTLIHKLNKNLTSETLENDLRKVADKVIISDFDIDKNHGQGPILLWNSNKEELFLGVVELTRDGKVILDEKKRKVDLKTNIKKILLFRIKVIEMCKKESLITFFSVNNNSQTLKKNIQTSLNIILIFIALLALSTVLELLKKFVIDFNQTNYLAIAILLIFALLSIVSILSIKICVKYKNIVSDGFYGIVISSLCISIFSIYSIAIIDYKTVLMVVLVGTFLLIKEIFSSVGRIYEDKKKSGKMLKAILFSVITSIFLFINSVLIIKGITTYSAVLTFIVFQMAILNIFFIVKSLIHLYKMYRIQSISPALTNMQPQLVSNYKRILDLNYVKVTGNNSSFKSINAKFIYNYLVNQTSGVYLSNDLNTEKYNFVINKGLKGEDILVKSRLLCKMLYNVFTISTYQN

SEQ ID NO: 57370 - protein, 122 aa, Enterococcus faecalis; identical to SEQ ID NO: 57165
  MISC_FEATURE (26)..(26): X=any amino acid
  MISC_FEATURE (106)..(106): X=any amino acid

SEQ ID NO: 57371 - protein, 110 aa, Enterococcus faecalis
MKAQMESWQDIQEYVKNNKKKHKRRMANDAMKNVNELGFPFTYFEDTYQFAIKTSIGMVDYFGTTGTWVVRKNQDRGRGLKKLKKYLEHPVPTKEIKKTKGNQSWMKNNR

SEQ ID NO: 57372 - protein, 122 aa, Enterococcus faecalis; identical to SEQ ID NO: 57165
  MISC_FEATURE (26)..(26): X=any amino acid
  MISC_FEATURE (106)..(106): X=any amino acid

SEQ ID NO: 57373 - protein, 40 aa, Enterococcus faecalis; identical to SEQ ID NO: 42572

SEQ ID NO: 57374 - protein, 261 aa, Enterococcus faecalis
MKKIALFSMLTFSVLSLSLAGCGNKKTASTNDSKPKQETKKATQKSSSQQEMKSSHSSVTGQNSNVTGENPSENATQPSAGTDETNEVPQNQAPDTNITITNVVFNPERNEINGTTLPNATITATVVGDASAQAGVFYADANGNFTVISPRAGATTQLIATVDQRNSAPVQIDIPSSGQEAALSFSNITIDPKQGTISGKTAPNATILVSRADDARVILASFTADAQGNFTASNLVPGTKNRLDVTLNGEIGTPYLFDLPN

SEQ ID NO: 57375 - protein, 1061 aa, Enterococcus faecalis
MKRGKHMKKTMLILLFGLLTVVGLPMVTEAVEPVNATDTTIFGAQAMVPNSTEDQTDKLQTLLSQTAKEGRALFLPQGSYALSKDIAISSNYQLIGDTTGATILHNATGAPIQLTDTTYGTKTNVRLQNIAFDGINVTLKLTNQLTLANNIFYNPLKGFVVNLNADIGVKISGNIFMRDTAHMQSGGDFNRAIYIGGYSTPSRFQYMSDVDIVDNLFGLKVTELDAIKSTSRSDLAATITRLQTAIEAGAISVPNEQNYLSTGVNSFNMLKDVTVQHNFFYSPYDNENLNGLVGDHAIYFRGAQNITVVGNHLRGLQNGPAGGFKFKSGRNITIMNNYLRNTGLIMYGTPEIGLAETQAEGAISELSNWLVANNIFDWKYWDNQYAIGMEYNRHTGNNNVFNGVFINNQFVNYHNIPQNRRRELLIASGGGFRPETSFVKDNTRDDGLKNGQLLVENWTEADYRLMPATWESLISPTLYEQYKNTPIPVRNTLATPVATTIVQGQSIDPQQLVANTNDADEAVPAAKIVNPEVLNEIGQQKVTVQLTYETGSLVTVNVPVTVEAPAKKLDLSQLQTVYASIGEANQYTVYSWQLFTAIGPKTIVPSYYQQATQLLAEGQESQDKTQEQVDQLTSNLQSAMKVLVKKADITLERTEAENELASVHKLDESVYTKDSWQAMQEALIDTTTGEGSSKQLQQLLAWSDEELLEPTLGGFKTPADAQKRINQLTQTIKTALLLLVEKSTETTSNTSESSTSSTTSETSNTSESSTSSTTSETSNTNESNTPSTTSKTSNTSESSTSSTTSETSNTNESNTPSTTSETSNTSESSTSSTTSESSSTSESSTPSTTSESSSTSESSTSSTTSETSNTSESSTPSTTSESSSTSESNTPSTTSETSSTSESSTSSTTSETSNTNESNTPSTTSKTSSTSESSASSTTSATNNTSESSTPSTVNESSQSKGQNSVIYAVESNQDPNDAQSNSKPSAKASQTKESVAENQATKQIQTNQESSGTVKKADNTTKIAKKKFPKTGEQSSAVGSFLGLSFLSLAIATYCFKVKR

SEQ ID NO: 57376 - protein, 117 aa, Enterococcus faecalis
MIKGIGIDAVELSRIKPIVEKQGSFIQRVLTPNELTLFEKLSTKRQIEFLAGRFACKEAFSKAWGTGIGKVGLQDIEVLTEKTGAPYVANSPHNGKVFVSITHTETMAIAQIVLESE

SEQ ID NO: 57377 - protein, 135 aa, Enterococcus faecalis; identical to SEQ ID NO: 57166
  MISC_FEATURE (22)..(22): X=any amino acid
  MISC_FEATURE (79)..(79): X=any amino acid
  MISC_FEATURE (128)..(128): X=any amino acid

SEQ ID NO: 57378 - protein, 149 aa, Enterococcus faecalis; identical to SEQ ID NO: 56892
  MISC_FEATURE (68)..(68): X=any amino acid
  MISC_FEATURE (107)..(107): X=any amino acid
  MISC_FEATURE (126)..(126): X=any amino acid
  MISC_FEATURE (134)..(134): X=any amino acid

SEQ ID NO: 57379 - protein, 239 aa, Enterococcus faecalis
MEEKKLLFNIGPIWFDGTIVLMVLLTCIIVFAFVYACTRNMKLRPKGKQTVIEWLVDFIRGIITDNLPRKEVSNFHLMAFTLFMFVLVSNILGLVTKIVVGDDLSVWKSPTADPIVTLTLAMMMIVLTHFFGMKRFGFKGYLVNSYLRPVGFLLPVKLMEEFTNLLTLGLRLYGNIFAGEVLLGLIAGTVASVGLWVIPLAIPLEMIWVAFSIFIGCIQAFIFVTLSMVYMSHKIETEE

SEQ ID NO: 57380 - protein, 73 aa, Enterococcus faecalis
MEGLNFIAAAIAIFGSAIGAAIGNGQVISKTIESMTRQPEMSGQLRTTMFIGVALIEAVPILGVVVSLLLLFR

SEQ ID NO: 57381 - protein, 176 aa, Enterococcus faecalis
MLLTTLVVGETAPSTTLGTMIVVSGAFLILMLLLKKYAWGAIVDILTQREEKIANDLDSAEQSRVAAAKMEKERQQQLLSSRSEAAEIIKNAKESGEQTRQKTLKETTAEVTRLREKARTDISQEREEALSSVKNEVADLSLQIAAKILNKELTPDAHEALIDSYIESLGKANETR

SEQ ID NO: 57382 - protein, 180 aa, Enterococcus faecalis
MKLDKYTVGKRYGKALFELAVEKNQAEAIYQELLTLREVYHQVPGIGDILSDDRLEPYEKDSIMEKLVTGFSEMMQNFLRVVYEYRRMYDLLLMIDEYERRYDEHQGLILGSVTTAIPLSKEQHQAMEEKAAQLLGYEQAHLVNLIDPSIVGGVVIEANHQVIDGSIRKQLEHMQQKLLK

SEQ ID NO: 57383 - protein, 141 aa, Enterococcus faecalis
MKLTITEIQEILPHRYPFLLLDSVEEVIPGERVVAKKNVTVNEQVFQGHFPGNPVLPGVLIIESLAQAGAVALLSMPEFKGKTAYFGGLDKAKFRQKVTPGDTLILEVELLKVRASAGMGKGVAKVNGKKVAEAELTFMIG

SEQ ID NO: 57384 - protein, 628 aa, Enterococcus faecalis
MKKRSFVYWGMFFILLSTLITPFLKLETGYAQTEPTSTSETNQISATPNVVPRKQVGNIVTAIQLTDKEGNPLGTINQYTDIYLRIEFNLPDNTVNSGDTSVITLPEELRLEKNMTFNVVDDTGTVVAIAQTDVANKTVTLTYTDYVENHANISGSLYFTSLIDFENVENESKIPIYVTVEGEKIFAGDLDYQGEGDDVNEKFSKYSWFIEDDPTEIYNVLRINPTGQTYTDLEVEDVLKTESLSYMKDTMKIERGQWTLDGNAIWQFTPEEDITDQLAVQYGPDDRNFSVHFGNIGTNEYRITYKTKIDHLPEKGETFTNYAKLTENQTVVEEVEVSRVSQTGGGEANGEQYVVEIHKEDEAGQRLAGAEFELIRNSTNQTVAKITTDQNGTAIVKGLLKDNYTLVETKAPTGYQLSQNKIPITPEDFGKNLVALKTVVNHKISYQPVAASFLAGKVLLGKPLKDAEFQFELLDEKGTVLETVSNDTLGKIQFSPLTFETPGNYQYTIREVNTQQTGVSYDTHNLQVQVTVEALLGNLVATTQYDGGQVFTNHYTPEKPIESTTPPTSGTTDTTTNSTTETTSITIEKQAIRNKELPKTGETKENAFLFLGSLLLIQGLFIYFKTKK

SEQ ID NO: 57385 - protein, 89 aa, Enterococcus faecalis
MAKKSKIAKAKKQMAMIEKYADKRQELKAAGDRTALAKLPRDSNPNRLRLRDQTDGRPRGYMRKFGMSRIKFRELAHQGLIPGVKKASW

SEQ ID NO: 57386 - protein, 139 aa, Enterococcus faecalis
MDKIKIWITMDENQMLTDYSFIAKKNYIEIEVNEEPKDYLNWGLRNGKLVHYPDDLNGLTNNRTTSFVGNVMLNFAVISWALSYIPLIGKVILDYPKYADIKAEYGLLGLTDDNMKTFVSYKRITEKQYEEITGNSYKK

SEQ ID NO: 57387 - protein, 226 aa, Enterococcus faecalis
MYQLFEKYFPNVVQLKQEFLQSTWETLYMVFWTALIAGVLGVLLGVVLVSTGPSGVLKNPPLYSVLEKIINVCRSIPFIIMLALIQPLTRILAGTTIGTTAALVPLVIGVIPFFARQIENALLEVDPGVIEAAEAMGTSPLGIIFRVYLIEGLPSIIRVSAVTIINLIGLTAMAGAIGAGGLGNLAITRGYNRFQTDVTFMATLIILIMVFISQAISNQLIKKTSH

SEQ ID NO: 57388 - protein, 135 aa, Enterococcus faecalis
MKKEFSRVLLKNQSDEILILKDRPDTWNFPGGKQELGESALECAIREMKEELAVEITELEEIFTGPLVFDSIVWQGHFYFAKQAQGKVTLNEPNKIKGVQFIKRFEEVNFSPGLAPLFDYLARSDYLKLNKTNWK

SEQ ID NO: 57389 - protein, 197 aa, Enterococcus faecalis
MEIIVGTNNQGKLKEMQSGLKDPAIRLVSYRKYTTSQEQPAETGTTYAENAYLKARFFQQLIGRPVLGDDGGLTLTAFPDLLGIHTSRFFHSANPEEQNRELLHLFEGQQSTRELTLSATLVYVLNDDKLLQTEATLTGELVEPRGTGGYGFDPIIYLPDRGKTLAELSTSERMKISPRIRALRKMIQQIKEQCDND

SEQ ID NO: 57390 - protein, 1265 aa, Enterococcus faecalis
MKQTKWQRLATIGLCSSLVINAFSGVTAVAETVTIESSPTAESSAKEETQASSVKEETTKASTENSQVTTDTSQEEATKEAEKEEPQAEVEQAETPIIPKPKKINMKATYSFSAETYQFGFVNESGQLINPDIIPITYSYAKGSWKTDGYNRKWTSMVQGSASTVGNLKNVIMPATSVVMPPGPSYEGTQEVYTNFSIRIPKYYASASLYNREGKIDSTYPLPAIALAGTRPLSLTQSSVISALALTSKGDNVYTPRETFFGGDPAGVKFTNFLYRINDFDVKGNNIGYKTVSSPIYYHLTNRRVTENFVDTSGAKITPPSNFTQGKQTVINSDPYTFQQSGFLPETYKVGTKSYRFKGWYKGKTKTEPLATTKTPSYKVTYDDNDDLTVVYEEFSGYELPASTNQFGFVDEATNKLIAPDQVQMKYNLTLNENNKKTVMSSNLTGTDTATLKNLSVPVNYFEQYRVNTFYGASDITFTLPKRYKSINITKSDGKTDPAFPLPKIYNIDQVEMSHMPVTTYNKLKQLSGQTFGFNALADQPEFYTKTLFGTESGIDDPVNYYTMSGPVYYYLENRKVTENFVDTNGAKITPPTGFTQGKKTVITSDAYTFKQAGTLPDTYTTGGKTYKFKGWYKGKSILNTLTTTKAPSYQVTYDDNDDLNVVYEEETVTTVYPSVDMNFVNEKGGAFTPALTFSGKYYAQSTSAYLRTDLYDVTSKNNGNGQYTVSINNGSMPLSQELLKKYNNGQPISATNRLQFNVDKLAIDQQLKYVDSIQLDTAQSSNLKSYRYVYTNNSSLVFDPNVAPAEVDLSSESLNLLNFDSDGTYFSNANNRLFYTHLGYSGTPGVNYLLVMFLFNAKPADKSKLVYKVTRKQVTENFVDVNGAKITAPTGFTQGNQVPMNSNTFKYTAAKALPATYTTGGKVYTFQGWYKGKTKPSTLNKTTTPTFNATFDGNDDMTAMYKEEIPTASVTLTRPKEVIDTNTNVIWTTTITNTSKAPLQNLTLKKGPNWSAGLTIPTFMEVTPEGETTKSIPVNSTLWTEGVPLPNAVPIGKKVSVAFTTRATGKPNTVLKAEVVVFGGIKDSTVDNFVRIRPNDQEVVTPTTEGFISVPTFDFGQVGVAGTKQQHSLKQAADYYGNGTRNPYLRIKKTQPNWSLTAQLSQPKSATDSLPTATRLLLGAAPVSSFTNYNQPTELKNTVGTTSAISLTANNTATSIIANKQFTGSNVYQLDFTFNNVKLEVPANQGVKGQQYKAAVTWNLVTGP

SEQ ID NO: 57391 - protein, 311 aa, Enterococcus faecalis
MKRVNWKRWLVVGLSCSLFMDSVVGVTVLAETITGATEQGVATSQSSDEASQTTQTTEESQATVASEAKTVPPQETARIASRAIGYSSVEGREIPFFFVEEDGTLFDPDRITMAVNLSTFSFYEEKLQRTPLEPTTVNGGKLLSIPTSPAFKYDTNNQNPSNIYGVSEVSFTIPKEYQSLDIRPSTFYTGDTTQYPVPTVFANVGGKVTNYVGANAETELELTNEKMPNKLTFGPKKTFKYTVATAPGGVTYALTYFYGDVGGPTSSHQRRGTAGPVYYYLTKRRVTEKFENPAAGRFLRQKVIRRIRKPL

SEQ ID NO: 57392 - protein, 645 aa, Enterococcus faecalis
MPERYTGSDGKTYLFKGWYKGNAKPSTLETTKTPSYAVTYDDNDDLHVVYEEAVMKTYTLPAREALFGYVDEQGNLINPAKFKLSATMGESDGATGEMTTFPTIDGIDMPASQLKKLAIPQKVYTRPDDGTIVTYGPQEVSVEIPKYYQTISISPTTAYTGDKTKYPVPNEVRRGIENPDNIVSSLVGTTAYNLTQKSATRYTARRSYWTWGPTKTLYSMSIYSGTAGGNYNLSTPDGTIYYYLENRRVTEHFVDESGAKITPPTGFTQGNQLVVDSENYVYTVAKALPKIYQAGEKTYIFQGWFKGKTKPATLKTTTTPSFTPTFNDEDDMTAVYQEAIPTAELTLTGAVDIIENGATMDYWEALLKNTGEAPLTTIKIKPTATWAAGIGAPNTIFVQGTGQNTKAFPVTKEQWTTGAGVSITLDQPLPAGGQLKMNLLGTAVTGNPGQVLTADVEVTGNFGSLTAKDTVRIKDLDQEITSPDGDGFISTPTFDFGKLAISGSKQQYGLKKAADYYGNGTRNPYLRLNTSQANWSLTAQLSQPKSATDSLPTTTRLLLGTAAAASFTDYNQPTETRTPLGKTSTVTLTADNTATAVVANQQFTGSDVYQLDFTFANIKLEVPANQGMAGQQYQAAVTWNLVTGP

SEQ ID NO: 57393 - protein, 1252 aa, Enterococcus faecalis
MNQKRNRLFAIALCGSLLISSLNGIPAIAETMAAPDVQGEDRQTVVPSEGVQGRAPVSFPEADTEVGVPPADEELPEQTEQVVGQVEASVTSPIIVNTPESLRAQRAVQTFDIPEKTYKMSFLDESGRFIDPAKVSITGDIMKFTMQGALTKVGAVATNNVGTTKQLTVPKVALSGDTAIKSYDFSGIQNEKITLPRFYNVPKITPSANYTGQIYPMAVTKQVNVTGEVSNEETTGARLNMFVSGIPNQFVFSRASWDNDPAGNMFARGFNMATAGGTPAYLTTDDHIYYYVPNKRVNIYYNDMTPNGLPAYPPGYNASLSKTVVDSENFHYKAPKAFPEFFSSGNRHFQFKGWYKGPARPADPKAVKLETSLTPEFDVTYDGADNLYVFYDEVKEMTTTIPEVTYKFGFVDEKGALVAPTNVDIQANLTTVEDKVVQKVGAITGANVGNLKQLTVPSQTLTYVPKIKVASSGVTDFRLTIPKRYKIPTVTPGSFYTGSTTAYPLATTLLRHISGQADERITTDGTRYSLYNLPTPHSYRMYRSSWQPDVTNTGFSATLNMATTEIYPAYFTTDNTMYYFLENRRVTEHYVNEAGAEVPMPTGFTQGNQTVIDSDTYHFKLAKELPFSYFLNNKAYRFKGWYKGKTKPKVLETSRTPEYDTTFDDNDDLTVVYEEIKYGGNAVTFGFVGEDGQLLQPTGFQVTTDIVETIDGLSTVLSNVSAVDSTGNVKTLTIPQKEYVLTPQMNFYGTKNSLITIPRQYQEISFTKPANYQGLDYPVAGRVENMFSGNLYVEGAQPPYFSASKVKANQYKIIEFHWKEEPTQSFSSLYKATLIRSSVAPTGVEMYPNKPIYYYATNRRVTENFVDKSGAKITPPQGFTQGNQVTVTSDPFTYTASKALPSVYAAGAKTYKFVGWYKGTTKPTTLKTTATPNYLVDFDDNDDMTAVYEEETPTAALTLTSTNRVVNNDDSVDWVATLKNTSLAPLKTLTVKPATTWPAGIGTPTSLSVQLDGQAPKIYPVTATTWSEGISLTGLEIPAGQTANVTLVGTKISGTSDQRLTATLDVTGNFATVSAADAVRLTDTTQGTITPTEGFISVPTFDFGKMNIASKTQQSGLKKAADYYENGTRNPYLRIKKNQPNWQMTAQLSQPKATTDSLPTATRLLLGPANVSSFTNYNEATEQIKAVGKTSSLSLTANNVATSVVANQQFTGSDVYQLDFTFENIKLEVPANQGTKGQQYNAAVTWNLVTGP

SEQ ID NO: 57394 - protein, 82 aa, Enterococcus faecalis
MADLKGRFDDAKDKVEGTAKEAQGKVTDDKGKELEGKAQSTFADVKDKARDAGDDLKEGAEKLTDKVKEGFEDLKDKFSKDK

SEQ ID NO: 57395 - protein, 345 aa, Enterococcus faecalis
MLKEFKMIEAVAPDMLDVLQERFQILRNIYWMQPIGRRSLSETMGITERVLRTETDVLKQLNLIEPSKSGMTLTERGLEVYQGLELVMNQLLGMHQIEKEMTQYFGIQRCIVVAGDSDIQKKVLSDFGDVLTNTLNLLLPNGENTIAVMGGTTMAMVAENMGSLETEKRHNLFVPARGGIGEAVSVQANSISAVMANKTGGNYRALYVPEQLSRETYNSLLQEPSIQEVLTLISHANCVVHSIGRALHMAARRKMSDDEMVMLKQKNAVAESFGYFFDEEGKVVYKIPRIGLQLKNLQEIPYVVAIAGGKTKAKAIRAYMKNAPKQTWLITDEAAANEILKGVTL

SEQ ID NO: 57396 - protein, 129 aa, Enterococcus faecalis
MLLEIDEQSEQPIYQQLIDQIIVGIAKGELVPNESLPSIRQLADEIGVNMMTVSKAYNKLKQSGYIVTDRRNGTKIAAKLPATAVWQQQLHERLELLLAESFLHQQSEAEIQALIQKIYQNFDSKGRAL

SEQ ID NO: 57397 - protein, 281 aa, Enterococcus faecalis
MEEFKSEKEKMIAGALYFASDPELVADRKKAREQMALINQQPDTYIRRQLIEETFGKVGVGTYIEPMIQFDYGYNISVGKNFYANFNNVFLDVCPIEIGDNCMFGPNVQLYTAEHPLQAAKRNSGMESGKRIIIGNNVWIGGGAIVLPGVTLGDNVVVAAGAVVTKSFPENCVIAGNPARIIKELTEDDAPTTSLEQQRAKINQIDKELVRLLEQRMDVVAEIAAVKKKAGHAVFDSEREQQVLETILNHVENAEYEETLSETFQGIMDASKRFQEKHLGE

SEQ ID NO: 57398 - protein, 483 aa, Enterococcus faecalis
MMFLNKVDKRKIALFQLLENAPMLTESKETVMQELELSEFIVNKTVAELNADFIEFGLSEDFQIVSDGIFLTLNESGTETSATLIDCYIKESLRFAMFQDFFFQRFDSVNEFALEHFVSHTLAYKEFKELKKMLENYQITINKEFHLVGNETNLREVTTLVFLQLYQRDFSLYGKKVLEQIRNFELFFSEKVHLNQRAGYAQAKCFHFLAVSLVRTQQQFYVEKKVDSQVLKQLAGDNQQNVFNWLESLQIPEPQRTNEGNYLLLFLIAEEWLQVASAALCQRFAEIQQLNRDLLSYLKIQFQLSEEVLQGFEQKVTIVHFKLFHFPIEANYSYLKMDITYFAETYTEYFSASRQFIQEQKTNPAVWDARRFLFYRYLLLMVDALPLKKVLAPITLCVDFSFGEAYNRMIQKNIEKITEWNIIFKAHVDESVQLILSDIHFVDWPEITQIIWLAPPRPVDWSHFIKTLSALRPHSGEEKKKSS

SEQ ID NO: 57399 - protein, 79 aa, Enterococcus faecalis
MTREEVLQKVAKIISNHFDIEADQVTDQLNIKDDLNADSISVMEFVLELEDEFGTEISDEDAEKIETVGAAVDYIVSNS

SEQ ID NO: 57400 - protein, 361 aa, Enterococcus faecalis
MKHIKGMLVFIGLFILVGCAPDQEPTKQTTSGPQETKQVKQVTVTNQTTSAVEKQAPTKNDELIANQLTFDSHEYTYEVVTGATQTTFGTTPPAKYTPEEKKKKMFWSNQPPLGLMTGNYYKNEGVFTGGNYGIVEIITEPETQRILNVEFTEFASDPYYDTRYSGVNKRLSDYPEFQASNTRTDDTLVTVVNGITYVEKQMRDENRVTGNFYTVRGSSTSAREGLMPLAAEMDTWLKEPSKETYIGYAEDLGNGLIARLQVITEEQKIKHVSYDEYFSDEQEKITETALRPFYRQSKYYSPGYNKQTNNSFIHFVDALTKAITTQQTLSVNEEQELQHPSFTTYQRLAEKISTFQNSLKE

SEQ ID NO: 57401 - protein, 312 aa, Enterococcus faecalis
MKLLKKTVLIGTTLLLGSFLLAACGNTNKEANNADKTHEVTDTLGNKVTVPAKPKRIIASYLEDYLVALGEKPVAQWTVGQGSIQDYLAKELKDVPTISYDLPYEAVLKFEPDLLLISSSALVEGGKYKEYSKIAPTYVVKNGENVTWRDQLEDIATVLDKKEQAKKVLEDYDTLTKGVQEYLGKKDAGKSAAVLWVTNNQVFMVSDNRSSGTVLYQDLGLQVPKLVEEISKNATADWNQVSLEKLAELDADHIFLVNSDESAPLFQEAIWKNLPAVKNNQVHTYDKKSSWLYNGPIANTQIVEDVKKALLN

SEQ ID NO: 57402 - protein, 93 aa, Enterococcus faecium
MILEAYSPLGTGKIFDVPEMKQIAEAHDKTIAQVALRWSLQHEFLPLPKSVTPSRIKENTELFDFELTEEEMKQIDQLDGVVGKAKDPDTTQF

SEQ ID NO: 57403 - protein, 157 aa, Enterococcus faecium
MEQAYLDLGRKLLEEGHRKEDRTGTGTLSLFGYQMRFDLQKGFPLLTTKRVPFGLIKSELLWFLKGDTNIRYLLQNKNHIWDEWAFERYIKSPDYNGPDMTDFGHRCLTDPEFNEEYKKQSKLFCEKILTDDSFAETYGDLGHIYGYQWRHWETKDG

SEQ ID NO: 57404 - protein, 287 aa, Enterococcus faecium
LLEEPPAEFLDLVAIGTIADLVSLTDENRILVSLGIDAIHHSERIGLQALFEESGVKMRDADETTIGFSIAPRLNAIGRMGDPRPAVSLLATFDEEEASVQAKKLNEINEERKAIVEQITQEALAMVNKENHIHLLVNRGWHEGVLGIVAGNIMNETGKPTLVLTLKEDGSAKGSGRYIEALNLFEMLDQMRDLFTYFGGHHAAVGLTMPSENVTILQEKMNQYIVDHQIDLMRGPELRIDEVLLPNEVTVERIDELKLLAPFGTDNPLPQFLFRQVQAENIKRIGA

SEQ ID NO: 57405 - protein, 234 aa, Enterococcus faecium
LFRPEQNSRRMNQSARRLLMPMVPEKMFVDAVKQVVKANEDFVPPYGTGATLYLRPLLIGVGENIGVHPAPEYLFVVFCTPVGAYFKGGLKPTNFIVSDYDRAAPKGTGAAKVGGNYAASLLPGTEAKELDYSDCVYLDPATHTKIEEVGAANFFGITKDGKFITPQSPSILPSITKYSLLQLAEERLGLQAIEGDIFIDDLDQFAEAGACGTAAVISPIGGIYHNNNLHVFYS

SEQ ID NO: 57406 - protein, 165 aa, Enterococcus faecium
KHLKVNPTTSKNWADRDRFVLSAGHGSAMLYSLLHLAGYQVTIDDLKQFRQWDSKTPGHPEVHHTDGVEATTGPLGQGIAMAVGMAMAEAHLAATYNKENFNVMDHYTYAICGDGDLMEGVSQEASSMAGHMKLGKLIVLYDSNDISLDGPTSKAFTENVGARYE

SEQ ID NO: 57407 - protein, 258 aa, Enterococcus faecium
VLWFGTFMAGIGFSLVMPFMSLYIDTLGNYSTSQLNFWSGLTFSSTFLVTTLISPWWGKLADQKGRKLMLLRASLGMAIVISLMGCVTSVYQLVALRLLQGIFSGYISNATALVATGTPKEKSGQVLGTLATGSVTGTLLGPLLGGISASAFGYRPTFFITGIILFFVFLLSLFFVHEKFVPVKKENMVSAKQIFKDLKYPHVVIGMFVTTMIIQASNNSISPIISLYIRQLLHGHGDVTLISGIIASIPGIATLIAA

SEQ ID NO: 57408 - protein, 88 aa, Enterococcus faecium
TSIRTLETIGTKFNGEIKADSGWTDIFITPGYEFKVVEAFSTNFHLPKSTLVMLVSAFAGRELTLSAYQHAIEERYRFFSFGDAMFVK

SEQ ID NO: 57409 - protein, 406 aa, Enterococcus faecium
VIPVKDDLYTPKIPVSEDEISDLSTTKAKQMYGDPLPEIIQKRLEKELNSINGNGFSVIYLIAQKLVHKSNEDGYLVGSRGSVGSSFVATMTGITEVNPLAPHYYCPECQYSEFFEDGTYGSGFDMPEKQCPKCGARLNKDGHDIPFETFLGFHGDKVPDIDLNFSGDYQAEAHNYTKVLFGEDYVYRAGTIGTVADKTAYGYVKGYERDNNLQFRSAEVDRLAKGATGVKRTTGQHPGGIIVIPDYMDVYDFTPIQYPADDQNSEWKTTHFDFHSIHDNVLKLDILGHDDPTVIRMLQDLSGIDPQTIPTDDPEVMRIFAGPEVLGVSQEQIYSKTGTLGIPEFGTRFVRGMLEETHPTTFAELLQISGLSHGTDVWLGNAEELIRRGDATLAEVIGCRDDIMVY

SEQ ID NO: 57410 - protein, 282 aa, Enterococcus faecium
MKNMITGAAQMDGAILVVSATDGPMPQTREHILLSRQVGVKYLIVFLNKVDLVDDEELIDLVEMEVRELLSEYGFPGDDTPVIKGSALKALQGDPDAEAAIMELMDTVDEYIPTPERDTDKPLLLPVEDVFSITGRGTVASGRIDRGAVRVGDEVEIVGIKPETQKAVVTGVEMFRKTLDYGEAGDNVGVLLRGIQRDDIERGQVLAKPGSITPHTKFKAEVYVLTKEEGGRHTPFFNNYRPQFYFRTTDVTGTITLPEDTEMVMPGDNVTIDVDLIHPIAV

SEQ ID NO: 57411 - protein, 98 aa, Enterococcus faecium
MEEVNLSMANKAELIEKVASATDLTKKDATAAVDAVFSTIQDALANGEKVQLIGFGNFEVRERAARKGRNPQTGEEIEIPASKVPAFKPGKALKDAVK

SEQ ID NO: 57412 - protein, 88 aa, Enterococcus faecium
MEKKEFHVVAETGIHARPATLLVQTASKFNSDVNLEYKGKSVNLKSIMGVMSLGVGQGSDVTITAEGADEADAMAAIVETMKKEGLSE

SEQ ID NO: 57413 - protein, 82 aa, Enterococcus faecium
KRKQLLEAIRYVDLVIPEENWEQKVKDIKEYHADYFVMGDDWAGQFDELEQLTDAQVIYLPRTPEISTTQIKNELNSLNSDK

SEQ ID NO: 57414 - protein, 200 aa, Enterococcus faecium
NIESRGYSVALFNRTGAKTTAVVEEHPDKNFKATYTIEEFVESIEKPRRILLMVKAGPATDATIQELLPHLDKGDILIDGGNTFFKDTMRRNEELANSGINFIGTGVSGGEEGALKGPSIMPGGQKEAYALVAPILEQISAKAEDEAPCVTYIGPNGAGHYVKMVHNGIEYGDMQLIAESYDLMKNILNLSVEEMADIFK

SEQ ID NO: 57415 - protein, 180 aa, Enterococcus faecium
MDQLKVRLRRKGIEKLKNLAKSGKKKEKEQRIYKQLFASEYWKSAKVIGTTLSNEFELDTQPVIQRAEKEQKKIVVPKTLPKRQMAFYEMDEQSVLVRSSFGVLEPQSEKLYLPEMIDLLIVPGIIYNRAGYRIGFGGGYYDRYLNNFHKKTCSLVFREQLNEQWQPESFDQKIQQLFID

SEQ ID NO: 57416 - protein, 223 aa, Enterococcus faecium
MANLIRSLIENDKKELKRLDSIAKKVEAYADQMAALTDEQLQAKTAEFKGRYQKGETLDQLLPEAFAVVREAAKRVLGLYPYHVQLMGGIVLHDGNIPEMRTGEGKTLTATMPVYLNALTGEGVHVVTVNEYLATRDSTEMGELYNFLGLTVGLNINSKSSDEKREAYNCDITYSTNNELGFDYLRDNMVVYRHQMVQRPLNYAIVDEVDSILIDEAETPLII

SEQ ID NO: 57417 - protein, 267 aa, Enterococcus faecium
FEASAYATTPEPDSAKNEARRVAELGFDLVVAAGGDGTINEVVNGTVPLEHRPKMAIIPAGTTNDYARALKIPRDNIKAAAEVIKKHQTVKMDIGLSDSSYFINIAAGGYLTELTYEVPSELKSIFGYLAYLAKGAEMLPRVKPIKMRLKYDEGEYIGNASMFFLGLTNSVGGFEQIAPDAKLDDGKFSLIIVKTANIFEILHIAALMLNGGRHVDDPRVIYTKTSSLFVETEDDINRPVMINLDGEYGGEAPMHFQNLHQHIEFFA

SEQ ID NO: 57418 - protein, 295 aa, Enterococcus faecium
MQSIKNTLRLYLLDWKRIFKNPIATLLIIAIMIIPSLYAWFNIKALWDPYGNTGELPIAVYSADEPAEFQGKEVAIGEQVIESLHKNKQLGWQFVDSKEQLEDGVRSGKYYAGIYLPKDFSEDLLSFTSGDIKKPKIEYTVNEKINAIAPKITDKGASSIQSQITNEFIKTASSTLLKVFNEIGYDIDTNLVSINKVKDMILSTDENLDTIDGYTKQVLELQSQLPDIKEKLNKANEFVDYIPKVDEMGEKVVAFNDKMPELKDQAKIILDLQEKIPEIQNAGKQLAEIDGDFAS

SEQ ID NO: 57419 - protein, 333 aa, Enterococcus faecium
KTYEAAVAAFIKENKPKRQVVYDDLSNQLATPFTLNADEMDKLIQKIEDAGISVVDENGDPSIHSLKSAEKKAEQAKTEDLSAPTGVKINDPVRMYLKEIGRVSLLTAEEEVALALKIEEGDQEAKQRLAEANLRLVVSIAKRYVGRGMQFLDLIQEGNMGLMKAVEKFDYRKGFKFSTYATWWIRQAITRAIADQARTIRIPVHMVETINKLIRIQRQLLQDLGREPTPEEIGAEMDLPTEKVREILKIAQEPVSLETPIGEEDDSHLGDFIEDQEATSPAEHAAYELLKEQLEDVLDTLTDREENVLRLRFGLDDGRTRTLEEVGKVFGVT

SEQ ID NO: 57420 - protein, 313 aa, Enterococcus faecium
MMGRISKAMLAVYSGIAAFLIILFSLFTYFYASNQSHWWGELLRARLLYVPLIFHLMAISLGVGLIVFLLLSLIQKAKYGKIEEKLRALSSGNYESKLLHQPIPSASDDLYIKDIDMEITKIKEKMIEVSSELQIMTSRPQYVDGQTKEEILELERHRLARELHDSVSQQLFAAMMMMSALTEQAEKSETPEMFRKQLKMVAEIINASQSEMRALLLHLRPVNLEEKSLKQGIEQLLKELQNKIQISLKWEVEDVKLTSSIEDHLFRIVQELLSNTLRHAKANELEVYLHKIDNNLLLRIIDDGTGFNMNDTK

SEQ ID NO: 57421 - protein, 319 aa, Enterococcus faecium
KIEKSYGKGSIMKLGEKIDQQISTIPSGSLALDVALGVGGYPRGRIIEVYGPESSGKTTVALHAIAEVQKNGGTAAFIDAEHALDPQYAQKLGVNIDELLLSQPDTGEQGLEIADALVSSGAVDIVVVDSVAALVPRAEIDGEMGDSHVGLQARLMSQALRKLSGSINKTKTIAIFINQIREKVGVMFGNPEITPGGRALKFYATIRLEVRRAEQLKQGTDIVGNRTKIKVVKNKVAPPFKIAEVDVMYGLGISQEGELLDMAVEKDIVDKSGAWYSYKEDRIGQGRENAKIYMANHPEMMAEVSALVRAAYGIGGDVA

SEQ ID NO: 57422 - protein, 99 aa, Enterococcus faecium
MENTRYDIMYIIRPNIDEEAKTALIERFDAILKDNGAEVIESKDWEKRRFAYEMNGYREGIYHIVKVSSPSSANAVNEFDRLAKINDDIIRHMIVKEEA

SEQ ID NO: 57423 - protein, 78 aa, Enterococcus faecium
MAQQRRGGRKRRKVDYIAANHIEYIDYKDIELLKRFISERGKILPRRVTGTGAKNQRKITVAIKRARIMGLLPFVSED

SEQ ID NO: 57424 - protein, 352 aa, Enterococcus faecium
PFRFVSASVILLMNLWGVRYWLKMKRWLILNKREKIQQASTVAETNLAYVSEVMPVGVIAYQPSSQKIEWLNPLALKIKDQSGLTEEELLDTFFTAKEKKKNQVYLADKTFQFDMDTVKGVVYFNDITQNQLLKLHQTNSQPVIGILSIDNYADAIDKLDDKEISYLNSFVTTLVSDWMNEYHVFFKRINAERFFFVAQMIDLKKMMDKKFDLLDRFRAEAEKQSSPITLSMGIAYGSRTLDEIGGEAQNNLDVALVRGGDQVVVKEVKEGAKPVYYGGKSAKNVKRTRVRSRAMSTALRRIFDETGDVFIMGHKFPDMDALGSAFGVSCLARFNQKKAYIVINENEIIPDV

SEQ ID NO: 57425 - protein, 490 aa, Enterococcus faecium
MSLHFSDRKLFDDVNIKFTPGNCYGLIGANGAGKSTFLKVLSGDLQPSTGSVTMGPDERMAVLKQNHYDYEDYTVLETVIMGHKRLYEVMKEKDAIYMKEDFTDEDGIRAAELEGEFAELNGWEAEPEAAVLLQGLNIPEELHHQQMSELTGGQKVKVLLAQTLFGKPDVLLLDEPTNGLDIQSINWLEEFLINFENTVIVVSHDRHFLNKVCTHMADLDFGKIKLYVGNYDFWLESSQLAAKLQANANAKKEEQIKELQEFIARFSANASKSKQATSRKKMLEKITLDDIQPSSRRYPFVGFKPEREIGNDLLQVENVSVTIDGKKILDDISFNLSKEDKVAFVAENDITTTTLFKVIMGEITPDTGTVRWGVTTSNSYLPKDTTKEFDTDLTILDWLRQYASKEEDDNTFLRSFLGRMLFSGEEVLKPVNVLSGGEKVRCMLSKMMLSKANVLVLDDPTNHLDLESITALNDGLMAFTGSILFASHDH

SEQ ID NO: 57426 - protein, 377 aa, Enterococcus faecium
MEFAELVIVFAVTITLSNIASRILPMIPAPLIQIFLGVVLGLTEWGQSIDFEPELFLVMIIAPLLFREGEKADISSILKNFGTILFLAFGGVILTLVGVGATLSFLLPSVPLAACFAFGAALGPTDAVAVSSLSGRVNIPKKAMHILEGEGLLNDASGVTAFQFALGALITGSFSAVNAGMSLVVSSIGGALIGFLLVWFKQKIIHLIEKASAQDVTGYLLIELLLPFLAYVLAEAFDVSGIIAAVAAGILQASGFRKISVFDAELSSLSHSTWTTIAFTLNALVFIFLGIELTQVFSPVWGDGLYPNGLLLAIIVLISVMLFVIRFISISLFYVFKDGSKKFKKQLNEILILTFGGVKGTVSLATIFILPFSINNM

SEQ ID NO: 57427 - protein, 101 aa, Enterococcus faecium
MAISEEQVKHVAKLAKLAFADEELASFTDQLGKIIDMVEMLEEVDTEGVPFTSNVVETVNVMRQDRAQAGWNRDELLKNVPETEDGFIKVPAIIDNGEAGA

SEQ ID NO: 57428 - protein, 482 aa, Enterococcus faecium
HNRSLEELHHMLVSKEITVQDLTKATFERIKETEPEIEAFITLNEEKALEQAKALDEKGIDESNILAGIPIGIKDNIVTKDILTTAASKILYNFEPIYDATVMDKIYQADMIPVGKLNMDEFAMGGSTETSYFKKTKNAWDQTKVPGGSSGGSAAAVAAGQIPVSLGSDTGGSIRQPAAFNGIVGMKPTYGRVSRFGLIAFASSLDQIGPMTRTVKDNALALTAISGYDEKDGTSSGVSVPDFAEGLTGDIKGMKIALPKEYLGEGVAPGVKEAVLKAAETFRSLGAVVEEVSLPHSKYGVAVYYIIASSEASSNLQRFDGIRYGYRSENVKSLDDVYVNSRSEGFGEEVKRRIMLGTFSLSAGYYDAYFKKAGQVRTLIKRDFEKVFADYDLIIGPSSPTVAFGIGENINDPITMYMSDILTIPVNLAGLPGMSVPAGLSEGLPVGLQIIGNYFDEKTMYQAAYAFEQATEFHTQQPAILG

SEQ ID NO: 57429 - protein, 109 aa, Enterococcus faecium
MNFETVIGLEVHVELKTNSKIFSPAPAHFGAEPNSNTNVIDWGYPGVLPVMNKAALEFGMKAALALNCEISKDTHFDRKNYFYPDNPTAYQISQFDQPIGHDGWIDIEV

SEQ ID NO: 57430 - protein, 507 aa, Enterococcus faecium
LIVGLGLGFMVAKSRHEKEIAGAQSSAAGIIDSAKKEAETLKKEALLEAKEENQKYRSEVESELRESKLELKSQENRLIQREQTLNRKDDSLEKRENSLESKEEALSSKQQLIEEREKDVEKMIEDQQKELEKIAGLSKEDARDVIMKSTEEELNHELTLMVKESEQRAKEEADRKAKNLLSLAIQRCATDQVSETTVSVVTLPNDEMKGRIIGREGRNIRTLETLTGIDLIIDDTPEAVVLSGFDPIRREIARMTLEKLIQDGRIHPARIEEMVEKSRKEMDERIREYGEEAAFEVGAHTLHPDLIKIIGRLRFRTSYGQNVLKHSVEVAKLAGILAAELGEDIQLAKRAGLLHDIGKALDHEIEGSHVEIGAELAAKYKENPVVINAIASHHGDVEATSVISVLVAAADALSAARPGARSESLENYIRRLRSLENISNSFAGVESSYAVQAGREVRVMVKPEEISDLDAVRLVRDIRKRIEEELDYPGHIKVIVIRETRATDYAK

SEQ ID NO: 57431 - protein, 521 aa, Enterococcus faecium
SSICSNQWNEYRQTNELSIQKAVDFFSNLTLSEQEKVIAKPILKEVNDRLSFLENVGLDYLTLSRASGTLSGGEAQRIRLATQIGSNLSGVLYILDEPSIGLHQRDNDRLIGSLKKMRDLGNTLVVVEHDEDTMWAADYLIDVGPGAGEQGGQIVAAGTPEEVANDENSLTGKYLSGKKSIPVPKERRKGNGKAIKITGASENNLKNISVEFPLGEFVAVTGVSGSGKSTLVNSILKKSLAQKLNKNSAKPGKFKTISGYESIEKIIDIDQSPIGRTPRSNPATYTSVFDDIRVLFAQTNEAKMRGYKKGRFSFNVKGGRCEACRGDGIIKIEMHFLPDVYVPCEVCHGKRYNSETLEVHYKGKSIADILEMTVEDAVEFFKHIPKIHRKLQTIVDVGLGYVTMGQPATTLSGGEAQRMKLASELHKISNGKNFYILDEPTTGLHSDDIARLLHVLQRLVDAGNTVLVIEHNLDVIKTADYIIDLGPEGGEGGGTILTTGTPEEIINVKESYTGHYLKKIM

SEQ ID NO: 57432 - protein, 217 aa, Enterococcus faecium
MEKTIFNRTYEILNEVFNAVTHGIGTGLSIAGLVVLLVKGAHLHSSLHIVSYAIYGSMMILLFLTSTLFHSLIFTKAKKVFQVFDHSSIFLLIAGSYTPFCLLSIRGWLGWTLFVLIWLFAILGIIYKALTLHKRERVSKVSTIIYIFMGWLCVVAAVPLYHSLGMTGVILMVAGGLSYTIGAFFYSLNSIRYMHVVWHLFVMLGAGFMYFSVLFFT

SEQ ID NO: 57433 - protein, 175 aa, Enterococcus faecium
MLAAIWAQDENGLIGKEDRLPWRLPNDLKFFKQMTEANTLVMGRKTFEGMGSRPLPNRQTIVLTRDSSYKAEGVHVMHSVEDVLALEKETDGIFFIAGGSAVYQEFLPFCTILYRTVIHHVFDGDAYFPPVDWSDWSLINTSQGEIDEKNRYPHQFETYQRNENPVKSGTGELTI

SEQ ID NO: 57434 - protein, 383 aa, Enterococcus faecium
ELRDGDKARYGGKGVTKAVDNVNNIIAEAIIGYDVRDQMAIDKAMIALDGTPNKGKLGANAILGVSIAVARAAADYLEVPLYHYLGGFNTKVLPTPMMNIINGGSHADNSIDFQEFMIMPVGAPTFKEALRMGAEVFHALASILKARGLATSVGDEGGFAPNLGSNEEGFEVIIEAIEKAGYVPGKDVVLAMDAASSEFYDKEKGVYVLADSGEGEKTTDEMIKFYEELVSKYPIISIEDGLDENDWDGFKKLTDVLGDKVQLVGDDLFVTNTQKLSEGIEKGIANSILIKVNQIGTLTETFEAIEMAKEAGYTAVVSHRSGETEDSTISDIAVATNAGQIKTGSLSRTDRIAKYNQLLRIEDQLGEVAEYKGLKSFYNLKNK

SEQ ID NO: 57435 - protein, 148 aa, Enterococcus faecium
MPWNMKDFPASMKNLDKLTRKKAIDIANALLDEGYPDNRAIPIAIDQAKKWYEDASESEKRTFEKEKNPSKTDEHDTNPRAGKLLDSDVIVEYEEEQWIVKSKGAKKASNHFDTKKEAIEKGKQVAQNKESTLFIYKKDGTKEKEIDY

SEQ ID NO: 57436 - protein, 437 aa, Enterococcus faecium
NIERGVHMSSVVVVGTQWGDEGKGKITDFLSENAEVIARYQGGDNAGHTIKFNGVTYKLHLIPSGIFYKDKISVIGNGVVVNPKSLVKELAYLHEKGVETSNLRISDRAHVILPYHIKLDQLQEDAKGENKIGTTIKGIGPAYMDKAARVGIRIADLLDKEIFEERLRLNLDDKNRQFVKMFDSEPLDFDDIFEEYYEYGQQIKQYVTDTSVILNDALDAGKRVLFEGAQGVMLDIDQGTYPFVTSSNPVAGGVTIGSGVGPSKINKVVGVCKAYTSRVGDGPFPTELFDETGEQIREVGREYGTTTGRPRRVGWFDSVVMRHSKRVSGITNLSLNSIDVLSGLETVKICTAYELDGELIYHYPASLKELNRCKPIYEELPGWSEDITGCKTLAELPENARNYVRRISELVGVRISTFSVGPDRTQTNILESVWAQI

SEQ ID NO: 57437 - protein, 105 aa, Enterococcus faecium
MEVDDAVKAADVVMILLPDENIPDVYKNNVEPNIKQGATLAFAHGFNVHYNQVVPRADLDVIMVAPKGPGHTVRSEYLKGGGVPSLIAIYQDKSGKARDVALSYA

SEQ ID NO: 57438 - protein, 149 aa, Enterococcus faecium
MNKELSRHEIREMALQALFPLDFNADLTKEDAIFNAIELDHRDMINEDESEFVPVYLDTLVGGVCAKKDELDKVIEKHLKNNWHINRISKMDLVILRIAIFEMTYVTDVPAAVALNEAIELAKTFSDDRSRKFVNGVLSNVLKELEAGA

SEQ ID NO: 57439 - protein, 241 aa, Enterococcus faecium
MNNFIQTLSERKGELLEAAFQHLSISLISLLIAALIAIPLAIWAANHKKMAEVLLQITGVLQTIPSLALLGLLIPFVGIGTVPALIALVIYALLPIFQNTYIGLAEIDPSIEEAAVAFGMSRMRRLLKVELPIALPVIISGIRTALVLIIGTATLAALIGAGGLGTFILLGIDRNTPVLTLIGAISSALLAIIFSGLVRWVQHKKPRYSIITLAAVVCLFGGVSLYQSALFKNETITVAGK

SEQ ID NO: 57440 - protein, 587 aa, Enterococcus faecium
  MISC_FEATURE (580)..(580): X=any amino acid
MLKELKVTDLKKTYGEKDLFDQISFLVHEKDRIGLIGTNGTGKTSLLNIIAGIDSGDGDRQTVFYPTDYRIGYLSQAAEFSDELTVLQAVFQGNSPLIQTVRAYEEALIELGENGEDPDVQKRYAKAEEQMNKEDAWTTDTNAKIILQKLGISELDKKISTLSGGQKKRVSLAQVLIDEPDLLLLDEPTNHLDYEAIEWLENYLKQYRGALLMVTHDRYFLDRVANRIFELSFGKLYEYKGNYEAYVLEKAERDRVEVEQEEKRNVLYKQELAWMRAGVQARGTKQQARINRFEDLKENLYQVNQEDDLELNLATQRLGKKVLEIKDGSYRINDQTLLEHLDLLIQSRERLGITGKNGAGKSTLLNILAGRIPLDSGTMSIGETVHLAYYTQDNEEMAPDKRMIAYLQEAAEEAKTADGSQIGVAELLERFLFPRFMHGTLIGKLSGGEKRRLFLLKLLIQQPNVLLLDEPTNDLDIATLTILEDYFRSFPGAVITVSHDRYFLDKVADKLLVFQGNGKQELYYGNMSSYLLKQKETQQPAEKAKPKIQSKEPAEKKTLSYMEQKEWETIEDEIAELEEXISLLPER

SEQ ID NO: 57441 - protein, 528 aa, Enterococcus faecium
MSKINAGIAMVKVLESWGIDHIYGIPGGSFNSIMDALYQEKTEINYIQVRHEEVGALAAAADAKLTGKVGAVFGSAGPGATHLINGLYDAQMDHVPLVAFLGQVASTSMNYNSFQELNENPIFADVSVYNRTVMTPQSLPHVVDEAIKAAYEHKGVAIVTIPVDLGFEEIDEQPFSTAHTHKTSVILPEEKDLLAALPYLEKAKKPVLYVGQGTRNGFPQIKEFSEHFSVPIVASVLAKGIIPDDYENFLGFAGRVATKPGNEALAEADLILFVGSDFPFGRAFFNPTAEFIQIDIDASKFGRRHETSLSILGDANTALQRLVELGDARPADSWYLANQENKEKWVNWLKSFEDREEEPIRSEAVYKEINRIAEDDAIFVTDVGNTTIHSIRLLNMNGKQKHTTSGWFATMGNGVPGGIAAQLSYPEKQVFTLSGDGGFAMVMQDIITQVKYQLPIINVVFSNDSFGFIEAEQEDTEQKKFGVFLEDADFGKVGEALGANSFTVTEYSQLRFCFDAAAKSDRPVVIDV

SEQ ID NO: 57442 - protein, 445 aa, Enterococcus faecium
MAQEYLTVTTLTRYLKRKFDADPYLERVYLTGEISNFRLRANAHQYFSLKDDHAKISAIMFKGAFQKLRFQPKEGMKVLVVGRISLYEAGGSYQIYVEHMEPDGIGALYQELEERKEKLMKEGLFQGPKKMLPRFPKRIAVLTSPSGRVIRDIITTVKRRYPIVQLVLFPTVVQGNQAADNVVRNIQRVEEMGNFDTMIIGRGGGSIEDLWPFNEERVARAIYQANTPVISSVGHETDTTIADLVADVRAATPTAAAELAVPVLSEELMRIQERQARLQQAFVRQIQRKQERFERARRSYVFRQPERLYEGQTIKLDQLKQRLYQATQQIYHAKEKQTIALSHQLEQVAPLYRVKAARQETAYLEKRLEEKIQQYMKQQQQRFAQAVQSLDLLSPLKIMGRGYSYTTLNDQVVKSVSEIHQGDLLTIHYQDGIVKGQVQEIDKGE

SEQ ID NO: 57443 - protein, 265 aa, Enterococcus faecium
  MISC_FEATURE (255)..(255): X=any amino acid
AEMRLTDFSAIHLPAVEKEILSFLDEHTTDRGLYDAMSYSVKAGGKRIRPLLLLTAVASFDEPIDVPVYQVAAALEMVHTYSLIHDDLPAMDNDDLRRGKPTNHKVFGETLAILAGDGLLTGAFQLISMAHLGNSPKLLLLQQLAVCAGSQGMVAGQAADIEGESKKLSLEELAFIHERKTGHLIRYALLAGGILANIPEEILLLLQRLAEHLGLAFQIRDDLLDVIGTTKTLGKTAGKDERMEKNTYPRLLGLXKTREALEIEL

SEQ ID NO: 57444 - protein, 324 aa, Enterococcus faecium
MRKVIIDCDPGIDDTLALSLAVKSPDIEVVAITVVCGNVPADIGTQNVLKCLERCDRLDIPVYQGMEKPLKQPFISAQDTHGMDGLGETNFPMILRKQAEPLHAVDFLADYFKEKTNTSVIALGPLTNIAFALKVNPNIGKHMDRFVSMGGTYKSHGNCSPVAEYNYWCDPEAASYVFENLKQTIEMVGLDVTREIVLTPTILEYCCQMNPEEGEYLKAITRFYFDFHWKQERILGCVINDPLAVAYFIEGAICEGFKSFTAVETQGISRGQTLVDRYEFWQKPANSKIMTKVDTRLFFRKFLTVLLNAQEETIMKDLERLKMG

SEQ ID NO: 57445 - protein, 541 aa, Enterococcus faecium
MAKELKFAEDARALMLRGVDKLADTVKVTLGPKGRNVVLEKSYGSPLITNDGVTIAKEIELEDHFENMGAKLVSEVASKTNDIAGDGTTTATVLTQAIVREGLKNVTAGANPLGIRRGIELATKAAVEELHNISTVVDSKEAIAQVAAVSSGSDKVGHLIADAMEKVGNDGVITIEESKGIETELDVVEGMQFDRGYLSQYMVTDNDKMEAVLENPYILITDKKISNIQDILPLLEQILQQSRPLLIIADDVDGEALPTLVLNKIRGTFNVVAVKAPGFGDRRKAMLEDIAILTGGTVITDDLGLELKDATIENLGNASKVVVDKDNTTIVEGSGEKEAIEARVQLIKNQIAETTSDFDREKLQERLAKLAGGVAVVKVGAATETELKELKLRIEDALNATRAAVEEGMVSGGGTALVNVISKVSAVEAEGDVATGIKIVVRALEEPIRQIAENAGYEGSVIVDKLKNVELGTGFNAATGEWVNMVEAGIVDPTKVTRSALQNAASVSALLLTTEAVVADKPEPAAPAAPAMDPSMMGGMM

SEQ ID NO: 57446 - protein, 299 aa, Enterococcus faecium
MANDKITIHGARAHNLKNIDVTIPRDKFVVVTGLSGSGKSSLAFDTLYAEGQRRYVESLSAYARQFLGQMDKPDVDSIDGLSPAISIDQKTTSKNPRSTVGTVTEINDYLRLLFARVGHPICPNDHIEITSQSVDQMADQVMALPERTKIQVLAPIVVKKKGQHKKIFERIQKEGYVRVRVDGEIYDLSEVPELEKNKKHDIAIVIDRIIVKEGIRSRLFDSLEAALRLADGYALVDVIGEEDMLFSEHYACPYCGFTVGELEPRLFSFNAPFGACPDCDGLGVKLEVDQDLVIPDRTK

SEQ ID NO: 57447 - protein, 113 aa, Enterococcus faecium
MGHIGLYRDEETLEPHEYFVKLPEDIDARQLFVVDPMLATGGSAIMAIDALKERGASNIKFVCLVAAPEGVKALQEAHPDIDIYTASLDEKLNEHGYIVPGLGDAGDRLFGTK

SEQ ID NO: 57448 - protein, 271 aa, Enterococcus faecium
SYERDLEQYLHFLQEQKIASWQDVDRFLVIRFLEKLHERKKSDTTVTRMISSLRRFHQFLRQERITDHDPMQHIDTPKKAQKLPSTLTLTEVEKLIEAPDTTKTLGIRDRAILEVMYATGMRVSELIGLKLGDLHLSLGLVQTVGKGDKERIIPLGDYAIQWLERYLDEARPLLVKDASEMHVFVNNHGKGLSRQGIWKNLKQLVREAGIYKEVTPHTLRHSFATHLLENGADLRTVQELLGHADISTTQIYTHITKKRMTDVYKQHFPRA

SEQ ID NO: 57449 - protein, 167 aa, Enterococcus faecium
MSEAIIAKKAAIVDEVSEKFTAAASVVVVDYRGLTVDEVTRLRKQLRDANVEMKVIKNSILSRAAKKAGLEGMDEVFTGPTAVAFSNEDVVAPAKIMDEFAKEAKALEIKGGIIEGKVSSLEEITALAKLPNREGLLSMLLSVLQAPVRNVAYAVKAVADKEDGDAA

SEQ ID NO: 57450 - protein, 122 aa, Enterococcus faecium
MALNIENIVAELKEATILELNDLVKAIEEEFGVSAAAPVAVAAAGGAAAAEEQTEFTVELTAAGDQKVKVIKAVREATGLGLKEAKAVVDGAPAPVKEGVSKEEAEELKAKLEEVGASVTVK

SEQ ID NO: 57451 - protein, 254 aa, Enterococcus faecium
NEKREVTKEVKEAIAAAVAKGVSIVLCTGRPLPGVQEQLNELNLFQDNDYVITYNGALVQQTKSGKIIARHGLTHEDFLEIEVMARRVGSHLHSIDDKAIYTPNRDISAYTIHEASLVKMPLKYRTPEEMTPDMNIVKMMMIDEPEILDAAIARLPQTFRDKYTTVKSAPYYFEVLNKEASKGAAVANLAQHLGIDQDEIMAIGDNENDLSMIEYAGLGVAMGNAVSLVKEAANVITSSNDEHGVAEAIKKYVL

SEQ ID NO: 57452 - protein, 68 aa, Enterococcus faecium
MIIDLFIVLAVIIPAAQFPFQSWLIESVAAPTPVSAIMHAGIVNAGGIILTRFSPVFDNPIATRLKKT

SEQ ID NO: 57453 - protein, 158 aa, Enterococcus faecium
MNGIEAVVAATGNDTRAVSASIHAYAARNGLYQGLTDWQIKGDKLVGKLTVPLAVATVGGASNILPKAKASLAMLDIDSAKELAQVIAAVGLAQNLAALRALVTEGIQKGHMGLQARSLAISIGAIGEEIEQVAKKLREAEKMNQQTAIQILEKIREK

SEQ ID NO: 57454 - protein, 150 aa, Enterococcus faecium
MKVIFLQDVKGKGKKGDIKEVPAGYAQNYLIKNNLAKEATKSSISQLAGQKKAQEKHEAEILEEAKKLKEFLEKEDTVVELKAKAGEDSRLFGSIPSKQIAEGLNKQYKIKLDKRKIELENPIRSLGYTNVPVKLHHEVTATIKVHVVQE

SEQ ID NO: 57455 - protein, 462 aa, Enterococcus faecium
MNEVWQDRIPPQNIEAEQAVLGSVFLDAETIIDAMEYIEPKDFYRRGHQIIFETMIELNDRNEAIDVVTVKDRLEQANLLEDAGGLSYLSDLALAVPTAANIVYYAKIVEEKSLLRTLIQTATGIVTKGFEQGEEVQTILDDAERSILEVSEKRNRSGFLSIAEVLNSTIENIDRLAQNNEEITGLPTGYQGLDKMTAGFQPEELIILAARPAVGKTAFALNIAQNVGTKTDRSVAIFSLEMGAESLVNRMLCAEGSIEASHLRTGQLSEEEWSNLIVAMGSLSRANIFIDDTPGIKISEIRAKCRKLAQEKGNLGLILIDYLQLIEGNGKENRQQEVSDISRQLKKLAKELKVPVIALSQLSRGVEQRQDKRPVLSDIRESGSIEQDADIVAFLYRDDYYEREGGDDDDGNEPKNDNVIEVIIEKNRSGARGTVELLFIKEYNKFSSLSPREEFSRRGCEP

SEQ ID NO: 57456 - protein, 65 aa, Enterococcus faecium
MTEKILYQHGTLGALMAGLMDGTETIAHILEKGTLGLGTLHGLDGEVIFLDGVLIKEDQMAQLPN

SEQ ID NO: 57457 - protein, 249 aa, Enterococcus faecium
MAVKITGLFKNMHIRIMPKQEKPYRRLAKISESQPEFQQSNVQGTLVGFFTPELGNSWQMASWRVIGSFFVALVIGVWLAYFQKDSVLKEKITYKVAENHHHHVHEEEQSENNEPKNQLIHQTGHVLTHSIDEFFDTGRYLIIGGLIAAAMQTYLPTRIMLTLGSTKILAIIIMLLLAFTMSLCSEADAFIGSSLLSLFGTAPVAAFLVFGPMVDIKNLLMMKRYFTGRFILSLIGLIALSVIGFTLFI

SEQ ID NO: 57458 - protein, 601 aa, Enterococcus faecium
MCGIVGMIGLKNVTPGLIGGLEKLEYRGYDSAGIFVSDGTTDHLVKAQGRIQNLKDRITSDTTGNIGIGHTRWATHGQPSEENAHPHTSQSGRFVLVHNGVIENFEELKNAYLTDDHFIGETDTEIIAHLIETFAKDMTAKEAFLKALRVIKGSYAFALIDRTTPDVIYVAKNKSPLLVGLGDGFNVIASDAMAMLAHTKKFVEVEDEEMVTVTSDKIIIQNFAGDIMERSSFEAQVDASDIEKGTYPFYMLKEIDEQPIIMRRIAQKYVTEDNRVPLDPKLIDTLSDSDRIYIVACGTSYHAGLAGKQTLEELTQIPVEVHLASEFGYNTPLLSKKPFFIFLSQSGETADSRQVLVKINRLGYPSLTITNVAGSTLSREASFTLLLHAGPEIAVASTKAYTAQIAVLTLLAKAIGDKKEVEISLSFDITHELSLVANAMESVIAQKVYLEELAAEYLSDTRNAFYIGRGADYNVSLEAALKLKEISYIQAEGFAAGELKHGTIALIEEGTPVIGIISEEVTGAHTRGNLKEVESRGAKTLVIVSEGLEKENDQLVLPAVHPYLSTLATVVPTQLLAYYATLLRGFDVDKPRNLAKSVTVE

SEQ ID NO: 57459 - protein, 187 aa, Enterococcus faecium
MITVVHKERQEKSSSDVRLWVYLGSISTKIQYGYTDSAKKQGNVKFLRITDIQEGRVNWSSVPYCDISNSKLIDLRLEENDILIARTGGTMGKSFLVKEISEESVFASYLIRIRLVEKLLSEYVDCFLDSPLYWKLLEKISYGTGQPNVNGTNLSKLLIPLPPLEEQQRMTTKIEMIRRSIRRINFE

SEQ ID NO: 57460 - protein, 329 aa, Enterococcus faecium
FMKLHPMWENYPALSKELTETLKRMEETVRLKNKPVEQAIKETIHAGGKLLRPAYQLLFSQFGPEQDRDKAIALAASIEMLHTATLIHDDIVDEADLRRGQPNIRSQFGNVVSVYAGDYLFVCCFKLLSDYSTSLKSLQLNSRSMEKVLNGELGQMDDRYNYELSVKEYLENISGKTAELFQLSCSVGAFESGTSERFAKKAGDIGLSIGMAFQIIDDILDYTKESQEIGKPVLEDMRQGVYSLPLIYSLQKNKPKLLPYLEKKAAMTEEDVDAVRKIVEHTGGVEEARKLAASYTEKALKEIKKLPATSLRTKENLFSLTQLILDRKD

SEQ ID NO: 57461 - protein, 631 aa, Enterococcus faecium
MKIINIGVLAHVDAGKTTLTESLLYNSGAITELGSVDKGTTRTDNTLLERQRGITIQTGITSFQWENTKVNIIDTPGHMDFLAEVYRSLSVLDGAILLISAKDGVQAQTRILFHALRKMGIPTIFFINKIDQNGIDLSTVYQDIKEKLSAEIVIKQKVELYPNVCVTNFTESEQWDTVIEGNDDLLEKYMSGKSLEALELEQEESIRFQNCSLFPLYHGSAKSNIGIDNLIEVITNKFYSSTHRGPSELCGNVFKIEYTKKRQRLAYIRLYSGVLHLRDSVRVSEKEKIKVTEMYTSINGELCKIDRAYSGEIVILQNEFLKLNSVLGDTKLLPQRKKIENPHPLLQTTVEPSKPEQREMLLDALLEISDSDPLLRYYVDSTTHEIILSFLGKVQMEVISALLQEKYHVEIELKEPTVIYMERPLKNAEYTIHIEVPPNPFWASIGLSVSPLPLGSGMQYESSVSLGYLNQSFQNAVMEGIRYGCEQGLYGWNVTDCKICFKYGLYYSPVSTPADFRMLAPIVLEQVLKKAGTELLEPYLSFKIYAPQEYLSRAYNDAPKYCANIVDTQLKNNEVILSGEIPARCIQEYRSDLTFFTNGRSVCLTELKGYHVTTGEFFLTSIPQIFPLISC

SEQ ID NO: 57462 - protein, 726 aa, Enterococcus faecium
LHTDGPLLLMAGAGSGKTRVLTHRIAYLIEEKEVNPWNILAITFTNKAAKEMKERVNAILVSGGEDVWVSTFHSMCVRILRRDVDFIGYNRNFTIIDSSEQLTLMKRILKELNIDPKKYDPRSILGTISQAKNSLQTPQDFAKMQGSYYEEIAAKCYAAYQKELQYNQCMDFDDLIMNTIRLFEEHPDSLTYYQNKFHYIHVDEYQDTNHAQYTLVNLLAGRFRNLCVVGDADQSIYGWRGADMQNILDFEKDYPDAAVILLEQNYRSTKNILSAANQVIENNSNRKPKNLWTENKEGNKITYYRADNERDETRFIVDRMQEEIRNNHRNYGDFAILYRTNAQSRVMEETLLKANIPYKMVGGHKFYDRKEIKDILAYLNVLANPQDSINFERIVNSPKRGIGPGSIEKLRSFASLHEWPLLEAAQNVDLANIGGKAGQQLGAFGEMIQEVTQMIPYLTVTELTKEVLDRSGYLEDLKIQNTLEAQARIENLEEFLTVTQEFDKQFEQQNEEDADAPEEKLTVFLNDLALVSDIDNLEEDASQVTLMTLHAAKGLEFPVVFLIGLEEGVFPLSRALMEESELEEERRLAYVGITRAEEALYLTNAFSRTLYGRTQYNRPSRFVEEIDQELLEIEGMRPTPKKTPVFAKKTAAYSYKQPETAVVSSKSATGGEKNSWKPGDKVKHKKWGLGTVVRVSGTSKDLELDVAFPSQGVKRLLAAFAPIEKA

SEQ ID NO: 57463 - protein, 214 aa, Enterococcus faecium
MMEHEMTIDEAAKRAEELRTRLNQWSREYYVEDKPTVEDYVYDKEYAELVAIEEQYPDLITSDSPTQRVGGKVLEGFEKVIHDIPLYSLNDVFSKEELIAFDQRVQKAVGRVVDYCCELKIDGLSVSLRYEDGNFVRGATRGDGTVGENITENLKTVRSVPIKLKEPMNIEVRGECFMPKRSFVQLNQDREAEGKDIFANPRNAAAGSLRQLDS

SEQ ID NO: 57464 - protein, 816 aa, Enterococcus faecium
MENRQEVQELTLEEVMGDRFGRYSKYIIQERALPDIRDGLKPVQRRILFAMNKDGNTYDKGFRKSAKSVGNIMGNYHPHGDSSIYEAMVRMSQDWKLREVLIEMHGNNGSMDGDPPAAMRYTEARLSKLSGEMLADIEKETVDLVWNFDDTEKEPTVLPARYPNLLVNGSTGISAGYATEIPTHNLAEVIDGTIYMIDHPQASLEKLMEYIPGPDFPTGGILQGKDEIKKAYETGRGKVILRSKTKIEAMKGNKQQIVITEIPYEVNKATLVKKMDEIRLNKKIDGIAEVRDESDRTGLQIVVELKKDANAQGILNYLFKNTELQINYNFNMVAIDHMTPHQVGLKDILRSYIEHRKQVITKRSQFDLAKAQKRQHIVEGLMKALSILDEVIVTIRESKDKKDAKKNLVDVFQFTEEQAEAIVTLQLYRLTNTDITELQKESESLIAQITELNKILSNDKELFSVMKKELREVKKNYSSARLTTIEDEIEEIKIDTQVLVAQEDVIVSVTREGYVKRTSLRSYSASKPEEIGMREGDYLLYSGELSTLDHVLLITNKANVIYRPVHELPDLKWKDAGEHISQTISNLSVDESILAVFPYQKIQAEKTFVFISKNGLIKQTRMTEFEPWRTYKSRPLSCMKLKAEEDELIAVYLKEDQPGLDVFLVTHQGMGLRYPLTDVPVVGAKAAGVKSMNLKDGDRIINGLLVLAEGDTPIVIVTQRGAVKRMLAQEISQTSRANGRVTVMRELKKNPHRIIYMSEGRSKEITLMNQKGQQLTIDPTDFPIGDRTSNGSFAMDEKKGGEVIEVIDAPEIFIES

SEQ ID NO: 57465 - protein, 380 aa, Enterococcus faecium
MKNIKKFFSRNIFPVFIKILPIQKNLIVFSSFGGRNYSGNPRVISEKIHEKKLNYRIIWLIKKEAIITDLPDYIKRIDSDSFLAAFYLYTAKYWIDDSRKTIKYAKRKKQLYFQTWHGTPLKKIEFDAKDKLPKRYLSYAKKDSESITYLLSGNRYSSKKYVSAFNIVPSKILEVGTPRNDELASSKEQVFDLKKKQINVLFAPTFRNNIEDNGITQLEWLGVDNLREFFKKQQQELNFMTKFHPNVHSKLATDSKSIEYMKKHQITLINDGIPLEMLFEEIDVLITDYSSIFFDFALTKKPIILFNYDEKEYSLERGFYIQLSELPIISVQDSYGLVDVFKNQQEKLLKSSQELLDYIGNYETGASTEKVLELIERDIK

SEQ ID NO: 57466 - protein, 888 aa, Enterococcus faecium
MENKEQAQQAVYKETIDSLMQQTQSSTDGLSTTQAKEKLERDGLNQLKEKPKKPTWKLFLETFKDAMVIVLLIVALIQMVMGDYIEFLVIFAVLMLNSIISVVQTKKAEGSLEALKNLSAPDARVIRDGKEKTIPANELVVGDIVLLDAGDYVPADGRLLDAGSLKVDEGMLTGESTSAEKEVTDITSTVPIGDRTNMVFSGTIVTYGRGKFLVTSTGNNTEIGQVAGLLESTTEQVTPLQRGLDKFSKKLSLAILALSLLILGIQLFRIYLGEGTGDMTADIVSAVMFAVAVAVAAIPEALQSIVTIVLSLGTNKMAKRHAIIRKLPAVETLGSTSIICTDKTGTLTQNKMTVVDYFLGNGDTGDFTNDPSKWTADERRLIEISVLANDASISEDGTKLGDPTEVAFIDFSEKLNQPYQEIRNNYPRQAELPFDSDRKLMSTGHTIDNENYLFVKGGPDIVFQRSKKVLLNGEVVPMTDELMKKFQEQNEAFSTRALRVLAFAYRPLDNFDLSFEDEDDLILVGLLAMIDPPRAEVTQAVTEARSAGIKTIMITGDHKTTAVAIAKQIGIFEEGNLALTGTELDELTEDQLNEVLEKVTVYARVSPENKIRIVRAWQNKGHISAMTGDGVNDAPALKQADIGIAMGTGTDVAKDAAAMVLTDDNFASIVSAVEVGRNVFDNIKKAISYLFAGNLGAIIAIIFALVADWSNPFTALQLLFINLVNDSLPAIALGTEKAEPATMNRPPRDPNSGIFTDKTLISVTYRGVLIGIAVIFAQWLGMQHSPEFGVAMSFSTLIWCRTLQTFPARSNTQTAIQAGFFSNRSVLLAVVVCSALYCLTMIPGLKEVFSIPSAFGLTEVFTCMGIALVTIVLMEITKLIIVRVQGNK

SEQ ID NO: 57467 - protein, 225 aa, Enterococcus faecium
MIEIYLFVNPLGEYCFEMEQQLLQFIEEEYGTPSKEKMQFRFLPLVNLQTIGDVMQQKGISQNNLEERNHLFSMTYSAALDCKAAQFQGKKKGRRFLIKLQEAVGCNDIPYSQELAESIFEEIGGDLNMFKEDRQSDFVKEVFFSDQKIAREMGITKHPSAVVYNYACDRDFGVLVEVKGTSSLWRITELCKTTDNSYQVFNGEHLHTNDSQFHSRTSHLHLLSN

SEQ ID NO: 57468 - protein, 296 aa, Enterococcus faecium
MRSFVSGGKEMAQIGIYEKALPKDISWKERFSLIKEMDFDFIEMSIDETDERLARLDWSEEKIAELREEMFSSGVRIHSICLSAHRRFPFGSADPEKKKAAKQLMKKAIRLAHNLSIKVIQIAGYDVYYEEKSMNSREDFIEGIKESVKEASKYGIILSVEIMDDLFMNSISKFLEIKEQIHSPFLQVYPDLGNLSAWPENNPARELEKGIDYITAIHLKDTYPVTKEYSGQFRDVPFGSGCVDFLGLLRHLKRLDYDGTFLIEMWSEKSQDFRREIQQAKDYLSSKLKEAGYDVL

SEQ ID NO: 57469 - protein, 691 aa, Enterococcus faecium
MAKDLLLEIGLEEMPAHVVTPSMKQLEEKTAKFLDENQLTYDTIETFSTPRRLAIKVTNIPERQADSEEEVKGPAKKIALDADGNWTKAAEGFVRGQGLTTDAITFRELKGVEYVYVTKYTHGKEAKEVLTGLADVIKSLTFPVTMHWAEYDFEYIRPIHWIVALLDDEVIPFEILDIKTDRASRGHRFLGEDVTFAHAKEYEEKLNEQFVIASPQKRKEMIITQANELAEKNHWIIDLDEDLLEEVNNLVEYPTVFSGDFEEKYLSVPEEVLVTSMKEHQRYFEVRNDQGMLLPHFISARNGDRVKLENVVRGNQKVLTARLEDAEFFYNEDKKASIDQYVEKLKTVTFHEKIGSIYEKMQRVQVIARIIGEQVGLSEEELMDLQRAAEIYKFDLVTNMVGEFPELQGIMGEKYALLKGEKPAVATAIREHYMPISSEGDLPETTVGSILAIADKLDSIFSFFAVGMIPSGSNDPYALRRQAYGVVRIIESKKWAFPLSVLQETISEVISKDADRFGIGLSAGQQQVIDFIKGRLRQLLTTKNIRHDVIEAVLNAEQKDLTKVFAAAQLFKQHLADEDFKPSMEALTRVVNLAKKAELEKQSEVDPELFENEAEKELHKAVEAMKTSFADQTINENYDQLVSLRPLIENYFDQTMVMAEEPAVRENRLTQLNQIAAMALSLASLDQIITK

SEQ ID NO: 57470 - protein, 148 aa, Enterococcus faecium
MSLLSRLNDDMKAAMKAKDKESLQVIRMIKSSIQNEQIKEGHDLTEEEELTVLSREMKQRRDSLHEFEEAGRDDLAEKVKSEIVIVEKYMPEQLSDEEIRQLVQEAITQTGASSMKEFGKVMGAIMPKVKGKADGNQVNAIVKELLQS

SEQ ID NO: 57471 - protein, 661 aa, Enterococcus faecium
MIMKQKEKLLLRYLIDHKKEYVTSQRLASELLLSDRTIRNYLQRIKELVEKNGGKIIAKPGYGYQLHILQRLTFDLFLSRQEIVPGYAREPQGFYESEDRQKYILNQLLLEDAILFMDDLAEELYISRSSLTKDMQEIKERLIPYSLKIVSKHGQGTWIEGEERNRRHFIMDTFFGNHYGNSLKEYLGQSRFFPDISFEELVIIILDETREAKLKVSDFIIQNLTLHLALGIKRLREGFEIKELGIEQEVSKRVEYQVAQRIVQRIEVIAGVSFPEEEVAYLTLHLMAKSNHKENQNNQELSKELAKVLKRLSQEFHFSLVEDLQLFNGLLDHLSPMMIRLSRGIRIENPLTEEIKKENLKVFDAVKRHFSNMPALKNYTINEDEWAYLALHLMAALEKERAAHKLHALIICATGYGSAQLLKNRVVSEFGKNITVVSVKGYYEINETTLKGIDLIISSIDLSTMFFKIPVLHVSIFLNEDDVRKIRKVIGESIPYHSSDRPIPAFSLQQKKQIYTEQLSEKFFKTYTYEPKKEEILHDLLQKLSINEEEGYIREMRKQIQQRENMGQIIFSDTVAVPHPAVPVGIETKVAVALIPSGMQWDQYQEIHFVFLVSPSYIENEGITVVTKAIVRLVDQLKVQQEILAEPIFENFSSKFIKLIE

SEQ ID NO: 57472 - protein, 438 aa, Enterococcus faecium
MKKTIFGFAALMSAVVLAACGGGGTDTSGNNSGGNGNNKEELTFPIATKNNDDAIEDGELEAAVATDSQFKGLFQWEFYQDSYDAAFMAPSHEPLFANDDDFRITDDGAATLDLDEDTKKATIKVKDNVKWSDGEDVTADDVIFPYEIIGNKDYTGIRYDDTFRNIVGMEEYHDGSADTISGIKKIDDKTVEIEYKEVNPSMLQSGGGIWSYAAPKHTLEGVAIKDMESSDQVRKNPVTFGPYYMSNIVAGESVEYLPNEHYWNGTPKLKKITMKSVPMASATEALNSKLYDMIFQMPTDTYDTYKEIAGYTNLGREQTSYTYLGFKLGKWNADTKSVEYNPDSKMADKSLRQAMGYALDNDAVGERFYAGLRSNATSLIPPVFQSYHDDEMKGFTQDLDKAKKLLDDAGYKDVDDDGLREDKDGNKLTINFASMSGG

SEQ ID NO: 57473 - protein, 687 aa, Enterococcus faecium
MKTRTIEILHRIMTAQYPVKAKHLASEFNVSQRTIRQEVLEANIWLSSKKLPEIRTIRNKGFLLKLEKEKQARLETEIKDVKDGFLNRRERIFDLVLALVYSRIPIHLNKKEEEFQISKSTLDEDMRRLRATLVSYGIEIVSYGKQGLVYKGSERSIRTMIYDFINQNLGMTDFFMNQDAQLTPAQKIFLHYFPLEEIKKIQEIYSNKLLKQEDDIYKKQILLFTLIWIQRIRKHEFISAINWKNTEIKDSSFSAFIDHMIEEFQLDNVPQVERNYLRFTIETFNARDISNSIEWVQAQLLTIQLIQFVENETHVPFHLKEEALFENLYKHMAALIVRIKNHIQVMNPLKENIRTNYFPIYRAVTHFVPTIEEVIGGKILEDEIAFLVIHFSTIASVIKRDLNYVYKSVVVCNHGMATGNLLAENLKEKFPQIEITAVLSSKEIELVDKLDVNLVFSTFQLNYRNKPLLVVDPILTETNILVIEDFLKRNEELQRLEPNSHESTELFTQIIDVMKESGGRVDRIIYGKLEKLFETNNLEINKREIQPMLKDILTDSNIMIKEKATTWEESIELAARPLVKENIVEERYVEAMIRAVNDYGPYIVIGKHMALAHARPEDGVNKLGVSVATIEQPIDFGNPEMDPVKIIFCLAAVDSYSLWRNRRNSSAARSALWWAAPLRFTPILIKA

SEQ ID NO: 57474 - protein, 397 aa, Enterococcus faecium
MVKVEVKHLTKIFGKKTQAALDMMNDHQPKTEILKKTGATVGVYDVNFDVKEGEIFVIMGLSGSGKSTLIRLLNRLIEPTSGSIYIDGEDVSKLSKEELREVRRHKINMVFQNFGLFPHRTILENTEYGLEVRGVPKEERQEKAEKALENSSLLSFKDQYPSQLSGGMQQRVGLARALANDPEILLMDEAFSALDPLIRREMQDELLDLQANVQKTIIFITHDLNEALRIGDRIALMKDGEIMQIGTGEEILTNPANDYVREFVEEVDRSKVLTAQNIMVPALTTNIESDGPNVALTRMRNEEVSMLMAVDRKRHLKGIITADQALEARKQKRPLIDFLDENVTVVGKDMVVSDIFNIIYDSPTPLAVVEDGKLKGVVIRGSVIEALAETSEVSEHE

SEQ ID NO: 57475 - protein, 389 aa, Enterococcus faecium
MISKEKRTSILYSFIALLFSIALYFNANGQSVPNTLSGNEAYNQTVTGVPIKISYDSKRYYIHGYENAVTVKLSSANRVQLNAEANEDTRMFRVTADITKLGEGTHEVPLKIQNLSSAVTAKIEPSTITVTVEKKVIKDFDVETLIPSTFTPSGYELDDTSVSPKKVSITTGDKTLAEIKRVVADVDASMVTDDGINSEVPIQALNAAGEVLSIVSDPVQVTVKADSIKPSKSVRLYGIQQGTPAAGVESYDFSFSKLEAEVSGSSDLLASIGDSIAVPINVSGINHRTTRKIEIPVEEGLSIKPESVSVEITPVLQTSSSSSASTSSRTQENTSTSRSISSADSGTEPSTTTISSSSESGTSSSTTSTEETSETSESTQMSRTNSSEN

SEQ ID NO: 57476 - protein, 167 aa, Enterococcus faecium
MNHIVLFEPLIPANTGNIARTCAATNTPLHLIEPLGFSTDDKHLKRAGLDYWNDVNITYHSNLEAFLTFLGNRKLHLISKFAHKVYSDENFADGEEHFFLFGKETTGLPETFMRENEEKCLRIPMNDEHVRSLNLSNTAAMIVYEALRQQGFPNLELTHHYENDKLD

SEQ ID NO: 57477 - protein, 862 aa, Enterococcus faecium
MQPEEMPYFVGTVAAIFFQNPSNFYKVLLVHISETTADYREKEIVVTGSFGDIQENETYRFYGELVDHPKYGRQLKLERYEQEKPTTANGIVAYLSSEKFPGIGKKTAEKIVELLGEDAIEKIIADPSVLKQISGLTKPKREMLAETIRLNHGMDQVIMGLNRYGFGSQLAFSIYQAYKNESLDIIEENPYQLVEDIEGIGFKRADNLAEQIGIAADSPRRIRAAILHQIFQHAVQTGDTYVPAETLLQQTIRILETSRPIEIQPDQVATVIIQLVEEGKIQQEETNLYENSLYFSEWGISNSIQRLLSRKKEIHYPEKEVQKNIRRIEKIFGIQYGPSQEQAIAEAIRSPLFILTGGPGTGKTTVINGIVNLFAELNGLELDPSKYTQEIFPILLAAPTGRAAKRMNETTGLPASTIHRLLGLNGREKTPSVSTKELEGGLLIVDEMSMVDTWLANTLFKAIPTNMQVILVGDKDQLPSVGPGQVLHDLLEIEQIPKMELNQIYRQGDGSSIIPLAHEIKEGRLPKDFTKNQKDRSYFRSDAYQIEPLISKIVEKAKNKGFRAQDIQVLAPMYRGPAGIDALNKMMQEIFNPGKPGKKEVHWNDTIYRIGDKVLQLVNTPELNVFNGDMGEITGIILAKDSEDKVDELVIQFDANEVTYKRNEWNKITLSYCCSIHKSQGSEFKMVILPMVHQYQRMLQRNLLYTAVTRSKELLILLGEEQAYVTCVANESASRMTTLKSRIIDNDKMNITLRTKLAAYEDSLVGNDPFEDGNYTKEPRVVKEKLPVEDDSGTNESKKQVMETVEPDLFSSFVGEEKKEEVEPAVSKDFVLTAEVIDNQLVDPMIGMENSSPYDFIPAKNA

SEQ ID NO: 57478 - protein, 331 aa, Enterococcus faecium
MQVIYLLIAVLFTGVSYLLPTKPNWIFQVILFLLCAFLPDLVLFLPATMRVIAPEESHLDYLFLLGFLLISTVGNHPPIKVAFVVILLFFSFYLRKKDQRTTDLEKKYIVSKDTHWEKQQELSEQNKALALSQETQLALQIVEERNRIARDIHDNVGHLLSSAILQIGALEMINQEPKLKEPLENLSATVHTGMDRIRQSVHDLHETSISFQHSLEFLIADFPSSVTIEGNLFEGLNETQQNCFLMVIKEALTNSIKHSHAKTVVLHFRTLPAFYRLQITNDGTSPQKNSAPGIGLKTMRQRVQEQKGQVHIFQENQQFQLTIILPREGHQ

SEQ ID NO: 57479 - protein, 231 aa, Enterococcus faecium
IIAAVSEMRGSTYEAIQLLAKMMHVDGHVYPSSETPLTLHAVFKDGTTAVGESKIAIDRKTIDRVYVCNTNDKSEAKAARKVVSAIMDADMVVLGPGSLFTSILPNLVIPEIGEAMLKTTAETVYICNIMTQKGETEHFTDADHIRVLHKHLNQPFIDTVLVNTEKVPEDYMDPEIYDEYLVQVAHDFNGLRNEGCRVISTDFLELKDGGVFHDGDKVVEELFRLVFGSKY

SEQ ID NO: 57480 - protein, 311 aa, Enterococcus faecium
MSFAADVKKELTGLEVHREHAKAELAALLRMNGSLGIVNQQFILNVQTENAAIARRIYSLLKDHYQVRSELLVRKKMKLKKNNVYIVRLKQGTKDVLMDLDIMDGMMFNGHVSDEIMGNSQKMRSYLRGAFMASGSVNNPETSRYHLEIFSIYEQHNQDICDMLNYYGLHARTLERRNGYISYLKGAEKIADFLTLIGATNSMLRFEDVRIVRDMRNSVNRLVNCETANLNKTIDAASKQIENIELIEAKVGLHALPEKLQEIAELRLQHPEVSLKELGEMIPSGAISKSGINHRIRKINEFAEKLREEAV

SEQ ID NO: 57481 - protein, 418 aa, Enterococcus faecium
MNIIDELTWRDAINQQTNEERLRELVEEKSISLYCGVDPTGDSMHIGHLIPFMMMKRFQLAGHHPYILIGGGTGTIGDPSGRKTERVLQTMEQVQHNVDALSNQMRKLFGKDANITFVNNYDWLSKISLLEFLRDYGKNFNINTMLAKDIVASRLEVGISFTEFTYQILQSIDFLHLYKTYDVQLQIGGADQWGNITAGLDLIRKLEGPEAEAFGLTIPLMLKADGTKFGKTAGGAVWLDPKKTSPFEFYQFWLNQDDRDVVKYLKFFTFLSQEEIEDLAKKVETEPEKREAQRRLAEEVTRFVHSEEDLKEAQKITQALFSGNIKELNAEEIAQGFGKMPNVEISSTPENIVELLVSTKIEPSKRQAREDVSNGAISINGDRVTDLNFVINPSDEFDGKFVVIRKGKKNYFLAKVID

SEQ ID NO: 57482 - protein, 62 aa, Enterococcus faecium
MAKVCYFTGRKTKSGNNRSHAMNSTKRTVKPNLQKVRVMVDGKPKKVWVSTRALKSGKVERV

SEQ ID NO: 57483 - protein, 641 aa, Enterococcus faecium
PFYEEPRMPKDLITRTDYVTAKNVLDAKGADALVEWIKGQENLLLTDTTFRDAHQSLLATRVRTKDFKQIARLTGEGLPELFSSEMWGGATFDVAYRFLNEDPWQRLRKIRSLMPNTLLQMLFRGSNAVGYSNYPDNVLVEFVKEAAAQGIDVFRIFDSLNWTPQMEKSIQAVRDTGKIAEAAICYTGDINDPSRAKYNVQYYKDMAKELEQLGAHIIAIKDMAGLLKPQAAYRLISELKETTDLPIHLHTHDTSGNGIITYSAASKAGVDIVDVAMSAMSGNTSQPSMSSLYYALVNGPRLPEITIENAQKLNHYWEDVRMYYKPFENGLNAPETEVYMHEMPGGQYSNLQQQAKAVGLGHRWDEIKQMYHTVNLMFGDIVKVTPSSKVVGDMALFMVQNDLTEEDIYEKGETLSFPESVVTFFQGELGQPVGGFPKKLQKIILKGRPALNERPGLLAESVDFNEVKKELAEKIGYEPKQDEVLSYLMYPQVFLDYQKAYNQFGDVTLLDTPTFFQGIRLGETINVQIERGKTLIIRLDEIGEPDIEGNRVLFFNLNGQRREITIKDNSIISTVQTRLKAEPTNREQIGATMSGSVLDVLVKKGDNVKKGDTLMITEAMKMETAIEARFDGEVAHVMCLQ

SEQ ID NO: 57484 - protein, 416 aa, Enterococcus faecium
MYDNPSSNETVRCSFCGKTQEEVKKIVAGPGVYICNECIDLCKEIIDEEFYEEAVREFTEVPKPLEILEVLNNYVIGQDRAKRSLAVAVYNHYKRVNQQAQENTDDVELQKSNICLIGPTGSGKTFLAQTLAKTLNVPFAIADATSLTEAGYVGEDVENILLKLLQSADYNVERAEKGIIYIDEIDKIARKSENVSITRDVSGEGVQQALLKILEGTVASVPPQGGRKHPHQEFIQIDTTNILFIVGGAFDGIETIVKNRMGEKTIGFGTQNQKLSEDESVMQHIIPEDLLKFGLIPEFIGRLPVMAALEKLTTDDLVRILTEPKNALVKQYQKLLSLDDTELEFEPEALRAIAKKAIERNTGARGLRSIIEEIMMDVMFDIPSNENIEKVIITKEAAELSGEPTVIYKDSEKKAG

SEQ ID NO: 57485 - protein, 304 aa, Enterococcus faecium
MIYTVTLNPSIDYIVRVDGLKLGDLNRMKEDFKLPGGKGINVSRILKRIDSQSTALGFLGGFTGEFISKWLEKEQINSLFTHVQEDTRINIKLKSDTETEINGLGPAISDEEINELKQALGTVEQGDIVVLSGSAPASLRKGFYQELIDIIREKGADFVIDTTGDDLKNALVKKPLLIKPNNHELAELYNTTFQSVEEIIPYGKKLLAEGAQNVLISMAGDGALLFTEQGTYKTNVLVRPLKNSVGAGDSMIAGFIGAYSRTKDPIEAFKWGVACGSATAFSDDLAARELIDELLPEVEITKID

SEQ ID NO: 57486 - protein, 489 aa, Enterococcus faecium
MVSLFRLSIEKLGDFVRSIYEISREQPIYLVGMAICCILAAFFVGYLVKNEPDIKGSGIPQVEGQLRGELSMNWFSVLWKKFIGGVLSVGAGLFLGREGPSIQLGAAIGQGAGQLFRSPSSEEKILISSGASSGLAAAFNAPIAGLLFVLEEIHHSFSPLVWLTSFAAAITANFVSLYFFGLRPVLYLGDLPSLPLKYYGSLVVLGVLLGVLGFIYQKVLLALPNFYNRLPLPAYFHGFVPFLLILPIGYLWPSTLGGGNQIVLAFGHASLPIIIIIGLFVLRFVFSMISYGGGLPGGIFLPILTLGALIGSFYGNIMVDFGMDPIYIKDFVVIAMAGYFTAIGKAPLTAIILVTEMVGSLNHLMPLGLAALVAYIVNDLLGGNPIYESLLERLLGNNQTAALKGARTTFDFPVTAESSLDGLMVRDFNWPKNMLLISIRRGNQEILTHGDTIMNVGDILVILTDEANLPRIKQEIEAKSSITNLKQSF

SEQ ID NO: 57487 - protein, 174 aa, Enterococcus faecium
TPPDLETRTAILRKKAAAERLEIPDDTLSYIAGQIDSNIRELEGALVRVQAFAAMNSEDISTSLAADALKTLKSGKGHPQLSILQIQEEVAKYYHIQLKDLKGKKRVKSIVVPRQIAMYLARELTDNSLPKIGAEFGGKDHTTVIHAHEKIQQLMDSSVSMQNEVSEIKNFLLN

SEQ ID NO: 57488 - protein, 382 aa, Enterococcus faecium
MNDYTPTHYNESTILEFIIQNAEVSRSKLAKLTNLTKSSISDITKTLIEKSLVYELNTGMASVSGGRKPIYLSFNNECALVIAIEIGKDYIHSSLSYINGELVNKLSYHSLLVTKDTLVMLLTKIISDLTSKIPQTPYGILGIGMAIHGIVKDDTVLFTPYSDIDSIPLKDLLAKEIPYPIVLINEANAGALGEYTFKTPSENLININIQDGIGAGIVENGKLFIGANGTAGEIGHTTLYPDGILCPCGNHGCLEHYASTRILLKKLLDSDHKPHPDISVIVKKWHQGDAHTQKILKHNAKLLSIGINNIVLMYDPEVVIINSEIYRGIPELIDEIKKHLTGKNTKNLAIKNTSLKGNSTLYGCVSIVAQSFLKINNLKFTV

SEQ ID NO: 57489 - protein, 435 aa, Enterococcus faecium
MNYFEAVPKIQYEGKQTKNKFAFRYYNPEEEILGKPMKEHLRFAVAYWHTITADGSDPFGAGTYQRNWEGNNPMETAKNRVEAFFEILEKLGAEYFCFHDVDIAPQGDSLEEFFQNIDTITDLIKEKMDQTGIKLLWNTANMFTHPRFVNGAATTNNADVYAIAAAQVKKGLDISKKLNGQNYVFWGGREGYESLLNTNMDFELDNLARFYKMAIAYTKKIGHQPQFLIEPKPKEPSKHQYDFDAATSMAFIMKYGLQDHFKLNLEANHATLAGHTFEHEINVARSYNALGSLDANQGDLLLGWDTDEFPTDIYSTTLAMHEVLENGGIAPGGINFDAKVRRTSFEMEDLILAHIVGMDTYARGLRAAAKMKEERFFEEIMEEKYASFTQGIGKKIIDDQETFESLSEYALSLSDVTNQSSHIEYIKSLINDYLV

SEQ ID NO: 57490 - protein, 395 aa, Enterococcus faecium
LATFMTAVETTIVITAANAIANSFGREIPIALLFSSYLFSSALSTPVFSRLADQYGKKPIFIIGLLLFMTGTFLCDISQSFFILVFFRMVQGIGAGGIVPITFSLIGNLFDYESRGRIMGSNNSAWGIASLAAPLLGGLLVENFSWHWVFFINIPVGLITILILLLFYDEEKRPSVSFSYQELGQYLFLITVLFLLLVGIQIIPDHFILGGGVFLFGILVSFILLSYKNKVKEPVLPVETLRSSDFLLFNLVTFLMNGAMMGFQVYLPLWMQTQLSLSPSPGGLALLPSSIFFITGSMIAVPLGKHFGTKRLLTFCMGVNGLVFLILGFLPQMTPYFVFLILASFSGFGTGTTVTTSVLSAQALATRKKISTVSGFITLCRNLGQSFMITFFGIV

SEQ ID NO: 57491 - protein, 153 aa, Enterococcus faecium
MPCENSLSTKRRRRMENKGESNLKWLAKLTRTYQKELDQALAPLKLNSTNYYFIVKIHDYHQLKQEELIKLTGLDGSNVTRTIQKLTKMGLVTKEKSTQDRRSFLLELTKKGQELHAQVVESVENAQKKFLSKLTADEQGTFEYLLGKLAQEE

SEQ ID NO: 57492 - protein, 203 aa, Enterococcus faecium
  MISC_FEATURE (175)..(175): X=any amino acid
  MISC_FEATURE (182)..(182): X=any amino acid
MSKILVFGHQNPDTDAIGAAIAFSHLQNELGKETEAVALGTPNEETQYALDHFQLSAPRVVESAKAENADVMLVDHNEFQQSISDISEVNILAVVDHHRIANFETANPLYYRAEPVGCTSTIILKLYKENQVTIPKEIAGIMLSAIISDTVVFRITHEVHLKDEAAAKELAANRXKSILNTXGLEMLEAGTDLSDKSAAVLLD

SEQ ID NO: 57493 - protein, 184 aa, Enterococcus faecium
MAKKTVKDIDLKDKKVLVRVDFNVPLKDGVITDDTRIKAALPTINYVLEQGGKAILFSHLGRVKTEEDKEGKSLAPVAKRLGELLGKEVTFVPETRGEQLEEAIRNMNDGDVVVFENTRFEDIDGKKESKNDTELGKYWASLGDVFVNDAFGTAHRAHASNVGIASTGIPTVAGFLIGKGIKFI

SEQ ID NO: 57494 - protein, 132 aa, Enterococcus faecium
IKEKATTWEESIELAARPLVKENIVEERYVEAMIRAVNDYGPYIVIGKHMALAHARPEDGVNKLGVSVLRLSQPIDFGNPEMDPVKIIFCLAAVDSYSHLNIMKELIELINNEEKLDRLIECTNIEDFKQLL

SEQ ID NO: 57495 - protein, 330 aa, Enterococcus faecium
MVTIKDIAKAAGVSHTTVSRALNNSSLIKNETKQKIRQLAKEMNYSPNYSAKGLVNQKKYLIGLFFSSLHKGTSSNFLADSIAGIHSVLDTNYSLSVESIDVVDLTEINLQRYDGLIVMSQSDDDQPFIDYLKEKKFPFVVVNRHINDPAVINVTADDAAGVMQAVDYGIGCGHTKIAYIGGKKNFRSTKEREKGVLKSLKKASIPVNPAYFLTGDYSLESGLQNMEYLLSLSDLPTLVFCGNDDIAIGALRAVHLAGLRVPQNISLIGFDDSPVVSYLNPPLTTVRKPLKEMCQEGTKLLLDLIEGRTIEQSKIELSTLLILRESINYL

SEQ ID NO: 57496 - protein, 333 aa, Enterococcus faecium
EATEEQVKKVVDHIEKEGFKVSIDQGTERVVIGLKGDTRSLQEGAFTRYEGVENAVRILNTYKLTSREFHPGNTVVDVDGVKIGDGSFVTMAGPCSIEGLDQIRECARMAKAGGAKILRGGAFKPRTSPYAFQGLEEEGLKYIRQAADEFGMKVITEVMDEGHIDMVAEYSDILQIGARNMQNFKLLSAVGKTGKPVGLKRGISGTINEWLNAAEYIAVEDKSPVIFIERGIRTYETATRNTFDLSAVPLMKKLTHFPVIVDPSHGTGIWDLVPPMARAGVASGADGMIVEIHPDPANAWSDGPQSLNEKTYSRMMKEVTIMKEAMEKIQTLD

SEQ ID NO: 57497 - protein, 388 aa, Enterococcus faecium
MRYMTAGESHGPELTAIIEGLPAGLPLSEEEINHELARRQTGYGRGGRMKIEKDRVRITSGIRHGKTIGSPVTLVIENKDWKNWTTVMSVAEVPEKDQSLRRVARPRPGHADLVGGMKYHHRDLRNVLERSSARETTMRVAIGAIAKKILEELDIIVAGHVICLGGIQAEIPGNISIQEIKEISEASEVRVVDSAVEQRIKELIDQTKKNGDTIGGIVEVLVGGVPAGLGSYVQWDTKLDAKIAQALVSINAFKGVEFGVGFTAGSLPGSEVMDEILWEKERGYFRRTNNLGGFEGGMTNGEPLIIRGVMKPIPTLYKPLQSVDIDTKEPYKASVERSDSTAVPAASVVAENVVATVVATELLSKFPSDSLVELKAAVKEYRDYLKHY

SEQ ID NO: 57498 - protein, 201 aa, Enterococcus faecium
MDAMSSFGGIPIRVAELGIDFLISSSNKCIQGVPGFSFVLANKAELEKRKNVSRSLSLDLYDQYRVMENENGKWRFTSPTHTVLAFQQALKELEAEGGIETRYSRYLANNHVLRQKMTEMGFQPFIQEYQGPFITSFLYPKEWRFDFNHFYQYLKQNGFVIYPGKISDHECFRIGNIGEIYPEDILELTAIIKDYKENVND

SEQ ID NO: 57499 - protein, 1056 aa, Enterococcus faecium
MNQYVKKLIASILFVFPLLMVTFVFADVEKTSESTQSENQSFDKTTFSEESITSETTESQSEAPTSNTRQEENKTSETSEVAEQTSDSSEEVQVRVVSADGYSEAATTEELTQLLADESVAKIRLTQPLTLDRELEIKRDIVIDFGGLAHNFGTHHIYINETPQSIEFQNFKGTAAHPGGLIPNTDGNAIIIAYMSDFWGSRYHFTGEIKFTGTLDLYDGSKLGLIYAPRATVALDGVSGVLDVQPVKEGMNAAPGKAYFCRSYQLNVINGSQLYGPYLGKFYGFLDSGDETGSGKTAPGLHILSGSKVSLDYDRADGVSDEGEAVDTLPGNVTFEVSGSGSEFLVNTKINITNDNNRGIIQMRGSGSRVAVSNDGKITINTATTGGFRLQGDSSQIHVSSGGQISVKMAGDGDQPGNNGMRFVGKGLSLIVEGAGSVIDIDKQSGRSSAVRFENGTQKLTVTNGGSLKVRNAGDGKSYVNRLNQGNQAIQFYDASGFLESPGSADFTVTGEKSNIDIRADSGATVDTTGDIDLNFMAGEKTYLVMVGKTGEDKTGIISGDVLNVDLESPTYFDFQNKRIGSETNGIGGWVFQGNGDSSLKIAHSEIALWRKAGATFDNFEKDPDYFSDMTDLSINGTDLGNFVSSPSAGLTNEFAQTGAGMKNYNRISANNQLPMIESLRVPTNADKKIYGHVVVPEGVEAKPRDAWTGEVEVTLRITYADTTKSPIEITTLTQGQTDENEGAGYNPWGEGEQGGLFEVQAPNKERLTMGDQVQVVAAKKVRGGQEVTELDSAKTTVDVIPPEPANLSTTLINAASRTITGTGEAGALVSLKKNQAVLSETTIDDTGEFVLSIPENQLFAGDVLEIVLNDQAGEATAKGVQNKPSTNDEIGNHNPSDTPVVYHDAPPFAPATKIVVEGGLSFLAPSKLDFGQIKATGLTQEAFGQMDIQEKLWIYDQRETKSPWILTIKLSQPFTNDAGFSMQDVLYFKKGEEYQLVNEEELEIVRGQNSTNVQADYSEYLNNGRAFKLVLTKENQIAGNYSAEMTWTLADAPTE

SEQ ID NO: 57500 - protein, 65 aa, Enterococcus faecium
MNNGTVKWFNSDKGFGFITGEDGNDVFAHFSAIQGEGFKSLDEGQAVTYDIEEGQRGPQAVNIVK

SEQ ID NO: 57501 - protein, 342 aa, Enterococcus faecium
MKKTSLLFAASSLSLGLLGLSGCGNNSSVATVADADVNEIVTLRFAYASNSQPVIDAMNEFGRLVKEKTDGSVQIQYFPDGQLGGERELIELTQSGAVDFTKVSASALESFSKDYSIFSVPYLFNDEEHFFKVMDNEEIMEPIYQSTKNLGFTGLTYYDSGQRSFYMVDGPIHTPEDLKGKKIRVMQSETAIKMVELLGGSPVPMGSDEVYTSLQSNLINGSENNEFVLYTAGHGGVAKYYSYDEHTRVPDIIIMNDAIKEQLTDEQEKAIEEAAKESTVFEIEAFAKAIEEEKALAQEEHGVQFNDVDNTPFREAVAPLHDIFKNDPTYKDLYQKIQEQGA

SEQ ID NO: 57502 - protein, 418 aa, Enterococcus faecium
MNTIEKNYEQAKEKYATIGVDTDAVLEKIQDIKISMHCWQGDDVKGFLTPDGELTGGIMATGNFPGAARTPEELRQDLEKAYSLIPGKHKLNLHAIYLDTEESVDLNEIEPKHFEKWVEWAKKEEIGLDFNPTFFSHPMMKDGFTLAHPDKEVREYWIEHGKRSRKIAEYFGKETGQTSINNFWVPDGMKDNPIDRFTPRERLMESLDEIFTEELDGRYVQDAVESKLFGLGAEAYTVGSHEFYMGYGLTRDKLVCLDAGHFHPTEVISNKLSSLALFSKGIMLHVSRPVRWDSDHVVLMDDELQEIAKELVRNELLEKTNIGLDFFDATINRIAAWVIGTRNTQKALLKAMLEPVERLKEMELAFDFTSRMAYTEELKDFPYADVWNYFCYKNQVPVGLDWLEEVQEYQKDVLELRK

SEQ ID NO: 57503 - protein, 103 aa, Enterococcus faecium
MVKKAFCMKVYPEKQEEYKKRHDELWPEMRTALREHGVIDYSIYLDPSISLLFGYLVIEDEKLWEKMANTSINQKWWKYMEDIMETNPDASPVSWELMPVFEL

SEQ ID NO: 57504 - protein, 30 aa, Enterococcus faecium
MTSNHHAPYDLGYTRATMGSTTSCEVARLS

SEQ ID NO: 57505 - protein, 242 aa, Enterococcus faecium
MKYLAIDIGGTNLKYGYVSQDGHLLQHWTIPVPTNYNDLLQKITAIYLSSENILGVGISSPGIYDMKSNRITGSSALKYLIGRPLKADISWALNTTVAIENDGNCALLGEYWQGNCQYSRSSAIYVIGSAVGGSIQISDEILRGANNNAGELGYSLVDNLPTTDKYSSLGGKIGFNALLKKINQQGYKFENGKDLFLKSQTDRKLEKLIIDELKYLASSLITLQYVIDPEVILIGGGVSQNT

SEQ ID NO: 57506 - protein, 444 aa, Enterococcus faecium
MGLTNNLKDLYERIPKGVKFVFAPIFIRLMVKNKEFQHTWKQLDYFESLSESQKREFQLNSLKKVLQYAYDNVPYYRSLFDEYDFKPSQFRDFSDLKILPFLEKAEAIQAGKTIYSTDEKLKYYKTFTGGSSGQALTVLLDKSSIYRERACVTHFLSKFGYDPLKTKTVAFWGHNQDQDFYYSPLKNEIVISPFRLYQKNQFDAICKDIEKFGATFVMGYPSAIYLFAQMAEANSKKLKFDHVVYYAENCSLEEKDYIERVFNCKVDSYYGHTERACFAEISEDGCKFNDFYGYTELIPTDQPNEYRIVCTGFLSKKMPLIRYATDDVVHILPDGKMVLVGHKRSEIHLISKNGQHVFKGAMTLHIEELKKIKRYQYIQNEKGKVQLCVVENEPLTKDELKIIQNYISRRCEGLLDVEIKVVDELILTTRGKFNWAVCNIKDKE

SEQ ID NO: 57507 - protein, 363 aa, Enterococcus faecium
  MISC_FEATURE (15)..(15): X=any amino acid
  MISC_FEATURE (180)..(180): X=any amino acid
  MISC_FEATURE (285)..(285): X=any amino acid
  MISC_FEATURE (321)..(321): X=any amino acid
SWVEVGLKQIEKNIXFTKIPYRHRVDIMAVVKANAYGHGAIPVAKTLQKIGVMNFAVAPLDEGIQLRNNGITGQILILGYTQIDLMQLVYKYDLTQTIVSEDYGNQIVKSNTNVKVQIAVDTGMHRIGFNETKPKHCAEIIRSFSKTLNITGCFTHLCCVDTKDIDDTEFTNQQIRRFEXVVTHLEDLCLPYCHCFNSAGGMNYSYLKKTAFVRLGIILYGLKPDYNFQMPNFIKTALEWKSTISMIKWIDAGESVGYGRTFIAIKNEGGNRCTRYADGLSRALXNRGYILCNGKKASIIGRICMDQFMIDVTEIPHINPXTVVTIIGEDGSFTISADDIAKEIGTIGYEVLCGISERVIRKY

SEQ ID NO: 57508 - protein, 550 aa, Enterococcus faecium
MSYKVEYERWCNHANADIVEELRSYSEKDIEDSFYKNLSFGTGGLRGTIGAGTNRMNVHTVGKASQGLADYLNKTCEAPSVVVGYDSRIKSDVFAKTAADIFAANGIQVHVWPELLPVPTVSFATRYLKADAGVMITASHNPSEYNGYKVYGADGCQITTEAAAAIMAEIEKLDIFADVKMGGDASKIASIQPEVLTAFIEEVKGQSVLFGEEVDKNVAIVYSPLNGTGLVPVTRTLAEMGYSNVTVVEEQRLPDGNFPTCPYPNPEIKEAMFLGMEYAKKYNADLLLATDPDCDRVGIAVKNAEGDYVLLSGNETGLLLLDYICSQRIKHGKMPADPMMVKTIVTMDLGERIASNYGVRTVDVLTGFKFIGEQIGMLENAGRADSYIFGFEESYGYLSGSYVRDKDGVNAAYLICEMFSYYKTHGISLLDKLNEIYAKYGYCLNTLHSFEFEGVAGFTKMQEIMVKFHKGLDIIGGKKVIETLDYSKGLNGLPKSDVLKYLLEGNCSVVVRPSGTEPKLKTYISVSAESKEAAEAMEAIMAAELAEMFK

SEQ ID NO: 57509 - protein, 65 aa, Enterococcus faecium; identical to SEQ ID NO: 57500

SEQ ID NO: 57510 - protein, 66 aa, Enterococcus faecium
MNNGTVKWFNADKGFGFITGEDGNDVFAHFSAIQGDGFKTLEEGQAVSYDVEDGQRGPQATNIVKA

SEQ ID NO: 57511 - protein, 191 aa, Enterococcus faecium
MSKKLTVQDMILTLQKFWSSNGCMLMQAYDTEKGAGTMSPYTFLRAIGPEPWNAAYVEPSRRPADGRYGENPNRLYQHHQFQVVMKPSPENIQELYLESLRLLGIDPLEHDIRFVEDNWENPSMGCAGVGWEVWLDGMEITQFTYFQQVGGLPCKPVTSEITYGLERLASYIQEVESVYDLEWADGVKYGE

SEQ ID NO: 57512 - protein, 98 aa, Enterococcus faecium
KDILQQEFKTKMRGYDPVEVDEFLDNIIKDYETYSKELLALQEENDRLSAKVAQLSKTQGASSNTRATNRGTKERTVTNFDILKRLSNLEREVFGKKL

SEQ ID NO: 57513 - protein, 172 aa, Enterococcus faecium
LAVVGVIFYHLLPTSMKGGYLGVPIFFVVSGYLITDLLRQEWEQNGKINIWQFYVRRMKRLYPALVFMLVTASAYITLFQRGLLNNLRGVVVSSLLYVNNWWQINNGLSYFDRFANESPFTHIWSLAVEGQNYLIWPILFVLLMVFVRKRKWIFYTVLGTSFLSAILMMILY

SEQ ID NO: 57514 - protein, 164 aa, Enterococcus faecium
MSDDMLTTEDFDFDLPEELIAQTPLKDRDHSRLLVLDRKTGEMEDKHFHEIIEELQPGDALVMNNTRVLPARLYGEKPDTGAHLEVLLLTNTQGDTWETLIKPAKRAKVGARISFGDGRLQAVVKEELEHGGRIIDFEYEGIFLEILESLGEMPLPPYIKERLE

SEQ ID NO: 57515 - protein, 160 aa, Enterococcus faecium
ERLIIMRRLCSEDMPAFIISRGLPAPEEMIQAANENGIAVLRSPISTSRLLGELSSYLDGRLAPRTSVHGVLVDVYGLGVLIQGDSGIGKSETALELIKRGHRLIADDRVDVYQQDELTVIGEPPKILEHLIGIRGIGIIDVMNLFGASAVRGSMQVQLA

SEQ ID NO: 57516 - protein, 191 aa, Enterococcus faecium
FAVGYTIFGFSLFLFLFIPLASRFKLTEGLVVNSVLVTHYLVEENMSWQLIGNEAGLMAIGLVFALLANVYMPDRTKQLKENQIQIEKEFRNILRQMAEFLLSENKEDVQIKCERLLTFIRESQEDAREHQENYWLRQPLYYETYFSMRRAQANVIKDMLENLERIQQPAYYGKHIYGLLIYTAETFSESN

SEQ ID NO: 57517 - protein, 186 aa, Enterococcus faecium
MRTFIYADKFFLASGVKHAGYLEITDGLFGEYTKELPEGEVNIIDQSGKWIAPGLVDTHIHGYMNHDVMDNDAEGIKVMSEGLLSCGVTSFLPTTLTSSKERLKDVAETIGKMYQEAPGAKIKGIYFEGPFFTEEHKGAQNPSYFGDPDLDTFHEWQEASGGLIKKIALAPERQGVEEFVKQVTEE

SEQ ID NO: 57518 - protein, 146 aa, Enterococcus faecium
MDEEGIDLEKLKESIHKNKLKAVLINPNFQNPTGKVMSQKRREKLVELCRPYRLPIIEDDVFTDLSFLNQEEVLPIRTIDPDNVLYVGSLSRVLGKTTKIGWVIGPETFISQLAQAQEMMEFSMNILTQITVANVFNEAIDLKMQD

SEQ ID NO: 57519 - protein, 125 aa, Enterococcus faecium
RMVSIVQDAPTNFETDLFMPIIHAVEKLSKQVKYGENPVTDISYKVIADHIRALSFAIGDGALPSNEGRGYVLRRLLRRAVMHGKKLGIEQAFLYRLVPVVGEIMVSYYPEVLQQKEFIEKVIRT

SEQ ID NO: 57520 - protein, 148 aa, Enterococcus faecium
MMGGTTMAVLAEQLSNLENKKRHNLFVPARGGIGEAITVQANSVSARMAAKANGNHRALYVPEQLSLATYNSLLNEPSIQEVLNLISEANCVIHSIGRALHMAARRKMTEKELVMLKQANAVAESFGYFFNEKGEVVYKVPRIGIELQ

SEQ ID NO: 57521 - protein, 131 aa, Enterococcus faecium
CFSTFVSLIVSAILIRNFILSMNRSSVSDKISIIAKIVANDKLIQKKLQTGDPTHAIQGITNEIMIASNLDFIVVMDPEGIRYSHADPSYIGLPFSSHEDVKKVIGGQEFFSEKEGMLGFGFRYFVPIYYN

SEQ ID NO: 57522 - protein, 119 aa, Enterococcus faecium
AIFEETVEHMLLQPTFITEYPAAVSPLARRNDVNPDVTDRFEFFIGGRELANGFSELNDAEDQAKRFQDQVNQKEAGDDEAMFYDADFVTALEHGLPPTAGQGIGIDRLVMLFTNSHTI

SEQ ID NO: 57523 - protein, 50 aa, Enterococcus faecium
SSLTVAIGCTGGQHRSVALTERLANALGKNYKVNVTHRDKDKRKETVNRS

SEQ ID NO: 57524 - protein, 160 aa, Enterococcus faecium
MIGQYVQLKKSGKNYLGLCPFHEERTPSFSVAEDKQIFHCFGCGKGGNVFTFLQELEGLSFPEAVVKVADFEQIPLEDQWRQRTIAVQNPESATGKLIAAHEKAAEIYHHMLLHTKAGQPALEYLQSRGLSLELIEEFNIGFAPNERSFLQQVFKNESIS

SEQ ID NO: 57525 - protein, 193 aa, Enterococcus faecium
  MISC_FEATURE (64)..(64): X=any amino acid
GVWIGKLFFKKDIRQHGSGNTGTTNTCRVLGKTAGIVVLLMDILKGTLATCLPMIFHLSGINPXWFGVCAILGHTFPIFAGFKGGKAVATSAGMLLGFNPVFFVYSCIIFIVSLFCTSMVSLSSMISAVLITLSTIVLPYVAPVILAKPNWLLTIIAFLVSSFIFYRHKDNIKRIRNHTESRIPFGLNSSKKK

SEQ ID NO: 57526 - protein, 101 aa, Enterococcus faecium
LNLAPYSFFNAFNYIPPIISFSSVGRKDSLNNIEQTGEFVWNLATRPLAEQMSQSCAAVSPEVNEFELAGLTPVASKVIAVPRVGESAVSFECKVTQIIQL

SEQ ID NO: 57527 - protein, 145 aa, Enterococcus faecium
KMGVSLDGRSAMHSVESQWITGPVARAETQRCRLQSSAVITGADTVLRDQARLTIRKAELQLEESQACLAMERPPLRVLIDSQRRVPPNAAFFTAGPTLVATTSTSLTDPGEGQELLMFDAVDGQVPLEALLKTLANRGANEVLI

SEQ ID NO: 57528 - protein, 127 aa, Enterococcus faecium
NKKNNGMMKNALYYVLVILAMVMVVYFIFGNNGQRSSDIEYSKFTEQLQAGKIKEFEVQPANGVYKITGEYKEQQTVANSGGLAILGSTDTTTNHFTTIILPNDTTLSRVTRLAEENKVATTVKEES

SEQ ID NO: 57529 - protein, 274 aa, Enterococcus faecium
MNIQQMKYVVAVANNGSFREAAKKMFVSQPSLSAGIKELETELGITLFTRTNRGAYLTEEGQDFLNRAEKILVQLDTLETHYLTSEKRDNFSIAAQHYDFLGPLTAQLLEEFKDEIKQFRIMETTTARVIEEVKEQHSEIGIIYMNEHNQAGIRRYLQLGELSGRSIGKFKTHIFLRQGHPLAEHAEITKEELLSYPQVRFTQDGNNFPYFYEDLIEIPDQETVIYTSDRGTLMNIVLETDAYASGSGIVIGGIREHLRLIPLAEGELNEFYII

SEQ ID NO: 57530 - protein, 73 aa, Enterococcus faecium
SVGKKVGNAVNRNEVKRKIRAAVYSIEEEIDPELDFIVIARPSVKGLTYDEVRSNLVHVLKLAKIIDREEKSK

SEQ ID NO: 57531 - protein, 149 aa, Enterococcus faecium
  MISC_FEATURE (68)..(68): X=any amino acid
  MISC_FEATURE (107)..(107): X=any amino acid
  MISC_FEATURE (135)..(135): X=any amino acid
MGSFRPVAGNLHLHRTKISPSLSLRQCPNRYAFRAGRNLPDKEFRYLRTVIVTAAVYWGFNSYLRLRXALLLTFQHRAGVSPYTSSYDFAETCVFDKQSLGPIHCGXSYDQHPLLPKLRGHFAEFLNREFSRSPXDFSPRLPVSGLRYG

SEQ ID NO: 57532 - protein, 51 aa, Enterococcus faecium
MMLRVEKLRKKMQEENLDSFLVTSPYNLRYLTNFTGTTGLAVITLEKAFFI

SEQ ID NO: 57533 - protein, 135 aa, Enterococcus faecium
  MISC_FEATURE (22)..(22): X=any amino acid
  MISC_FEATURE (128)..(128): X=any amino acid
GTGISTCYPSPTPVGLGLGPDXPWADEPSPGNLSHSVDRILTCLFATHTGILTSKRSSSPHDLPSTPLERSPTNTLKVYSTASVICLAPVHFRRRVTRLVSYYALFKWWLLLSQHPSCLCNPTSFSTXHIFWDLS

SEQ ID NO: 57534 - protein, 362 aa, Enterococcus faecium
  MISC_FEATURE (354)..(354): X=any amino acid
  MISC_FEATURE (360)..(360): X=any amino acid
NSYKSSVLNVASIVLLTRMYVGAATQIFAIPDFLDKSLVVFCAILCAIQISVRKYNKLEFIGLFFFGIIIVISAILSKEYTFLYTFMLVLLIGKNSVKSFLSYYFRYCAALLISINIIYVAGLALGMVELSIKNGQNCFTGGFATGNAYAFIVFWLVSLYLYIHFDDCKIGHIIGFTVLSFLISYISLCKTVMVLSIINGIAITLLKNGWYPKKILEFLARWLFPVLGVAYCSAITIFANKMGSNYAAVFAIDHFLTGRIRNAAYYYEKFGFTFWGREISKGAISYDDYYRLTSVTIDGLYPLLFLQVGFCMFILLCLAFVLVKKNKEVGRVELYFLIVYVIFGLSEMLLLTEXFVFLFXFL

SEQ ID NO: 57535 - protein, 427 aa, Enterococcus faecium
MGGIVALFDFGFNTTFARNITFCWSGAKALSKESVEYSDSLEPDFLLIKKVLATCRIIYLMISLVALICIGLLGSVYIYYIGKELTGSDYLIAWLIYSIAIFMNLYYGYYDSFLRGIGAIAEVNKIKIYSRVIQIVLVAVLLNLGFGIIGASLAYLGYGMFFRIVAKRKFFASHNIGKRLNSITEKVTRKDIQEIFNLVWHNAWRDGLVSVANYLSNQATVLIGSLYLTLAETGAYSLAVQLAQAIAQISSALYMAYQPTLQSAYVARNNEKIKNTLSAILLSFICLSIAGFGALFVIGLPIIRIIKPNAILNPIAILAVGIYQCMLKGRNCYTSYISSTNRVPYARAFVVSGILCVTLSFIFEEFIIRGIWGLIFAQIISQAVFNSWYWPMFVHKELKLKIFEVFPRGWKELRLFYKKDAVPRQFD

SEQ ID NO: 57536 - protein, 122 aa, Enterococcus faecium; identical to SEQ ID NO: 57165
  MISC_FEATURE (26)..(26): X=any amino acid
  MISC_FEATURE (106)..(106): X=any amino acid

SEQ ID NO: 57537 - protein, 106 aa, Enterococcus faecium
LDDKEISYLNSFVTTLVSDWMNEYHVFFKRINAERFFFVAQMIDLKKMMDKKFDLLDRFRAEAEKQSSPITLSMGIAYGSRTLDEIGGEALRFPVDKNNGSPPHVH

SEQ ID NO: 57538 - protein, 123 aa, Enterococcus faecium
HKMMDGPADKSYGIHVAKIAGLPSNLLERAADILHTLENGDNGHHTVPAEVEEKTKTAKQEQIKPPAEKVNQDHIQDRVKEENQQLSLFSELSENETEVIESLKQINLLGMTPMDALNTLYEL

SEQ ID NO: 57539 - protein, 73 aa, Enterococcus faecium
MSLLCKLVPERCIACGLCQIEAPDIFDYDEEGIVLFAQEPEAHQQFVMPEEETYVKKAYQKCPVRAILLENKI

SEQ ID NO: 57540 - protein, 246 aa, Enterococcus faecium
MVLSQDDVSYYEYMDNSGFPSRLVVSNNNEIKNVYKEKDKEEIGDFDMVPLIDAFVKKHPDFSYRGAKGTLALTGYNGVLGYRTSKSQYGDNEKTKKEIKEAKKVAEQLKKDGWSFASHTWGHLNMTQASLEDVKKDNELWQQEVAPILGKTNILIYPFGADISDWQPYSAENQKFAYLKSQGFDIFCNVDASTPAWGQLGTDFYRNARINIDGIRFQSDLDGKNPILDPFINVHDVYDKEARESA

SEQ ID NO: 57541 - protein, 363 aa, Enterococcus faecium
SMKKVLVANRGEIAVRVFRACTELGIKTVGIYAEEDEYSVHRFKADEAYLVGQGKKPIDAYLDIEGIISIAKECGADAIHPGYGLLSENLNFAQRCEEEGIIFVGPKLHHLDIFGDKIKAKAAAIEAGIASIPGTDGPIASIDDALEFAKQYGYPIMIKAALGGGGRGMRVAHDEKSAREGYERAKSEAKAAFGSDEVYVEKYIANPKHIEVQILGDTHGNVIHLFERDCSVQRRHQKVVEVAPCVSMNEQQRQKICQAAVQLMKYVGYVNAGTVEFLVEGDDFYFIEVNPRVQVEHTITEMITDIDIVTTQLLIAQGLDLHKEIGLPQQEGIKLNGSAIQCRITTEDPLNNFLPDTGKIDTY

SEQ ID NO: 57542 - protein, 159 aa, Enterococcus faecium
LKMKEEGKASKAPIRESFGKWENLKIVLIALFSINAGQAVTFYAAQFYVLFFLTQFLKMDPALANMLLIISVVIGAPFFIFFGWLSDKLGRKRMLMVGLLLATALYFPIFKGLAHYTNPAMDHASRQSPITVLADPATCTFQFRPVGKARFDSPCDKVK

SEQ ID NO: 57543 - protein, 178 aa, Enterococcus faecium
MKEDQAAIDQDLANLKNKVGNDRAQLEKKLAEAKAKAEAVQTDLDGKIQQAKEFNQQLNQVAQTASGKLSQTQADITAASQAIHGKISEAQTVANDFEAKKADLAASFQRIKDILHSAGEKSVTSGSTTETVQQTTEPSKSTSQTLPKTNEKTASVNYSFVGTGVLVAAAYGIIRKKK

SEQ ID NO: 57544 - protein, 56 aa, Enterococcus faecium
MRENFDLRPAGIIEMLDLRRPIYKQTAAYGHFGRTDVDLPWEHTDKVDALKASLAK

SEQ ID NO: 57545 - protein, 32 aa, Enterococcus faecium
GTLQESRKREFYEKPSVRRKKKSEAARKRKKF

SEQ ID NO: 57546 - protein, 48 aa, Enterococcus faecium
MKKGGTLTIVIQKKQGAPSAQKKMEETFGNAEIVTKDKGYYIIKSVKE

SEQ ID NO: 57547 - protein, 318 aa, Enterococcus faecium
MLEMNYCSQCGEKLAKDSNFCEKCDKSVKGEQIVRQFETQLNVFRLNQRKVSRFISFIKNNLIVIFTFIMITMLILTIKPILGWMFFVVSIIFGYWYANSKNSSEHLLNKKMKEKVMMLDKQEIKEFTNGLLQTATQNLTVRNEHIEQSSNNRNEVLEDKNEYRNESARMNYSWVVSFIGIICYYTGVFLAPILQGEISGFGYGIDTTITLYDYLTFLSKMDGGYQFLLIVILIIPMISFILLFINHVISKFFQILLLIANGLFLFKILSEIKTYSVSSEYFDISSSNSVGFGILLVGMGIILMIVTTIWKVMKEQDK

SEQ ID NO: 57548 - protein, 167 aa, Enterococcus faecium
LAIILLVGLCLYALPTQGFAVAGGHGGGTSSGRSSGRGSFGGRSYGGSYFGSRSYGRDSYGYYGPSTGPSSYEQTGFLALAVLSVGGVSAFSIVKNKRQKKRLKSEILSRMSGTAKEKKAQFLEIQKIFMKIQSAWEEETPEKARSCYTDKLFAEHQKVLQKNKQTV

SEQ ID NO: 57549 - protein, 49 aa, Enterococcus faecium
MLIDVRELGINGKEAESILDSVNITVNKNSIPFETLSPFKTSGIRIGTP

SEQ ID NO: 57550 - protein, 309 aa, Enterococcus faecium
MVSLFMYATQSSGLFVVMFVLLQNVSTGLDIYFESSIMSWITAEKKDFGKYRMFGSLGYATSGFWISLFLVLLRNVSYMLLLACAINLVLLFSNITKPIPNTIEKITIEKIQGKKVPRIYYLFFAFCTLIITLPNSFGYILNSHLRNEYDLDLNKATFYASIAVFIGSCISEMFGFFAVDSVIRRFSPLKVVFIGFIFSGLRWFFALVSTSEEMFISTYLLHGISFAFIFIGSIHFIASVSDTIEMGELSMRFSFFANIMGIILAQLYSIMLPYIGTQGIIWVFLFVCIASFPMVILILRRQHNEILSN

SEQ ID NO: 57551 - protein, 332 aa, Enterococcus faecium
MGFFDKIKRAFTGEEKTEEVEVQEKYDKGLEKTRKTFGERMNELFANFRTVDEDFFEELEETLIGADVGFETAIRITEALRQEVKLRNAKKSAEVQNAIIEKLVDLYEAEGINEVNELNIQEDGLTVILFVGVNGVGKTTSIGKLAHQFKNEGKKVLMAAADTFRAGAIDQLVVWGERAGVEVVRGNAGGDPAAVVFDALERAKTEQADVLLVDTAGRLQNKVNLMNELEKIKRVIQRELPEAPQETLLVLDATTGQNAMVQAKQFKETTDVTGLVLTKLDGTAKGGIVLAIRNELHLPVKLVGLGEGIDDLEPFDPNDFVVGLFKGLLKEE

SEQ ID NO: 57552 - protein, 296 aa, Enterococcus faecium
MKSMTGFGKAIRETKAYQLDIEIKSVNQRFLDVQIRSPKILNFVENDFRQLIKQQLSRGRIEVFVNLAYIGKNEKQIVINWELIDSLITQLTDGIQQRYGSQNQVSISRMAERFALDENFVTVEEKPEESMEELAQLALDTLKSALDSIEASREKEGQALALVLKKNTEEFKEVLKKLDSFVEIYEKEFQIRYQKKLEEFLGAKVDEQRLLTELAILLERGDIHEELDRLAIHVQKLDELIEAQCPVGRELDFLIQEMNREINTIGSKSNAIEIKNQVVQSKTILEKIREQVQNIE

SEQ ID NO: 57553 - protein, 485 aa, Enterococcus faecium
MKKFPEGFLWGGATAANQCEGAWDVDEKGLSVSDVYTFDSDLPKEKWTDQWHMMTHQQVKAAQDPNSKYYYPKRHGNDFYHHFKEDIRLFAEMGFKCYRMSIAWTRIFPHGDEETPNEAGLFFYDQVFDECLKYGIEPVVSLSHYEMPLYLVTEYGGWPNRKLIQFYVRFAETVFKRYKNKVKYWMTFNEINCVKHHPFVSVGVIEENHPHLEQAKYQGAHHQFIASALATKACHEIIKGSQVGCMISYQLLVPYSCDPDDIQKTIEQQRTSLFFSDVQARGYYPAYTQRMFEEKGVNLKIEVGDEEILAAYPVDFVSFSYYMSSAVSAHPENWEGVQGNLITGGIKNPYLPSSEWGWQIDPKGLRIALNQLYDRYQKPLFIAENGLGAIDKVEEDGTVQDDYRIDYLKQHIEQMKEAIKDGVDLFGYTSWGCIDIVSASTSQMSKRYGYIYVDQDDEGNGTKKRLKKKSFDWYRQVIQSNGEIL

SEQ ID NO: 57554 - protein, 431 aa, Enterococcus faecium
MNDSIKKMLRLIEKDLMITEVSYETFQKKKTLIVDAVFSPAPHTCRNCGSTVVDGNGKVIVVKNGKKETIVRFEQYNHMPLVMRLKKQRYTCKNCRTHWTAQSYFVQPRHSIANHVRYKIASLLTEKVSLSFIAKNCQVSLTTVIRTLKEFKSYLPKQSKRILPRVLMVDEFRSHASIEDKMSFICADGETGQLIDVLPTRKLPRLTSYFLGCTNPKEVKFLVTDMNAAYFQLTKRILPNAKVVIDRFHIIKHMNQAFNELRIREMNELRKVGQKSQAEKLKKNWRFLLKNRANINHYEYKTWKSFRAPKYPFLTEAMMIDRLLGFSTSLKEAYPYFHELVEAFRDKDPDLFFSLLAELPETLDDGFREKLQNLLTYEEGITNAMIYPYTNGKIEAKNTHIKTMKRVSYGFKSFENMRIRIFLINQLIKVR

SEQ ID NO: 57555 - protein, 220 aa, Enterococcus faecium
YAYYDHKKGKEETMFYRFMRGVVRVLLALVNGNARYENKEVLPQDENYILVAPHRTWWDPLYLAVAAAPKEFSFMAKEELFKNPVLRFILTRSNAFPVKRENPGPSVIKTPVKILKSTNLSLIMFPSGTRHATELKGGMALISRMSKAKIVPAVYQGPLTLGDLFKRQRVTVRFGEPIDLSDIKKTDKEGMAEIERRTQAAFDKLDKEVNPDFKYEVKKK

SEQ ID NO: 57556 - protein, 588 aa, Enterococcus faecium
MDTAAIYHRPESEYAFLYTNTRFRIRLRTRKNDIKKVYVLCGDPYTITTEKWYQKQRPMKKCLSTNVHDYWEIEVTSETRRLQYAFHVVGEDNTDCFYGDQGIFPYRENVITEPNFYFRIPYFHQIDRFTIPEWVKETVWYQIFPERFANGDKANDPEHTLPWGSKDPDREDFFGGDLQGVRDHLDYLTDLGVNGIYFCPIFKATSNHKYDTIDYYEVDPAFGDKKLLKNLIDEAHKRGIRIMFDAVFNHMGVHSPQWQDVLKNGEKSIYKDWFHIRFFPVDSYQMTDLPETAENIPYDTFAFTPFMPKLNTANPEVQKYLLDIATYWIKEFDIDGWRLDVANEVDHHFWKKFREAVTEIKPDIYILGEIWHSSQAWLQGDEFHAVMNYAFTDSIKDYFAKKKITASQMVSGMNHQQMLYRDQVNEGTFNLLDSHDTARILTLCQGNKELMKSVMAFMFLQKGSPCIYYGTEIGMTGEDDPDCRKCMIWEKEEQDLELFGFIKELVSLRKQLSKIISEGSTQWLIVYDREDKLYFTRELEGQIIYVYFNQSKEPWVVEQENEVILSQNCQLLEDGKAEIRQYGFLIMC

SEQ ID NO: 57557 - protein, 323 aa, Enterococcus faecium
MSKHYFDPRLKIFALNSNRPLAEKIAAAVGVELGKSSVTQFSDGEIQVNIEESIRGSHVYVIQSTSSPVNDNLMELLIMIDALKRASAKTINVVMPYYGYARQDRKARAREPITAKLVANMIQKAGATRMLTLDLHAVQIQGFFDIPVDHLMGAPLIANYFLEKGIKGDDVVVVSPDHGGVTRARKLAEFLKSPIAIIDKRRPKANVAEVMNIIGQVKGKTCVLIDDMIDTAGTITLAANALKEAGATSVYASCTHPVLSGPALQRIEDSAIERLVVTDSIYLPEDRKIDKIDEVSVGGLMGDAIKRIHENKPVSPLFETKNK

SEQ ID NO: 57558 - protein, 207 aa, Enterococcus faecium
  MISC_FEATURE (201)..(201): X=any amino acid
VELFDSLRFKIVRRGIKIVFPEATDARILGAAARLKAEELVEPILVGNEEEIRNAAHARGIKTSSFTIISPDNYDKWDEMVDTFVERRNGKASKEQAEKILKDVNYFGTMLTYMGIADGMVSGAIHSTGDTVRPALQIIKTKPGISRTSGAMIMVRGRDQEKYVFSDCAINVKPTAQELAEIAVDSAKTAELFDIEPKVAXMSFSTK

SEQ ID NO: 57559 - protein, 225 aa, Enterococcus faecium
MIADNLQKIKQEIQDSCALVHRDPKEVTLVAVTKSVESAQAEELVRAGVMNCAENRVDKLLEKKQDLFDFPEIKWHLIGNLQRRKVKLIVNEIDYFHALDSLRLAEEIQKRLEKELSCFIEVNVSGEESKHGISPDELLPFVESLAACTKIKVVGLMTMAPKEASDEQIHKVFGTLKELRDLVQAKGYAHAPCSELSMGMSQDFQIAIEEGATFIRVGTALFKDE

SEQ ID NO: 57560 - protein, 389 aa, Enterococcus faecium
MKSSNEIEKALYESSNSSISITKKDGKYFNVNQFKDIEKLKEIEEKIIQYDGLAKLKDAKVVSGEQRINREDLSDEFKNVVSLEATNNTKRNILFSSGVFTIKEGKNIEENDKNSIIVHEEFAKQNNLKLGDEVDLELLDIEKSGKIKSHKFKIIGIFSGKKQETYTGLSSDFSENMVFVDYSTSQEILNNSENNEIANKILMYSGSAESTDLALNKLKELKIDESKYFVEKDSNAFEESLESVSGIKYIIKVMTYSIMLGGMVVLSLILILWLRERIYEIGIFLSIGTSKIQIIMQFIFELIFISIPSIISSLFLGNVLLKVIVDGFINSEDSMISGGSLINNSSFMSNITTLGQSYLILISIIVLSVVFASSLMLIKKPKEILSKIS

SEQ ID NO: 57561 - protein, 325 aa, Enterococcus faecium
MAQKTMIQAITDALALELENDENVVVFGEDVGKNGGVFRATEGLQEKFGEDRVFDTPLAESGIAGLSFGLALEGFRPVPEIQFFGFIFEAMDEVVAQMARTRYRMSGTRNLPITIRSPFGGGVHTPELHSDNLEGLIAQSPGIRVVIPSNPYDAKGLLISSIRSNDPVVFLEHMKLYRSFREEVPDEAYEVPLDKAAVTREGTDVSIITYGAMVREAIKAADNLAKENISVEIIDLRTVAPLDVETIIQSVEKTGRVVVVQEAQRQAGVAAQVVSEISERAILSLEAPIGRVSAPDTVFPFGQAENVWLPNAKDIEDKVKEIAEF

SEQ ID NO: 57562 - protein, 1175 aa, Enterococcus faecium
  MISC_FEATURE (660)..(660): X=any amino acid
  MISC_FEATURE (685)..(685): X=any amino acid
  MISC_FEATURE (710)..(710): X=any amino acid
FESMQIGLASPEKIRSWSYGEVKKPETINYRTLKPEREGLFCERIFGPTKDWECACGKYKRIRYKGIVCDRCGVEVTRSKVRRERMGHIELAAPVSHIWYFKGIPSRMGLVLDMSPRALEEIIYFASYVVIEPGNTNLEKKQLLTEREYREKREQYGQEFQAAMGAEAIKQLLDNVDLDAEAAELKEELKSAQGQKRTRAIRRLDILEAFRASGNQPSWMVMDVIPVIPPDLRPMVQLEGGRFATSDLNDLYRRVINRNNRLKRLLDLNAPGIIVQNEKRMLQEAVDALIDNGRRGRPVTGPGNRPLKSLSHMLKGKQGRFRQNLLGKRVDYSGRSVIVVGPFLKMYQCGLPKEMAIELFKPFVMRELVQRELASNIKNAKRKIERQEDEVWDVLEDVIKEHPVLLNRAPTLHRLGIQAFEPVLVQGRAIRLHPLVCEAYNADFDGDQMAVHVPLNEEAQAEARMLMLAAQNILNPKDGKPVVTPSQDMVLGNYYLTMEEEGREGEGMVFRDQNEAVIAWRNGYVHLHSRIGVNPNSLGEKPFTEWQKERTMITTVGKIIFNEIMPPEFPYLNEPTDFNLTVQTPDKYFVEAGTDIPAHIKEQELVLPFKKKNLGNIIAEVFKRFKVTETSKMLDRMKDLGYKHSTHAGITVGIADISVXMKNKKSLKMPINKLKLLQNNSVVVXSQMTNVMNVSLLFGMLQKTASNKNXWKVLEAKNPIFMMSDSGARGNISNFTQLAGMRGLMAAPNGRIMELPIISNFREGLSVLEMFISTHGARKGMTDTALKTADSGYLTRRLVDVAQDVIIREEDCGTDRGLEIQAIREGNEIIESLEDRLVGRYTRKEVRHPETNELIIAGNQLISEDIAKQIVDAGVETVTIRSVFTCNTKHGVCKHCYGRNLATGSDVEVGEAVGTIAAQSIGEPGTQLTMRTFHTGGVAGDDITQGLPRVQEIFEARNPKGQAVITEVTGDVIDISEDPATRTKEVTIKGKTDTRTYTVPYTARMKVAEGDMIHRGAPLTEGSIDPKQLLQVRDVLSVENYLLREVQRVYRMQGVEIGDKHIEVMVRQMLRKVRVMDPGDTDILPGTLLDIADFKDQNYNTLVSGGVPATSRPVLLGITKASLETNSFLSAASFQETTRVLTDAAIRGKKDPLLGLKENVIIGKIIPAGTGMQRY

SEQ ID NO: 57563 - protein, 524 aa, Enterococcus faecium
MKKQRKIVIRSSKIYTKKGFSPESGYIFIEGNIIKSITKENPISDEDVTFIDCKNGLVTAGNVDSHCFFSGHAMNFIGEDFSDVQTSNDLFTKLSHLTNLEDNKAIILGHDLPQKFTNSKYAKKLNKLFPDIPTVIMASGAETCLLNSAAESRFNFTSQTCYPEAYWRLLHYVFSDKKFIKPLFVSYMKFLNSRGITAIKEMGFDDFYGFTDILKELEESSDLSLRVNFMSQPVSEKMNIDYAKKMSALFTGDAIRFSGFNKMTDGSISEMKGDLKQPYTNNSEITNIEKIDWNEIERDLKIADNHGFRFSLHAQGDGAVSKTVSLMEKCQTDINGKLLNRHSITDLELTEKDDLKKMGDLGIIAEIYPQITSLYDNPLAKVKQIKEYVGPRAKYYWNRKEMINNNIILSCGTDLPLLYDDIPESIFNACGGYFTDDSFQFNSNNCLNVSELIDAWTSGGAYNLGLEDKIGTLEAGKLADIVIYSDDLFSIPIKNVKQAKVVTTIYDGKIVFKDDSVIINSNTK

SEQ ID NO: 57564 - protein, 100 aa, Enterococcus faecium
MDSLSKKLAIQVLNDEAERIKRLIRNQNNSLCISQCKAFEEVVDTQMYGFSRQVGFAVRIGVIGKNEGQLMLSELERELNQLYSEVYQEIYDKKEVGKEE

SEQ ID NO: 57565 - protein, 548 aa, Enterococcus faecium
MDNQRKPALDQLTPQEKMARGSAWMTASNIISRLLGAVYIIPWYAWMGENAKAANGLFNMGYNIYALFLLISTAGIPAAIAKQTARYNSLNEYGTSRRLFIRALQMMGGLGLLFALFMYIASPWLAHASGGGEELIPTMRSLSIAVLVFPCMSVIRGYFQGNQEMMPYALSQIVEQVARIFYMLLATFIIMKVMDGDYVTAVTQSTFAAFIGMLASILVLLYFLKKHQAYTSAFIHYSENKINIATKELLLDTVKEAIPFIIVGSGVTIFKLVDQFTFMKIMSASTEYSNAQLLDLFSIFSANPDKLTMVVIALATSIASTGLPLITEAVTLKDRVGLAKLTSGNLQLFSFFMFPATFGVMLLAYPLNTLFYTPDSLGSNVLIQASFVGLFLGLYMLVSNMLQGMFENKAAINYLVIGFLVKLLLQYPAIRLFEVYGPLLATMIGFAVSCTLILKRIHEVARFKPSFVWRRTLLIFILTLIMLLASWITKMIFGAFLNEDSKFQSLLLILVVAGIGALVYGYLALKIRLAERLLGPGIARLRHKLKIK

SEQ ID NO: 57566 - protein, 195 aa, Enterococcus faecium
MDYSNEYTAYSRENLMQKIQMRMSEQRFKHVLGVEETAVALAKKYGASPEKASIAALTHDYAKERPDEEFKMVIVRDGFDPELLNYNNAIWHGLVGASFVERELGITDAEILHAIRVHTTGAAKMSLLDKIIYVADYIEPGRDFPGVQDARAIAWADLDEAVAFETKHTLAHLLAQEQQIYPKTIETYNYWVAKK

SEQ ID NO: 57567 - protein, 300 aa, Enterococcus faecium
MLLGSHVSMSGKKMLLGAAEEAASYGSSTFMIYTGAPQNTRRKAIEEMNIDAGKAYMAENGLTNIVVHAPYIINLGNTIKPEMFPFAVQFLREEIVRAEALGATQITLHPGAHVGAGTEAGIARIIEGLNEVLTKEQTAQIALETMAGKGTEIGRTFEELAQIIDGVKLNEKLSVTFDTCHTNDAGYNIKEDFSGVMEEFDKIIGLDRLKVLHINDSKNPQGSHKDRHANIGFGTIGFDTLNKIVHDPMFDNISKILETPYVGKDKKKAYAPYGKEIAMFKAQIFDPEVFPELLAEEVIL

SEQ ID NO: 57568 - protein, 289 aa, Enterococcus faecium
MIKLIASDMDGTLLDAHMSVSPENAEAIRFANDAGVEFMVATGRNYQEARAALDEVGIDCAMITLNGAQVFDKEGNSLFTVSIPNNQAISVLDILDANGIYYEVATNDGLYSENQAKRIESFASMVATHLPHLTYKMAIAMASAKLELLHITYVDSIRAILEEKNLEVLKIICFHTEGPAVLGPVGKQISLLGDLAVTSSGQNNIEVNHKNAQKGIAVAHVAHERGISLEEVMTIGDNFNDVSMLQVAGVSFAMGNAEIEVKDYAKYTTDTNLESGVGKAILRAIAEDL

SEQ ID NO: 57569 - protein, 129 aa, Enterococcus faecium
MAAKKVNRKRRVKKNIEAGIAHIHSTFNNTIIMITDTHGNALAWSSAGSLGFKGSKKSTPFAAQMAAETATKAAMEHGLKTVEVTVKGPGSGREAAIRSLQATGLEVTAIRDVTPVPHNGARPPKRRRV

SEQ ID NO: 57570 - protein, 547 aa, Enterococcus faecium
MIQEQKWWKEAVGYQIYPASFKDSNGDGQGDINGIREKLNYLKDLGIGFIWINPIYQSPFVDNGYDVSDYQDIEERFGTMEDFDLLLKEAHELGIKVIMDLVINHSSDQHQWFEESKKSKESPYRDYYIWVDGVDGKEPNNWTSIFGGSAWEYSHETGQYYLHVFAKEQPDLNWESEKLKEELFNMIRWWLDKGIDGFRLDAISHVKKDEYSVKATENPFSPFQNVSGIEEHLTDLKHVFEEYDIMTVGEASGVTAEEGPQWVGKDGYFDMIFEFDHIHIWQQEKEGQLDVLKLKLALSAWQTSLDGIGWNALYMENHDVPRAVSVFGDTRPDFWAMSAKAIAMMYFFLQGTPFIYQGQEIGMTNMPFESIDQVDAVDSKRLYKRLLAEGKTREEALDIIRETTRDNSRTPMQWTSEQYAGFSTHEPWLITNPNTKTINVEQQEYEPESVLQFYKNMIRIRQTNKGLIYGSYKEYLHEHPQLYVYERYLEDEQYLIMVNLTESLADYELPKEADQSWTLLLSNSSSGEFEAKGILAPYEARLYKTNK

SEQ ID NO: 57571 - protein, 383 aa, Enterococcus faecium
MRAVHFGAGNIGRGFIGEVLAANGFEITFVDVNHTIIDALNERKEYEIELADESKEKITVKNVKGINNQTNPEKVIQEIAEADLVTTAIGPNILPFIAELIAKGIQEREKEGSTTSLDIIACENMIGGSAFLEKEVYKYLPETSFTDKYIGFPNAAVDRIVPLQHHEDPLFVQVEPFKEWVIDDSQRKNKKIQLKGVLYVDDLEPYIERKLFSVNTGHATVAYTGALLGYQTIDEAMQDALVVAQLKSVLQETGSLLIAKWGFDAEQHHAYIEKIIHRFQNKNISDAITRVARTPLRKLGYQERFTRPVRELQEHNLTCPHLTATMGIIFNYYDPEDEQSRQLHEMKIHENLEQLIQEVTGINDPKTIGNIKQNVNRYAKQVA

SEQ ID NO: 57572 - protein, 646 aa, Enterococcus faecium
MIKITFPDGAVKEFESGTTTLAIAESISKSLAKKALAGKVNGKLVDLTRPIEEDASIEIITPDHEDALGLVRHSAAHLMAQAMRRLYPNIHFGVGPAIDSGFYYDTDNGQNQVTAEDLPAIEAEMMKIVKENLPIERRVLSKQEALEIFASDPYKVELISELPEEEVITAYQQGEFIDLCRGPHVPSTGRIQVFKLLSVAGAYWRGNSNNQMMQRVYGTAFFDKKALKEYIRLREEAKERDHRKLGKELDLFMVSPEVGSGLPFWLPKGATIRRTIERYIVDKEVSLGYQHVYTPIMGDVELYKTSGHWDHYQEDMFPPMDMGDGEMLVLRPMNCPHHMMVYKNTIHSYRELPIRIAELGMMHRYEKSGALSGLQRVREMTLNDGHTFVRPDQIKDEFKRTLELMVAVYADFNITDYRFRLSYRDPNNTDKYFDDDAMWEKAQAMLKAAMDELELDYFEAEGEAAFYGPKLDVQVKTALGTEETLSTIQLDFLLPERFDLTYVGEDGENTHRPVVIHRGIVSTMERFVAYLTEVYKGAFPTWLAPIQATIIPVSVDAHGDYAYEIKERLQMKGLRVEVDDRNEKMGYKIRASQTQKIPYQLVVGDKELEDATVNVRRYGSKETAVEDLNIFIDAMEAEVKNYSREN

SEQ ID NO: 57573 - protein, 373 aa, Enterococcus faecium
MRFLHTADWHIGKKLQGYDLIEDQRHVLSSILDIAKEEKVEAIVIAGDLYDRSVPAVDAVELYNELMVDWNLKEKIPIFAISGNHDSSTRLSAGTPWFSYSNYFLRTQLAEAFEPVEFKNVQFFFLPYFEPIAARLYFEDDNIRTIKQAVAKVIDKMQELFDSEKKQVLISHFFVMGSVKSDSETKIEVGGLDSIPGELLTPFDYVALGHLHNQAALRQDNARYSGSPLKFSLSEINQKKGVWIVDLTTGLELNFREIEPLHDIEEITASFKELLDPAFYQSVNRENYIYIYLTDRTIIPNMMNQLRQIYPRILGIERANGRAEQTKRKRKVLEMKDPQKLAEAFFSEMTEEQLTANQEKWLGETLQEIMEME

SEQ ID NO: 57574 - protein, 261 aa, Enterococcus faecium
  MISC_FEATURE (18)..(18): X=any amino acid
  MISC_FEATURE (20)..(20): X=any amino acid
FIGKDETKAEIRYNEKVXQXIYKRWLFMKKVLVVDDEKPISDIVKFNLAKEGYDVYTAYDGEEALEKVAEVEPDLILLDLMLPKMDGLEVAREVRKTYDMPIIMVTAKDSEIDKVLGLELGADDYVTKPFSNRELVARVKANLRRGATAAKEPEEAAPAELTIGDLTIHPEAYMVTKRGETIELTHREFELLFYLAKHLGQVMTREHLLQTVWGYDYFGDVRTVDVTVRRLREKIEDNPSHPNYLVTRRGVGYYLRNPEQE

SEQ ID NO: 57575 - protein, 201 aa, Enterococcus faecium
MTYIFEKGTSGKHLILLHGTGGDEHSLLDIAHFLAPNSTLLSFRGTVQEDGMNRFFKRNGLNQFDLDSLEKETDKLHEKIKEISEKELIPLSDWLLVGYSNGANIAAHLLLERETELNKGLFFHPMSLGVHQSRSTLEDKTVWISYGDNDPIVSPASFKELADQFETRQANVTIQLTVTGHQLTMDEIKQAREWTDHLLTK

SEQ ID NO: 57576 - protein, 245 aa, Enterococcus faecium
MLQIYAHRGSSGTHPENTLPAFAEAVRVGADGIELDVHLSKDGYLIVMHDEEVDRTTNGKGLIREKTLEELKKLNAGGKFSKEFPAAKVPELREVLGLLLQKNYRGMLMIEIKTDQYEYPGIEEKLAETLKSRDWPFQHAYCSFHLDSLEKIALLEPEIQLDLLMSTSDKKIQLAAETPYIEGVHPKNTWLFEHPVQAADFPKAIRAWTINDEEEMAKCQELKIDGIITDFPEKALRWKQSTKSR

SEQ ID NO: 57577 - protein, 320 aa, Enterococcus faecium
MEWTQALIPIVSSCAMTIAAMPLFIGYFQMKKQGQAIREEGPKWHNSKAGTPTMGGLVFLIGSILTGIWVGAWQKQLTPTLFILLFVLALYGVIGFLDDFIKIFKKRNMGLNSKQKLIGQILGGIIFYLVYRSEGYPGVLNFFGLDLPLGIIYGIFALFWLVGFSNAVNLTDGIDGLVAGLGSISFAAYGLIAWHQHQYDVLIICLSVLGGLLGFFVYNRKPAKIFMGDVGSLALGGLLAAISIMLNQEWTLLLIGLIYVMETASVMLQVTSFKLTGKRIFKMSPIHHHFEMCGWSEWKIDTVFWLISIVTSLITLWIVW

SEQ ID NO: 57578 - protein, 289 aa, Enterococcus faecium
MALFKKKKYIRINPNRESKPANSPSVPDNMWAKCPNCKHILYTKDIGEEKVCPHCGYAFRIGAWQRLALIIDEKSFEEWDTDLVTKDPLAFPEYTEKIKKMQDKTGLHEAVLTGKATIQGIPFIIGVMDPNFIMGSMGTIVGEKITRLFERATKESLPVVLFTASGGARMQEGIFSLMQMAKISAAVKRHSNEGLFYLTVLTDPTTGGVTASFAMEGDIILAEPQSLIGFAGRRVIEQTIKQELPEDFQKAEFLLSHGFVDQIVPRMELKQKIHTLLELHTQKGWIDRG

SEQ ID NO: 57579 - protein, 118 aa, Enterococcus faecium
MITKPDKNKTRQKRHRRVRNNISGTAERPRLNVFRSNKNIYAQIIDDVAGVTLASASTLDKEISGGTKTEAAQAVGKLVAERAAEKGIKVVVFDRGGYLYHGRVQALAEAARENGLEF

SEQ ID NO: 57580 - protein, 154 aa, Enterococcus faecium
MPKGEGKLIAQNKKARHDYSIIDTMEAGMVLQGTEIKSIRNSRINLKDGFIRVRNGEAFLHNVHISPYEQGNIFNHDPLRTRKLLLHKKQIIRLENELKNTGITVVPLKVYIRNGYAKVLIGLAKGKKSYDKREDLKRKDIDRQIDRTLKNFSR

SEQ ID NO: 57581 - protein, 609 aa, Enterococcus faecium
MWKCHFYCIIHLIIHFLFIKITEKRKEEINLKKTNSSGKPKRDFTKLSTPHTYVIIFGVVIFAWILTFVVPAGKFSTQDIEYKDANGETSTRTVLRQDSFRYAYELDKSYVFDQLEELQDHPAEREKLDVPEKGLEKVIADGEKNLTQEKLDEISLTDDVLYDQYGENIYDTSKKLHKTAKIWGTDDFGGFGFLNFVFEGLVSGDKYGSAVGIAALILVVGGAFGIIMRTGAIDAGIYAFISKTKGLERLALPLLFFAFSFGGATFGMAEEVIPFSMVMVPFVIALGYDSIVAVTVTYVASQVGNATSWMSPFSVAVAQGIAGIPVLSGATFRLIMWVVVTALAAGYMMIYAEKIRKKPESSLTYKSDDYFRSHIKKTSDENKKFMLGHKLILLEMLVVLVWIVWGVTQKGYYIPEIASQFFVMGLVAGIIAVLFKLDGMKVNDIASSFQSGAADLAGTAIVVGMAKGILLVLGGSDASVPSALNTILHGIGTALTGVPAVIGAWAMYIFQSLFNLVVTSNSGQAALTMPIMAPLADLVGVSRQVAVLAYQLGSGFMDAFTPVSASLIGVLGVARIEWAKWARFQIKMQGFLFVLGTIFIMIAIAIGLQ

SEQ ID NO: 57582 - protein, 234 aa, Enterococcus faecium
MTETTLYIVRHGKTMFNTIERVQGWCDTPLTKQGQEGIHYLGRGLKNVDFSFAYSSDSGRAIETARIILGEHSKGKEIPYFIEKRIREWCFGSLEGGYDMEMWGVIPRVLNFKTYDEMFTTEVSFEQIANAVYNLDTAGWAETYETLRDRVWTGFEDIAHHCEKNGGGNVLVVSHGLTIAFLLNLIDPKQPVRAGLLNGSVTKVTYANGRFSIHGINDTSYIDNGKTHSRDSFL

SEQ ID NO: 57583 - protein, 261 aa, Enterococcus faecium
MDKTAHDVVQLARAKERWTSLDFFEEIFDSFEECHGDRLFADDEAIVGGIARLDGKPVTVIGIQKGRDLQENIRRNFGSPHPEGYRKALRLMKQAEKFNRPVITLINTAGAYCGVGAEERGEGEAIARNLLEMSDLKVPIIAIIIGEGGSGGALALGLADEVWMLEETIYAVLSPEGFASILWKDGSRAAEAAELMKITAPELRELGIVDRVIPETFNGEQLPRYKVAHIMKKALIERLTELVRLDQHKLLEKRYKRFRQY

SEQ ID NO: 57584 - protein, 178 aa, Enterococcus faecium
MRKYTFVFKKKVVSDYLNNEGGYKYLAHKYQINRTLVRHWVRIYNYHGWEGLVGGGKSYTTKFKLDVIEYMETNGLSIQETAKKFNIGSNRTLSKWIEQYEEGGASSLESQKRGRKISMNSKLNIPKKLKDESLEEEVIRLRAENAYLKKLETLIQEQDLSKKKSRLKQSFSSKKNLN

SEQ ID NO: 57585 - protein, 1240 aa, Enterococcus faecium
MNQIPLKPQNERFTDDQWQAIFDQGDNLLVSASAGSGKTTVLVRRVIEKLKMGFDIDELLIVTFTEAAAREMKERIQEALQEAVNSESDPVRRQHFTKQLVLLPTANISTLHAFCLTVIRRYYYLIDIDPVFRMLTDETETILMKEDVWDELREALYAENDERFFQLTMNFSNDRSDDGLTNLVFSLYEFARANPDPKKWLEQLSDNYRLPEGLAKSRLYQEQIRPLVLADIYQCVQLYEQMTQLAQGEGLEKMHEQVAGEQQQIKNIYEAFSQDRLEEAYAGLEQLTFSTFKSSRKAELKEISNEVKGMRDKAKKLIQQISKSYFPVSPSQMEELTDKALPLVEEMTKVTQSFMDGFSMRKREKGVLDFNDLEHLALQILTEKTKDAWLPSEASKHYRKKFKEVMVDEYQDVNQLQEAILYWLREPDDTKGNMFMVGDVKQSIYSFRLADPSLFIGKYENFSKKEGGRRIVLAENFRSRKEVLSFTNLIFEQLMDPAVGQINYDEAAKLIQGFSDFPENEQFEPEIMIYEKEQEESEIEIPTDDILEDKTEGELFMTGLKIRQLIDSSFMIYDKKSKKSRPIEYKDIVLLTPTKKNNLTILEIFKTLDIPLEMKDAQNYFQATEIRTMISLLQLIDNPYQDIPLAAVLRSPIVGLIEPELASIRLADRAHTYYDAVLAYQASNEDELAAKLEHFGKQLEHWRELARRSSITDLLWDIYYETGYLEYVVGLPAGAQRQANLYALVDRAKAYEQSSFRGLYQFVRFIEKMQEKDKDLAEPVISIEDNAVRVMTIHASKGLEFPVVFLLDMTKEFNLQDLRNRYAFEEKLGAGIRYMDPETRVLYDTLPFQAIKLVKQNKLLSEEMRKLYVGLTRAEQKLFIVGSYKNKEQMIQTWSEAADHEELVFDPALRLKGRSSLMNWIGYGLIRHPEMQKYLEEEISTSLLQHSNAQFSISWMNQQSIIEQRQLLAEKELVNLDQQMKEDETLLADSLQKRLAYEYPYQASSQTTSYQSVSEIKRLFEDPDDTQESRLTLESSQNKAASRQFRYTQEQLAEPKFLQKDRQVSAAAVGTATHALLQLLPLEMPTTESIHQKLQELVRKRLVDEKVAKKVDVSSIIWFFQTELGQQLIANKENVKREQPFSMLLPADEVFQDYPNQEDELLIHGIVDGYLEEKDHLNIYDFKTDFILHPDDPAEIDAIVQKYQGQLRLYQQAMSEALNKPVENVFLILLRVKQIININK

SEQ ID NO: 57586 - protein, 974 aa, Enterococcus faecium
LTVQDMILTLQKFWSSNGCMLMQAYDTEKGAGTMSPYTFLRAIGPEPWNAAYVEPSRRPADGRYGENPNRLYQHHQFQVVMKPSPENIQELYLESLRLLGIDPLEHDIRFVEDNWENPSMGCAGVGWEVWLDGMEITQFTYFQQVGGLPCKPVTSEITYGLERLASYIQEVESVYDLEWADGVKYGEIFKQPEYEHSKYSFEVSDQDLLLSNFDRFEKEAKRCIDENLVHPAYDYILKCSHTFNLLDARGAVSVTERAGYLSRIRNMARSVAKIFVAEREKLGFPLLNKNTANPENVKELNKMAKDLLLEIGLEEMPAHVVTPSMKQLEEKTAKFLDENQLTYDTIETFSTPRRLAIKVTNIPERQADSEEEVKGPAKKIALDADGNWTKAAEGFVRGQGLTTDAITFRELKGVEYVYVTKYTHGKEAKEVLTGLADVIKSLTFPVTMHWAEYDFEYIRPIHWIVALLDDEVIPFEILDIKTDRASRGHRFLGEDVTFAHAKEYEEKLNEQFVIASPQKRKEMIITQANELAEKNHWIIDLDEDLLEEVNNLVEYPTVFSGDFEEKYLSVPEEVLVTSMKEHQRYFEVRNDQGMLLPYFISARNGDRVKLENVVRGNQKVLTARLEDAEFFYNEDKKASIDQYVEKLKTVTFHEKIGSIYEKMQRVQVIARIIGEQVGLSEEELMDLQRAAEIYKFDLVTNMVGEFPELQGIMGEKYALLKGEKPAVATAIREHYMPISSEGDLPETTVGSILAIADKLDSIFSFFAVGMIPSGSNDPYALRRQAYGVVRIIESKKWAFPLSVLQETISEVISKDADRFGIGLSAGQQQVIDFIKGRLRQLLTTKNIRHDVIEAVLNAEQKDLTKVFAAAQLFKQHLADEDFKPSMEALTRVVNLAKKAELEKQSEVDPELFENEAEKELHKAVEAMKTSFADQTINENYDQLVSLRPLIENYFDQTMVMAEEPAVRENRLTQL

SEQ ID NO: 57587 - protein, 564 aa, Enterococcus faecium
MRKSKAIMIGAGIANMAAAVYLIQEGKWKGDQITFYSLDDHGSNDGAPTDTVVDEYWNKNHPLENQKGYIARGGRMLNYRTYVDLMDLLSRIPSVTEPGMTAEEDTRDFDAKHRTFDKARLMEGGKGIIDGGKLGFNNKDRILLTKLIAMPDSEEEKLDNITIEEYFKDDPHFFETNFWFMWETTFAFRTRSSAQELRRYMHQMIYEFTQIEHLVGVNRTRYNQYESIMLPLIEYLKEQGCKIILNRRVTDWEFKETPMQDEITVTGLKITNTLTQEEEYVVVDEDTAVIFTNGSITDSATLGDYETPAVENMDYGAASSLWKKASERFYNLGNPDKFFADRDASEWVSFTLTTKNHLLLNEITRITTQEPGNALNSFISTTPITPLGQKDVNMSIVVHHQPHFTSQKPNETVIWGYFLYPRRRGEFVDKQYIKMNGKEMLEELIGQLSKVDPGPVNIREKETEIFDSVINNIPVYMPYASALFNNRAKSDRPKVIPKHSTNLAFTGEFVEQPYQMIFTEQSAVRSGEIAAFHFAGIPMSRLVKTPRYDKDIPTLARAAKKMFE

SEQ ID NO: 57588 - protein, 390 aa, Enterococcus faecium
MNKSRIRILDIFMAIILVVGIGIFSYPFVEDSLNDFLAQQMIIHYQKQASNKNSEEIKKQQEKMTKKNQQLAEQNVSPGIGSFNQAVDAKALKDLPSNAFFMEHMLGVIEIPKINVSLPIFDQTTEIFLQKGTSLLEESSYPTGGKNTHAVLSGHRGLPEAKLFTDLPKLKKGDQFFIQINGKTLAYQVEKIQVVLPDEVDSLGIQKGRDLVTLLTCTPYMVNTHRLLVTGHRIPYQAKEAKKAIQGIDQWKKWKFFIWFIGILLGSIGLVWLLIAYLDSLAIAKRNYPLSFYVKNTNGRPIEGMVFSVKTLNGKHYITREKVPFVKASDEYGLVRFSDLKGRNYRLQHEELLLKIHVKHKHSKQFSMKLKKGRYKLRKEKEVYYLIEKE

SEQ ID NO: 57589 - protein, 98 aa, Enterococcus faecium
MKFQQTKEVLNQLVADLSQMSVVVHQTHWYMRGPGFLTLHPMMDEFMDDLNAQLDEVSERLITLDGSPYSTLRDLQITQNPDEIGRWDRTIPERLETL

SEQ ID NO: 57590 - protein, 173 aa, Enterococcus faecium
MNKYEIRKMTPSDVDLLQQISIETFTDTFGKDNSPEHLADYLTQAYALEKLTEELKDKETDFFLVSIDQEPAGYLKLNTGTSQSEEMADHFLEIERIYVRKKFKHQGIGTFLLDTAIEKAKEKQKTAIWLGVWEHNDVALAFYRKKGFIKYSEHVFYMGDDPQTDYLFIKQLF

SEQ ID NO: 57591 - protein, 239 aa, Enterococcus faecium
MDERSLTFHIGPIWFDGTVCIMVLLTCLIVFFLAYFFTRNLKLKPTGKQNAIEWVIDFSRGIVTDNLPRKELSNFHLLAFTLFLFVFVANNIGLVTKIVLPNETTLWKSPTADPFVTLTLAFIMILLTHLFGVKKLGFKGYFVNSFLKPYSFMFPMKLIEEFTNLLTLALRLYGNIYAGEVLLTLIAKMVISLGWFSLPLAIPLEMVWIAFSLFIGSIQAFVFVTLSMVYMSHKIEVEE

SEQ ID NO: 57592 - protein, 413 aa, Enterococcus faecium
  MISC_FEATURE (343)..(343): X=any amino acid
MEFSIDNNINDGAVIKVIGVGGGGGNAVNRMIEENVKGVEFITANTDVQALKNSKAETVIQLGPKYTRGLGAGSQPEVGQKAAEESEQSLREALDGADMIFITAGMGGGTGTGAAPIVAGIAKELGALTVGVVTRPFTFEGPKRGRFAAEGIARLKENVDTLLIISNNRLLEVVDKKTPMLEAFREADNVLRQGVQGISDLITAPGYVNLDFADVKTVMENQGTALMGIGVASGEDRVVEATKKAISSPLLETSIDGAEQVLLNITGGLDMTLFEAQDASDIVANAATGDVNIILGTSINEEMGDEIRVTVIATGIDESKKERKSSRPADKHKCNHLLKRLYXIWIKLNQLLQKKKTVLAIGISDVNKMFVLELMISNFDNIEKKEFDTFNREETKSHGDDELNTPPFFRRKK

SEQ ID NO: 57593 - protein, 319 aa, Enterococcus faecium
MTETFQHYTVMLKETVDGLNIKPDGVYVDCTLGGAGHSEYLLSQLSSKGHLYAFDQDQKAIDHAKLRLASYVEQGMVTFIKANFRELEERLSEHVDKVDGILYDLGVSSPQLDEAERGFSYHQDAPLDMRMDQSAPLSAYHVINEYSYHELVKIFFRYGEEKFSKQIAREIERVRKTKPIQTTGELVEIIKQVIPAPARRKGGHPAKRIFQAVRIAVNDELGAEEASLEQAIRLLKVNGRISVITFHSLEDRIVKSMFKEYSTVQDLPPGLPVIPDEFQPELKVITRKPILPSEEELTENNRSRSAKLRIAEKIRMKEE

SEQ ID NO: 57594 - protein, 431 aa, Enterococcus faecium
MFRLLKDAFKVKDIRSKILFTVFVLFVFRLGAHITVPGVNAASLQNLSSLPFFNMLNLVSGSAMQNFSIFSMGVSPYITASIVIQLLQMDIVPRFVEWSKQGEVGRKKLNQATRYLTLVLAFIQSVGITAGFNQYAQLGFVNNPNVATYVTIGLILTAGTMFVTWLGEQITEKGIGNGVSMIIFAGIISRLPESIREIYEDYFINIDPSDIWKSAIFVAILLVAVLLIVTFVTFFQQAERKIPIQYTKRVAGAPTSSYLPLKVNAAGVIPVIFASSFIATPNAVLQALSGRFGSENWYKVMMEIFNYNTAPGATIYTILIVAFTFFYAFVQVNPEKLAENLQKQGSYIPSVRPGKGTEEYVSRLLMRLSTVGAVFLGLVALLPIIAQMVWDLPQSIGLGGTSLLIVIGVALETAKQLEGLMLKRKYVGFIE

SEQ ID NO: 57595 - protein, 584 aa, Enterococcus faecium
METTLRKYIEVASKKKPADLVIKHAKIVNVFTKEIMEKDVAICEGMIVGIGEYEGKSVHNANGQYLVPGFIDGHVHIESSLLSPSEFSKVSLLHGVTTVVTDPHEIGNIAGSTGLEFMIEDARQTLMNIFFMLPSCVPVTPFETNGANLNAKKLAPFLQKPEVLGLAEVMNYQAVANNETDILEKIQLMHQHKKKIDGHAAGIGMEELNVYPAAGIRTDHEATTAKEAKERLDLGMYLMVREGTVAKDLASLLPAITPENSRRCFFVTDDKLINDLVKEGSIDHIVRQAIALGIDPLQAIQMATLNAAECFDLKTLGAIAPGYQADFFLTDDLTKLPIHEVFYKGTLVVQSGQLQDHLFADHSNSYTCCLPKLNAQPLNPHSLELLLSSSQAHVIEIIPNSLVTKDLVEKVDRQGERFIPSIEKDQLKIAVIERHHQTGNIGLGIVKGFQLKQGAIATTIAHDSHNLVVVGTNDEDMLYAANLLIQKGGGMTVVNKQQEIACVSLPIGGIMTQEPFSIVYEQLNELITKAHQLGAAKTFDPFLTLSFLTLSVIPELKITDKGLFSFSRFQLIPPCGKTDEINTF

SEQ ID NO: 57596 - protein, 80 aa, Enterococcus faecium
MGFIWSLIVGGIIGAIAGAITNKGSSMGIIANVVAGLVGSALGQALLGSWGPSIAGMAIVPSLIGAIILVLIVSFFARKL

SEQ ID NO: 57597 - protein, 314 aa, Enterococcus faecium
MAYYFEHEEEPDFGFSPDAEFPIINGEKGNVSLALRFKGDNAGDYVLKSFVSGLRENMVPGTATAALQVPSADAAIAMEEAFYQFIEANPVSGTIEADNTYVKIELVGKGAHGASPQSGINAGSFLALFLDNYEFLGSAKQFIHVAAAYVHEDFYGEKLGVAYEDEKMGKLTMNAGLFAFEENGTEEANFINMNFRFPKGVTVDGLQSDIEQTVGQEGATVTRGARVMEPHYVPMDDPLVATLLQVYEDHTGEKGYEQIIGGGTYGRLLKRGVAYGAMFPGYTDTMHQANEFMSLDDLFRATAIYADAIYRLAK

SEQ ID NO: 57598 - protein, 332 aa, Enterococcus faecium
MEIYDITIIGAGPVGMFAAFYAGMRQAKTKIIDSLPQLGGQLATLYPEKYIYDIPGYPAIKASELIDQLEKQLTTFNHTFHLKEEVLSLTREDEVIEITTNKGIHYSKAVILALGNGSFQPRKLNLDNAESFENHGLDYFVNDLMKYAGKKVAIAGGGDSAIDWTLMLEPIASEVYLIHRRPEFRAHEHSVSRLKSSSVNLLTPYLIDGLSGNNGELTDIRLKKVKSDETIDLMIDSLIVNYGFSSNLEHLSSWGLDSTRNAITVKSDMSTSIPGVYAAGDICTYEGKVKLIATGLGEAPTAVNNALHYINPKERTQPGHSTSLYDKNLRPS

SEQ ID NO: 57599 - protein, 195 aa, Enterococcus faecium
MNLPNKLTVLRICMIPIFILVVGLPLDWGQFNVGDTTLAVTQLVGAVIFALASITDWLDGKIARARGLVTNFGKFADPLADKMLVMTAFIMLVDQGKAPGWVVAIIVCRELAVTGLRLLLVEHGEVMAAAWPGKVKTATQMVAIILLFINNIPFSLIGIPVDQIMLYACLIFTIYSGVDYFIKRDPQSRPQAGSC

SEQ ID NO: 57600 - protein, 102 aa, Enterococcus faecium
MYAIIKTGGKQVKVEVGQAIYVEKLDVEAGEKVVFDEVILVGGESTKVGAPTVAGATVEGTVEKHGKQKKVVTFKYKPKKHSHRKQGHRQPYTKVVIDAINA

SEQ ID NO: 57601 - protein, 736 aa, Enterococcus faecium
MKAAQKTAFGSFHLFSSVLLSREGKGEVMSEKQVFKTTWGGRPLQIEVGQLAKQANGAVLVRYGDTVVLSAAVASKEAKDTDFFPLTINYEEKMYAAGKIPGGFIKREGRPSTEATLTARLIDRPIRPMFAEGFRNEVQVTNIVMSVETDCSPAMAAMLGSSLALSISDIPFDGPIAGVEVGRVNGEYVLNPTVEQAEQTDIELTVAGTKQAINMVESGAKEVSEEDMLGALLFGFDAIKELVAFQEEIVQAVGKEKMEVTLLQVDEVLKKEIFDASYATMKAAVMTEEKLAREDNIEQVKIDIREAYAEKFAGHEDEDHLLKEVKQITEDLEKDVVRELITIDKIRPDGRKLDEIRPLSSEVSLLPRVHGSGLFTRGQTQALSACTLAPLGEHQIIDGLGVEVSKRFIHHYNFPQFSVGSTGRAGSPGRREIGHGALGERALAQVIPSEEEFPYTIRLVAEVLESNGSSSQASICAGTLALMDAGVPIKAPVAGIAMGLVSDGENYTILTDIQGLEDHLGDMDFKVAGTKDGITALQMDIKIQGITEQILTEALTQAKQARMEILEELTSTIAAPREELSQYAPKIEMIQIEPAKIKDVIGKGGDTINGIIDETGVKIDIDQDGKVSIASADAEMIKKAIKIIEDLTKEVKVGEVYLGKVVRIEKFGAFVNLIKGKDGLVHISQLANDRVNKVEDVVKLGDEILVKVTEIDKQGRVNLSRKAMLNEDGSTKNEEK

SEQ ID NO: 57602 - protein, 671 aa, Enterococcus faecium
MNYKISYLLKTPREISLEKAAEIIEVNTSEAIKQLTPFAEYVDDTRIRIKKFRAIDWAEKFLDITRFEAVYTEQERRDLLYLMVYSTATSVSVFHFQDFLQVSKGTVLSDIKKIRNELEVEDCQLSYTRKTGFRLLGSEAILRREAKNRTARLMQSLAGRFGLTYLTATLSIDYYAKVRDLLDKTISLSDLRFAPNRMDELAYYLSLTTIRIGKTSMELVKDAELLASLAVTDISRQVLTGLGYSEHQNSEIIFFSLCLASIVEGDVQEPALDFLLECSSEVIHRMEFLMAVEFASFRELLMNVFYHLVPAYFRISYSFYLPNVMIDQIKHQYASIYEMTRKALLPLERRIGKSIPEEEIGFFTILFGGEIRKADAEERNRKIRAVIVCPSGISSSLILKSELQQLFPMIFFTETNSADRLHEVDETSYDIIFSTVPLTLTDKKKSLYVLHPIMTDLEKNQLINQVQRDWLIPGFSMPSAQELLSALLPYIELKEGVDEEKLYQVLNRKMNKLLEKKEDQRPMLSELLTEEMIQLSDQPKNWQEAITFAAQPLLSENKIEESYIKAMIERVEQYGAFIHIGDHIALPHARPEDGVNEVGMSLLKLQQPVDLLDNPAHPISLFICLAAIDNEAHLRALANLTKLLSNKQNLQDLLHASTKEEILAIIRKGDE

SEQ ID NO: 57603 - protein, 236 aa, Enterococcus faecium
MTEKILYQHGTLGALMAGLMDGTETIAHILEKGTLGLGTLHGLDGEVIFLDGVAYQGRSDGSVAQLDGSELTPYAAITDFTPDTSFSVSKTADGEQLKKDILVREAGENLFLAVKITGLFKNMHIRIMPKQEKPYRRLAKISESQPEFQQSNVQGTLVGFFTPELFQGVAAAGFHLHFIDDTHTFGGHVMDFEVAEGKVEISRISSLVQHFPVDDPTFVHETIDYADLAAEIQQAE

SEQ ID NO: 57604 - protein, 358 aa, Enterococcus faecium
MFENKKIKINVSDFQKVSAVTAVMMQTILSFALANSHSATNTAFLGTFYVIVKYTAPMFIFAIVYNMVKTSQHLSYWEFLKEKFFELVVPYLLWTTAYLWLFPAVQQQTPYTDTASFLLKYVTGDGAPHLWYTVMMLQIQLFMPFFVWLGYKVFANKKYVWPVLIGSTILYVAWYLFYQTQVLTGPYHDSWYLLDRFVASFMIYGVAAFVYHEKVYQYLDRVRYLFLPVALVIAFFSVRSLLAHPGDLSFANAPYLNTIQSLYSLVIIFAVFIGASKMIVNDSPKLPLFKWLSVYAYRTYLANVFVFQVLLLLFKDSWLQLPSGVMILVAYLMTASCAFALSWLLHIIWVAIKKGFSK

SEQ ID NO: 57605 - protein, 320 aa, Enterococcus faecium
MEQFGMITATASVLPEKIITNNDLSKMMDTSDEWISSRTGIRERRCVTNQETSDLCILVAEKLIKQKNLNPKDLDFILVATMSPDYTTPSVAAQVQGKLGATHAIAFDISAACSGFVYALSMAEKMIRCGSTKGLVIGGETLSKLIDWSDRTTAVLFGDGAGGILLEANPQKKLLKEKLAADGTRSSSLTAGYQQNKNPFYSEDSEGSYYLQMTGRDIFDFAVRDVANNIQEVMKDKPVDYLLLHQANLRIIEKIARKVKMPQEKFLTNMDKYGNTSAASIPILLDEAVSSGKITLGKQQKVIFTGYGGGLTWGSILMEL

SEQ ID NO: 57606 - protein, 431 aa, Enterococcus faecium; identical to SEQ ID NO: 57554

SEQ ID NO: 57607 - protein, 1104 aa, Enterococcus faecium
MFFPQLYTITSYSLLQSTIRIREYVQEAKKQGYTSLAITDKDVLYGAPEFYRICVEEGVQPIIGLHLSYTYEEKNYGLLAYAKDEIGYQQLMKLSSRKMIQEKLELAEMTETDHLAFVVPANHSVSEAFNKEDNFFGHWQFLLENVFTRNFYIGLTENTPDQLPEWYQYVIKENYSLCALHPIASLQQEELFALEVMKHIKEGSQIPLENLSASLPLTANVYLLSEQEMIKRFEKAGLSQAVIGAQRLAESISFEFQFHQKLLPHYPVPNGKQAGEYLRELCYSQVERRITDYTKEYQERLDYELSVIHQMGFDDYFLIVWDVMAFAHRNKIVTGAGRGSAAGSLVAYVLEITDVDPLEYDLLFERFLNPERFTMPDIDLDIPDNRREEVLNYVREKYGQYHMAQIATFGTMAAKMVLRDAARVFGLSQSEANRWSKAIPNQLKITLTQAYKTSHQLVELVQASEKNQLLFKTAVILEGLPRHVSTHAAGVVISDKNLLELVPLQRGSDEAFLTQYTMNEVEAIGLLKMDFLGLRNLSIIDFTLKAVKRVEGYEIRLKEIPLNDAKTLLLFQRGETSGVFQFESAGIRNVLRRLDPENIEDIAAVNALYRPGPMQNIDTFIARKKGKEAIRYPDDSLIPILKNTYGVIVYQEQIMQIASTMAGFTLGQSDILRRAVSKKKKDVLDEEKSHFVSGALQQGYSEKTAATVYEYIEKFANYGFNRSHAFAYSFVGFQMAYLKAHHPGAFFTSLMNSVRHNTSKLKEYIAEARKNKLKLSSPSINQSNSSFELVNKEEIRFGLTAIKGIRRDFVEDILNERKQNGPFQSVDQFLIRIDKRWLKLELLQSLTAVGVFDELSPNRKQLMLDLEGKIQNIVYSGGSLDLLGIMALKEEEVADYTLEERLKLEEEYLGIYLSGHPAEGFDRLRLAKQVQLITDIVPNQPVNLLVMIKEVREIRTKKGELMAFVEGTDSSGEISVTVFPTLYRKYRNLFAVDRVIFVQGRSEISKYNQELQLIGESFADPNQLEAQYPSQTCYLRITEEREDPEIMKQLQVIFQKHPGYIPVVMYHEKTQRKVVLSDAYWVDDSKSIKRQLIYLLGEDNVVFK

SEQ ID NO: 57608 - protein, 275 aa, Enterococcus faecium; identical to SEQ ID NO: 56941

SEQ ID NO: 57609 - protein, 230 aa, Enterococcus faecium
MGKRLIKEVPTSSLPRERMEIYGAEALSDQELLAILLRTGQHPYSVMSIAGNLLKTFGGLASLRQATLHELEEIRGIGRVKAIEIKALIELGRRIQTDHERAAPPVRTSYELAQQLILEMKDHKQEHLVCIYLDTKNQVILKKTVFIGSLNQSVAHPREIFHYAVRYCAARIVLAHNHPSGNVIPSQQDMNFTKRIQKCGEMMGITVLDHLIIGRKRYFSLREEGMMEEK

SEQ ID NO: 57610 - protein, 230 aa, Enterococcus faecium
RITVRHKVADTKRQYRVIDFKRNKDNVVATVQTIEYDPNRSANIALVHYEDGCKAYILAPKGLEVGMKLVSGPEADIKVGNALPLENIPVGTVIHNIEMKPGKGGQLIRSAGTSAQVLGKEGKYVLIRLNSGEVRMILAACRATIGSVGNEQHELINIGKAGRSRWMRKRPTVRGSVMNPNDHPHGGGEGKAPIGRKAPVSPWGQPALGYKTRNKKAKSDKLIVRRRKNK

SEQ ID NO: 57611 - protein, 242 aa, Enterococcus faecium
MKGIFMIPEEFRQSLAEKGIELTDHQMNQFAIYYRTLVEWNEKMNLTAITDEKDVYLKHFYDSLTLAFEVDFTQPLSLCDVGSGAGFPSIPLKIAFPELQITIVDSLNKRITFLSELTRLLGIDASLYHDRAETFGQNPHFRASFDLVTARAVARLNVLAELCLPLAKQEGYFYALKAAKSEEELTEAKQAIALLGGKFLKEEAVTLPNVSDQRHIIVIQKKKPTPKKYPRKPGLPNKQPIK

SEQ ID NO: 57612 - protein, 459 aa, Enterococcus faecium
MKTKQQKAVLSRHLAKYDIIKGRKNKKEENPMQQPLAYRMRPRTIDEVVGQQHLVGEGKIIRRMVDARMLSSMILYGPPGTGKTSIASAIAGSTNYAFRMLNAATDSKKDLQVVAEEAKMSGTVILLLDEVHRLDKTKQDFLLPHLESGRIILIGATTENPYITINPAIRSRTQIFEVKPLTEQDIQLAVEHALRDKERGLGQQAIQLDEDALLHLSRATNGDLRSALNGLELATLSTPSDKEGRIHLTLSIIEECVQRKALTHDKNGDAHYDVISAFQKSIRGSDVDAALHYLARLVEAGDLASICRRLMVIGYEDIGLGNPAAAARTVNAVLAAEKLGLPEARIPLADVVVDLCLSPKSNSAYMALDAALADIREGKAGDVPDHLRDSHYKGAKSLNRGVGYQYPHHFDQAWVNQQYLPDKLKNAQYYQPKDTGKYEQALGQQYYRIKEWKKHPPKN

SEQ ID NO: 57613 - protein, 823 aa, Enterococcus faecium
MSEEIRENIHDVNLTSEMKDSFIDYAMSVIVARALPDVRDGLKPVHRRILYGMNELGVTPDKAHKKSARIVGDVMGKYHPHGDSAIYESMVRMAQPFSYRYMLVDGHGNFGSVDGDGAAAMRYTEARMSKIATEMLRDINKNTVDFQSNYDDTEKEPVVLPARFPNLLVNGTTGIAVGMATNIPPHNLSEVVAAIDLLMDNPDVTTNELMEVLPGPDFPTGGLVMGKSGIRRAYETGKGSITVRAKVEITEMPNGKERIIVTELPYMVNKAKLIERISELHRDKRIEGITDLRDESSREGMRIVIDIRRDASASVILNNLYKLTSLQNSFGFNMLAIEKGVPKVLSLKQILENYIEHQREVITRRTVFEKEKAEARAHILEGLRIALDHIDEIIAIIRGSKSDDEAKATMIERFDLSDRQSQAILDMRLRRLTGLEREKIENEYQELLKLIEDLTDILARPERVTEIIKNELADLNQRFGDKRRTELLVGEVLSLEDEDLIEEEEIVITLTNNGYIKRLANNEFRAQRRGGRGVQGMGIHNDDFVKNLVSCSTHDTLLFFTNNGKVYRAKGYEIPEYGRTAKGIPIINLLGIDSSESIQAIIAVTGEAEEGHYLFFTTRQGTVKRTSVTAFANIRSNGLIAIGLKEDDELVNVLLTDGQSNIIIGTHNGYSVTFKEEAVRDMGRTASGVRGIRLREEDYVVGAALMKENQEVLVITEKGYGKRTKVSEYPVKGRGGKGIKTANITEKNGPLAGLTTVSGDEDIMLITDKGVIIRFNVSTVSQTGRSTLGVRLMKMEADTKVVTMAAVEPEAAEQTVEEQGSEE

SEQ ID NO: 57614 - protein, 89 aa, Enterococcus faecium
NVKEVRLSPTIDLNDFNTKLRNARKFLEKGDKVKASIRFKGRAITHKEIGQKVLNRLAEETADIATVEQKAKMDGRSMFLTLAPKNDSK

SEQ ID NO: 57615 - protein, 409 aa, Enterococcus faecium
MVLVSKKKEPKKLSHPSSDENNLTPWQKANRKYLAEQEMKNQEPKKEDITLDTPLSDSEEEKTVQEEQQEESQSEKKIEFFEEIKQKKNGGPYNGSFLNRLPNLKSQRHKVLFRRLALIITVLGIPLIFLIYYVSPYSKLQAVAVSGNKTVNSQEIISDTKLSLGENVWGQYFHRSTYIDRLKKAQPRIETANIHFKGMNEFDLDVTEYKEIALIAKNNQYYPVIENGTVLDEKVANPTKNLPILEEFKDSAKIKELTKQYNQLSSELQKAISEIKYTPRASNKNLIQLNMNDGNQVIVNINNLANQMKYYSQVAKDMDEKGVIDMEVGIFSHPYGSTQETEESGQSEETTESEENADQTNESSEEAETQKAQTPGSSSTNGSSDSNDSSETSQIEDNPSTTPSSLNEN

SEQ ID NO: 57616 - protein, 357 aa, Enterococcus faecium
MYDQLQAIEDRYEELGELLSDPEVISDTKRFMQLSKEEANTRETVEVYRRYKEVVQGITDTEELLGEKLDDEMAELAKEELSELKKEKEVLEEKIKILLLPKDPNDDKNIIMEIRGAAGGDEAALFAGDLFNMYQKYAEAQGWKTEVMEANVTGIGGYKEVIMMITGDNVYSKLKYESGAHRVQRVPSTESQGRIHTSTATVVVMPEAEEVEIDIEDKDIRTDIYHASGAGGQHVNKTASAVRLTHLPTGIVVAMQDERSQIKNREKAMKILRARVYDKIQQEAQSEYDANRKSAVGTGDRSERIRTYNFPQNRVTDHRIGLTIQKLDQILAGKLDEIVDALIMYDQTSKLEAMQNG

SEQ ID NO: 57617 - protein, 415 aa, Enterococcus faecium
MTDLMQLGQQAKDSAQQLALMPTNRKNELLVQMAQTIKKNQQAIIEANHKDLEKAVENNISETMQDRLQLTPERINAMATEIEKIASLDDPIGKVDEMWTNTDGLRIGKKRVPLGVTGIIYESRPNVTTDAASLAFKSGNAVILRGGKEAFFSNQLLVQLLQQVLVSAGESPYAIQFVDDTSHETAGQLMRLTEYLDVLIPRGGAKLIQRVKEQATVPIIETGTGNNHVYIDKEAQLSMAVNIIVNAKASRPSVCNAAETLLIHSEIAPFFLPAIEKELVEHGVSLRADARALEYLETAALAEDTDWDTEYLDYILAVKVVDSLDEAIAHINRHNTKHSETIVTDSYAASQRFLNEVDAAAVYVNASTRFTDGSVFGFGAEIGISTQKLHARGPMGLNELTSTKYIIYGDGQIRE

SEQ ID NO: 57618 - protein, 590 aa, Enterococcus faecium
MNDLLKQYFGYDEFRPGQKEIIQKVIDQENVLGIMPTGSGKSICYQLPALLLDGLTVVVSPLISLMKDQVDAANQLGIPATFINSSLDGYETARRFQEIDRQQYRLLYIAPERFIMPDFIQAMKRWNVRMIAIDEAHCISQWGHDFRPSYLQMANQLDQLPNRPVIVALTATATVQVAADIKRLLKIPENNHIQTGFERENLRFQVIKDQKKEQYLIEYLKINKNQSGIIYAATRKEVDRLYHLLKKFDFSVGRYHGGLNENERTEMQEAFLYDRLQLIVATNAFGMGINKSNVRFVIHYQIPGSLEAYYQEAGRAGRDGLSSEAILLFSPQDIQVQKFFIQQSQREEGQKQKEYEKLKAMTEYVYIESCLQQYILNYFGETSSPCNRCGNCLDDREIVEVTTEAQMVLSCLKRMGENYGKQMLMKVLAGSKEQKLQALGFGHLSTYGLMKNQSQKETMQLIEYLISNGYLLTINGEYPVLKVTERGIQVLKGQESVYRKEPKKVQQLSDEETDTLFEVLRELRTDLASEAGVPPYVVFSDSTLKEMSRIRPSSRLEMLQIKGVGQSKLDKYGEAFLSRIKNADSNVLDK

SEQ ID NO: 57619 - protein, 329 aa, Enterococcus faecium
MRRELSMKIINFEEVVASFSFEEAIQVMKKCFFDYESGKISQNPRLVEILPDGKDKNMFAMMPAYLGENRYFGTKVITAFPDNHQYHLPSHLGEIFLFDAQNGLPKALINANAVTWIRTAAVSALATDYLANPHAETLALIGAGQQALSHLTAISTIRPITTVFVYDILEERRNTFIAKAKKQYPKITFINAISVEDAVRPAEIICTLTSSKEAFLQKEWVREDAHINAVGTFTPDTREISTSLMETSQIYVDDYSATLTESGDLLIAMAEGDLEESCIVGTLGELVSEKKTFYKGESRPTIFDAVGLAIEDLCCAEYIYNKLEKGALK

SEQ ID NO: 57620 - protein, 252 aa, Enterococcus faecium
  MISC_FEATURE (176)..(176): X=any amino acid
VKEIQSAKNPRIKELKKLHKKKYREEKAEYLLEGFHLIEEAASSDAEIKELFVTQRGMKEWGDWLAVNKEISTFLVSDEVMTAMSDLPTPQGILAVMTLTSEDTPDFSGGWLLLDNVQDPGNVGTMIRTADAFGMAGVLLGKGTADIYSTKVLRSMQGSNYHLPVLQKDLADVIPXMKGKGFTVYGTELNEEAHALDKVEKTEDFAIIMGNEGQGSSQEILSLTDQNVYIPMKGNAESLNVGVAAGIVLYHF

SEQ ID NO: 57621 - protein, 84 aa, Enterococcus faecium
  MISC_FEATURE (72)..(72): X=any amino acid
  MISC_FEATURE (73)..(73): X=any amino acid
  MISC_FEATURE (74)..(74): X=any amino acid
  MISC_FEATURE (75)..(75): X=any amino acid
  MISC_FEATURE (76)..(76): X=any amino acid
  MISC_FEATURE (77)..(77): X=any amino acid
  MISC_FEATURE (78)..(78): X=any amino acid
  MISC_FEATURE (79)..(79): X=any amino acid
  MISC_FEATURE (80)..(80): X=any amino acid
MILENKLGLTNQVELAKVEEKLSKQKAKELYDCGKINEIEVGTFKGLSEIHEFLFSDIYDFAGKIRSRNVYXXXXXXXXXMFQG

SEQ ID NO: 57622 - protein, 85 aa, Enterococcus faecium
EIGSKPPLCWRKPCHRQADIAKKREPLLEVEAEKAVNEFASPLTGTVSSVNDKIGEDINILNDSDEMNAWILSFKDVDPKEFDEL

SEQ ID NO: 57623 - protein, 410 aa, Enterococcus faecium
MYENLLPRFLRYVKTETRSDATSKTTPSTQTQVAFAQELKKELEELGLADVFYNEDNGFVMGTLPSNVDHEVRSIGFISHMDTADFNAVGVNPQIIENYDGESTIVLDAEERYTLNTKDFPNLKNYEGHTLITTDGSTLLGADDKSGIAEIMTAMEILINNPSIPHGTIKVAFGPDEEIGVGADKFDVEQFDVDFAYTVDGGPLGELQYETFSAAQANITIQGKNVHPGTAKDTMINALQLAIDFHNQLPADEVPEKTEGYEGFFHLMALDGNPEEASMSYIIRDHDREKFEARKAQITHIQEELNQRFDQERIKVDMYDQYYNMKEIIEKDMSIVELAKQAMIELGISPVIEPVRGGTDGSKISYMGIPTPNLFAGGENMHGRFEFVSLQVMEKATDVIVKIAELNTKS

SEQ ID NO: 57624 - protein, 176 aa, Enterococcus faecium
MKKQLLIVDGYNMIGSWPELVQLKKQDKMADAREALLHRLSNYAKYEGMEVIVVFDAQLVPGIQQNYKKYQLDVVFTKEDETADSYIERIAGQLNDRLTQVTVATSDLAEQWMIFSQGALRTSAYELYKTIKKTEKTIAQENKDMHFIDFRRNSPWNEEQLKKLSQKLDDLMRKNK

SEQ ID NO: 57625 - protein, 121 aa, Enterococcus faecium
MARIAGVDIPRDKRVVVSLTYIYGIGNTTAKKILADAGVSEDVRVRELTNEQTDAIRAEVDKLKVEGDLRREVNLNIKRLMEIGSYRGIRHRRGLPVRGQNTKNNARTRKGPARAIAGKKK

SEQ ID NO: 57626 - protein, 426 aa, Enterococcus faecium
MKTLIKNGQINTRKNMTTPAEIWIEDGRIKAIGTGFSEAEFDEVFDAKGQLITPGLVDVHVHLREPGFTYKETIEAGTRSAARGGFTTVCAMPNLNPVPDTAEKLRQVYDIIRKDAVVKVLQYAPITENLRSEKLVDQEALIEEGAFAFTNDGVGVQTAGTMYLAMKEAAKNNKALVAHTEDESLLFGGVMHAGKKAEELGLPGILSVTESSQIARDLLLAEATGVHYHVCHVSTKESVRVIRDAKKAGIHVTAEVSPHHLILIDEDIPEDFGFWKMNPPLRGREDREALIEGLLDGTIDCIATDHAPHGLEEKSQSFMKSPFGIVGSETAFQLIYTHFVETGRFTLEQVINWLAVKPAEIFGLNAGTLTVGAPADVAVFDITQTCTIDKEDFLSKGENTPFIGWKVKGETQMTFVNGKLVWQKGE

SEQ ID NO: 57627 - protein, 166 aa, Enterococcus faecium
MVYIDPKHLELEDRVVAINRVTKVVKGGRRLRFAALVVVGDKNGHVGFGTGKAQEVPEAIRKAIEDAKKNLVEVPMVGSTIPHEVIGAFSGGRILMKPAVEGSGVAAGGPVRAVLELAGVADITSKSLGSNTPINVVRATVEGLKQLKRAEEVAELRGKSVEELIG

SEQ ID NO: 57628 - protein, 451 aa, Enterococcus faecium
  MISC_FEATURE (223)..(223): X=any amino acid
MGYKELGKDILANVGGSENVSSLAHCATRLRFKDDSKADESAIRNLKGVVGVVNQGGQFQVIIGGDVKFVFAEIDKLGDFSASKESSSEANNKGIVSKVLDTIAGIFVPIVPALTGAGMLKALLALLVMLEWMTPESQTYQFLNFIGDAAFYFLPVLLASSAAKKFGCNQYIAITLGAILLHPTFTAMIAGARETGESLALFGLPVTLANYGSSVIPIILAIXFMSYIEPIIDKLMPNAVRIFMTPLLTLLIVAPITLIVIGPLGTFLGNGLGSLIEFVNTYASWLVPLLVGAFTPLLVMTGMHYGLIPIGINMLATSGFDTVAGPGMMVSNIAQGGAALAVAFRTKQLSVKQLAVSSGLSAFMGITEPALYGINMRFKKPLIASMVGGGAAGLFIGIMGVGRYAQVAPGILALPSFFGEKGLSNFIYAAIGCAIAFVVGFIASFILGIDE

SEQ ID NO: 57629 - protein, 62 aa, Enterococcus faecium
MKELFSTYKLPIIFGVLGLILAVLWITVGFFKTLLILIMAAIGVAIGFYLKQTKILDHYFKS

SEQ ID NO: 57630 - protein, 341 aa, Enterococcus faecium
MKPTIYDIAKKANVSKSTVSRVLNNQPNISDKAKASVLQAIKELNYEPSKIARGLSGNGFDAILALSHRTSHTTYGNPFFSDVIQSISAVSEQNNFDLILQTAKTPEEELEKCAKKIQEKMIRGIIILSSTMDETLLFELDQYNIPIVVIGKVGNDYTNIYSVDTDNFQDSYDLVETLIKNGHRHIGCLHAPTEVYVSNDRLNGYRQCLFDHHLDIRNEWIIDGGFRLEDSMAAMNDLMKLRERPTAIFSTDALKSLSIYKVAEQSGKQIPDDLSIAGFSDPLLSSLFSPQLTRIDIPTNQLGIKATELLFQLIHHQYPEEKRIILSTEITLTDSIQQQEM

SEQ ID NO: 57631 - protein, 906 aa, Enterococcus faecium
  MISC_FEATURE (582)..(582): X=any amino acid
GNKWYKCDLHIHSTASQCFQDKKVTAKEWVEECLNKGLDCVALTDHNTGENIDEYKKVAIENGLDFFPGVELTCGENGTHLLVLFDKSACTNDISDFLTKMGIKREDWASAAACSMKSVLEVIDFAEHEGLLVIPAHIDEFNGISSAKFGNLGKIFESENIYAVQTVQKEFFENRSQMIPSSKRDTIYDSVNARYDGRVGKDTLESWYKSVVEAEKNNMTFLSFSDNPHSKGNSKHGLWGIGTRYSYIKMKDEPDLGSLRDALMLGETRVHSDFSNFSINENEVLLEKLSFSGTTLSTKEVVVEFSDNLTSIIGGRGTGKSCITRFLVYVLGKEAELDQFSEIQSDYQNFAQIEHNGSGIFLKDTIVKLNIFYKGTKYQIIRTQDRHSIYEFTQENGLVEKETERLRMISDKVSIYSQKQIYEISKNQTSILELLDGYNSDLISEYKNEIETCVNEIRKLNWDIVSVKKEIQDKAKVELEIEDLKKQVEKLSHKSYKDVYDEYSKETDIYRELKRDVEALKEIPKNLTDSVDKIDFGNGIKVTDEIDEHRGELIKNLVTNRAKIQTIINEMSDEIDVIEQSXINQIGKLTIMRFQRGIKEVQKLSEELSQDELKMLQNLDSLYQSLSKTEERLEEIIQQEIKLKDYQVEVDSAMSRMNKSYQNLYSERSSSSREIFSDITGIEATIQPNRDFNNYVKELRACINKEDTFDSEFGSLIDKLTKNSITNQDIYNDILDIRVSGESSIFSDKKLINSIRKLNDAQVLELQTLKPNDLVVIRLELNGKKVSLSNASAGQKTSAILSMILAYGNSPLILDQPEDDLDSQLINNLIVRSIITKKENRQILIVTHNANIPVNGDSEWLISMGDSKEISADQCGSVDEPNIKPRICTVMEGGEDAFTNRAKRYG

SEQ ID NO: 57632 - protein, 63 aa, Enterococcus faecium
MYDLHDIVEMKKPHACQTNRWEVIRMGADIKIRCMNCGHIVMMTRRDFEKKLKKVIEKNAEKE

SEQ ID NO: 57633 - protein, 312 aa, Enterococcus faecium
MIEFEKPRIAKIDEEKDYGKFIVEPLERGYGTTLGNSLRRILLSSLPGAAITNIQIDGVLHEFSTIKGVREDVTQIILNIKGLALKMYGQEEKTLEIDITGPATVTAGDIIVDSDVEILNKDMYICSVSEGATFHARLTVKPGRGYVQADENKKEDMPIGVLPVDSIYTPVRRVNYQVENTRVGHREDFDKLTMEIWTDGSIEPLEAMSLSAKIMTEHLDIFVNLTDEAKNAEIMVEKEETQKEKMLEMTIEELDLSVRSYNCLKRAGINTVQELTNKSEPEMIKVRNLGRKSLEEVKAKLHDLGLGLRKED

SEQ ID NO: 57634 - protein, 589 aa, Enterococcus faecium
MTDLIKASKFFYHYLKRYKLSFFFIFITVIIATYLQVKAPQYIGEAFQELANYVGGLMQGVDDKSKFVSVIWKLLLFYVLASAANFIYSILFTQVVGKSTNRMRIGLFNKLEKLTIRFFDSHQDGEILSRFTSDLDNIQNSLNQALLQVITNAVLLVGILIMMFRQNVELAWATIASTPVAVLIAVLIIRKARKYVDLQQDEVGKLNGYMDEKISGQRVIITNGLQEETIEGFLEHNQSVREATFKGQAYSGLLFPMMQGMSLVNTAIVIFFGGWLALNGDLERSVALGLVVTFVQYSQQYYQPLMQISSGYSMIQLAITGARRLNEIFDEKDEVKPENGKAFDGVEKGLALQHVDFGYSPEKLVLKDVSINVDKGEMVALVGPTGSGKTTIMNLLNRFYDVNDGSVVIDGIDIRDYDLDALRRHVGIVLQESVLFSGTIKDNITFGKPDASDEEVINAAKQANIHDFIMTLEKGYDTEISEENNLFSTGQKQLISIARTIITNPSLLILDEATSNVDTVTEARIQKAMDEAIKGRTSFVIAHRLKTILNADRIVVLRDGEVIEEGSHHELLAENGFYAELYHNQFVFE

SEQ ID NO: 57635 - protein, 378 aa, Enterococcus faecium
MLKNEVLTMKHISVLIKPASSLCNLRCSYCFYANVSSLREVRSFGKMKEEVTEKMIENIYADLEDGDQLTLAFQGGEPTMAGLNYFRTVIRLVAQQQKQVQVHYAIQTNGTMINEKWCAFLKEHDFLVGLSIDGHPLYHDLHRVDPKGRGTFQRVLQTKQLFDYYEIDYNVLCVLTNPLAKEAKKVFRFLKEQQIDFVQFIPCLDDLDAKKRNSYALTPKRFAGFYHQLLQLWLQELAEGHYISIKLFDDLLNLLIKRQVTACGILGNCQVQYVIEADGSVYPCDFYVLDEYRMGYIQEQTLRQLFEQDIAKTFLCGRPEMPKKCLSCPFQKMCRGGCKRMKDAIYVDNTGYCGYQQLLQEFVPQINRILGLLQGVSV

SEQ ID NO: 57636 - protein, 232 aa, Enterococcus faecium
MLEQLKEEVYQANLDLPKHGLVKYTWGNVSAFDPETRYFVIKPSGVSYEEMTADDMVVVDLDNHIIEGKLNPSSDTPTHAVLYRSFPQIGGIVHTHSTWATIWAQAGLDVPAMGTTHADTFYGSVPCARFLTQQEIDSGYEYETGKVIIETFKERKIDPLAIPGVLLHGHGPFTWGKDAQSAVMNAVVLDEVCKMNLFTRQLNSFSEELPQRILDKHYLRKHGKNAYYGQNK

SEQ ID NO: 57637 - protein, 231 aa, Enterococcus faecium
MEAQEIIRYIQTASKKTPVKVYLNVTEPIEFKESKVFGEGSSFVVFGDYETIAPVLEAESEKIIEIEIETAARYSAVPLLDIKKINARIEPGAIIRDQVSIGNNAVIMMGAIINIGAVIGENTMIDMGAVLGGRATVGKNCHIGAGAVLAGVIEPASAKPVIVEDGVLVGANAVIVEGVHIGKDAVVAAGAVVLEDVAAETVVGGIPARVLKISDDQTKENTALIAALREL

SEQ ID NO: 57638 - protein, 299 aa, Enterococcus faecium
MLEVKDLVKTFGNYTAVDHVSFQIPDGKIMGLIGQNGAGKTTTFRLILDFLTQDQGEVLWNGHHLGEKDYDVIGYLPEERGLYPKVTIQDQLLYFAELRGKSRKEIEPKIDFWMEKFQVKGKKTDKVKSLSKGNQQKVQLIATLIHEPKLIILDEPFSGLDPVNAELLKDGILELKKHGSCVIFSSHNMDNVEKICDHLIMLRNGKMVLNGKVHEIRESFGRTKLFLESGLSQQEVEEIEGVKKVILHEDNTLEITLEDPEAGKEIFTRATQFGYIPMFNQQPPTLEEIFKLKAGEIDA

SEQ ID NO: 57639 - protein, 417 aa, Enterococcus faecium
MEKLYDVIVVGAGTSGMMAAISAAEQGARVLLIEKNKKAGKKLLMTGGGRCNVTNNRPVDDLIAHIPGNGKFLYSTFAQWNNFDIMNFFESQGVHLKEEDHGRMFPVTNKSKTIIEALLNRLKELDVTLLFSTRVEKLIHKEHKIYGIRTEFEEFHAPAIILTTGGRTYPSTGSTGDGYKIVKRVGHTVTPLYATESPLISDEPYIQEKTLQGLSLQDITLRVLNKKGRVLTEHTMDLLFTHFGISGPAALRCSSFVNKELEKTGEPVTLSLDCFPTQTKQELIHILTEKSKATKKNLVNAWHGILPERLLVFFLERLEMDHLTGQQASQKQIQDFVQLCKEFKLSINKTFPIEKSFVTGGGVSLKEIYPKTLESKIIDGLYFAGELLDVNGYTGGFNITAAFATGHVAGMNAGQRA

SEQ ID NO: 57640 - protein, 186 aa, Enterococcus faecium
YYDEIANSLTEALYSTIRLLDEEKLNEAIKMITQSKNIYIFGVGSSGNTSLDLENMFLRVGVQAKAVLDPHFQAQVASLLTVNDLVIIFSLSGKTKDTYDSLKIAKKNGAKIIAITNYIHSPIGKSADLVLQTAIEEFLNGGSLAGKISQLYICDLLVHGYEQNNNIDSVELREKVLRSIIDKSIE

SEQ ID NO: 57641 - protein, 299 aa, Enterococcus faecium
MPEHKSGFVAIVGRPNVGKSTLLNRIVGQKIAIMSDKAQTTRNKIQGVYTTPEAQLIFIDTPGIHKPKHRLGDFMVEAAYSALKEVDAVLFMISADQKRGRGDDFIIERLKNVHSPVYLIINKIDKIHPDELLGIIEDYSTQMPFAQVIPISATEGNNVERLMDVLVSEMPEGPQYFPDDQVTDHPEYFIVSELIREKVLFLTRDEVPHSVAVVVDSMKRNENDKIHIQATIIVERDSQKGIIIGKGGKMLKQVGTKARKDIENLLGDKVFLELWVKVQKDWRDKKVYLQDFGYRKDEY

SEQ ID NO: 57642 - protein, 320 aa, Enterococcus faecium
MKRIGILTSGGDAPGMNAAVRAVVRKGIYEGLEVYGINYGFAGLVAGDIRRLDVADVGDKIQRGGTFLYSARYPEFATEEGQLKGIEQLKKFGIEGLVVIGGDGSYHGAMALTKRGFPAVGIPGTIDNDIPGTDFTIGFDTAINTVLESIDRIRDTATSHVRTFVIEVMGRNAGDIALWSGVAGGADEIIIPEHDFDMASVAKKIQEGRDRGKKHCLIILAEGVMGGNEFAEKLSEFGDYHTRVSILGHVVRGGAPSARDRVLASKFGAYAVELLQEGKGGLCVGIHDNEIVASDIIDTLENNKHKPDLSLYDLNNSLSF

SEQ ID NO: 57643 - protein, 114 aa, Enterococcus faecium
MIKGTFKRNDAGQIVSFTLTGHADAGPYGSDIVCAGVSALAISTVNGIASLAGFEPIVEMNEEEGGYLYTEVTSGMTQEQNNIAEILLENLLLGLQSIEAENSEYIQIKTINDK

SEQ ID NO: 57644 - protein, 278 aa, Enterococcus faecium
VKTILQLKKEFKLNLLLSIAQLAKSTYYYWVKKLDKPDKYSKIKQEITAIVKESRNSYGYRRVTLALKMKGYTINHKTVEKLMSQMGLTCQIRIKRYKSYKGTVGKIAKNVLKRNFSVDTPNKKWVTDVTEFKIKGRKIYLSPILDLFNGEIISYSISTSPTYKLIEEMLQQAIKKKGTEGSLILHSDQGWQYQMPQYQKKLKENNIIQSMSRKGNCLDNSVIENFFGVLKSEFFYREKFRSIEIFQSKLNEYIRWYNNKRIKLKLNGLSPVEYRKQS

SEQ ID NO: 57645 - protein, 648 aa, Enterococcus faecium
MTEERSLVERAKEYDASQIQVLEGLEAVRKRPGMYIGSTSSEGLHHLVWEIVDNSIDEVLAGFATKIHVIIEKDNSITVIDDGRGIPVDIQAKTGRPAVETVFTVLHAGGKFGGGGYKVSGGLHGVGSSVVNALSTQLDVKVYKEGNVYYQEYRRGAVVDDLKIIEQTDRHGTTVHFTPDPEIFTETTEFDFSKLATRIRELAFLNRGMRISIEDKREEEPVINEYHYDGGIKSYVEYLNANKTVIFPEPVYLEGEQQDIAVEVSMQYTDGYHSNIMSFANNIHTYEGGTHESGFKTALTRVINDYARKQKLMKENDDNLTGEDVREGLTAVISIKHPDPQFEGQTKTKLGNSEVRTVTDRLFSEHFMKFLLENPSVGRQIVEKGLLASRARLAAKRAREVTRRKGALEISNLPGKLADCSSNDPEKCELFIVEGDSAGGSAKQGRNREFQAILPIRGKILNVEKASMDKILANEEIRSLFTAMGTGFGEDFDVSKARYHKLVIMTDADVDGAHIRTLLLTLFYRYMRPIVEAGYVYIAQPPLYGVKQGKNITYVQPGKNAEEELKQVVASLPASPKPSVQRYKGLGEMDDHQLWETTMDPSNRMMARVSVDDAIAADQIFEMLMGDRVEPRRAFIEENAHYVKNLDI

SEQ ID NO: 57646 - protein, 62 aa, Enterococcus faecium
MKVKEIRELTTAEMLDQEKQLKEELFNLRFQLATGQLENTARIKEVRKSIARIKTVLREQAK

SEQ ID NO: 57647 - protein, 131 aa, Enterococcus faecium
MKKGKVINSDISRVIAQMGHFDKLSIGDAGMPVPFGTEKIDLAVSNGLPSFLSVLENVLEELEVQSIELAEEIKTMNPEILEKIKLLLPDTPISFIPHEEMKKELNNCHAFIRTGEMTPYANIILVSGVVF

SEQ ID NO: 57648 - protein, 169 aa, Enterococcus faecium
MLKKETMKYYLPIVLFFLMLIDGHLTRMLGEWSKGTYMSNAHFLILALLCCSMAFEKRYLLITTIVLGAIYDAYYIGVIGIYAVALPLIVWLMYVMKDVIHVNIFTEFFSMIIFVTGYELFTMVVQLIFKLAVVNNTYFITRFLGPTLLLNMIIFVLFIFPFKKLFSDE

SEQ ID NO: 57649 - protein, 279 aa, Enterococcus faecium
MEPIIELEKINYKYQPDDLRPALKDVSFTIDKGEWIAIIGHNGSGKSTLAKTINGLLLPESGIVKVGNQILDEENIWTIRQMVGMVFQNPDNQFVGSTVEDDVAFGLENQGIPREEMLVRVKDALEKVRMAEFASREPARLSGGQKQRVAIAGVVALRPDIIILDEATSMLDPEGREEVISTIKKIKEESQLTVISITHDIDEAANANRILVMRQGELVREGTPKEIFSAGPELIDLGLDLPFPEKLKSALKERGVDVPSEYMTEERMVDWLWTSVLNK

SEQ ID NO: 57650 - protein, 291 aa, Enterococcus faecium
  MISC_FEATURE (75)..(75): X=any amino acid
  MISC_FEATURE (138)..(138): X=any amino acid
  MISC_FEATURE (165)..(165): X=any amino acid
  MISC_FEATURE (267)..(267): X=any amino acid
MNGSIKKILRSIDKNLMITEVSYETLQKKKTLIVAAVLFPAPCVCRNCGSAVVDGNRKLMVVKNKKKETIVHFEXYNHMPMVIRLKKQRYTCKNCRSHWNAQSYFIRPRHSISNHVRHKITSLLTEKVSLFFISKSCXVSLTTVIRTLKELRSYLPKSSKRILSXVLRVCEFRSHVSVEDKLSFISADGETEKLIEKIYPTQKIPRLTNYFLSCTNPKEIEFLVTDMNATYFQLTKHVLPNAKLVIDRLLVFPRLSRRRNLYSRVGXSFPRQKTRLVFLLIDKEPLKLEKK

SEQ ID NO: 57651 - protein, 444 aa, Enterococcus faecium
MENQNKLYHFVGIKGSGMSSLALVLHEQGLNVQGSDIEKYFFTQRDLEKANITILPFNADNVKPGMTIIAGNAFPDSHEEIQRAKELGLEVIRYHDFIGHFIQNYTSIAVTGSHGKTSTTGLLSHVLSGVRPTSYLIGDGTGHGDPQAEFFSFEACEYRRHFLAYSPDYAIMTNIDFDHPDYYTSIDDVFTAFQTMAGQVKKAIFAYGDDAYLRKLKANVPIYYYGVTENDDIQARNIERTTSGSAFDVYHGDEFVGHFTVPAFGKHNILNALGVIAVAYFEKLDLKEVAEEMLTFPGVKRRFSEKIVADMTVVDDYAHHPAEIKATIDGARQKYPDKEIIAVFQPHTFTRTIALMDEFAEALDLADKVYLCDIFGSAREEQGNVKIEDLGAKIKKGGEVIKENNVSPLLDYHDAVVIFMGAGDVQKFEQAYEKLLSSTTKNVL

SEQ ID NO: 57652 - protein, 1061 aa, Enterococcus faecium
MPKRTDIKKIMVIGSGPIIIGQAAEFDYAGTQACLALKEEGYEVVLVNSNPATIMTDKEVADQVYIEPITLEFVSRILRKERPDALLPTLGGQTGLNMAMELAASGILEELNIELLGTKLSAIDQAEDRDLFKQLMKELNQPIPESEIVNTVEEAVDFANKIGYPVIVRPAFTLGGTGGGMCENEEELRIVSENGLSLSPATQCLIERSIAGFKEIEYEVMRDSADNAIVVCNMENFDPVGIHTGDSIVFAPSQTLSDHEYQMLRDASLSIIRALKIEGGCNVQLALDPHSFNYYVIEVNPRVSRSSALASKATGYPIAKLAAKIALGLTLDEMKNPVTGTTFAEFEPALDYVVAKIPRWPFDKFENGERLLGTQMKATGEVMAIGRNIEESLLKAVRSLEIGTHHIELPELADITDDDLIQKVVRAQDDRLFYVAEAIRRGYTIEELADLTKIDLFFLDKLLHIVEIEQQLKQQPLDDKILKTAKQNGFTDKKVAELWEINEEAVRQMRKENDLIPVYKMVDTCAAEFESKTPYFYSSYEYENESSRSEKPSILVLGSGPIRIGQGVEFDYATVHSVKAIQQAGYEAIIMNSNPETVSTDFSISDKLYFEPLTFEDVMNVIELEQPIGVIVQFGGQTAINLAEPLTAAGVKILGTTIEDLDRAENRDLFEQALKELDIPQPLGDTATSKEEAVVIASRIGYPVLVRPSYVLGGRAMEIVENQRDLEDYMEHAVKASPEHPVLVDRYLLGGECEVDAICDGETVLIPGIMEHIERAGVHSGDSMAVYPPQTLSESIKKTIEDYTIRLALGLNCVGMMNIQFVIHENEVYVIEVNPRASRTVPFLSKVTGIPMAQIATKAILGEKLKTLGYENGLYPETKEVHVKAPVFSFTKLQKVDTYLGPEMKSTGEVMGSDRQLDKALYKAFEASGLHLPEYGAVLFTIADETKEEALELAKRFTEIGYSLIGTKHTAAYFEKNGLVVETVAKISEEAAEKNVVDLIRDGKTQVVVNTIDKDRGNASKDGFIIRREAVEHGIPLFTSLDTADAIVRVMESRAFSTNPI

SEQ ID NO: 57653 - protein, 167 aa, Enterococcus faecium
MHETLGGIILDINEIRELVSQFDQSSLTEFDLREGQFELYMNKNKTSRGMNMVQTNETLPVSEPVNVISEQATTAPEIMKEKESAVFDGIEVVSPIVGIVYLQPAPDKPAFKKVGDQVAKGEVICIIEAMKLMNEITSEADGVITEILVENESVVEYGQPLFRIQQK

SEQ ID NO: 57654 - protein, 321 aa, Enterococcus faecium
MSETYYEAINWNEIEDIIDKSTWEKLTEQFWLDTRIPLSNDLDDWRTLSQLEKDTVGHVFGGLTLLDTVQSESGMDQLRKDVRTPHEEAVLNNIQFMESVHAKSYSSIFSTLNTKKEIEEIFDWTNTNPYLQKKAERINEIYKHGTPLEKKIASVFLETFLFYSGFYTPLYYLGNNKLANVAEIIKLIIRDESVHGTYIGYKFQLGFNELPEAEQETLKDWMYNLLYELYENEERYTEELYDPIGWTEEVKTFLRYNANKALMNLGMDPLFPDTANDVNPIVMNGISTGTSNHDFFSQVGNGYLLGHVEAMKDDDYLIGLE

SEQ ID NO: 57655 - protein, 113 aa, Enterococcus faecium
MEKELSTLDQYLIDPDWGKPKIEETSGRKIRRNLLTNEELAWDQDDLGNHVTIWDHVYLIHLSKHSNKPEYIYVIEDGLIDALEEYDRDNLIDISYYGPGKKYIAEMEAEFDE

SEQ ID NO: 57656 - protein, 273 aa, Enterococcus faecium
MNRFASKEEEKLYYEHKASEEEFLNWYQKQERPEYDKPSLTVDIVLMCYNKEEDQLKVLLIQRKGHPYRNSWALPGGFVQKDESTGESVLRETKEETGVVISKENIEQLHTFSTPNRDPRGWVVTVSYLAFIGEEPLIAGDDAKEVRWFTLERHSNKIHLSSGEVAISLDLVTGESSGKDTLAFDHSQIILKAFNRVVNKMEHEPQVLQVLGKDFTITEARKVFAKFLGIDYKTIDHSNFKKAMLQYFDEIGERPVGIGRPSKIYQLKPGHHE

SEQ ID NO: 57657 - protein, 89 aa, Enterococcus faecium
MRLDKFLKISRIIKRRSVAKEVADKGRIQINGKLAKSSSDVKVGDILKVQFGNKTLEVKITELHESTKKEDAQKMYEIISENRTETLEK

SEQ ID NO: 57658 - protein, 524 aa, Enterococcus faecium
MKKSLISAVMVCSMTLTAVASPIAAAADDFDSQIQQQDQKIADLKNQQADAQSQIDALESQVSEINTQAQDLLAKQDTLRQESAQLVKDIADLQERIEKREDTIQKQAREAQVSNTSSNYIDAVLNADSLADAIGRVQAMTTMVKANNDLMEQQKQDKKAVEDKKAENDAKLKELAENQAALESQKGDLLSKQADLNVLKTSLAAEQATAEDKKADLNRQKAEAEAEQARIREQQRLAEQARQQAAQEKAEKEAREQAEAEAQATQASSTAQSSATEESSATQSSMTEESSSATQSSATEESTTPESSTEESTAPESSATEESTTAPESSATEESTTVPESSATEESTTVPESSTTEESTTPAPTTPSTDQSVDTGNGTGSSTPAPTPTPTPEQPKPVTPAPAPSGSVNGAAIVAEAYKYIGTPYVWGGKDPSGFDCSGFTRYVYMQVTGRDIGGWTVPQESAGTKISVSQAKAGDLLFWGSQGGTYHVAIALGGGQYIHAPQPGESVKVGSVQWFAPDFAVSM

SEQ ID NO: 57659 - protein, 289 aa, Enterococcus faecium
MDIRFEQVDFTYQPNTPFEQRALFDINMTIKENSYTALVGHTGSGKSTLLQHLNALVKPTSGTVHIGERDIQPDTDNKNLKPIRKKVGIVFQFPEAQLFEETVAKDIAFGPKNFGVSEEEALVLAKETLEQVGLDESYLERSPFELSGGQMRRVAIAGVLAMRPEVLVLDEPTAGLDPQGRKEMMEMFWRLHKEQQITIVLVTHLMDDVANFADYVYVLEKGRIVNSGEPQEVFQNIEWLKEKQLGVPTATEFAEELMAKGMNFATLPLTAEELADAIVHYAGGNAHDE

SEQ ID NO: 57660 - protein, 406 aa, Enterococcus faecium
MTEYAIRLKDITKSYNMYAKPSDRFREALNPFKKSYHDVFYALKNVNVEIKKGEMIGFVGENGSGKSTMLKIITGVLTPTSGTMEIEGKISALLELGSGFNPEYSGYENIYLNGMVLGFSREEVDEMVDDIIEFADIGDHIYQPVKTYSSGMFVRLAFAVAINVNPDILIVDEALAVGDLEFQLKCMEKFTEIKNSGKTILFVSHDISSIRRFCDRSYWLKNGEVVEYGDTMEVTTNYENFLKKKSVKTVDRNKNQVERFAAPDIVDVTKAELLDKDKNPVDMLEQGEKLYVKVTYEVKDDTIKNPVLGIALRTVDNFYVCGLNTLLDGIKIPWKKGENIFYLEYEKLGLLAGEYYFDVAVFEENATVPLVYKTKYMNLFVSGSYIGEGIVVLDHKWEEGTHSNEI

SEQ ID NO: 57661 - protein, 804 aa, Enterococcus faecium
MSYNHKEIEKKWQKYWAKTNTFNTHDDPEKPKFYALDMFPYPSGQGLHVGHPEGYTATDILSRVKRSQGYNVLHPMGWDAFGLPAEQYALDTGNDPAEFTQKNIETFRRQINSLGFSYDWNREVNTTDPEYYKWTQWIFTKLYEKGLAYEAEVAVNWVPELGTVISNEEVIDGKSERGGYDVVRKPMRQWMLKITAYADRLLDDLELVDWPESIKEMQRNWIGRSVGANIEFKVAGTDKSYTVFTTRPDTLFGATYSVLAPELDLVREITTPEQKAAVEAYIEETAKKSDLKRTDLAKEKTGVFTGAYAINPVNGKEIPIWIADYVLSSYGTGAIMAVPAHDERDFEFAQTFGLEILPVIEGGDVEKAAYTEDGTHINSEFLDGMNKQEAIDKMNEWLEENGVGKKEVSYRLRDWLFSRQRYWGEPIPIIHWEDGTVTAVPEEELPLRLPKTKNIKPSGTGESPLANIEEWVNVVDPVTGKKGRRETNTMPQWAGSSWYYLRYIDPHNKKELADYEKLKRWLPVDIYIGGAEHAVLHLLYARFWHKFLYDIGVVPTKEPFQKLYNQGMILGENNEKMSKSRGNVVNPDDVVETYGADTLRMYEMFMGPLDASIAWSENGLEGSRKFLDRVWRLIVDENNKMRDRITTLNDGKLDKVYHQTVKKVTEDYENLHFNTAISQLMVFINEAYKVDALPYEYIEGFVQLLAPIAPHMGEELWAILGNDGGISYAPWPTYDEAALVEDEVEVVFQVNGKVRAKSNVPRDLGKDELEKAALANEIVQEYIEGKTVRKVIAVPNKLVNIVAN

SEQ ID NO: 57662 - protein, 536 aa, Enterococcus faecium
MTKYIFVTGGVVSSIGKGIVAASLGRLLKNRGLKVTIQKFDPYINVDPGTMSPYQHGEVFVTDDGAETDLDLGHYERFIDINLNKYSNVTTGKIYSEVLRKERKGEYLGATVQVIPHITNEIKEKIMRAAKMTDSDVIITEVGGTVGDIESLPFLEALRQMKADVGTDNVMYIHTTLIPYLKAAGEMKTKPTQHSVKELRGLGIQPNILVVRTEQPVSQSVKNKLAQFCDVEPEAVIESPDVDTLYSIPLVLQAQGMDQIVCDHLKLDTPEADMTEWKELEERVLNLKKKVRIALVGKYVELPDAYISVVEALKHSGFAYNSDIEIDWIKAQELTRENVEERLKDADGILVPGGFGDRGVEGKIEAIRYARENDVPFLGICLGMQMACVEFARNVVGLEDASSAETNPDTANNIIDLMADQENIENLGGTLRLGLYPCKIKKGTKTAEAYDGADVVQERHRHRYEFNNKYRQLFEEQGLVFSGVSPDNRLVEIVELPEKKFFVGCQFHPELISRPNRPQKLIKAFVGASLADHETK

SEQ ID NO: 57663 - protein, 215 aa, Enterococcus faecium
MNLILMGLPGAGKGTQAEKIIDAYGIPHISTGDMFRAAMQNETALGLEAKSYMDKGALVPDEVTNGIVKERLAEPDTEKGFLLDGFPRTLDQAKALDAMLKDLNKKIDAVIDIHVGEEILVERLAGRFICSNCGATYHKIFNPTKVEDTCDRCGGHEFYQREDDKPETVKNRLAINIKNSEPILAYYKEQGLLNTIDGAREIDAVFADVQKIIEK

SEQ ID NO: 57664 - protein, 428 aa, Enterococcus faecium
MNKTEYEQINETLYHEVLPNGLTVYLLPKNDYHKTYGLFSTNYGSIDNEFIPYGEKEKVKVPDGIAHFLEHKLFEKEDGDVFQLFGKQGASANAFTSFTKTSYLFSTTDQVEKNLTTLIDFVQAPYFTEETVNKEKGIIGQEIQMYEDDPNWRMFFGILNNLYPTHPLHIDIAGTVESIDKITAQDLYTCYRTFYQPSNMVLFVVGKMEPEKLMKLIRENQEAKNFPPKQEIVRYFPENTKEIIKQSALEAAITRDKFVLGIKGLDTLPQEGTELLRYKTAINLLFQMILGNTSRNYLAMYNQGIIDDSFGFEFSLDREFHFADFSGDTDEPEKAAEKVKEIILGFADDPEVSETNLDLLKKKMLGQYFQSLNSIEYIANQFTQSLFGDRTLFDLPEIIDSIQMKDVLAAGEAFISEEAFSEFYMRPK

SEQ ID NO: 57665 - protein, 339 aa, Enterococcus faecium
MKESVFQGRSLLAEKDFTKEELQYLIDFSEHLKDLKKRGIPHHYLEGKNIALLFEKTSTRTRSAFTTAAIDLGAHPEYLGANDIQLGKKESTEDTAKVLGRMFDGIEFRGFSQKMVEELAEFSGVPVWNGLTDEWHPTQMIADFLTIQENFGTVEGITVAYCGDGRNNMANSLLVTGAILGANMRIVAPKELQPEEEIVKMAEGFAEKSGAQLMITDDVDKGVDGADVLYSDVWVSMGEEDKFEERIKLLKPYQINMEMVEKTHNTDRLIFLHCLPAFHDTNTVYGEQMKERFGITEMEVTDEVFRSKYARQFDQAENRMHSIKAIMAATLGNLFIPRV

SEQ ID NO: 57666 - protein, 568 aa, Enterococcus faecium
MSFDGVFTHAMVNELRETLLSGRISKIHQPYENEIVLVIRSRGKNHRLLLSAHPSYARVQITQIDYQNPDNPPNFVMMLRKYLDGAILEDIEQIENDRVIHFHFAKRNELGDLQNIILIVELMGRHSTIVLVNRETGKILDAIKHIGSSQNTYRSLLPGVEYVAPPKQEVLNPFSSEKEKIFQRLSQTELDPKAIQRQFQGIGFDIAQELTKRLLERPNEKMVVWDEFFSAISHQPIPTFYETENKDFFTPIAYQVLSEQASAVTAYPTLSQLLDSYYHEKAEKDRAKQQGGELIRKIENELKRNKNKLKKREQTLKESENAENYRRNGELLTTFLTQVPRGAKEVVLPNYYEEDRPIKIALDPALTPNQNAQKYFHRYQKLKNAVKLIGEQIQEAKDEIQYLESVLSQLEIAGPMDIEAIKEELTSEGYLKKKNLKKQKRKKPSQPDQYFSSDGTLILVGKNNLQNDQLTMKTAKKTDYWLHAKNIPGSHVIIKSDKPSDETITEAAELAAYFSKYRYSAQVPVDLVQVKHIRKPNGAKPGYVIYENQKTIIVTPEEEKITAMKQNR

SEQ ID NO: 57667 - protein, 518 aa, Enterococcus faecium
MAIKAEEISALIKEQIENYQNVLSVEEIGTVTYVGDGIARAHGLENAMSGELLEFSNGSYGMAQNLESNDVGIIILGDFESIREGDKVKRTGKIMEVPVGEALIGRVVNPLGQPIDGLGEIVTDKARPVEAMAPGVMQRKSVNEPMQTGLKAIDALVPIGRGQRELVIGDRKTGKTSIAIDTIINQKGQDMICIYVAIGQKDSTVRTQVETLKKYGAMDYTIVVNAGASQPAPLLYIAPYAGTAMGEEFMYNGKHVLIIFDDLSKQAVAYRELSLLLRRPPGREAYPGDVFYLHSRLLERAAKLSDDLGGGSMTALPFVETQAGDISAYIPTNVISITDGQIFLESDLFYAGTRPAVDAGLSVSRVGGSAQIKAMKKVAGTLRLDLASYRELEAFTQFGSDLDAATQAKLNRGRRTVEILKQKLHAPLAVEKQVVILYALTHGFLDSIPVDSILDFEHELFEYLDTNHSDIFETIRTTKDLPEEEALNSAIQEYKDMFLATKGNNSSTEDKLKSIQNA

SEQ ID NO: 57668 - protein, 316 aa, Enterococcus faecium
MQEPMFLKPVFQEKIWGGSRLRSVFGFDIPNDKIGEDWAISAHPHGVSVVENGEFKGKRLDELWSEHKELFGHPSEPVFPLLIKILDAEDDLSVQVHPDDAYGMKHEGELGKTECWYIIDAEPGAEIIYGHHAKTREELAEMIKDGRWDDLLKKVPVKKGDFFYVPSGTIHAIGKGIMILETQQSSDTTYRVYDYDRKDAQGQTRELHIQQSIDVTTVPAKTPELQIKEVRKGNSSIVTYLETEFFNVYEWDIKGITSFKKQAPYTLMTVIEGAGDLVVDGKTYPLEKGTSCIIPNGVSEWAVQGELAIIASEPGK

SEQ ID NO: 57669 - protein, 274 aa, Enterococcus faecium
MSLQTEIINELGVKPTIDPKEEIRKSIDFMKAYLKKYPFLKTFVLGISGGQDSTLAGRLAQLTMEEMREETKDENYQFIAVRLPYGEQADEEDAKAALDFIQPDVSLRVNIKPAVDAQVQVLSEAGVGISDFNKGNIKARQRMITQYAVAGERAGAVLGTDHAAENITGFFTKFGDGGADILPLFRLDKRQGKQLLQALNAPEKLYTKIPTADLEDGKPMIADEVALGVTYNEIDDYLEGKEVPAQAQEKIEAWWNKTQHKRHLPISVLDDFWK

SEQ ID NO: 57670 - protein, 346 aa, Enterococcus faecium
MTDFNFFKADRVYNELFYQFPKVFIVSDEYKKMKDSTKIAYMLLKARLEIAISKRQIDEEGNVYFTYTTNELCSVLNCQKQKAIAIKKELESFGLLLQKQMGFNKQLGKNNPNRLYLAELKVSENDIYLLEKFDRENRENVDKSEGMKIIPTLDEKSDAESLGAQEGMKIIPCQNVDKSEGMKIIPELNNNILDTNRHNIDTEKDRLQDQLLLDNFETIMTNDSIATFIPERVLNLIKTFSSSYSEAQKTVQTIHNAKKKAETESGISIIFEELDSYYVNAEQELYTTLLKAYQKLKTEKVENIQNLIFVYVKNWFIEKPIAAKVSSEKRLNSESFPKTITKDWLE

SEQ ID NO: 57671 - protein, 337 aa, Enterococcus faecium
MINLGIIGTNWITHQFVQAALSTKKYELTAVYSRHLEKAQEFGSHYEGDIEFATDLKTFFNITHMDTIYIASPNSLHFSQAKQAILAGKNVIVEKPAFSTPKEMDEIIHLANEHNVYFFEAARNIHESGFKKIADYLPLKDEIIGANFSYMKYSSRYDQVLDGEEPNIFSTHFSGGALMDLGVYLVYAAVAWFGMPKEVHYFPRKISTGVDGLGWGILRYENFDVSIQPGKIGDSYLPSEIYFDSGTLVMNGVNAIEQAQFHDRAHKEIIDLAVTAAENPMADEAEDFANVMAHPKDPAWGLLYEEWIELARNVNQVIYDLRKNGGIKFDADNEEDF

SEQ ID NO: 57672 - protein, 72 aa, Enterococcus faecium
MAKEDMIEVEGTVVETLPNAMFKVELENGHQVLATVSGKIRMHYIRILPGDKVTVELSPYDLNRGRITYRFK

SEQ ID NO: 57673 - protein, 361 aa, Enterococcus faecium
MIEVSAPGKLYIAGEYAVVETGHPAVIAAVDQFVTVTVESARKVGSIQSAQYSGMPVRWTRRNGELVLDIRENPFHYILAAIRLTEKYAQEKNILLSFYDLKVTSELDSSNGRKYGLGSSGAVTVATVKALNVFYALNLSQLEIFKIASLANLAVQDNGSCGDIAASCYGGWIAFSTFDHPWLQEQETQHSISELLALDWPGLSIEPLIAPEDLRLLIGWTGSPASTSDLVDQVHRSREDKMVAYQLFLKNSTECVNEMIKGFKENNVTLIQQMIRKNRQLLHDLSAITGVVIETPALNKLCNLAEQYEGAAKSSGAGGGDCGIVIVDQKSGILPLMSAWEKAEITPLPLHVYSDQRKENR

SEQ ID NO: 57674 - protein, 712 aa, Enterococcus faecium
MQKKEIAVFIDQITRERATGDLLIVGWAIDEVTKEIPTIKVEKENVIAEATHVVRLDINHLYNLDVKTQSGFKVRLSGKMRGKAILDFQTARHQNGIAVKLNGKYPYDDGIESSWERKKRLLKKGINYARTHGVKKAIRRVKLELKPGSIDYAEWISRHEKPDLKEQRKEAQGFAYRPLISILMPVYNVEIKWLEKCIDSVLDQTYDHWELCISDDASTDPAIRKCLESYQAKDDRIKVVFRKENGHISLATNSALEIAEGEFIALLDNDDELPPFALYEVAKVLNVHPELDVIYSDEDKIDADGNRFDPHFKADWSPDTLMGNNYISHLGVYRTSIVKELGGFRKGYEGSQDYDLVLRVTEQIPADHIYHIDRVLYHWRTIPGSTASNGEAKSYIYDSGVKALTDALSRRNIKGSVRPGRISGFYEIAYDVLQEDLVSVIIPTKNGYEDLKTCVDSIIEKTSYSNYEIIIADNGSTDPKMQELFAEYKHQLKDRFIVELIDIPFNYSRINNLAAEKANGKYFLFLNNDTEVIEPDWMTVMVSYAQFDRIGCVGAKLFYPDDTTQHAGVLLGIGGVAGHALNNYDRTHCGYFGRLVIDVNYLAVTAACMMVKAADFNAVNGFDETLEVAFNDVDLCLKVYELGRYNVYAHQAELYHFESKSRGYEDTPEKQRRFAGEIKKMQDKWPAYIAHDPFYNDNLTKEGIGDFSLRPD

SEQ ID NO: 57675 - protein, 305 aa, Enterococcus faecium
MKTAFLFSGQGAQYQGMGKDLYEEAVVKQTFDEASEILGYDMAELCFTENERLDQTQYTQPAILTVSIAYYRLLKEHGIIPDAALGLSLGEYSALVASNALSFTEAVALVAKRGAYMTEAAPAGSGKMVAVMNAPIETIEESCHEASKYGIVSPANYNTPQQIVIGGEEKAVDEAVLLLKEKGFKRMIPLNVSGPFHTAILEPAAKKLAKDLSQIQFSEPSFPIISNTTTEIMKKETIAGLLEQQVMQPVRFYESIHKLKTIGIEQVIEVGPGKVLSGFMKKIDKTIPVLRVENKQTFDETIAIL

SEQ ID NO: 57676 - protein, 314 aa, Enterococcus faecium
MARRRRKSRGKKIFLIILAVLIVLVLAIVGVGAKLYLDLSHSIEKTYESVERTQGERTKPVDLDKQESFSVLLMGIDTGDLGRVDQGRSDTMMVATVSPEDKQTTIVSIPRDTYVDIVGHDTKDKINHSYAFGGAAMAMDTVQKYVDIPIDHYVSINMKGLKELVDAVGGIEVNNDFTFSQDGYDFPIGKITLNGDQALSYSRMRYEDPNGDYGRQGRQRKIVEGIAKKVLSLNGVSNYQSILNALESNMKTDMSFDEMKKIALDYREAFGTIKQDQLQGEGFMQDNISYQKVSDQELDRVKKELKDQMNLENK

SEQ ID NO: 57677 - protein, 490 aa, Enterococcus faecium
MNNTYPDDSLTLHTDLYQINMMQTYWELGRADLHAVFECYFREMPFNHGYAVFAGLERLVNYLENLTFNDSDIAYLRGLEVYPEGFLEYLQNFEFKATVRSAREGELVFANEPLIQVEGPLAHCQLVETALLNMVNFQTLIATKAARIKSVIGEDPLLEFGTRRAQELDAAVWGTRAAYIGGADATSNVRAGKIFGIPASGTHAHSLVQSYGNDYEAFMAYAKTHKDCVFLVDTYDTLKSGVPSAIRVAKELGDKINFQGVRIDSGDMAYISKRVREQLDAAGFTEAKIYASNDLDEATILNLKMQKAKIDVWGVGTKLITAYDQPALGAVFKLVSIEDDEGKMMDTIKLSSNAEKVTTPGKKQVWRITRNFDGKSEGDYVTLWDEDPREEEAIFMFHPVHTFINKTVRDFTARPVLQDIFIEGKRVYELPALNEIKEYTKENLDSLWEEYKRDLNPQKYPVDLSTECWNHKMAIMERMKKSVAELHTEA

SEQ ID NO: 57678 - protein, 200 aa, Enterococcus faecium
MRNPKPKEWLAKDYSQNYIADYKPFNFVDGEGVRNSLYVSGCLFACEGCFNKAAQNFRYGKPFTPELEEQIIADLRNDYVQGLTLLGGEPFLNTDVCLQVVRRIRKEFGTTKDIWSWTGYTFDELLQDSEDKLELLSQIDILVDGRFELSKRDLKLQFRGSSNQRIIDVQKSLESNQVVIWEKCTDATETYEQIKKQDLI

SEQ ID NO: 57679 - protein, 646 aa, Enterococcus faecium
MKKIIAITSCPVGIAHTYMAAENLEKAGKAVGAEVKVETHGSIGIENELTARDIEEAAGVIIAADTKIDKSRFGGKPLITVGVQEGIHHADELVRDILAGKAPVYKSTEAIISSENKSESENLGKKIYKSLMNGVSYMVPFVVTGGLLIAISLTLGGTATPEGIKIPEGTIWATMNSIGSIAMGLMVPILSAFIAQSIADRPGLVPGFVGGMLAANGALYGSDANAGFLGGIITGFLAGFIALGIKKVRVPKALQSIMPIIVIPILGSLAVGFVFIYVIGEPVALLFSSLTHFLAGMQGGSEIVLAMILGAMIAFDMGGPFNKVAFLFGSGLIAEGNYSIMGPIAVAICIPPLALGLASLILKTKFTKTEREAGKASLAMGLFGITEGAIPFASTDPLRVIPSIVIGAMTGSVIAMLSGVTDHVAHGGPIVAVLGAVDHVAMFFVAVIAGIAVTVLMLRILKPTLQQTAVAAANGVTVADLSETETSDVYTKTETFDSITDIMSDEAIVLGETATTKDGVIEDLVQRLEKTAAITDKTRFKEVIYDREHESTTGIGMGIAIPHGKSAYVLKPTVAFARSQSGVDWHSLDGKPAHMIFMIAVPENSQGDMHLKILQRLSRKLMDDDFRQALMEAPDKTTVHQLLSEM

SEQ ID NO: 57680 - protein, 475 aa, Enterococcus faecium
MEMEKKSTGISKWGLVALVVSSSIGSGVFGITSDLASSAAPGPAILSWIIVGIGILALVLSLNHLGEKRPDLDGGIFGYAEASFGKLGGFISGWGYWLSAWLGNVAFATMLMSAMGEFFPIFKGGQNVPSILFASIFIWGLTLLVNNGVEGASVINTIVTICKLVPLFLFLIFVFIAFKVNIFTADFWGNVSDNLVNGTGQQGTIWLQIKGCLMVMMWVFVGIEGASVLANRAKKRSEAQQASIIGLLCLLFIYILASILPYGVLSQEELATISQPAMANILKGIVGNWGAALINIGLIISIIGSWLSWTMLPAETTMLMARDGLLPKGWGKTNKKNAPTYSLVVTAILTNLFLLTFLVTDYAYQFAYSLCTAAILICYLLVGIYQVQFSLKEGIKKQVVIGGIAVVFELMGIILAGFSYVLLCSIAYLPGFCFYWIACRETKHQITGKEKVMIGLICVAALLSIGLLAVGWIKI

SEQ ID NO: 57681 - protein, 88 aa, Enterococcus faecium
MGFTDETVRFGFDDSRKKEVSETLAIVYRALEEKGYNPINQIVGYLLSGDPAYIPRYRDARNLIRRHERDEIMEVIVKDYLSNHGVNL

SEQ ID NO: 57682 - protein, 331 aa, Enterococcus faecium
MLEWSENKRQAMERLSTPEGIITALAIDQRGALKKMMSALGMEATKEKIEQFKTLISQELTPYASAILLDPEYGLPAAQKRAAASGLLLAYEKTGYDQTVPGRLPDLLSDCSVLRLKELGADAVKFLLYYDYEEAEEINRQKQVFVERIGSECMAEGLPFYLELLSYDAKNVDTKSLSYAKAKPRKVIEMMKEFSKTQYKVDVLKVEVPVNMSFVEGNATGEIAYTRQEAAAYFKEQSDATDLPYIFLSAGVSAALFMETLRFAKHAGARFNGVLCGRATWKDAVAPFVEKGEAATLEWLTEQGTQNIRQLNEVIRETAIPWYEKVSESTC

SEQ ID NO: 57683 - protein, 306 aa, Enterococcus faecium
MKIGVIGVGNIAEKAYLPTYAKKQGTLDFYFATRNKETKERIQKEYGFQHLYETIDELLEEKIEACMIHAATKVHYELAKKCLENGIHVYIDKPLSVHLNEVRELQELADKNQIILMIGFNRRFAPMVEELKRIPDKRLIHLQKNRIAAKETTEFVLYDLFLHLIDTAVYLLDEPILRTKYQIRETKEFLEYAILQLETQNQTAILTMDLASGANIEKYQVTSKNGTYEVNDLTQLVIQDADGKKVKEFGDWTNTLVKRGFEPMVEAFFSQIRLGKSETELLKQKEVVRSHELCEEVLKDHYRHQL

SEQ ID NO: 57684 - protein, 257 aa, Enterococcus faecium
MSVLEIKNLHVSIEEKEILKGVNLTMKTGEIHAIMGPNGTGKSTLSAAIMGNPNYEVTEGEILFDGKNVLDLEVDERARLGLFLAMQYPSEIPGITNAEFMRAAINAKRDENDKISVMAFLKKLDEKMALLNMPEEMAERYLNEGFSGGEKKRNEILQLLMLEPTFAILDEIDSGLDIDALKVVAKGVNEMRGDNFGALIITHYQRLLNYITPDVVHIMMEGRVVMTGNADLAKRLEAEGYAGISKELGIDYKEEEA

SEQ ID NO: 57685 - protein, 728 aa, Enterococcus faecium
MNEKEILRLQKELKRWENKYKKLQQVFRLQEEIIATYEAAYGEAPGLIEEEVQVKESEGNSSFFKMMEKRSYNRFNQEQKAAITYDMKKHLRIIAGAGSGKTQTICAKAVYLMTQKQVDEERILMITFTRNAANELKKRVDNFSQRKTAVHIGTFHSIFFRIYNEICRKFPEVAMQGIQGDFSKDTAQKVNAVLQQLIRKYNLYIFDQYGEKTIASRLDYWQNMNLSVEEMVQLVKEKYDSIDKNARQPISERLYGLLTELQEQKRSQQLLEFNDVLQNLKSALENEEIQHYIGQKYDYLFIDEFQDTNPLQWEIVKRMTKENRIKLIVVGDDDQSIYGFRGSEPAYIKNFEKEYPTKTLFLLTNYRSRAAIVQGANRLISYNKNDRIPKAMIPAQKEAGVMEAYLFSDTKAESQWLIKQIQTFIQKNGKYKESIILYRSASQTQQLVQSLLKTNIPFVLEADSPYEGIFGIKSFQHFYQKIVHWQTALNLQKKNQAYQQLLRQLMADCYLKKSECDQYFSPKYQNIAVADYILSISPNLKSKSAEIREFEEALRKTDQHQEIYSLVQSYLHLPRIAKEIDQSDQEWIREEVKQHATFRRLQALSQETQATAKELKTRLIAYRQGKLDALCIQSIHKSKGLSYRNVFLIGCNEGSLPYNGATEKKVIDFNEIKAEPVTTIEEERRLFYVAMTRARNRLYLCVPQMKNSRKLKVSRFIKETGSRVKKGK

SEQ ID NO: 57686 - protein, 681 aa, Enterococcus faecium
MKTIFAYLVDFHLGIESGIQYFILFINPIATTLLLLGIALYIRRPRVAYITMMVIYFLLTLLVFSNVTYYREFTDFITINTILGAGKVASGLGESAIRLFRPYDVIYWIDFIILTVLLIAKKIKLDPRPIRARMAFAISTLAVMIFSGNLFMAEADRPELLTRTFSRDYLVKYLGLNAFMVYDGVQTYQTNQVRAEASPNDMKEVENYVKEHYAAPNDDLFGLARGKNVIYIHLESFQQFLIDYKLTDENGLQHEVTPFINSLYHSNSTFSFDNFFHQVKAGKTSDAETLMENSLFGLNQGSLFTQLGGKNTFQAAPDILSQTQGYTSAVFHGNAGTFWNRNETYKNLGYDYFFDSSYYDVNDDNSFQYGLHDKPFFQQSVQYLERLQQPFYSKFIAVSNHYPYSKFTNDEAGFPLANTNDETINGYFATANYLDTAVQEFFNYLKESGLYDNSVIVLYGDHYGVSNSRNKNLAELVGKTSSTWTNYDNAQMQRVPYMIHIPGQTQGGINHTYGGQVDALPTLLHLLGVDTKNYIQLGQDLFSKDHEQLVSFRDGDFVTPKYTYYGGTIYSNETGEAITEPTEEVQNEIDSLKEKVDKQLAVSDQINNGDLLRFYTNSGLDPIDTSDYDYKNGLEKLKEAEKSLGDKSTSVFSEHNGQSTVDLYKTQTYQELHGTTTSSSE

SEQ ID NO: 57687 - protein, 406 aa, Enterococcus faecium
MVKFIHAADLHMDRSFEGLTTLDKTVQEKLLKTNLTVLSNIIEQAIINNVDFVLLAGDNFHQNRPSLKIQKHFSEQMKRLEKNHIPVFIIFGNHDFYQKERYWFSFPKNVHLFTSETVETKKITIKSGETVSLSGFSYRQPWIQKDKVMEFPSRELTDYHIGLYHGEPGVSQKGNYAPFQPSKMQEKGYDYWALGHIHVPTVLNEKQTIVYPGAPQGHTKKEQASTSILLVELSKGSCQIHPIKVAEVYWKTKEISLRKARTTKEVIVHIRQQLSKVEDGFSLIEIKLKDYDHLNTDVLERIQSGELLDYLLEEFSDRINDFFIWRISLIENTFYTKTPLAASAKLMEQLFQYYQTPQDFQQILNEVYSHQEAARILSELPEYQEETLEKAKQLLNQDFLFEEDQE

SEQ ID NO: 57688 - protein, 815 aa, Enterococcus faecium
MAQKKRPTKKRKKTKKTKKQKQQQEQMLTIGVGFALILFAVFGFLKLGFLGILIANGFRIIAGNTYQILCLLLAVLGFWIVIKNTEFSIGKNRRWFGGILFYFGILLLLHAHLFGKLHTGEPNIMGTTWDLLASDIKQSQVDNNVGGGMIGAILYHFTYFLIAQPGSYLAAVLLLAGGAFLFSNLEGYQLLNGIQSIGERVQELLEGDPAKQARKQAAKEERMKQRAEAKEARRLAAKEAAEKEAAEYEKKKAVSQQRENTADEWQEPENTEPEQLSFVPIDSFQENIHPANLEKPVPDTPKQTNTAEGFSDELPEDDGTSLEFEIEAEQENQDYELPTVDLLDSIPTVDQSDEYKKIEKNIGVLEQTFQSFGVDAKVVKASLGPSVTKFEVQPAVGVKVSKIVNLTDDIALALAAKDVRMEAPIPGKSLIGIEVPNGKISMVSFREIIEAQPNHPDKLLEVPLGRDVSGRVQTADLSKMPHLLVAGSTGSGKSVAINGIITSILMRAKPHEVKLMMIDPKMVELNMYNGIPHLLTPVVTNPRKAAQALQKVVQEMEERYEKFAATGVRNISGYNEFVQQKNLENGTKHPTLPFIVVIVDELADLMMVASNEVEDAIIRLAQMARAAGIHMILATQRPSVDVITGIIKANVPSRMAFAVSSGTDSRTIIDSNGAEKLLGRGDMLFLPMGENKPIRVQGAFISDHEVERVVQFVTDQQEAHYEEKMMPTDEVETTGAPEQPQDELFEEAKALVVEMQTASISLLQRRFRIGYNRAARLVDELEAHGVVGPSEGSKPRKVFIEQEETSETLPDDNDM

SEQ ID NO: 57689 - protein, 235 aa, Enterococcus faecium
MALTPLDIQNKTFPTKMRGYNQDEVDDFLDLVVRDYEELTQRNRELEKAVKHSEEKLEYFNELKDALNQSIIVAQDTADKVKTSASKESEVIVTSAQNKADELVANAEKRAHQLTTDAEEKARKILTDATEKARQLATETEDLKKKTRVFHQRISLMLESQLEQVKSPEWDEILQPFSSYVTDSHEVIKEVLAKQLDNENDTDVNSDTGVIEAPMTAFDTQAIDISIVPGENENE

SEQ ID NO: 57690 - protein, 140 aa, Enterococcus faecium
  MISC_FEATURE (2)..(2): X=any amino acid
IXIFNYERMDILLQKEPGDEERMIVKRIIGMPGDTVKMENDQLTINGKKYDEPYLDEFKKEFSEDKLQGEYAYSSGFQAQAESSSTFTSDFEYTVPKGKYLVLGDNRLISKDSRMFGLVDKDMIQGKVVFRYWPLSEIKI

SEQ ID NO: 57691 - protein, 144 aa, Enterococcus faecium
MLVPKRVKHRREFRGKMRGEAKGGKEVAFGEYGLQAVDSHWITNRQIEAARIAMTRYMKRGGKVWIKIFPHKSYTAKAIGVRMGSGKGAPEGWVAPVKRGKIMFEIAGVPEEVAREALRLASHKLPMKTKIVKREEMGGESNEG

SEQ ID NO: 57692 - protein, 499 aa, Enterococcus faecium
MLETLQPTMKLNRRDSVVVALTPIPKQTQLTIDQQTITTLEDIPQGHKIALGDLKAGDNVIKYGYPIGHVTTDVTAGQWLHTHNVKTNLSGELDYRYEKDVHPSHYLFENRTFQGYLRKNGKVGIRNDLFLVPTVGCVNGIAELIVKQFKEKHPDLGQFDHITILKHPYGCSQLGKDHQNTREILADAVNHPNAGGVLVFGLGCENNTVPEFKKILGEYDEERVKFLVAQDVYDEIEQGVALLEELLTAAENDQRISVPLSKLNVGLKCGGSDGLSGITANPLLGAFSDYLIAQGGSTILTEVPEMFGAEQVLMARAENEEVFDSIVDLINDFKQYFLSYGEPVYENPSPGNKAGGITTLEDKSLGCTQKSGSSPVVDVLQYGEKIRKPGLSLLQAPGNDLVAASALASSDCQLVLFTTGRGTPFGSYVPTVKVSTNTTLFERKGHWMDFNAGVLLEQPMEVILESFVQKIIAVASGEETKNEQNDVREIAIFKNGVTL

SEQ ID NO: 57693 - protein, 508 aa, Enterococcus faecium
MSNEKNVLFTIFGGTGDLAQRKLYPSLFRLYRKGNLGEHFAVIGTARRPWSDEHYREVVKETIRALNPSDEEATTFASHFYYQSHDVNDSTHYQTLKELSDRLDGHYQLNGNRVYYLAMAPQFFGTIVSHLKSQNIMTKNGFNRLIIEKPFGSDYQSAFELNQQIREVFPEQDIFRIDHYLGKEMIQNISAIRFANNIFEAQWNNRYIDNIQITFGENLGVEDRGGYYDHSGALKDMVQNHILQVVALLAMEPPVAFSEKEIRTEKIKALKAIRIYNEEEVLENFVRGQYAQGELDGVQFKGYREEDKVDAQSETETFVAGKFTIDNFRWSGVPFYVRTGKRLTEKGTRINIVFKQVPVNVFKTSVDEPCDDTTLPPNVLTIYIQPTEGFSLSLNGKEVGQGFETEPIKLEFRNSAEMVENSPEAYEKLLLDALNGDGTNFSHWEEVAQSWHIVDVIRKAWDQTQPDFPNYKAGSMGPKAAFELLEKDGFEWIWQPDNWYRERGKLND

SEQ ID NO: 57694 - protein, 394 aa, Enterococcus faecium
MSMNHFIKQLFTIKDSNIQIQSFEETFYKSRKSIVIEGTLIRTYRRCPCCKDSTKQIVKNGKKISMILLNRSGNKRTYLRLKKQRYLCRACKKYFTARTYLVTPFCFISKQIHYKILEELTERQSIKAIGKHCDVSVTTVQRTLSALSSDIRQNLEYLPRCLLFDEFRSLSTWHGKFSFSCMDGETGKLFEILPSRRKKDLVAFFMRFSLKARLGVHYIVTDMNAPYFSLVKECFPNAQVIVDRFHIVQHLNRFFDAVRKRVMKTLDQKDPIQAKQYRQLKSLFKLLLKSEDRLDYNTLTKRRNFNWRLLTETEVVDRLLKISPELKTAYRYYQDLLTAYQEKDPDTFFQLLRAMPGEVPLELHHIKKAFFKYEKGIRLALLKKYSNARLENLH

SEQ ID NO: 57695 - protein, 178 aa, Enterococcus faecium
MSWFTRAIDAAKRNDPAARSTAEIVLTYPGFHALFWHRFSHFLYQHRLFLLAKINAQFWRFLTGVEIHPGATIGTGVFIDHGMGIVIGETAEIEDDVILFHGVTLGGTGKETGKRHPTVKQGAMLSANAQILGPVTIGKNAKIGAGAVVLKDVPDDATAVGVPAKVVRIKGEKVRRSE

SEQ ID NO: 57696 - protein, 59 aa, Enterococcus faecium
MAELKVTLKRSIIGRPQNQRDTVKALGLTKINSSVVKPSNEAIKGMINTVSHLVDVEEI

SEQ ID NO: 57697 - protein, 239 aa, Enterococcus faecium
MRLDKFLADMGLGSRKEVKGLIKKGTIEVNGQVVKSDKAQVNEFEDAVTYLGEIITYQKDFYYILHKPAGVISATQDNHDQTVIDLLEDQDYREDLFPVGRLDKDTEGLLILTNDGVFAHQLLSPKKHVEKEYLAEVSGIMTEEDIRLFAEGLIIDGDEQTLPAKLQIDQVDQETETSIIRLILHEGKFHQVKRMVKAVGKEVLYLKRIRMGKFWLPKDLNKGQYRPMTKEELEQVREK

SEQ ID NO: 57698 - protein, 264 aa, Enterococcus faecium
MITSDIKNADEYVRKVDKSQIPTCNIMGVNIAAINMEWLLEYLEKNIDLLHGDYICVSNVHTTVTSFEEPDYCAVQNGGIMAIPDGGPLSTVGRKRGYKNMERTTGPSLMGKIFKVTNEKGYRHFFYGSKQETLDLLEEKLKVYYPGIQIAGMYSPPFRPLTEEEDKAVIKMINAVKPDFVWIGLGAPKQEKWMAEHQGKIDGLMIGVGAGFDYYAGNIQRAPQWMQKWNLEWMYRLIQDPKRLFYRYWHTNTKFILNAVIRRK

SEQ ID NO: 57699 - protein, 185 aa, Enterococcus faecium
MNGLFITIEGPDGAGKTSILNELYPLLKEVAKTEIIQTREPGGIPIAEEIRAVILDPKNDRMDERTEALLYAAARRQHLVEKVLPALAKGKIVLCDRFVDSSLAYQGAGRRIGVTEIARLNEFATEGTTPDFTLYLDVDSDTGLRRIKKYRQNQIDRLDSEGLEFHQRVRHAYLKLAEENPERIH

SEQ ID NO: 57700 - protein, 97 aa, Enterococcus faecium
MLLSMNLQLFAHKKGGGSTSNGRDSESKRLGAKRADGQTVTGGSILYRQRGTKIYPGVNVGIGGDDTLFAKVDGVVRFERKGRNKKQVSVYPVAQEA

SEQ ID NO: 57701 - protein, 535 aa, Enterococcus faecium
MDTPGHADFGGEVERIMKMVDGVVLVVDAYEGTMPQTRFVLKKALEQHITPIVVVNKIDKPSARPEHVVDEVLELFIELGADDDQLDFPVIYASALNGTSSLSDDPADQEPTMAPIFDTIIEKIPAPVDNSDEPLQFQVSLLDYNDYVGRIGIGRVFRGTIKVGDQVALIKLDGTVKKFRVTKLFGFFGLKRLEIQEAKAGDLIAVSGMEDIFVGETVTPVDHQDALPILHIDEPTLQMTFLVNNSPFAGREGKFVTARKIEERLMAELQTDVSLRVEPTNSPDAWTVSGRGELHLSILIENMRREGYELQVSRPEVIEKEIDGVKCEPFERVQIDTPEEYMGSVIESLSLRKGEMQDMVHTGNGQIRLTFLTPARGLIGYSTEFLSMTRGYGIMNHTFDQYLPMLPGQIGGRHQGALVSIDTGKATTYSIMSIEERGTVFVEPGTEVYEGMIIGENSRDNDLTVNITKAKQMTNVRSATKDQTSVIKKPKQLTLEESLEFLNDDEYCEVTPESIRLRKQILEKNAREKASKKKK

SEQ ID NO: 57702 - protein, 444 aa, Enterococcus faecium
  MISC_FEATURE (44)..(44): X=any amino acid
  MISC_FEATURE (60)..(60): X=any amino acid
  MISC_FEATURE (68)..(68): X=any amino acid
NADPESQSLLAQILLLIVLTLINAFLAASEIAVVSINKNRIEHXADEGRCGNARYSLFKXYSPEIPLXMLPYATRVPKLGITLVNILSGASLANTLSERLAPVLGGGTAAKNIANIIVLAILTYVSIVFGELYPKRIALNKSEEVAKFTSGLIRLIGVVAKPFVWLLSASTSLLARITPMTFDDEDSKMTRDEMRYMLENEGVLNNEELEMLQGVFSLDTKVAREVMVPRTDAFMIDINDTVEENVNEVLSENYSRIPVYNEDKDKVVGILHTKNLLKAAHKFGFDNLDIKKIMQEPLFVPETVFIDDLLYEMKKTQNQMAILLDEYGGVVGLATLEDLLEEIVGEIDDESDEVENLYEKIDEHEYIIQGRMLIDEFNEAFDSDLHMSDVDTMAGYLITALGMIPDEGEKLSFDVDNITLVSEEMEGSRILKIRVIFHDPEETE

SEQ ID NO: 57703 - protein, 70 aa, Enterococcus faecium
MTNATVYVQAIQEKLHQKDQGQEEFLQAIDEFMPTVMSFLDTHPEYIEKNILELLTEPERVIHISSALAR

SEQ ID NO: 57704 - protein, 1055 aa, Enterococcus faecium
MNQCVKKLIASILFVFPLLMVTSVFADVEKTNESTQSENQSFDKTTFSEESITSETTESQSEASTNKRQEENKTSETSEVAEQTSDSSEAALARAVSADGYSEAATTEELAQLLADESVTKIRLIQPLTLDRELEIKRDIVIDFGGFAHNFGTHHIYINEIPQSIEFQNFKGTAAHPGGLTPNIDGNAIIIAYMTDFWGSRYHFTGEIKFTGTLDLYDGSKLGLIYAPRATVTLDGVSGVLDVQPVKEGLNAAPGKAYFCRSYQLNVINGSQLYGPYLGKFYGFLDSGDETGSGKTAPGIHILSGSKVSLDYDRADGVSDEGEAVDTLPGNVMFEVSGSGSEFSVNTKINITNDNNRGIIQMRGSGSKVTVSNGGKITINTATTGGFRLQGDSSQIHVSSGGQISVKMAGDDDQPGNNGMRFVGKGLSLIVEGAGSVIDIDKQSGRSSAVRFENGTQKLTVTNGGSLRVRNTGDGKSYVNRLNQGNQAIQFYDASGFLESPGSADFTVTGEKSNIDIRADSGATVDTTGDIDLNFTAGEKTYLVMVGKTGEDKTGIISGDVLNVDLESPTYFDFQNKRIGSETNGIGGWVFQGNGDSSLKIAHSEIALWRKTGATFDNFEKDPDYFSDMTDLSINGTDLGNFVSSPSAGLTNEFAQTGAGMKNYNRISANNQLPMIESLRVPTNADKKIYGHVVVPEGVEAKPRDAWTGEVEVTLRITYADTTKSSVEITALTQGQTDENEGAGYNPWGEGEQGGLFEVQVPNDERLKTEDQVQVVAAKKVRGGQEVTELDSAKTTVDVIPPEPANLSTTLINAASRTITGTGEAGALVSLKKNQAVLSETTIDDTGEFVLSIPENQLFAGDVLEIVLNDQAGEATAKGVQNKPSTNDEIGNHNPSDTPVVYHDAPPFAPATKIVVEGGLSFLAPSKLDFGQIKATGLTQEAFGQMDIQEKLWIYDQRETKNPWILTIKLSQPFTNDAGFSMQDVLYFKKGEEYQLVNEEELEIVRGQNSTNVQADYSEYLNNGRAFKLVLTKENQIAGNYSAEITWTLADAPTE

SEQ ID NO: 57705 - protein, 265 aa, Enterococcus faecium
MLTVTRISKGKGPFYRVDLSEGEALQVSEDVLVRYRLLKGRELDEETIQEIKKSSGADFGFHLAMNYLSYQLRSEKEIRTYLKEKEILQEDRNKIVARLKELDLVDDLVYGESYVRTNMRLSDKGPKKLAQQMQQKGLKPEIIEQALSQYTFEDQVQNAHQTAEKAFGKNHGKSQKELLRKIQQTLMTKGFSQEVIQQAIADLPQEADQEIEYDYLVKQGDKLWRRNLRFEPKKRNLKVKQSLYQKGFDLDMIQRFITEKEEESE

SEQ ID NO: 57706 - protein, 557 aa, Enterococcus faecium
MDGIIKQIEKGKPFFEKISRNSYLGAVRDGFLTAMPAILFSSIFILIAAVPEIFGYQWPESVSTWLWKVYNYSMGVVGLLVSATTARCLADSMNRRLPKNKVINTTSVMLASVVSFLLLSVSPIEGGFSTEYMGTKGLLASFVAAFLTVNLYKFCVLKDITIKMPKEVPGTISQTFRDIFPFSFSVFAAVLIDLGIRQIFQISFAEAIITVLQPLFTAADGYLGIAIIWGAMALFWFVGVHGPSIVEPAIAAIIYANVETNLQLFNSGEQASKVLTVGLGNFVGTMGGTGATLVVPFIFLLFAKSKQLKAVGKASFIPVSFAVNEPLLFAAPMILNPYFFIPFLLTPVVNVCLFKFFVDVLGMNSFMYVLPWATPAPIGLVLGTGMGILAFVLAAVLIVVDFLIYLPFCKAYDAVLVEKEAQKAEVIATEEGASADVREEVPVAASQVISDANKEINVLVLCAGAGTSAMLANALKKGASESKAPISAMAGAYGSHYEMLQDFDMVVLAPQVNSYYDDIKEDTDRLGIKLVATKGAEYIGLTRDPEKAVQFILNQFQ

SEQ ID NO: 57707 - protein, 806 aa, Enterococcus faecium
MLVSYKWLNRYVDLSNVTPKELADKMSVTGIEVEGVTVPEEGLKKIVVGEVKECVPHPDSDHLSICQVDIGEDELSQIVCGAPNVKVGIKVIVALPNSRIAGNVKIKKGKMRGQVSNGMICSLQEIGYSDSVIPKEYAEGIYYMPQEAVNGDPVFPYLDMDDSIIELSITPNRADALSMRGVAYEVGAIYRQTPTFDDEKLVESSRPASDKIQVEVEDKEAVPAYQIRIIEGVRIQPSPQWLQNLLMNEGIRPINNVVDVTNYILLLFGQPLHAFDYDKLKSKEIFVRRAKENETLVTLDGESRELTTDNLVITNGKEPVALAGVMGGLDSEITNETTTVALESALFDPISIRRTAKQFNLRSESSARFEKGINHATVGEASEVAAAMIVSLAGGEVLQGAVKGSEIKAEDVSVKISLERINQYLGTSLVVKEVNEIFEALGFSYEEKEHVYSVVVPPRRWDIQIEADIIEEVARIYGYDQLPSTLPSGETVAGSLSKEQETTRKIRTIFEGSGLSEAISYALTTEEKSRQFVINESNITRLDWPMSEERSVLRMNLISGLLDDISYNTARKNTEIALYEIGRVFFQENDPCTHLPQEVKHAAIAVSGIWEEKDWQTKAQNVDFFTIKGLLENLFEQLGITEDVHYQTVTEMKEMHPGRTAAIYLGEKFIGFVGQVHPTIAKSYDIPETYVAEFDLSAVVEAAQKGIVFEAVTKFPAVSRDIALLVKETVTNQELTEVIRSAAGRFLTDIQLFDVYQGENIEKGHKSMAYSLTFVNPEATLTDEEINKGMEKVEKALVENLEASIR

SEQ ID NO: 57708 - protein, 156 aa, Enterococcus faecium
MGLSKLDNLYRQVILDHSSHPHHRGSLTDSTSKIELNNPTCGDVIELQVDVKDGIIKNIAFDGSGCSISTASASMMTDAVIGKSIEEAEHLTVDFLQLVQGKEVKDPDQLGDAAMLGGVAKFPARIKCATLAWKALGKAMENDGTAAFHHYHKEEE

SEQ ID NO: 57709 - protein, 194 aa, Enterococcus faecium
MAKKVMGQDGKMYKVSKPFYKKVWFWVLAVILIIIIGSALNGGSDSNKASDNGGEKVTKSSTSASSSKEEKSDTFYKIGDTVKVGDAEYTLNSVELTDERNQFEENQPAQVVKITYTVKNDGDSDIPVGTDVEVYGPDDKKSETYANENTMGSVAPGKQMDVTAHFTLNQKGEIEIHFSPLVSFEKAAIFKATV

SEQ ID NO: 57710 - protein, 201 aa, Enterococcus faecium
MSVSLEVSKREVRPRSLRNKLRHEGKVPAVVYGYKVESTPISFDGLTLSKLLREHGANTVITMDIDGQKVNTLVHKIQTNTFTNHFEHAEFLSVNMSEETEVETEVVLVGESVGAKSGGVLAQNLYTVVVSATPDKLPERIEVDVTNLELGDSITVADLPKNDDYKFVTDSEEQIAAVVAQSEEESTGEGGEPEVIGSTEE

SEQ ID NO: 57711 - protein, 225 aa, Enterococcus faecium
MSAKQNEQQNVEHKTEIAKKKSSAEQETTVTEELTAALEEIVEEPKAEKVKGELVTLLDDSNFLIGERHYRLVSDYREGFNAEKLGERYSDVLARYDYIVGDWGYEQLRLKGFFQADNRRAHPDQRIDSLEDYLYEYCNFGCAYFVIERIGGKKEKTTQRRKKKKNHNRAYIDEKKGPVASNRKKPVIKNRKTESAKTSEKVKKQEQPKQVEKTKTAFTIRKREE

SEQ ID NO: 57712 - protein, 1175 aa, Enterococcus faecium
MSLQFILGNGKKDHRQVLIDEASAWLDQDASNQVFFLVPNYSKFEQEQEILAEMRRRSGKKAFSTTNVQVFSFYRLAWYLLQQTTLLTGNELSESGSAMILRQILEKNEEELTIFRGEINKRGFIRQLQELYSELRTGNIQPEDLMLLFGDSPNAEDQQLKMKDLKLIFSAYDSELTQRALTNEDALSILANYMQTQDFNNVKFIVSGFSRINGQEYQLLQAMMEKGQLVVDLLLDRPYTADLPEVLTLFHETGKLYFRLFQSARERKVPILVDRFAPEQTRPTELQLLQTMWEETSSQKKAAVHKLGGQEHLHLWEAENPTEEVRQLAVEIRRLVSEENYRYRDIQVLTKNMSLYGNILRPIFQEMAIPFYIDEEQMMENHPLIEWINSLFALDRYSYRLSDIMRFFKTELFLSTEAETELDEWKQERDEFRKKLDITENVALAYNYQGTYWTREKDWQFVAYDFEAEQIEDVQYLEEQSNTIRRLFQKAVPVFLKKIKKSKTGQEAANVFYQFLIQSGVQQQLLFWRNQEVDRGNLEAARNHEQTWGALIDLLDEYVVIYGESAFDWSLFQEIITSGLENLSYGKIPTAIDQVRINRLELVRPNQAAVTFALGLNDQVFPDRKETKGLLSSEEREVLNQALPDGQFLFDPSKESISFEPFQAYLVFLSGTDRLYLSYAQSYDTDGSLKMSPYLRRITEYLSVPVERKEHLTIESDPNCYVGTYRSGINTVNRIYRLALDEKKPVPKHWQKLKELVLNSSWRNFALQIFESQEHLNVPVSMPEKMAEELYGKEIYTSISRMENFYNCEYKYFMQFGLKLKERTVYGLTPAATGDFYHESLDRFFKLLFSNQLSLVNMSDTQRRDFTEKVLQEVFGELRFEILDSSARMNYIRYQLGQTIQKVAWALQKQSKNTGMHPLQTEILFGQIAGAKGITGLELPLSNGGKLHVRGKIDRIDVASEQEDTWLSVVDYKSSGRSFDVTEAYYGMAMQLLTYLDVALMDAVRLTGKAAVKPAGSYYLHVHNPVLTETDDVEKNTLKKFSYDGVFVDDPALLEVLDHSLEAKEQSLIYPVKKNAKDEYQKGSFSKDKFFTEEELQLFMAHNRENMRLAGDAITSGEIKLNPAYKDKQRIACEFCPFRSICTFDVMLKENNYHRLEKIDKEEALRRILKRSEEE

SEQ ID NO: 57713 - protein, 562 aa, Enterococcus faecium
MKFVSTIKIIPLGGVRENGKNMYVAEVGEDIFILDCGLKYPENELLGIDVVIPDFTYLEENIDRVAGVFLTHGHADAIGALPYLLSKISVPVFGTELTIELAKLNVSRNEAAKGFKDFHVVDEHTEIDFGETVVSFFRTTHTIPDSVGINLKTKEGSIVYTGDFKFDQTAIPMYQTDYARLAEIGKEGVLALLSESANAENPQPVASEAQIADEVFDTIKYWEGRIIVACVASNLQRVQQVLDAAEKAQRKVVLTGQDFERIIRTAMRLEKLQLPSEDLLVTLKDMKNYDPEELIILETGRMGEPIKSLQKMANGTHRNVKIEEGDLVYITTTPSIAMETIVAKTEDIIYRAGGTVKLISENMRVSGHANPNDLQLMINLMKPTYFVPVQGEYRELAAHADLAHAVGMPYKNIYITGRGDVLEYKNKRMSVAGTTSAENVMIDGLGIGDIGNIVLRDRKILSEDGIFVAVVTISRREKKIISKPQITSRGFVYVKASRDLMKESSNMIETIVEKHLESNDFEWSKLKQDIRDQLGRYLFEQTKRRPVILPVIMEATQRRNKK

SEQ ID NO: 57714 - protein, 315 aa, Enterococcus faecium
MKTVILAEKPSQAKAYADSFSKTTRKDGYFEIQDRLFSGETVITYGFGHLVELDSPDMYDENWKQWSLEHLPIFPTHYRYHVPKDKKKQFNVVKQQLQSADTIIIATDSDREGELIAWTIIQQAGADQGKTYKRLWINSLEKEAIYQGFQQLRDAGETYPKFEEAQARQIADWLIGMNGSPLYSLLLQQKGISGSFSLGRVQTPTLYMIYQLQEKIRNFKKEPYFEGKAQVTAQNGTFDAKLDPNETQVTQEAFEAYLKEKGVQVGQQPGMILEVETEKKSAASPRLFSLSSLQSKMNQLMKASAKDTLEAMQGL

SEQ ID NO: 57715 - protein, 349 aa, Enterococcus faecium
MFTMQDYIYEEKEVLSTILKKNDFSTREHMKKTVNLLILATGSSYNACLAAKPALESYGDLTVDIQEPFYFFNYGKLSPSIDTVIAVSQSGKSASTVEAVKMIQKQGLPVVAITNDVQSPLALEAAQIIDLGAGVESVGFVTKGYSATVLQLLLLGIGIGISKNKISKKIEQDYMQQLRKIINHLPAIIQKTEEFFDGYQSLFRLAQRFVTIGYGPNWGTAKEAETKLTETIRVPSQGFELEAYMHGPYLEADASHLLFFIEGESVNKERSQKLQRYMSRYVGETLTITTKKARNEKTLGLAIECDEYLSVLALVVPFQLFAYKTAVAKGIDLNKKIFEDFDTVLKSKL

SEQ ID NO: 57716 - protein, 387 aa, Enterococcus faecium
MPKKVKKRHLLDYSILIPYLILCVLGLIMVYSSTSYLLLENGQNPSASVINQSIFWVLSLIAIALLYKMKTDVLKNQRLIMAAIAVLTILLLIVVFFGKEINGAKGWLQIAGFSIQPAEYLKIISIWYLSLTLSKRQNSVQKDFLGTVKRPLAMVIGLTALVAILPDFGNAAVIFLIILVLLLASGVNYVYTLIVGVGGFCLSTFTIWLINITNGKILPGRLQYIYNRFAIYQNPFSDELNKGHQLVNGYYAMFNGGLFGRGLGNSIQKKGFLQEAQTDFIYAIVVEELGVIMGILILALLFFMIVRIVLVGIRSKDPFNSLLCIGIGAMFLIQVFVNLGGITGVIPLTGITFPFLSQGGSSLLMLSICVGFVLNISADEKRKSLGL

SEQ ID NO: 57717 - protein, 179 aa, Enterococcus faecium
MNRLKEKYLKEVTPSLMEKFNYSSVMQTPKVEKIVINMGVGDAVSNAKNLDKAVEELTLITGQKPMITKAKKSIAGFRLREGMPIGAKVTLRGERMYEFLDKLVSVSLPRVRDFHGVSKKAFDGRGNYTLGIKEQLIFPEVDYDLVDKVRGMDIVIVTTANSDEESRELLTQLGMPFQK

SEQ ID NO: 57718 - protein, 663 aa, Enterococcus faecium
MATTHNTKKISMAGLLVAMGVVYGDIGTSPLYVMKSIVEDNGGLSGINPDFVIGSVSLIFWTLTLLTTIKYVVIALNADNHGEGGIFSLYTLVRKGGKYLIIPAMIGGAALLADGVLTPAVTVTTAIEGLRGIPQFFDRFGNNQNVIVIITLVIIFVLFMVQRFGTDIVGKAFGPIMFAWFTFLGVMGLMNFSQDWTVIRALNPYYAIQLLFSADNKLGLFILGNIFLATTGAEALYSDLGHVGKRNIRLSWPYVKICLVINYFGQAAWLLNVYQNPEAQQIKNLNPFFQMMPQSWIVIGVAFATVAAVIASQALITGSFTLVSEAIKLKLLPRLKIMYPGNSIGQMYIPAVNLILWIACSLVVVTFRTSHHMEAAYGLSITVTMLMTTALLYFYLIQNGHSRWLAYLVTFFFGAIEVVFFISSVVKFFRGGFVAVLIGLIILVVMFIWEQGNIIRESSTEDVSLRDYIPQLRELRDDTSLPIYQTNVVFLVPDMAEDKVGRQFIYSILDKRPKRARVYWFVHVEVTDEPYTKEYQVDMMDTDFIVQVNLFLGFRVQQEINVYVRQVIHDLMKQGRLPKQPQRYSLTPGREVGDFQFVLIDEVVSNVTTLGKWQRQIMQAKLAIKKIATSPETWFGLEYSEVKHETVPLIIGNTRKTWLKERL

SEQ ID NO: 57719 - protein, 367 aa, Enterococcus faecium
  MISC_FEATURE (32)..(32): X=any amino acid
DLYVIKKMKEGSTMTYHTSNEEHPIDIVNIAXLEGRVKERMEAGAFGYIRGGSEDEWTMKENTTSFNTKKIMPRILRGIDSADLHTSVFGIELDTPIIQAPSAAQGLAHEKGEADTAKGVAAAGSIFSISTYANTTIKDAADAAPGAPQFFQLYMSKDDRFNEFILNKAVEAGAKAIILTADSTLGGYREEDVINQFQFPLPMPNLAAYSEQSASGNGEGKGIAEIYAAAKQGLTPDDIKTIKEITHLPVIVKGIQSPEDAVIAISAGADGIWVSNHGGRQLDGGPASFEVLPKIAEVVNKRVPVIFDSGVRRGEHVFKALASGADLVAIGRPVIYGLNLSGAEGVTSVFEHLNKELSITKPLAGTK

SEQ ID NO: 57720 - protein, 1452 aa, Enterococcus faecium
MSEKRDLFEKLLEQIQLEEAEKNHPLLTAGEMDSVVVHRKSRLWEFTLHFSKILPIMLYRSLTQHLTIAFKDIAQVKLNILADDQTFDEQLLQDYWAQALENQQCDTPLAQQVLKTQVPVIKDRKVILPIDSTGAISYLKQQYLPLVEELFVSYGFPKFRIEPEVDEQQAERVLKLFEERKQEQAEAFMKQAAESLVVHEQKKKERKEQSPALEGPIHIQLGRNIPADEPTTPMISIVEEERRVTLEGYVFDKEVRELRSKRKILTLKITDYTSSFIVKKFSNGEKDEQVFDAISVGSWLKVRGSIQEDTFVRDLVMNAQDIIEVKHTPRKDYAPEGEKRVELHVHSNMSTMDATNSISDLVAQAGKWGHRAIAITDHGGAQAFPEAHSAGKKAGVKILYGVEANVVDDGVPIAYNDAHEALSEATYVVFDVETTGLSAVYDTIIELAAVKMYKGNVIESFDEFIDPGHPLSRTTVDLTGITDGMVRGSKSEEEVLRMFLEFSKDTILVAHNAAFDMGFLNTSYARYGIPEAANPVIDTLELARYLYPQFKRFGLGVLSKKFGVSLEQHHRAIYDAEATGHLAWIFVKEAMDNHNMLYHDQLNEHIGEGDSYKRARPFHVTILAKNQAGLKDLFKLISMSNVEYFERVPRIPRSQLKKMRENLLIGSACDKGEIFEAMMQKGVEEARNRAKFYDYIEVMPKAVYAPLIEQELVKNEHDLEEIIQNLVEIGKSLDKIVVATGNVHYLNEEDAIYRKILINSMGGANPLNRHSLPDVHFRTTDEMLTAFHFLGEETAKEIVVENTNKIADICEEVIPVKDELYTPKIPGSEDEISELSYTKAKQMYGDPLPEIIQKRLKKELNSINGNGFSVIYLIAQKLVHKSNEDGYLVGSRGSVGSSFVATMTGITEVNPLAPHYYCPECQYSEFFEDGTYGSGFDMPEKQCPKCGARLNKDGHDIPFETFLGFHGDKVPDIDLNFSGDYQAEAHNYTKVLFGEDYVYRAGTIGTVADKTAYGYVKGYERDNNLQFRSAEVDRLAKGATGVKRTTGQHPGGIIVIPDYMDVYDFTPIQYPADDQNSEWKTTHFDFHSIHDNVLKLDILGHDDPTVIRMLQDLSGIDPQTIPTDDPEVMRIFAGPEVLGVSQEQIYSKTGTLGIPEFGTRFVRGMLEETHPTTFAELLQISGLSHGTDVWLGNAEELIRRGDATLAEVIGCRDDIMVYLIHAGLDSGMAFKIMETVRKGQWNKIPDELRETYLSAMKENNVPDWYIDSCSKIKYMFPKAHAAAYVLMALRVAYFKVYFPILYYCAYFSVRADDFDLVSMCKGKDAVKQAMKEITDKGLDASVKEKNQLTVLELANEMLERGFKFGMIDLYKSDAVNFVIEGDTLIAPFRAVPSLGTNVAKQIVEARKDGPFLSKEDLATRGKVSKTLIEYMNDNGVLKDLPDENQLSLFDML

SEQ ID NO: 57721 - protein, 942 aa, Enterococcus faecium
MIWQEVNGYTLHSIKRSDGSAVNIAAIESKINQAIADYQKKPSFHNSTVKTVLGQSTTVTDTNGLNLSEFDEVVENIANIDYRVNGNQLVITPNANSKESGELTLKKSANTGTPVAYKMAGQQTLMAGAIDKPNTYTIKIDVETEGSLKIKKVDKETGNVVPGTVFHLDFGKTLPAKDVTTDKEGIATLDEIPHGAKVTITEKSVPAPYTIDTTPITATIKSGETISVTSKNTREKGQIILNKMGVETGTDLWNDKYSLAGNTFAIRKDSPTGEIVQEMTTDEKGHAETPKEIANALELGTYYVTETKASNGFVNTFKPVKVELNYVNQTVALVTSNVKGQNQEITGETTLTKEDKDTGNETQGKAEFKGAEYTLFTAKDGQAVKWSEAFKPELVKGTKASDETVTLTLDEKNQVAVKHLAINEYYWQETKAPEGYTLDETKYPVSIKKVDDNEKNAVITRDVTAKEQVIRFGFDFFKFAGSAAGTAETGFNDLTFKVSPLEGTSEITGAEDEAITAYNEQLGFDGYGKFENLPYGDYLLEEVEAPEGFQKITPLEIRSTFKENKADYTKSEYIFTITEKGQKQPIKTVTVPYEKLTNKAFSVSLNRLMLYDLPEEEDSLTSLGTWKDGGKELTDLDSTELVDKLSYNLHEIKEDWYVVAQAIDVEATKAAQEKDEKAKPVVIAETTATLANKEKTGTWKILHKLTAEQVLDKTIVLFNYVYENKKPYEAGDDPVAKDASLNNQAQTVNCTVERHVSIQTKAHLEDGSQTFTHGDVVDMFDDVSITHDVLDGSKEAFETILYALLPDNTTKEIWKSGKIDYEVNDKEFTKTVLAEKVDTSKYPEGTSFTFKEINYGKDGNINGKHNEDLKEKTQTLTPKKVPTTPSAPEQPEIPTVPSDSQESSPTVKTFPQTGEKNSNVLLFIGFTLIFATAGYYFWNRRN

SEQ ID NO: 57722 - protein, 652 aa, Enterococcus faecium
MKAYLQRMGRSLQLPVAVLPAAALLVGIGNWWASYSNDIVAHFLQAGGNAVLGQLPLLFAVGLALGMSVDKSGAAALAGLVAFEVPVNVLKTDSVATLLNIKPESVDPSFAQISNVFIGIIAGLIAAALYNRFHEAKLPMALSFFSGKRLVPILAAFVMLLISAVLLLVWPPVYSALVSFAKFILSLGWGGAGLYGFFNRLLIPTGLHQAMNSVFWFDVAGINDIGKFLASEGTKGVTGMYQAGFFPIMMFGLPAGAYAIYRNARPENKAKTASLMLAAAFASFFTGVTEPLEFSFMFVAWPLYVLHAIFTGISLAVSAFFHWTAGFAFSAGFVDYFLSLKNPIANQPLMLIVQGLVTAVIYYFGFNFAIKKFHLMTPGREEADLSDDDTATTNSDNKYAAQASKIYAALGGADNVTSIDNCTTRLRLQVKDTGLIDQNKIKATGVPGMKIIDGKNAQVIVGTEVQFVADEMAKLHGGAAARPAQTNTVVKTETFAGETIEQDIYAIANGKLIPITEVSDDVFAEKMMGDGYAVLPENGEIFSPIAGTITNIFPTKHAVGIQTDAGIEVLLHMGINTVDLKGEPFTLYVEEGQKVARGQLIALVDLAAIQSAGKNTDMVVVFTNGDKVQSLEIEPARDVKANDKIGSVSNKA

SEQ ID NO: 57723 - protein, 193 aa, Enterococcus faecium
MCTAITYATKDHYFGRNFDYEMSYNEVVTITPRNYRFDFRKVKNLDKHYAMIGIAAGVSNYPLYYEATNEKGLSMAGLNFPGNADYKELQEGKDNVAPFEFIPWILGQCSTIDEAKELLATINLVNIDFSEKLPLSPLHWLLADKEKSIVIESMKDGLHLYDNPVGVLTNNPPFDYQLFNLNNYRSLSNGTRV

SEQ ID NO: 57724 - protein, 250 aa, Enterococcus faecium
MNEKEWDEFAEEYYEIQQESQVTIAEDVKNYLKTEKVLPAETAADVAGGSGRFLSLAKEINRYDLIDFSSGMLENAKKEAEKNELPNVSFIKQSLEEFIQSNETYEMVFTAANPALVHLIQLEKLMKKSSKWCVIIRVVESIDDVFYPIEKQLGMIEEDPNTSPVVMDQFETYLIDEGFKVKKKDFTYFTQESITEELMKLYYDAYAKDPVVTRYIRKLFSEKREILSTTKLTYRLLLWSADKKRTFHDS

SEQ ID NO: 57725 - protein, 132 aa, Enterococcus faecium
MVMTDPIADFLTRIRNANMVKHESLEVPASKIKRDIAEILKREGFVRDVEYIEDDKQGVIRVFLKFGKNGERVITNLKRISKPGLRAYVKADEVPKVLNGLGIAIISTSEGVVTDKEAREKNIGGEVIAYVW

SEQ ID NO: 57726 - protein, 492 aa, Enterococcus faecium
MRSSPFIVHKGWSGHFFCAQNEKGSEKMAEITLEFDTIAAISTPPGEGAISIVRLSGDQAVQLADKVYQSGNKRLSEVPSHTIHYGHIVDPKSNQLVDEVMVSVMRAPKTFTREDVVEINCHGGIVVVNQILQLLLREGARLAEPGEFTKRAFLNGRVDLSQAEAVMDLIRAKTDKAMGLALNQLDGNLSALIRSLRQEILETLAQVEVNIDYPEYDDVEELTTKLLLEKAQMIQQRIQALLATSKQGKVLREGLSTAIIGRPNVGKSSLLNHLLREEKAIVTDIAGTTRDVIEEYVNVRGVPLKLIDTAGIRETEDVVERIGVERSRKALAEADLILLVLNQSEPLTAEDEQLLEATSGLKRIILLNKTDLPAQLEQEKLKKLIENEPVFSISVAKNDGLDRLESAISDLFFSGETGERDATYVSNTRHIALLEKASLSLEEVIAGIDSGMPVDLVQIDMTRCWDYLGEVVGDSVQDELITQLFSQFCLGK

SEQ ID NO: 57727 - protein, 154 aa, Enterococcus faecium
DGVHMSDHVTMKGNGQVSLTDEGLAKLNRLIKEAGFEEQLEADHEPKIVVGYVKTCVPHPDSDHLSITETEVDNGTVLQIVCGAPNIEAGQKVVVAKPGAMMPDGMMIWPGTLRGVDSYGMICSARELHLPNAPAKKGILVLPEDAVVGEAFPK

SEQ ID NO: 57728 - protein, 377 aa, Enterococcus faecium
MKAVTWQGKQKMEIRNVDDPKILEPTDAIIRITATAICGSDLHLYHHGEAVLEKGYVVGHEPMGIVEEVGSQVQTLKKGQRVVIPFNISCGHCHFCLNHMESQCDESNPDQLYGGLFGFGKLNGNHWGGQAEYLRVPYADSTSFVVPDNDLPDEKVLFLSDILPTAYWSVENAGVKKGDTVVILGSGPVGLFAQKFAVMAGAERVIAVDPVQHRLDKAANYNGVETYFLEDTAQAGTELYELAKGGADVIIDCVGMDGLEPVKEKAKNLVSLQSGTISPLQMASQAVKKFGTVQVTGVYMTPASSYPLQEFFMRDIAVKHGQAPIIHLMPKIYAMIAEGLFDPTQIITHSLPLSEAAQAYEIFDKKEDKNIKVVLKP

SEQ ID NO: 57729 - protein, 297 aa, Enterococcus faecium
MTEPKLIDPRNLYHTEKFPKQDQDTPALQQNMIPVPDCGEESYEGNNQLENRRVLITGGDSGIGRAAAIAFAREGADIALQFFPGEEKDAEEVAKYVKDAGRKIVLLPFDLRDEQAPKEIIDKAVSELGGLDTMVLNAGQQISCQSIAELPLEQVKDTFMINIIAMFALVKEAVPHIPAGGAIVTTTSVQAFNPSEHLLDYAATKASIANFTIGLAKQLAPKGIRVNGVAPGPIWTPLQLDEGQPSDSIPEFGQQSLLERAGQPGELAPVYVFLASNKASYVTAQIYGVTGGEAINL

SEQ ID NO: 57730 - protein, 458 aa, Enterococcus faecium
MEITKKTSKNNRKEVLSLKMVNVVGAGLAGSEAAWQIAQAGVPVRLYEMRPVKSTEAHHTSNFAELVCSNSLRGNSLANAVGLLKEEMRRLNSVVITSADETAVPAGGALAVDRDSFSETITRKVKEHPLVTVINEEITEIPEGITVVATGPLTSHPLAESIKAFNGSDGFYFYDAAAPIVDKATIDMDKVYLKSRYDKGEAAYLNCPMTEEEFKAFHEALINAEVAELKSFEKEKYFEGCMPIEVMAQRGFKTMLFGPMKPVGLEDPKTGKRPYAVIQLRQDNAAASLYNIVGFQTHLKWGEQKRVFRMIPGLENAEFVRYGVMHRNSFMNSPELLKPTYQSTKREDLFFAGQMTGVEGYVESAASGLLAGINAARLAKEMEPVEFPQETAIGSMAYYITHAEGKHFQPMNANYGLFPELPERIRDKKARYEAIAQRALKANEAIKTELEKTAIPNE

SEQ ID NO: 57731 - protein, 587 aa, Enterococcus faecium
MSTVLHVLDAINSPADVKKLSVEEMKQLAEEMRQKILQKDSDVGGHVGPNLGVVELTIAFHYVFDSPKDKIVWDVSHQSYGHKLLTGRKNGFEKGHYREVSGYSNQHESKHDYFTVGHTSTSISLATGLAKARDLKKESGNVVAFIGDGSLSGGLAFEGLNNGGVLQSNLIVLVNDNEMSIDENHGSLYKNLAELRQTNGKSSNNLFKAMGFDYRYVDNGNDLETVIRLFEEVKDIDHPIVLHVHTEKGRGYQPAIDNKMKYHWHVPFDLSTGEAKQVTSGETFNMIIMDYLDKKMQTSTAPIAAVNAAIPGAFGLKTFQEKHPDHYFDVGIAEQHSITFASALASQGVRPVVFQSSTFLQRAYDQLSHDLAINENPVIILVGGGTISASDRTHQGTFDIPYLSSIPNIKYLAPATKEDMISMLDWAFEQTAQPVAIRIPTHGVEHGTAIANDYSIPAYQTVNNGGKVAILALGGFLELGKETVKAFRKKGIEATLINPGTITENDVETLDKLKETHELVITLEDGSLSGGFGENISRYYGDSSMNVLNFGAEKEFTDSVPVGQLYERYHLTPKQIVEDSLRVLNIQ

SEQ ID NO: 57732 - protein, 680 aa, Enterococcus faecium
MLYKLAVKSFFRQSRGYLVYFFSLTLSVMIYYSFSAMTYDQSLVRRASQDTSIDGGLSFGGFIITVVLLFFVFSANRFFLNRRQKEIGIYQLFGMNKLQISGIYVLEIMIIGLFACISGILLGIIFSKLFSMILVRMMDMDLTSPFFISIPSVVDTLFAFFIILLAVSVYSIWKIWRYPMIRSFGEKEQADSSTMRFRTRHRLLAVIGLLLLTSGYFGASHFREITSWMISYHYLDTLVFFFPFLIFFVCVVGTYLFFCYTFRLFLIILSKWKIYYYGINFLIMGNTQVHLLKSWRTNSLITVILGISLMTIGGTASISTILSYQEKVSSPMDYQFDVETEKKIKPILAEEGQKITKEITLHYKVIGSIYSQNLEEPMFQTANLITETQYQAFRKVNPDLPNISLKSPGHTVLLDQMQTLFRNISLYGSSIGLPDNQELKIQQMLPSVLGDETMVYLSPVLIVDDTVFEKAKGVDYQVVNVDVSGGNNEKIDERLSNDLSIKWLNAVYYSYDIVNGSLQGEISTKKLPDDQMKEAQFSQESSRLNFSSSYSKLRAVNRRIGINIFVTLFVGMIVIIATGSILTVRQLAEAEEEKENYHLLTKLGIPQRRIRRMIFEQNALTFFPPMILGITHAVFAINVFTQYIKTADYWLAYLVSGLLILIYLLLYVITSQLYCRIIEE

SEQ ID NO: 57733 - protein, 277 aa, Enterococcus faecium
MKKRMIRLTDNRPIGFIDSGVGGLTVVKEALKQLPNENILFVGDTARCPYGPRPAEQVIQYTWEMTDYLVEQGIKMLVIACNTATAVALEEIKAALSIPVIGVILPGTRAAVKKTQNKQVGIIGTIGTVKSQAYEKALKEKVPELTVTSLACPKFVSVVESNEYHSSVAKKIVAETLAPLTTKKIDTLILGCTHYPLLRPIIQNVMGENVQLIDSGAETVGEVSMLLDYFNLSNSPQNGRTLCQFYTTGSAKLFEEIAEDWLGIGHLNVEHIELGGK

SEQ ID NO: 57734 - protein, 563 aa, Enterococcus faecium
MNNKDLVAKAVYDAVKDDLTLEQVEQLLENPKSAEHGDVAFPAFSLAKVYRKAPQQIAADLAEKIDSANFEKIEVVGPYLNFFMNKELISKKVLQTVVKEKEHYGDSNIGNQGTVPIDMSSPNIAKPISMGHLRSTVIGNSIGFIMEKIGYQPIRINHLGDWGTQFGKLIVAYKKWGTEEAVKAEPINELLRLYVQFHEVAETEPELNEEARAWFKRLEEGDKEAIQLWQWFRDESMKEFNKIYDLLEVRFDSLNGEAFYNDKMDEIVKLLEEKHLLNEDKGAEIVDLSAYDLNPALIKKSDGATLYITRDLAAALYRKRTYDFKQSLYVVGNEQSYHFKQLKAVLKEMGFDWSDDMHHIPFGLITQGGKKLSTRKGKIVLLEEVLNEAIQSAKEQISEKNPDLENKDAVAKQVGVGAVIFHDLKNDRLNTFDFNLEEVVRFEGETGPYVQYTHARAVSLLEKAGFVPSETADYALNDDTSWEVVKLVQKYPETVLSAGEKYEPSVIAKHAIKLAQAFNKYYAHTKILADDEQKEARLALVYAVTVLLKEDLRLLGLHAPDKM

SEQ ID NO: 57735 - protein, 361 aa, Enterococcus faecium
MRHDGRKAQELRKLELQTNVFKYPEGSVVIRFGDTTVICSATIEDSVPPFLRETGTGWVTAEYSMLPRATSTRNRRESSKGKLSGRTMEIQRLIGRSLRAVVDLEYLGERSIIVDCDVIQADGGTRTASITGAFVALKLAIEKLLREKELSEDPIKEHLAAVSVGILPDGTCVTDLDYQEDSAALVDMNLVMTESGKFVEIQGTGEEATFDGEQLNEMLFFGKNAIEDLIKEQKHALLTEFAQNDERIEETKTIIIATRNPGKAEEFRNMFKEAGYHVKTLLDYPELPDVEETGSTFEENARLKAETIAQLLDQPVLADDSGLKVDALGGMPGIYSARFAGEQKSDAGNNAKLLYELTDVP

SEQ ID NO: 57736 - protein, 468 aa, Enterococcus faecium
MVVGDFAVELDTVVIGAGPGGYVAAIRAAEMGQKVAIIEREYIGGVCLNVGCIPSKALIAAGHHYQESLDSEMFGVTSENVKLDFAKTQEWKENKVVHTLTSGVGFLLKKHKVETIEGEAFFVDDHTLRVIHPDSAQTYSFNNAIIATGSRPIEIPGFKFGGRVLDSTGGLALKEVPKKFVIIGGGVIGAELGGAYANLGAEVTILEGSPQILPTYEKDLVKLVEDDFKKKGVTVVTNAMAKEAVDNGDSVTVKYAVDGKEESVTADYVMVTVGRRPNTDDMGLEQAGVEVGERGLITVDKQGRTNVPNIYAIGDIVPGAALAHKASYEAKIAAEAISGKKVAVDYKAMPAVAFTDPELASVGMTIKEAKDAGIEAKAYKFPFSGNGRALSLGKTEGFIRLVTTIEDNVLIGAQIGGVGASDMVSELALAIESGMNAEDIALTIHPHPSLGEIVMDASELALGLPIHI

SEQ ID NO: 57737 - protein, 430 aa, Enterococcus faecium
GLFFGAGNLIFPVHLGQEAGAATFWANLGFLVTGIGLPFLGVIAIGVSKSSGVYELAKRINQTYAMVFTILLYLVIGPFFALPRLATTSFEIGLAPFIDPSRQTLYLAIFSIVFFVLAWWFSRKPTKILDYVGKFLNPAFLVLLGALLLLAFLNPLGSVNQAPIQPNYQEHAFFTGFTQGYNTLDALAALAFGIIIVTTIQNMGVTKPAEIAKDTIKSGAISIILMGIIYTLLAYLGAMSLGSFALSENGGITLAQIADHYLGTYGSILLAFIVILACLKTGIGLITAFAETFTDLFPQRNYAFFVALASILPCLAANVGLTNIIQFSLPVLMFIYPLAMTLILLVLVGPLFKQRTAVYRMTTYFTLIASIFDGLNACPETIKQTPIVQNLLYVAESYLPFFKLGMGWIVPAVIGFVIGLIWSFAKKEEV

SEQ ID NO: 57738 - protein, 397 aa, Enterococcus faecium
MENQNESLIKQYVKRRAKRRLFLWLFGTSAGLITVFVTLFLILAAGSIDNSDSDSSSGGEAFTGEYSEGLPIYKEIKGRGPFSDEIAQYAVGAAVKYKLLPSVILSQYGYESAFGTSASARNDLNYFGITWFDGCLFPKGTARGIGGIEGGWYMKFPNSKAAFSYYGFMVATQSNFNACVGNKSPGASLLILGRGGYAAAGITEDSPYYTGCMSIITSNKLTEYDEFAIKHWGEGGNNNGTITGEWTNPFPGSSLDKNSFSGGQLFGTNPGGEFRPNGFHDGLDFGSVDHPGSEIHAVHGGKVVYVGNPGISGLGACVIVINYDGLNMVYQEFANSTGNSRVKVGDQVKVGQVIGIRDTAHLHLGFTRMDWRQAQGHAFTDDGTWIDPLPFLNSSKK

SEQ ID NO: 57739 - protein, 212 aa, Enterococcus faecium
  MISC_FEATURE (68)..(68): X=any amino acid
  MISC_FEATURE (171)..(171): X=any amino acid
  MISC_FEATURE (196)..(196): X=any amino acid
VMGLEVAVTDVNEAIGRIFENLNAWKGHYICIADMEAVAQGFKNSSFQILKNQVIMTIPSGNALKNAXREQGNIKAEQFSGVELMKCCLSSNEGEICRHFFYGSCWKILDELENQLRKEYPHIQIAGKYAPPMDLNMNEDQLVMESIIGSGADIVWVNLPSPEQECWMASXNSLQSLMIGVGDSFEYLTGNIKKAXFVKRLDLLCRKQLLPK

SEQ ID NO: 57740 - protein, 267 aa, Enterococcus faecium
MRFLHLSDIHFRENYQTNLFTAELFPTIKNPQLALEKLLQELSLTVYDFILLTGDLVHEGGISDYQVLRKMLDQYFPTTPYYFCRGNHDRRSVFFEGMSVESNETGEYIHCTNQNGLRIISLDSAQDTQHEGKISIGQMIQLQEWLGTPAEKGTILLVHHPLSWEDPSIVTEVPEGFAELIAESDILGIFVGHIHQGSSAEFADKKQFMAESLSFGVDEYPDYSLFTNRTGFTSGSLIDGKIFTYQHYLTPHQIEIGRMKKPITGNH

SEQ ID NO: 57741 - protein, 711 aa, Enterococcus faecium
  MISC_FEATURE (28)..(28): X=any amino acid
  MISC_FEATURE (39)..(39): X=any amino acid
  MISC_FEATURE (41)..(41): X=any amino acid
  MISC_FEATURE (66)..(66): X=any amino acid
  MISC_FEATURE (88)..(88): X=any amino acid
  MISC_FEATURE (90)..(90): X=any amino acid
  MISC_FEATURE (96)..(96): X=any amino acid
VQKPKHETTSCTTSKQKTSQSTAERSTXKRNNEQSTKKXKXPQLSRSRSRERSSESRKKTNNKPKXYGKYQQPKSSRNEPRRQSKPYXQXQQTKQXQSRKFNNNNRNRYNKKGKKGKQQQSTKPAVPPRKFRELPDVLEYTEGMNVADIAKKIHREPAEIIKKLFMLGVMVNQNQALDKDTIELLATDYGMEPQEKVQVDIADIDKFFEAEEVDPDKLVSRPPVVTIMGHVDHGKTTLLDTLRHSRVTSGEAGGITQHIGAYQIDIDGKPITFLDTPGHAAFTSMRARGASITDITILVVAADDGVMPQTVEAINHAKAAGVPIIVAVNKIDKPGANPQHVMQELSEYELIPEAWGGETIFVEISAKFGQNIEELLEMILLVAEVEDLKADPTQRAIGTVIEARLDKGKGPVSTLLVQEGTLHVGDPIVVGNTYGRVRVMTNDLGRRDKEAGPATPVEITGLNDVPQAGDRFVVFEDEKTARAAGEERAKRALLENRAATSRVTLDNLFESLKEGELKEVNVIIKADVQGSAEALAASLKKIDVEGVRVKIVHSAVGAINESDVTLAAASNAIIIGFNVRPTPQAKVQADTEEVDIRLHRIIYKAIEEIETAMKGMLDPEFEEKITGQMIVRETFKVSKVGTIAGAYVTEGYIRRDSGVRVIRDGIVIYEGQLASLKRFKDDVKEVKMGYECGAMIEKFNDIKVDDVIEGF

SEQ ID NO: 57742 - protein, 268 aa, Enterococcus faecium
MNLLLSIAQLAKSTYYYWVKKLDKPDKYSKIKQEITAIVKESRNSYGYRRVTLALKMKGYTINHKTVRKLMSQMGLTCQIRIKRYKSYKGTVGKIAKNVLKRNFSVDTPNKKWVTDVTEFKIKGRKIYLSPILDLFNGEIISYSISTSPTYKLIEEMLQQAIKKKGTEGSLILHSDQGWQYQMPQYQKKLKENNIIQSMSRKGNCLDNSVIENFFGVLKSEFFYREKFRSIEIFQSKLNEYIRWYNNKRIKLKLNGLSPVEYRKQSIK

SEQ ID NO: 57743 - protein, 294 aa, Enterococcus faecium
MAFETIGEKLRQARLNKKISLDELQQITKIQKRYLEAIDNDDFDQLPGKFYVRAFIRQYAEAVGEDGDHLVDVFDGKSKLTGSVPERPQPETVSTSRKAMHQEESHPSRFWTSLPVILLGLVALAIVVVVGYMTWQDRQADPIIGDTASSLKVEGSVEESSSSEQSTQTKESSTVESTTKSSEEKKMAIATGEDSGSAIAVNITDATKPVTLEFTAVNRVWLGVLVDNAYVYQGTLAANETQSTVLPETATNATITIGAASNATIKANGESVPVNPGENNQSPKNVNLTLQYAE

SEQ ID NO: 57744 - protein, 109 aa, Enterococcus faecium
MVELTKENRLTPGGVVLTKIDDQSGEVLQGAVFELQDANGTVLQSGLTTGADGKLAIDGLAPGAYQLVETQAPTGYELDATPVTFKIEKEQEVAIFLTKRIEKLLIAQI

SEQ ID NO: 57745 - protein, 210 aa, Enterococcus faecium
MIFPKVNEASLNKGSFFHIYENEDFELYNILSQKEVIENQIICHPIIYKSIFKYAFFASNDFQRMEITDCIFENCDFSGCILTKSMLHRVKFVNCKLTGTKLMESYIGNTLFENCKMDYVNLSGSNIKESTFEHSVLSSADFVDCSLTKIMFSTNDLENASFFDTDLKNIDLSSNSFEMIEVRSEHLKNCTLNQLQALGFARKFLQIKVV

SEQ ID NO: 57746 - protein, 773 aa, Enterococcus faecium
MIKKTQNKIQRICQKHFVSRLKAVSKRKYLHPIMISIILIFTFLGSLSSIYVNVYTETSNFANQTTEETNSPPYSEIQSIESTNQSSNNETTSTTSSTQLIDPTEKEITAAKAAGEKAYSETGRSQTFSTVAATANFNGHTIPDGYTVIYAKDGVIVAVNGSMSADKTALQGVTKAIAFIDNRPDIHNLFIGSTVNGTTITFPKSIYMGVATAGNTIDSVTPNADKSYSFTPSTWGGLPAGGGMSTFSIGIQLANDIPFTGYSIKNGQIVDGKGNVSNFPTYQAATVQVNANRTGTFSYTVNGGAAKIGTYGTTLSGIHVGDKVVITPTAVTGYSFAQTNGSFTALESNVDTVTYTGKQTPITIKYQDYFGQMIAPSKIMNLTYGSAAQDLTTNTPTINGYTFTAVSAIETKNQSAMSVLASLDTNGNVIVKDANGKQISEVILYYKTNATVSINANGSKYYDGLSVVPIVKYAFNDKTESTSLLNNDLSIDQITWNPTDFKAMNEKGVEVTAPTEIGTYTSWQLTKSGLAKLAARTNYLFTIVQTSDVYTIKQISGAVELSGSKTYDGKAGVPSIHVKLAEGVTSSLTPVQVALSSMDYTADAQSAKNMVNAGSYTIKLTNSGIDKVKAANPKLSFTDIANTSGTYTIYKANAVITVDDAAFNYDAQSHSISVGNLHVTGVVLGESLDYTLTVNSRTDIGSQIVTISLGEGSVNNNYTIIATDTAKLTINPTLLLPSTGGIGLLPFVFLGLIFIFSGFFYFIHRKKKAGEQR

SEQ ID NO: 57747 - protein, 178 aa, Enterococcus faecium; identical to SEQ ID NO: 57584

SEQ ID NO: 57748 - protein, 723 aa, Enterococcus faecium
MDFQSILEKIKAALISFWRWIRPYLGQFHRWRKRIWKKYHVNKLILLIGLICVLVTSIYLFILAKQANVETLKSGLSQSTVIYDKKNEEAGTLYAQKGTYVELNAISPYIQDAVISTEDRNFYEHHGFDIKGIARAAVRMVLSGGTSGGGGSTITQQLAKNAYLTLDQTFDRKAKELFLAIEIEKKYSKEEILTMYLNNAYFGNGVWGVQDASRKYFGVDATNVTLSEAATLAGMLKGPGIYNPIDHPKNANDRKNTVLSVMEENGKITKEQEQAESQTDISAYLNDTYDNSDSGYRYPYYFDAVIDEAVNEYGLDEEDVMNKGYKIYTALDQDYQKQLEATYQNSALFPANASDGAMVQSASVALDPNTGGVQALVGRRGDHVFRGFSFATQMRRSPGSTIKPLSVYTPALEAGYKPSSILKDEPQSYYDAHNFDGTYQGEVPMYQAVAQSLNLPTVWLLHEIGLQKGYDKAEEFGLPLAKSDKYYGLALGGLEKGVSPLIMAGAYSAFANDGQMYTPHLITKIVDSTGAVIVDNTNKKPKQVISKETADEMTSMLLGTFSNGTAAAANPAGYTIAGKTGTTETNFDATKANDQWMIGYTPDVVISTWMGYEESSKLHYLEGTSGNVVGKVFKSAAEGILPYTSKTGFSVADAYATGGQVVAADQVGNTGNSNGESGNWQDNLNQYGEQAKEGLKNFGDMVKEGVQGIGEAAKDLWRKYQGE

SEQ ID NO: 57749 - protein, 728 aa, Enterococcus faecium
MATAETKMDTFVITGMTCANCSARIEKELNGQPGVVNATVNLATEKASVKYEGTTTEKLIQSVENIGYGAILYDEAHKQKIAEEKQAYLKKMLFDLILSTVLTLPLMLSMIAMMLGSHAAIVHFFHFPIVQLVLSAPVQFYVGARFYKGAYHAIKTKAPNMDVLVAIGTSAAFALSIYNGFFRGHPQDLYFESSSMIITLILLGKYLEHTAKTKTGNAIKQLMSLQTKTAQVIRNGKEETLAIEEVVVGDQLVIRPGEQIPADGRIISGSSAIDESMLTGENLPVEKNPDDTLFGGTINTNGLLHMEVTQVGKQTVLAQIIQMVEDAQGSKAPIQKIADRISGIFVPIVLVIAFITLIATGLITGDWQLALIHSVSVLVIACPCALGLATPTAIMVGTGVGARNGILIKGGEALEAAAHLDSIVLDKTGTITEGKPKVTDLVGSKEVLSIFYTLEQASEHPLGKAIVEYGKLQEAATYDMIDFTAHPGAGISGTINGVRYFAGTRKRLIELNLSFDEYQEHALELEQQGKTVMFLADEKQVIGLIAVADQIKLEVKQAIKQLQNKGLDVFMLTGDNKLAAETIGKQVGIDPKHIFAEVLPEDKAAYVEKLQKDGKKVGMAGDGINDAPALALADVGMAMGSGTDIAMETADVTLMNSSLASIAQTIELSRLTLRKIKQNLFWAFVYNTIGIPFAALGFLNPIIAGGAMAFSSVSVLLNSLCLNRHMKK

SEQ ID NO: 57750 - protein, 317 aa, Enterococcus faecium
MPNKLLEVKGLKQYFNVGKKNEVHAVNDISFHIYEGETFGLVGESGSGKSTTGRTIIRLNEPTDGEILFDGQDITKIKDKKGLTKFRHDVQMIFQDPYASLNPRMKVRDIIAEGIDVNGLAKSSEERAKKVDDLLRTVGLNPSHGTRYPHEFSGGQRQRIGIARALAVKPRFIICDEPISALDVSIQAQVVNLLQDLQKEHQLTYLFIAHDLSMVKHISDRIGVMHNGLLLEMGTSDEIYNHGVHPYTESLLSAIPLPDPDHERKRRRIKYQPEPDDGQVRQLREIAPEHFVYATEQEVPYYAKKLKRQKESLLVAN

SEQ ID NO: 57751 - protein, 239 aa, Enterococcus faecium
MKPIIGIAGNQLIRATDTFQGNQVSYTPQGFVDAVLDAQGLPLILPVMSPDSAPQLIEKIDKLILAGGQDVSPQLYMEDPHPKLTETNIQRDQFEQALILEALKQRKPIFAVCRGLQLLNVVLEGTLYQDLSLYPKWSVKHEQQPTAPQFATHEVKIVSDSLLSDLLPDSYFVNSYHHQAVKDLSPLLKAIAFSNDGLIEAVQSKDNMHKILGVQWHPELSHRVDSSEQRLFDFFVNEF

SEQ ID NO: 57752 - protein, 438 aa, Enterococcus faecium
MRISEKVVRIGLILMVALSIYFSYAIWLSPAGKSSINVDETNTQMIESQSNRKTSEVFLPLHVTWHHSGMIQETNSENLVYRLQLIIDKARFGKLSEVVSGDKSQFEQVKNLNSGFELAYNAPFLLREYKEAFDLDLDVSNLAKESENMYFTRIQFDQGNKKIRFLNYSNHLVYEANISLNWTDINKELTAKDTKWTEMTTEPSTIDTQYATKHSIKLKKYSYILSQQPYTLFRNAFFQKPDSVKNNDESNELIFYGGNETMSIHSETQVVDFRGELPEKKENASVFSESFPYISKLGSSLGNLRYFDRSDNTIDYRIFVEGFPVFGTDSRGQIGVEVGGETNGSVQVNIQTSLNTIQVPIPSDEEVELASTNEIIQQLKAKGADSNKIGSVIVGYTWQNVKETNRVVDLLPEWYVKYKDNWYSANDLLEKLPGLEAN

SEQ ID NO: 57753 - protein, 189 aa, Enterococcus faecium
MDKMKIQEIIVVEGKDDTRRLREVVDADTIETIGSAINEEILMQIEHAQETRGVIVFTDPDFSGEKIRKIIMEAVPQAKHAFLPRTQAKPKKKGSLGVEHASDAAILEALKKVVTPDISQTAVSEITRQDLLDYGLIAGAQAKEKREKLGDELRIGYTNGKQLEKRLKMFRITPKELAQAMKIVEEQHE

SEQ ID NO: 57754 - protein, 131 aa, Enterococcus faecium
MDSKDKNVEKNKHFLMSVEFAVQGVKTVFEEERNMRKHVAFGILALFMGVIFQIDRIEWLWLLLAVFLVWIVEIINTVFENVVDMFTDFHFHPIGKKIKDMAAGAVLVTACFAVIIGLILFVPKIYHLLFN

SEQ ID NO: 57755 - protein, 710 aa, Enterococcus faecium
MNPLLIVGTRQWKGVHSVMAYKYLVIVESPAKAKTIEKYLGRNYKVMASVGHIRDLPKSKMGIDFENNYEPHYISIRGKGDVIKSLKAAAKKAQKVYLASDPDREGEAIAWHLAYLLGLDLKEKNRVVFNEITKDAVKAAFKEPRTIDVDLVDAQQARRTLDRIVGYSISPILWRKVKKGLSAGRVQSVALKIIIDREKEIREFVPEEYWSIDGNFKKARKKFKANFWGIDGKKKKLPDAQSVKEVTARIDGTDFEVKKVEKKERKRNPANPFTTSSLQQEAARKLNFRTRKTMMVAQQLYEGITLGKQGTVGLITYMRTDSTRIADTAKAEAAAFIEDTYGKEFSRHDHRKIKNAQGAQDAHEAVRPTSVLRTPDELKQYLDKDQLKLYTLIWSRFVASQMTPAILDTMKVTLEQNGVIFIANGSKIKFKGFMQVYVEGRDDGKEEKENILPELEEGDVVQSVDIEPKQHFTQPPARFSEATLIRALEENGVGRPSTYAPTLDTIQRRYYVKLTQKRFEPTELGEIVNSLICEFFPQIVDIHFTAEMEGDLDKIEEGTEAWVKVVDRFYKPFEKELTNAEEKIEKIQIKDEPAGFDCDVCGHPMVIKLGKYGKFYACSNFPDCRNTKPIVKEIGVTCPVCHEGQVIERKSKKNRLFYGCSRFPECEFTSWDKPVGRNCPKCDGYLVEKKVKGGKQVVCVNGDYEEDIQK

SEQ ID NO: 57756 - protein, 251 aa, Enterococcus faecium
MRRVRQLPKPLYAKHGKRAVLLLHAYSGSPNDVRMLARFLEKADYTVYAPLFKGHGTMEPYDILQEKAESWWADTKKAIHFLQSEQFSDIAVLGLSMGGIFAVRALEEESVIGGGFFCSPLSPVKTNVPENFEKYVRQVLKTAGKSEKEINEKAVAYRSLAEQQLMDIQDQAAIVESRLSDIQQPIFLAQAGKDEMIDPNGVFETARKLSRQRVTLQWYPESGHVITVGTARRELEKDVLEFLEKLPWNEE

SEQ ID NO: 57757 - protein, 431 aa, Enterococcus faecium
MVDLIEKKRDGNELSKEEIEYIVTNYTNGKIPDYQVSALLMAIFYQDMTNEEITNLTLAIANSGDVIDLSSLEGIKVDKHSTGGVGDTTTLILAPLVASVGVTVAKMSGRGLGYTGGTLDKLEAIPGFQIELSDEEFVRIVNESKVAVIGQSGNLAPADKKLYALRDVTATVDSLPLIASSIMSKKIAAGADAIVLDVTTGDGAFMKNIEDARRLAKTMTSIGKLANRETVAVISDMSEPLGEAIGNSLEVVEAIETLQGNGPEDLVEMCYALGSQMVVLAGKAKTTDEARTLLQEALESGKALAKFKEMIQNQGGDPAIVEHPERILTARYTMELPAKQSGVVSKIVANELGIAAMMLGAGRKTKEEDIDHAVGLKLHKKIGDTVTKGESLLTIYSNDEEITSVIELLYKNIEIGESAMKPTLIHDIITE

SEQ ID NO: 57758 - protein, 382 aa, Enterococcus faecium
MKKILIVSGTRADYGIYKPVAENLLQDNWDVSFVVSGMHLSHKYGFTKELILADGFRISGEVQSLFLENNKGNMARSVALEINGFTNIFEQTSPDFVLLLGDRGEMLAAAIACLYLGIKTAHIHGGEVSGTVDESIRHAITKIASVHFAATEKSKERLIKMGEDSWRVFPVGAPRIDTILNNRLPSFRDIKEKYHLKFEKKKYVLQVFHPVVTELENIEKQILALINSMEQQSQPIICILPNSDAGSEIIRKMYQKYLKTDIIYITNLEPEEYLTILKECKFMIGNSSSGIIEAASFKIPVINLGTRQNGREQSKNIINANLNENEIETALNKIQDPQFIKSLKNVKNIYGDGNSSRRITKTLNQILNDGEDIKWIQKQIAY

SEQ ID NO: 57759 - protein, 356 aa, Enterococcus faecium
MTKILEVKDLEISFDTYAGKVRAIRGVNFHLNKGETLAIVGESGSGKSVTTRSIMRLLSSNANIDAGQILFKGNDIVGKSEREMQKIRGKEIAMIFQDPMTSLDPTMPIGKQVAESLRKHNKVSKKEGQKAALELLKLVGIPEAEKRINSYPHQFSGGQRQRIVIAIALVCYPEILIADEPTTALDVTIQAQILELLKEIQTKIDTSIIFITHDLGVVANVADRVAVMYGGRIVEVGTSEEIFYNPQHPYTWGLLGSMPTLDSANDRLYAIPGSPPDLLNPPKGDAFYPRNEFAMKIDAEQEPPFFELSKTHKAATWLLAPQAPKVTPPEEIQRRWAIFKEKQKHTYGQGGIADAK

SEQ ID NO: 57760 - protein, 504 aa, Enterococcus faecium
MEIKTIIEAIDDWGINEPDRVAYQADETHTFGELKQASDALAYYLEKKVEGDGPIVVFGNLEFEMIVSFLGVVKSGHAYLPIEEHTPKERILSIFRVAKPSMVISIGDWIEDIPSVPVITKKEFQEIKKIPVGFYPRNSVKGTENFYIIFTSGTTGEPKGVQISHDNLVSFVQWTMEDFGIKPGMHFLAQAPFSFDLSVFSIYPALVSGGMLKPLNKAVVQDFRQLFATLPALKLNVWVSTPSFMDICLMEPTFNGENVPELDMFLFCGEELTKKTAESLLDRFPNARIYNTYGPTEATVAISSIQIDQHVLDSYDRLPIGYVKKDTKVSIVQEGKPVSKGETGEIIIAGPSVSKGYLNNPEKTAAAFFCQNDLASYHTGDAGRLDEYGLLFYEGRMDQQVKLHGYRIELGDIEHYLLQDNRIKQAVVVPKYQGTKVQQLVAFVVLENKTKQPDFQLTKSIKEQLLEVVMDYMIPQKFHYVDLLPQTVNGKIDRKKLTAEVNPE

SEQ ID NO: 57761 - protein, 182 aa, Enterococcus faecium
MVESPFHSTTICAVEKDGKFAMAGDGQVTMGESVVMKGTAKKVRRIYNGEVVVGFAGSVADAFTLEEKFEGKLNEYNGNLQRAAVELAQEWRTQQSMQKLEAMLIVMNDKEMLLVSGTGEVITPDDGILAIGSGGNFALAAARAMKNYAQNDMSAKEIAENALNIAADICIFTNHNIIVEEL

SEQ ID NO: 57762 - protein, 270 aa, Enterococcus faecium
MRNTLNIEKNSLDLLRYWAAVMVMLGHFLRFSNSGGGDIKEILWKITDFMPGVVISLALSGYLISYSIERTSSTKTFIVKRIMRIYPELWLSTIINIVVILVLVPHLIDTSFIIWILTQFFGVANTPKCLKTFATGSINGALWTIFVEIQLYLIAVLVYRWIKKGSKTIHCVGALVAAFLNVIIGFLAEQQYDWKLLKIVDRSFIPYFLWFYIGMLIYLYRDILILFLRKLTPMLFVLQIVLKITNFQAPGYYASIIDGNLCLQLEQDTI

SEQ ID NO: 57763 - protein, 489 aa, Enterococcus faecium
GGVVLTKIDDQSGEILQGAVFELQNREGETLQTGLTTGEDGKLAIDGLAPGAYQLVETQAPIGYELDATPIEFEIERSQTAVVELTKENRLTPGGVVLTKIDDQSGEILQGAVFELQNREGETLQTGLTTGEDGKLAIDGLAPGAYQLVETQAPIGYELDATPIEFEIERSQTAVVELTKENRLTPGGVVLTKIDDQSGEILQGAVFELQNREGETLQTGLTTGEDGKLAIDGLAPGAYQLVETQAPTGYELDATPIEFEIERSQTAVVELTKANRLTPGGVVLTKIDDQSGEVLQGAVFELQDANGTVLQSGLTTGADGKLAIDGLAPGVYQLVETQAPTGYELDATPIEFEIERSQTAVVELTKENRLTPGGVVLTKIDDQSGEVLQGAVFELQDANGTVLQSGLTTGADGKLAIDGLAPGAYQLVETQAPTGYELDATPVTFKIEKEQEVAIFLTKENRKVADSSDIRGNNPTSSGNKHLPKTGET

SEQ ID NO: 57764 - protein, 289 aa, Enterococcus faecium
MYTTLKEVTKTAEELNFTVGAFNTHNLEMLPAMLGAAKEMGSPIIIQTSVDTAKYIGMHVLVNVMTAIAEEEMVDAVLHLDHARDFDDIKEAIDSGYTSVMYDGSHLPFKENILKTKAVVEYAHAHGVSVEGELGTIGGTEEGIHVAENDKVYTRPEDAVKFVEATGVDALAIAIGTNHGQFKSKTEVNIPLLKEIDAVVDVPLVIHGGTGVKEEDYPELINNGIRKFNVGTELLVNWTKVAKETFSETEINKSLRHNVIPANEAVKEIVKHKIGLFMNLESPINLGNK

SEQ ID NO: 57765 - protein, 348 aa, Enterococcus faecium
MSSKGTKTKIILNLLLLIVIFAIIYYLINQSFADIFAELLSTSVVVLAAAVILGTVYQIAEGRSIKEIAEPFAPNFTTKDGFLTSSYIAFYRIVSFGTGTLISEIYFYNKKGMKLSQGAGVTALHMIMYKLAVITYALAGLVIQFSLFYSNGPSMIWFIIAGILLTIVIVAFLLAMSVSLNVQIFFVSLSNKLFKSERLRKWVDTCNQQIYSLRETVQTIIQDRTALLRIYLWNMLKLVFWYVLPYLILIENHPKIDFLLTISFISFAVVLSGVIPTPAGIGSFEFVYLLLFRPVVGTVDAVSSLLLYRFSSFILPFLYGFVYVIAERRRVIKEEIIEVKKENKENQG

SEQ ID NO: 57766 - protein, 52 aa, Enterococcus faecium
MNIKDDLKADSISIMEFVLELEDEFGTEISDEDAEQIETVGGAVDYISSHLK

SEQ ID NO: 57767 - protein, 867 aa, Enterococcus faecium
FRASFALHNSLERFKNRNGLHTNAIYAFNTMFENVMQKEQPTHVLVAFDAGKTTFRTEMYAEYKGGRSKTPGEFKEQMPYIRDLLTGLGVQYYELPNYEADDIIGTLAEKVDKDQFDVVVLSGDRDLTQLASKEVKVDITVKGVSDIESYTPEHVAEKYDGLTPKQIIDMKGLAGDASDNIPGVTKIGEKTAYKLLKQYGSVEGIYEHIDEMKQSKMKENLINDKEQAFLSKKLATINTSAPVDVSIDSLKYEGKNLDKLVPFYKEMDFNQFLSKLNIVEEEVKMDDILFEVVHEFKEEMFTTDMALYVEMMGDNYHTEEIVGVAWGTEKKIYVTNDLSVFENRAFHSWITDPTRLKKVYDAKRTYVALNRYTGKTKGIDFDVLLGAYLLDTNEKSTDIEGIAAHYGYNDIQSDEAVYGKGAKKGLPEEEELFFAHLARKVAAINALTPKLSQELAEKNQEDLFRKMELPLSIILAEMEISGIKVDATRLQEMKGEFSARLREIEQKIYEEAGEEFNLNSPKQLGVILFEKMGLPVIKKTKTGYSTAVDVLEQLREQAPIVEDILTYRQIAKIQSTYVEGLLKVIQSDGKVHTRYVQTLTQTGRLSSVDPNLQNIPIRLDEGRKIRQAFVPREKDWLIYSSDYSQIELRVLAHISNDEHLKAAFLEGQDIHASTAMRVFGIEKAEDVTPNMRRQAKAVNFGIVYGISDYGLSQNLGISRKAAQQYIDTYFEKYPGVKEYMERIVREAKDQGYVETLYHRRRYLPDINSRNYNIRSFAERTAINTPIQGSAADILKIAMIELDKRLKETGLQATMLLQVHDELVFEVPEKELESIRSHWSTEVMEQAVSLHVPLITDSSWGKTWYEAK

SEQ ID NO: 57768 - protein, 313 aa, Enterococcus faecium
MNIIKIRHPYQSEQIPEDDVVLVLGFFDGVHIGHQKVIKTGMEIAQKEGLKLALMTFNQHPSIVFKKIDPSSVKYLTSLKQKEEKMAALGIDYLYEVDFTSSFAHLAPQEFVDQYIVGLHAKYAVSGFDYTYGPKDIADVAHFPEYAKGRFKIVTVSKEEEQGEKISSTRIRGLLDSGQVKEAAKLLGCTYEVEGVVVHGDARGRLLGFPTANVKVKSTVHLPKEGVYVSEIKIGETWYPAMGSIGHNDTFGEGRELTVELYILDFNQDIYGEHVAVRWNQFLRDQVKFSSVEELIEQLKEDEQATAEYFSQQ

SEQ ID NO: 57769 - protein, 271 aa, Enterococcus faecium
MLEEMPMMNKLIFGRYMPGDSLIHRLDPRAKLLASFYFIGIIFLANNWETYLLLAFFTLLSVFLSKVDLKFFIRGIRPLIWLILFTVALQVLFTSGGETYWSWGVFHITEFGVMNGLFIFCRFVLIIFMSTLLTLTTPPLELSDAIEYLLRPLKAVRFPVHEISLMLSIALRFVPTLMDETEKIMNAQRARGVDFGEGNLVQKMKAVIPLLIPLFVSSFNRAEDLATAMEARGYKGGEGRTKYRVLHWHNRDTMVIIAFVLLTVLLIFLRG

SEQ ID NO: 57770 - protein, 385 aa, Enterococcus faecium
MNFMEQLKAYKFRIYPTEEQEIFFAKSFGCVRKVYNLMLDDRKKAYEEVKNDSSKKMTFPTPAKYKKEFPFLKEIDSLALANAQLNLDKAYKNFFRDKSVGFPRFKSKKNPVQSYTTNNQNGTVALIDSKFIKVPKLKSLVRIKLHRQPKGIIKSATISRHSSGKYYISLLCKEEIIELPKTNSTIGIDLGIMDFAILSDGQKIDNNKFTSKMEKKLKREQRKLSRRALLAKNKGTNLFEAKNYQKQKRKVARLHEKVMNQRTDFLNKLSTEMIKNHDIICIEDLNTKGMLRNHKLAKSISDVSWSKFVTKLQYKADWYGRKIIKVDKWFPSSQICSECGHKDGKKSLEIREWTCPVCHTHHDRDINASINILTEGLRLHSMGLA

SEQ ID NO: 57771 - protein, 373 aa, Enterococcus faecium
MTDNSKTRVVVGMSGGVDSSVTALLLKEQGYDVIGIFMKNWDDTDENGVCTATEDYKDVAKVAAQIGIPYYSVNFEKEYWDRVFEYFLAEYRAGRTPNPDVMCNKEIKFKAFLDYAMDLGADYVATGHYAQVTRDENGVVHMLRGVDNNKDQTYFLSQLSQEQLSKTMFPLGGMEKSEVRAIAERAGLATAKKKDSTGICFIGEKNFKQFLSNYLPAKKGNMVTLDGEVKGQHAGLMYYTIGQRQGLGIGGGGDSQEPWFVVGKDLATNTLYVGQGFHHPALYATSLDASEIHFTTNEPMPKEFKCTAKFRYRQQDVPVTVRLLDDNRAEVVFDEPVRAITPGQAVVFYDGMECLGGGLIDHAYQETKVLQYV

SEQ ID NO: 57772 - protein, 178 aa, Enterococcus faecium
MSRIGNKVVVIPEGVTVTQDGNNVTVKGPKGELTRTFSADIKMNIEGNEVTFTRPNDSKEMKTIHGTTRANFNNMVVGVSEGFQKALELIGVGYRAQLQGSKLVLNVGYSHPVEITPPAGVTVEVPANTQVIVKGANKEEVGELAANIRGTRPPEPYKGKGIRYVGEYVRRKEGKTGK

SEQ ID NO: 57773 - protein, 431 aa, Enterococcus faecium
MLERYTRPEMGNIWTEENKYRAWLEVEILADEAWAELGEIPQEDVKKIREHASFDIDRILEIEKLTRHDVVAFTRAVSETLGEERKWVHYGLTSTDVVDTAYGYLIKQANDILREDLKRFTEIIGEKAKEHKYTVMMGRTHGVHAEPTTFGLKLATWYSEMKRNIERFEHAAKGVEAGKISGAVGTFANIPPFIEEYVCKQLGIRPQEISTQVLPRDLHAEYFSAMALIATSIERFATEIRGLQKSETREVEEFFAKGQKGSSAMPHKRNPIGSENMAGLARVVRGHMVTAYENVTLWHERDISHSSAERIILPDTTILLNYMLNRFGNIVKNLTVFPENMKRNMSATFGLIYSQRVMLKLIDKGMTREEAYDLVQPKTAYAWDNQVQFRPLLEEDPTITSVLSKEEIDDAFDYHHHLKNVDVIFKRVGLE

SEQ ID NO: 57774 - protein, 430 aa, Enterococcus faecium
MSFQRPKGTNDILPGESEKWQFVEETARLLFRDYQYNEMRTPIFEHYEVISRSVGDTTDIVSKEMYDFYDKGERHVTLRPEGTAPIVRSFVEHKLFGPEYAKPFKTFYMGPMFRYERPQKGRLRQFHQIGVEAFGSENPATDVESMVMALDFFKQLGITQIRLVINSLGDKETRQAYRQALIDYLLPFESELSEDSKRRLHENPLRVLDSKDKRDQKFVAEAPSILDYLSEPAQKHFDTVVSMLDALAVPYEIDSNMVRGLDYYTHTIFEIMSDAPKMGAQATICAGGRYDNLVEELGGPSTPGFGFAMGIERLLLTMEAEEVVIPAFNELDAYVVALGDETNIEALKVVQAIRNFGFSADRDFMNRKAKAQFKTADKANAKLVLVIGEDELASQTINVKAMASRKEKSFPLEEIYEHFDEVYDEMTLFE

SEQ ID NO: 57775 - protein, 252 aa, Enterococcus faecium
MVRVKGLNIGSGRPKICAPLIGAVREEVLREAVLAREAGADLVEWRVDHYREVFSFDEVAETLVLIHEMLDGLPLLFTFRTLAEGGEQDISIRQYRDLYEHVIHTGLVDMVDIELFKVESLGKRLIEEIKSLNIPLIISSHDFKETPADPVLLYRLNVMEHFGADIGKLAVTPNNERDVLRLMELTRRANAFVSMPIITMSMGNLGKISRLVGGTTGSVMTFGSLSSDSTSAPGQLPVKALKQIIQLLNEPL

SEQ ID NO: 57776 - protein, 373 aa, Enterococcus faecium
MDKYNVKTSFQKWFSAINFSGLSENSQSLISDFDFYSKKLDFQTTLKVLLHAVYEELPSYREIDRAFLDQRLCKELGIDSLCYSSLSRRAPEIKQEVLMEIFTQLVARISAQQPSSKTTSLQLIDSTTIPLNKAWFPWAKFRKTKSGIKLHLNLCYLDKTNQYPESFTMTNASEHDRNHLEVLVDKTQATYVVDRGYFDYKLLDKLNRDGYFFVTRTKSNTKITILDQIEVADTTTRDGTIISDQQVILVGGVNHVTERFRLVTVLTKGQKILRMVTNLFDVSPNEVADMYQARWQIELLFKHLKQNLTIKRLYSHSEQGAINQVILTLIATLLTYVIKIELNTTATLFQLKRTFHYLMFEPAEEWFKRYRPG

SEQ ID NO: 57777 - protein, 466 aa, Enterococcus faecium
MLKLPEDFIFGGATAAYQVEGATKEGGKGAVAWDDFLEEQGRFSPDPASDFYHQYAKDIELCERFGVNGLRLSIAWSRIFPDGAGKPNPEGIAFYHRVFEECKKRNVTPFVTLHHFDTPKRLFDHGDFLNRETIEAFVSYAIFCFHEFKEVKVWSTFNEIYPVATNQYLLGVFPPGIKYDFTKIVACLHNMMVAHARVVNYFKENELPGEIGVVHSLETKYAATDAPEDKHAAFLDDALSIRFLLDATYLGYYSTETLTALDEICEANQASYHFPEEDFVELKKASTRNDYLGINHYQCHFVKAYDGENAIHHNGTGEKGTSVYKVKGIGERIYKEGIPRTDWDWLIYPEGLYDLLLRIKSDYPHYNKIYITENGMGYKDQFEDGIIMDQPRIDYLRVYLESLSKAITAGVNVKGYFLWSLMDLFSWTNGYNKRYGLFYVDFETQKRYPKESAYWYKLVSETKTII

SEQ ID NO: 57778 - protein, 73 aa, Enterococcus faecium
MIRFRKYLTEKGLWSEEKEEQVIEATKEEIKAAIAEADKVPKQKVSDFLKNMFEVSPQSIKEQIAIYEAKESK

SEQ ID NO: 57779 - protein, 157 aa, Enterococcus faecium
MQTLAQAKQNFVYQVERIETEEKTKRHLQNIGIVAGSKIVVVNLSGNNAILLVKSHRVAVSREILGQIFVNKKTASSESWTSLDQLKAGETGIVVAIHGQGAVKRRLMDMGLTRNVKIVIRKLAPLGDPIELTVRGYELTLRKSEAELILIQREEKE

SEQ ID NO: 57780 - protein, 392 aa, Enterococcus faecium
MKVKVKKRASNRLKKGYPLIQKEDLAHPQKETTQWVELVDSQNQFIAKGYLGKQNKGIGWVLSQQNIPFDQSFFEEFFVKSKEKRTFFFSDDSTTAFRIFNGEGDGIGGLIVDYYAGYAVFSWYNETLYAHRELLIQAFREIYPEIIGGYEKIRFESVNLPESQFIYGKEAPEPLIVKENGVKFAVYLNEGLMTGIFLDQKEVRGSLAEGFASGKTVLNMFSYTGAFSVAAAMGGAIETTSVDLAKRSLKKTQEQFEVNGLDVDQQKIIVMDVFEYFKYAKRKQFLYDMIVLDPPSFARNKKKVFRVAKDYGELVKDSLDILAEDGILIASTNAANVSIEQFQTMIEEEFHAKNVSFEQLALYRLPKDFQTTDTFLEGNYLKVFVYQIKNNH

SEQ ID NO: 57781 - protein, 300 aa, Enterococcus faecium
MEIGVIGLGKMGLNLALNLKEHHHKVQGLDISSTAVSQARENDIPAYQEISEFLATFEQKKIIWLMLPAGEITENMLRKLFPKLGPGDIIIEGGNSYYKDSIRRAEEFQKNEIGYLDCGTSGGIEGARHQACLMIGGDKETFLSVEQLFKDVAIERGYLYAGASGSGHFLKMIHNGIEYGMMQAIGEGFQLVQKSEYAFDLEQVARVWNHGSVIRGWLMEIMEDQLNEHPNLSNYRGIVSASGEAKWTVETALEMAVPVPVIATSLFMRNLSQEEDSFSAKVVSALRNGFGGHEIVEKGE

SEQ ID NO: 57782 - protein, 119 aa, Enterococcus faecium
MARVKGGTVTRKRRKRVLKLAKGYYGSKHTLFKTAKEQVMNSYNYAYRDRRQKKRDFRKLWIARINAAARMNGLSYSKLMHGLKVAEIDINRKMLADLAVNDAAAFTALADQAKEALAK

SEQ ID NO: 57783 - protein, 202 aa, Enterococcus faecium
MNSFKKIVLGTTFAAGATAMFVGTTNAHADEVYTVKSGDSLSKISQKFAGDNSMIDAIAEKNSIANINRIYVGEQLTIPTSNDSSATTENKTTENTASTTETATQEHTYVAPVETVEVAPAAPAAATAPTSSSAKEWIAQKESGGSYTATNGRYIGRYQLDASYLNGDYSAANQERVAEQYVTSRYGSWDAAKTFWLANGWY

SEQ ID NO: 57784 - protein, 335 aa, Enterococcus faecium
MFKGKTILVTGGTGSIGSEIVRQLLKYEPKAIRIYSRGEEKQFYMQQELSNHTNLRFLIGDIRDSQRIDYACRDVDIIFHAAAMKHVPASEYNPMEAVKTNVMGTQNVIDAAIKNNVKHFVGISTDKVVSPTNTMGATKLLSEKLIIAANQYKGKTETIFSCVRFGNVMGSSGSVIPLFSKQIKNNKDITLTDVDMTRFMMSIPDAARLVLSAAMNSKFGETYVLKMPAINILTLAQSLIKIYNDTHDEKYRGEIKVVGIRPGEKLYEELMTTDEIERSYENDKMYIIPPHYHATDELYKDYEKIKITAYSSDATELMSGQEFIRIAKENNVVTW

SEQ ID NO: 57785 - protein, 500 aa, Enterococcus faecium
MFKKFSQLGRAFMLPIAILPVAGLLLGLGGALTNESAINAYPFLDQPWLHTILSIMSYAGNAVFANLALIFAIGIAVGLANGDKGTAGLAGGVAYLVYTATISGFLELFSAKDATLDTGVVGSIVVGGTVAFLHNRYRKIELPQFLGFFGGSRFIPIVSSLAAIIIGSFFYLIWPPIQNGLVVAGEQIAQMGSLGTFLYGFLLRLTGAVGLHHTIYPLFWYTSLGGTETVAGSTIAGAQNIFFAQLADPNHTGLFTYGTRFFAGRFATMMFGLPAACYAMYRAIPKKNRKKNGGLYFSGALTSFLTGITEPVEYMFLFVAPWLYVIHAFLDGLSFYFADILNIRVGNSFSGGLIDFLLFGVLQGNDKTNWLKLIPFGIAWAFIYFFVFTFFIKKFKVAIPGMEEESEVHSEKVINKNTSLHEESLIIIEALGGKENIESVEACATRLRVAVTNGEIIQKQTIKDTGATAVFEVKGGIQAVFGGKADLLSQEINQILGKDN

SEQ ID NO: 57786 - protein, 199 aa, Enterococcus faecium
MNDLKENMIFDLSKTAFVAIDMQKEIVNNGTLSPHTAASILTNNDLLVRTLKRTAALKVLVNVDISTFPYLSQQTDMGGMTASVPPEFTDLLLKDSLKDTDNMLTITKYNPSAFFGTSLDLQLRRRGIETIILSGVATTNGVYATALDAFQHGYHIVLAEDACSDRDKESHQLFIKKIFPKTARVRSTKQIIEAIQQSK

SEQ ID NO: 57787 - protein, 324 aa, Enterococcus faecium
MKKTATVLFVILGLSIIAAMIGISTSANERANENLSFTVKTDRIVYDMTQQVITIPVKPNKSVNASDVHAVLTYGWDGNGSSEKVIGEVYLKDVQWTAGIEYTIMISAELSIDEIKSKDKVDLIVFYDGQMTITENLKPSSWTVVGPPSSTDSTSSESSTENTSGESSTESTSSESSTENTSSESSTESTSSESSTGSTSSESSTESTSSESSTGSMSSESSTGSTSSESSTGKVNNELDLVPIIPTKEQKRNAGSNLKSVLKQPDFVSRGIDHQEKAKETDNRKSDLPETGSRTLNKLITWMGVLLILIVGASYFRSLFHRVK

SEQ ID NO: 57788 - protein, 218 aa, Enterococcus faecium
MGQKVHPIGMRVGIIRDWDAKWYAEKEYAEFLHEDLRIRKFISTKLADAAVSTVEIERATGRVNISIHTAKPGMVIGKGGSEVESLRKELNKLTGKRIHINIVEIKKPDLDAKLVGEGIARQLENRVAFRRAQKQAIQRSMRAGAQGIKTQVSGRLNGADIARSEGYSEGTVPLHTLRADIDYAWEEADTTYGKLGVKVWIYRGEILPTKKNTEKGGK

SEQ ID NO: 57789 - protein, 702 aa, Enterococcus faecium
MAKIQELSERLANQIAAGEVVERPASVVKELVENAIDAGSTQIDILVEEAGLRTIQVIDNGEGILADDVENAFKRHATSKIHNRDDLFRIRTLGFRGEALPSIASVSEMTLETANQEEKQGTYLSLKGGEVIEHRPAPLRQGTKITVSNLFFNTPARLKYVKTLHTELANIGDIVNRLALSHPSIAFRLVHDGNKMLATAGNGDLKQTIAGIYGLSTAKKMLKIEGKDLDFELFGYVSLPEVTRASRNYLSTIINGRFIKNFSLNKAIVAGYGSKLMVGRFPIAVLEIKMDPLLVDVNVHPTKQEVRLSKEKELTELISNAIQKALSQENLIPSAADNLRFKKKVPDQPKTEQIEIDLSYAFEEEKPKKPSSLNFDRETGTFFVEELKNTFVDRIVDKSVENVENYSGFSEENTTYPEKTAKTVDKFGENVDNFVEKTVEKSEKKEFPIVDNMEKTNEEQADKSVEEDEKIYEEELTLHPEFDFTQGNDKTLEQAIKKLETEKPVQRFPQLEYFGQMHGTYLFAQSSDGLYIIDQHAAQERIKYEYFREKIGEVSDDLQELLVPFVLDYPNSDALKLKEQKHLLEDAGIYLEEFGQNSFIVRAHPTWYPNGEEESIIREMIDMLLTTGSVSVKKFREATAIMMSCKRSIKANHYLNEAQARVLLKDLARCENPFNCPHGRPVLIHFTNSDMERMFKRIQDPH

SEQ ID NO: 57790 - protein, 265 aa, Enterococcus faecium
MRVLFIGDVVGSMGREMITEYLPRLKKKYRPQVTIVNGENAASGRGITEKIYKKFLQDGVDVVTMGNHTWDNRGIFEFVNEAKKMVRPANFPEGTPGQGMVFVKVNQVELAVINMQARSFMVDLDDPFRKMNELVEEARKRTPIIFVDFHGETTSEKQAMGWFLDGKVSAVVGTHTHVQTNDARILPRGTAYLTDVGMTGPYDGILGMRREPVIEKFLTALPKRFEVVEQGRSILSGCILELDDTTGHAKEIQLIQINDDRPFME

SEQ ID NO: 57791 - protein, 285 aa, Enterococcus faecium
MKMDKLLALYPQAQKKNSPASEADILSFAIDDAFIWIKQDSLSQQETSLLKALFPVINDQKKHPWYHYLFKDASCVQEKSFRLIQLHVESKGEFLKKEWQDTILELFRYSADFFFYTDTDALLVEQINRDYLDATEINGIFLSLDADFDTTTSVFVGSFHSPGTDLVPLFAEERKIFLTEQNNLYTHSRTFSMQDVALHYYTKDTVKDSKLIKSYIELIKQNEMEVIIQELWNELGNVSSAAKTLFLHRNTLKYRIEKFQEQSGFNLKKANDLLFCYLLLLHEHN

SEQ ID NO: 57792 - protein, 389 aa, Enterococcus faecium
MMNLSNRFSPRLSRIEVSKIRQFDQQISSIPDVIKLTLGEPDFPTPEHVKQAGIAAIEEDFSHYTGMRGLEELREAACIFQQQRYGLTYDPQTEVLTTVGATEAIASALLSVLEEGDKVLIPAPAYSGYQPLVELAGAELIPIDTSDTGFVCQPEQFERAFEQYGSAVKAVILNYPNNPTGTTLSAKQLKAIAEVLKKYPVFVISDEVYAELTYSGTHMSIATYLPEQTIVISGLSKSHAMTGWRVGFIFAQKALIDELIKVHQYLVTAATTMSQKAAAEALINGVKDSENMKEQYQTRRDYLVQQLAPLGFEVTQPNGAFYLFCKLPAAIQTDSWQFCVELAEQAKVACIPGIAFGPEGEGYIRISYASSMEKLHEACKRIKDFLTEQ

SEQ ID NO: 57793 - protein, 286 aa, Enterococcus faecium
MLYTMKELLKVAKENQFAVPAFNICSYDMMKAIIEEAERLEAPVILEIHPDEIAYLSDEFVAAVRAYAYTSKLPIVIHLDHGGTIEDVLRAIRNGYSSVMIDASLKSFDDNVQITKKVVALAHAVNVSVEAELGTIGNNGSAEGGAETIIYTDPDQAKIFVKETGIDTLAVAIGTAHGLYPKNRTPKLNIDLLKELNQQIDLPFVLHGGSGNPDAEVSEAVKYGVAKVNLSSDLKSVFFNALREILSENPSMYEPNAIYPAANKKVQEVVKHKMEILNTVGKASLY

SEQ ID NO: 57794 - protein, 589 aa, Enterococcus faecium
  MISC_FEATURE (490)..(490): X=any amino acid
  MISC_FEATURE (539)..(539): X=any amino acid
  MISC_FEATURE (557)..(557): X=any amino acid
  MISC_FEATURE (559)..(559): X=any amino acid
  MISC_FEATURE (564)..(564): X=any amino acid
  MISC_FEATURE (569)..(569): X=any amino acid
  MISC_FEATURE (573)..(573): X=any amino acid
TKQELFELFHASANGLTEEQIERSRENYGENAISYGKKTPFIVEILKAYITPFTLVLIALGIISFITEYVLAAPGDKDLFGVAIIFTMVIVSGTMTLIQSVRSNQAAEKLKSLVKVTAAVKRNGKYTEIPMEEIVCGDLVRLSAGDMIPADMRLLSAKDLFISQAALTGESYPVEKHAKVCEDDQQSETSYENLVFMGSNVISGSAEGIIVSVGNETLFGHVAETLSEKPIQSSFELGIHKTSMLLIKFMSLMAPAVIVINGLTKGDWLEAFLFGLSVAVGLTPEMLPMIVTTNLVKGASVMAKKGTVIKNLNAIQNFGAIDVLCTDKTGTLTQDKIILEYHMDCERNEDDRVLRHAYLNSYYQTGLKNLLDVAIIDEATETLDTDKINYQKVDEIPFDFERRRMSVVVADPAGKTQMITKGAIEEMLNISKFIDLGGTVTPLTKESKEAVLAKVQSLNEDGLRVIGVAQKTNPSVVGEFSAQDESHYGXDMCYLAFLDPPKETTKQALNSLKEHGVAVTSLTGDNELVTRSVVPVQVXSRDQLNWLPGEKISEIEXSXITTQXTDRPXSIQXNLNPQQQMHGSLTDQN

SEQ ID NO: 57795 - protein, 644 aa, Enterococcus faecium
MILLQANQIARHFGAEVLFENIHLEISTGARVALVGRNGAGKSTLLKIIAGIEAPDEGKIAKNKTATLGYLAQDTGLDSNETVWNEMLKAFEQVRQMEERMRELEIFISEGTPDTPAYSSYLKEYDRLQHDFSDRNGYGYENEIRSVLHGFKFDSSFYDQKIDTLSGGQRTRLALARMLLQHPDILILDEPTNHLDIETLSWLENYLQSYTGALLIVSHDRYFLDKVVNEVYELSRRKMRHYKGNYSKYLDLKAEQLASEWKAYEKQQTEIHKLEDFVARNLVRASTTKRAQSRRKTLEKMDRLDRPQGDEKQANFLFSIEKPSGNVVLQIEDAAIGYDNVTLSEPINLDIRRQEAIALVGPNGIGKSTLLKSIIHQIPFIRGKETLGTNVTIGYYDQGQADLHTNKTILAELWDEHPTTPEKEIRSALGAFLFSGEDVEKPIPLLSGGEKARVALAKLAMNKENFLILDEPTNHLDIDNKEVLENALIDYDGTLLFVSHDRYFINRIATKVVELSENGSKVYLGDYDYYLEKKQEEEEIAELLAQDEPESAPAPTNKSDYYQSKEQQKLIRSLQRKITQVEEEMARIDEWIDQLEQEMVAPENLEDHVKLNELNQDLEAARQDQETKLTEWEELSLELEEYEN

SEQ ID NO: 57796 - protein, 272 aa, Enterococcus faecium
MSYIYLIKENYPFLTKSEKKVADFILNSGKTIIYSTMSDIKKNTKVGDATIIRFCQKIGFSGFSDLKIEIAKEDFSQKKEHPTSVKYYDEIANSLTEALYSTIRLLDEEKLNEAIKMITQSKNIYIFGVGSSGNTSLDLENMFLRVGVQAKAVLDPHFQAQVASLLTVNDLVIIFSLSGKTKDTYDSLKIAKKNGAKIIAITNYIHSPIGKSADLVLQTAIEEFLNGGSLAGKISQLYICDLLVHGYEQNNNIDSVELREKVLRSIIDKSIE

SEQ ID NO: 57797 - protein, 687 aa, Enterococcus faecium
MYFTIAGNTKTDKELIKKATKEVGKRTSFLPKTIKYSVIETEEQLHVLGKVLEHESRSSVKLTLTLHDTEGKIEKAGTEYVFGQLDYQISEGFYPTLMDLIRLDVFKETDETMSVEESYRNEKLLQVLEEELESDQRKVNQGSEVEVNEEVPWERPIFPKKESKEKETVYVDEQADIPTQKSIFEEENDVMGQLEVDPFEETMEDEETAEVEVDPVEANEESTWTEGDSQEYIEPLISEEVEKNEIEIQKATVFDYILDQYPPEHEWMKEKNKLFLNELYSKYQLPQTYQAFLESKEELISQGKGTLLEQLESVQSTNWHELAQEDLLATFEERQQETDQEINEYATEQSSNWEKAKEELNKEEQRVIEEEVQKIKERYEKKRDNAYSLCVAKINNFTQTNQEALSKEKENLLKERIKERKEEFYRGLRTDKLKISKELNEQLNKLYQTTTEVLMEKHEKIQQELQVQIPKWKKEYEIQQQELKEQEEKQRQKEKEREQLELKKREQDLAEQQMAIEKQRLNQEKEKEAAARKERQEQMDTLRQAQLNYLAQPQPTPSVAAVQTPMNNQTNLTPSPQRSFNGWMVGCIASLSLLLGGGTVFAFNHINQSSQADSVATTTSIKEEAQEQARKEYEQQLEELLNRTNQSTTESSMENSKESDPSKAKEGSSDSTVQSNTSESSESNEVK

SEQ ID NO: 57798 - protein, 465 aa, Enterococcus faecium
MIRIKGGGTMAKKSKVQFVCQNCGYVSPKFLGRCPNCGKWNTMVEEIEQDTTDRRTRTSLTGEKAKPTKIADVVPKKEPRIKTKLEELNRVLGGGVVPGSMVLIGGDPGIGKSTLLLQVSQQLAAIGGKVLYVSGEESAEQIKLRAERLGSINTEFYLYAETDMNEISRAIEHISPDYVIIDSIQTMTQPDITSVAGSVSQVRETTAELLKIAKTNGIAIFIVGHVTKEGSIAGPRMLEHMVDTVLYFEGEQHHSFRILRAVKNRFGSTNEIGIFEMHEHGLEEVANPSQIFLEERLDGATGSAIVVAMEGTRPILVEIQALVTPTMFGNAKRTTTGLDFNRVSLIMAVLEKRAGLLLQNQDAYLKAAGGVKLNEPAIDLAIAVSIASSYKEKGTQPTECFIGEIGLTGEIRRVSHIEQRVKEVQKLGFTKVYLPKNNLGNWEAPKGIEIVGVATLAETLKRVFR

SEQ ID NO: 57799 - protein, 786 aa, Enterococcus faecium
MNNRILETLEFEKVKQMVRQFVVTAQGKEELAELVPVSEKQTITNWLQETEDGLKVQRLRGGIPIPKLENIRPHMKRIEIGADLNGVELAQVSRVLSTTSELNRFIDDLSDSEIEFARLYMWADQLVTIPVLSRRLKEAIDEDGRVTDDASPELKSIRQNIRRSEQAVREQLDGIVRGKNAKYLSDAIITMRNDRYVIPVKQEYRGVFGGVVHDQSASGQTLFIEPKQVVDLNNRLRQYQIAERNEIQRILSELSAELVPHRQEIIHNAYVIGKMDLMNAKARFGKEVKAIVPGISEDNHVVLKQARHPLIDQEKVVSNDITIGKDYQAIVITGPNTGGKTITLKTLGLLQLMGQAGLPIPAGEESQIGIFEEVFADIGDEQSIEQSLSTFSSHMTNTVDILSKVNEKSLVLFDELGAGTDPQEGAALAIAILDDLGKKSAYVMATTHYPELKVYGYNRANTINASMEFDVDTLSPTYRLLIGVPGRSNAFEISSRLGLDTEVIDEAKQLMNDESQDLNEMITDLENRRKMAETEYLEMRHFVSEAQELHDDLKEAYSYFFEEREKEMEKAKKKANEVVSEAEEKAEKIIADIRKMQQQIGQGNVKEHQLIDAKTQLANLHQEETLKKNKVLKKAKEQKTLKPGDEVLVTTYGQRGTLLRKNGNQWQVEIGILKMNVSEDELTPVAPQKEPTQRVIHAVRSESSSHVPNQLDLRGKRYEEALSEVDQYLDSAILAGYPQVTIVHGKGTGALRKGITDYLKNHRSVKSFEFAPANQGGNGATIVKFK

SEQ ID NO: 57800 - protein, 411 aa, Enterococcus faecium
MNRVVITGYGVTSPIGNDADSFLNSLKEGTNGIAPITKFDASETGITLAGEVKDFPYDKYFIKKDSKRMDMFSIYGIYAALEAMEMSGLDKEKMNQDRFGVIIGSGIGGLPTIENQVIRLHEKGAKRVSPMFVPMAIANMAAGNIALRVGAKGICTAIVTACASGTNSIGEAFRNIKHGYSDVILAGGTEATICEMGIAGFAALTALSESTDPNRGSIPFDENRNGFVMGEGAGVLVLESLEHAQARGAKIYGEIVGYGANCDAYHMTAPTPDGSGASKAMKLAMEEAGVQPEQVGYINAHGTSTPANDQAEAKAIQIALGENFRDTYVSSTKSMTGHLLGAAGGIEALATLLALEHQFIPPTINVEKQDPEIDLTVVKNESKPASFTYAMSNSLGFGGHNAVLCMKRWEE

SEQ ID NO: 57801 - protein, 358 aa, Enterococcus faecium
MERLLILEDGTVFEGKAFGADASVFGEIVFTTSMTGYQETITDQSFNGQIITFTYPMVGNYGVNRDDYESISPTCKGVVVKEHARVASNWRNQMTLDSFLKQKGIPGISGIDTRALTRKIREVGTMKASIVDAGDSFEHAFDQLKATVLATNQVQQVSTNKPYPSPGTGRKVIVIDFGLKHSILRELSKRNCNLTVLPYNTDAETILALSPDGVMLTNGPGDPKDVPEAIEMIKKIQGKVPIFGICLGHQLFALANGADTYKMKFGHRGLNHPVREVATGRIDFTSQNHGYAVDEATIDPEKLIVTHVEVNDGTVEGVKHRDYPAFSVQFHPDAAPGPHDALHLFDEFMEMMDAGKEQ

SEQ ID NO: 57802 - protein, 521 aa, Enterococcus faecium
MTNVADMTNVEKIIVLDYGSQYNQLITRRIRDLGVFSELLSHRITAEEVKAMNPKGIILSGGPNSVYDENAFGIDPEIFNLGIPVLGICYGMQLITYKLGGSVEPAKNREYGKALLEVTSDQAVLFKETPKQQTVWMSHGDLVTKVPEGFETVGTSKDCPIASIQDTTRNFYGIQFHAEVRHSEYGIELLRHFAFDVCHCEGNWTMDNFIDMQVEKIREQVGDKKVLLGLSGGVDSSVVGVLLQKAIGDQLTSIFVDHGLLRKGEAEQVMESLGGKFGLNIIKVNARDRFLDKLKGVSDPEQKRKIIGNEFVYVFDDEATKLAGEEGVSFLAQGTLYTDVIESGTETAQTIKSHHNVGGLPEDMQFELIEPLNTLFKDEVRELGTQLGMPDSIVWRQPFPGPGLGIRVLGEITEDKLEIVRESDAILREEIAAAGLDRDIWQYFTVLPGIRSVGVMGDGRTYDYTVGIRAVTSIDGMTADFARIPWEVLQKISVRIVNEVAHVNRIVYDITSKPPATVEWE

SEQ ID NO: 57803 - protein, 218 aa, Enterococcus faecium
MKYKTSFQVAGSFFLVLFFILGWIVKFHLSWLSGFDQWFTGIVRASYPDLNSYQLFMTKFGNPLTVIILFACAALWMWYKKKRAETFWFVSGFIVIAGIINPVIKLFFMRERPSLAHLVVETSYSFPSGHAAGSMILYGSLLFLLPAFVQKRTLRTLLQLLMMFIIVSVGISRIYLGVHFPTDIIGGYLLSLSWLCLTYPVYREKRKQIDNSYRKKDF

SEQ ID NO: 57804 - protein, 247 aa, Enterococcus faecium
MIEFINVSKSYGKKQALKDLSLSIRQGEIFGFLGHNGAGKSTTIKSLVSIIEPSSGTILVDGMKLTENRLSIKQKIGYVPDSPDIFLQLTAGEYWDLISAAYELDTQKKEKRLAELTALFDMYSHQNETIASFSHGMRQKTILIGTLLPDPDIWVLDEPLQGLDPQAAFDLKEMMKAHAAKGKTVIFSTHVLDTAQQLCDKLAILKKGELIYQGAVSELLNGSPDETLEKIYLKMAGRQATGDGPYV

SEQ ID NO: 57805 - protein, 453 aa, Enterococcus faecium
MKKISTYENKKVLVLGLAKSGVSAAKLLHELGALVTVNDGKPFDENPEAQELLSLGIKVITGSHPIELLDEEFSLMVKNPGIPYSHPLVAKAQEMGIPVITEVELAYEVAECPIIGITGTNGKTTTTTMTGLLLNAGADQGIARLAGNIGYPASGVAQEAKSEDKIVMELSSFQLMGITDFRPHIAVITNIYEAHIDYHGTRKEYVKAKWNLQKNMTEKDYLILNWNQSELQELAQRTKARVLPFSTKEVLEDGVYADDYSIYYKKEKIMEISELGVPGKHNVENALAAISVAKLYGISNEAIRETLHFFHGVPHRTQYVGEIQGRKFYNDSKATNILATKMALSGFETSKVVLLAGGLDRGNTFDELIPSLKGIKAMVVFGQTKEKLMDAGKKAGIETIVTADSVEQAVPLALENSTDGDVVLLSPANASWDQYPNFETRGNRFMEAVNRLK

SEQ ID NO: 57806 - protein, 358 aa, Enterococcus faecium
MKITLLYGGRSAEHEVSILSAFSVLNAIYYNYYQVQLVFITKEGQWVKGPLLTEKPASKDVLHLSWDPSGQTEEGFTGKVINPGEIKEEGAIVFPVLHGPNGEDGTIQGFLETLNMPYVGAGVLTSACAMDKIMTKYILQAAGVPQVPYVPVLKNQWKENPKKVFDQCEGSLLYPMFVKPANMGSSVGITKAENREELQNALATAYQYDSRAIVEQGIEAREIEVAVLGNEDVRTTLPGEVVKDVAFYDYEAKYINNKIEMQIPAEVPEEVYQKAQEYAKLAYTMLGGSGLSRCDFFLTNKNELFLNELNSMPGFTEFSMYPLLWENMGLKYGDLIEELIQLGMNRYHQRQSFFEKNE

SEQ ID NO: 57807 - protein, 336 aa, Enterococcus faecium
MTVKVGINGFGRIGRLAFRRIKEVSDDIEVVAINDLTSPTMLAQLLQFDSTHGTYPGTVTATEDSIVVDGEATRVYAEPDASKIPWAKENGVDIVLECTGFYTSEEKAKAHLDAGVKRVVISAPAGAMKTIVYNVNDDTLDENDKIISAGSCTTNCLAPMAYFLNNEFGIEVGTMTTVHAYTSTQMLLDGPVKGGNLRAARSAADNTIPHSTGAAKAIGLVIPELQGKLQGHAQRVPVVDGSLTELVSVLKTKVTADQVNEAIKKHTVDNPSFGYDDRQIVSSDVIGTTQGSIFDPTQTEVTTAGDFQLVKTVAWYDNEYGFTCQMIRLLEKFANL

SEQ ID NO: 57808 - protein, 742 aa, Enterococcus faecium
MENFSLTENRTFSRLEKQMIWKKPKSHRTSAEEWRIASEIKGNWQDPEMKISNVLLEGDAGSGKTQLAKALSADLQLPYTKVTCFADMDKSDVFGALLPVVDSNKEQDQELLEAIYQTDTLEAVLTLIQNHYGIDPFSAKEKLAELVQRIEADYPDAIHYSYYPSEIVRAIEKGYLLEIQEPTVIRDASVLVALNSALEPNGMLNLPTGIIRRHPDCVIVITTNRNYQGNRPLNESLRDRMQHAEKMDLPALEVMAERAMAKTMIQKQELLLKMAEIIRLLDETAKANAIKGVAGMRSYFYWANTYKQGQDLLQSIYPKVLYKLSTDSDELAILEQALSDSGLLLELQDILRKEKWGHPQSEHTKGRTISAEEANERNITENAEEILRLDEKKSLSAEEPNEGEEKQEETIEKNEIPPQMQKERSSDIEGKNQKEQQTGDDSQEMSASDMEAHDKEIKKQLNKEARQIMKETIHEKEGLIVHRPAFQGKTPEARELHMQVMPIVESLSRQILELLDNEQTETYQKGKYEGQRFNASKVAYGDLRNFDKKNPPHEQPSLAVAVRIDESGSMIRDDRIEAAKKAAIAIAEFSKKVDIPLLIYGDTADRSSREKTSLFSYKEFEDGFQWLNEKLVTMKPRQNNRDGAALRLAAEKLNRQSATTKLLLNISDGQPKALPDYTGKKAKEDIQSVLKEYERQGILFVSAAIGQDKEEIKSIYGESRFVDITDLNEFPKQMIQLIARYL

SEQ ID NO: 57809 - protein, 669 aa, Enterococcus faecium
MAEKETFYITTPIYYPSGKLHIGNSYTTIACDAIARYKRLMGFDVFYLTGVDEHGQKIETKAEELGVKPQEYVDKMAADVKKLWKTLDISYDKFIRTTDDYHKAAVQKIFDRLLEQGDIYLGEYEGWYSVSDEEFFTETQLAEVYKDDEGNVIGGKAPSGHEVELVKEESYFFRMSKYADRLLEYYEEHPEFIQPESRKNEMINNFIKPGLEDLAVSRTTFTWGVPVKSDPKHVVYVWIDALSNYITALGYGSEDESLFEKYWPADVQMVGKEIVRFHTIYWPIMLMALDLPLPKKVFGHGWLLMKDGKMSKSKGNVVYPEMLVERYGLDALRYYLLRAVPFGSDGVFTPEDFVSRVNYDLANDLGNLLNRTIAMINKYCDGLVPDYASLVTPFDSELSTTAANVVGRYHDAMEKMEFNTALAEIWVLISRANKYIDETEPWVLAKDEEKKAELNSVMIHLAESLRIAAILLQPIMTETPEKIFNQLGLDSETMNLEGLHFGEFPSGTKVVAKGTPIFPRLDMEEEVAFIQEKMSEGTQTNEDTVKWDPEETELVSTKEKQIKFDVFEKVELKVAEVINCQKVEGADKLLQFRLDAGDSQDRQILSGIAEFYPDPSELIGKKVVIVANLKPRKMRGQISQGMILSAEAPDGSLQVIEAPKSMPNGSEIA

SEQ ID NO: 57810 - protein, 301 aa, Enterococcus faecium
MEQSIFLKKEHQQVEKELYFDFCGFSKTMPFHSFGPAIRNDYILHVVMEGKGSYHVKNQQFQLKKGDLFLIRPGDSTFYLSDGEDPWMYCWLSFGGSAAEEIIRQSLFREDQYTMVSSDIQKYIDIILECMKDTEETLENELQLTALTYRFLSVLLKDGGKVSGGVQKVHSSLAVETVKYIEAHYAEKLSVEEIAQHLAVNRSHLSRVFKNHMGTSIKEYLIGVRINRGAFLLSLTDESVESIAYQVGFNSLVVFSRMFKKSTGETATNYRKRMKNENFKNIALDTLKKQLEKQTAVSWTT

SEQ ID NO: 57811 - protein, 932 aa, Enterococcus faecium
MKMKETLQLGKTKFPMRGNLPNREGEWQKEWEENRIYQKRQELNEGKPSFVLHDGPPYANGNIHLGHSLNKISKDIIIRSKSMSGYRAPYVPGWDTHGLPIEQVLANKGVKRKEMSMAEYLEKCREYALSQVDKQRADFKRLGVAGDWEHPYVTLDPSYEAAQVRVFGKMAEKGYIYKGLKPIYWSPSSESSLAEAEIEYKDVKSPSIFVAFNVKDGKDILDEDTAFVIWTTTPWTLPANQGIAVNPKFTYVLVEADGRKFVVAKDLLETVQSEIGWENVTVLKEFAGQEMEYMTASHPFYERESLVILGDHVTLDAGTGLVHTAPGHGEDDYIAGSKYKLSVVSPVDSKGLFTEEAPGFEGIFYDKANPMITDLLKEKGALLKLDFFTHSYPHDWRTKKPVIYRATPQWFASIDKFRQNILDEVEKVEWVIPWGKTRLYNMIRDRGDWVISRQRAWGVPLPIFYAENGEAIITPETIEHVAKLFAEHGSIIWFEKEAKELLPEGFTHPGSPNGEFTKEKDIMDVWFDSGSSHEAVLRQRPELSFPADMYLEGSDQYRGWFNSSITTSVAINGVAPYKSVISQGFALDGEGRKMSKSLGNIIAPEKVIKQFGADILRLWVSSVDYEADVRVSMDILSQVAEVYRKIRNTMRFLLANTEDFDPKKDTVSYNDLRSVDKYMTVRLNQVIKEIREEGYDKYNFMHIYRTVMNFLTVDLSSFYLDFAKDVVYIEAEDDYQRRCMQTVFYQTAVALTKLLTPIIPHTAEEIWSFLKEEEEYVQLSEFPGYEEFANQEELMDTWTAFMDFRDNVLKALEEARNSKLIGKSLEAKLTVYPKQQVREMLKALDADIAQLLIVSPDYFEVMAADEQVPDNAMVFDDVAITVEKADGETCDRCRQVRKDVGVDEKLPHLCGRCAKIVEDFYPEAVAEGFEEK

SEQ ID NO: 57812 - protein, 293 aa, Enterococcus faecium
MKVKKAVIPAAGLGTRFLPATKAMAKEMLPIVDKPTIQFIVEEALDSGIEDILIVTGKEKRPIEDHFDANIELENNLREKEKTELLALVEETTQVNLHFIRQSHPRGLGDAVLQAKAFIGNEPFVVMLGDDLMKDDIPLTQQLMMDYEETQASAVAVMRVPENETSKYGIIDPKTDSEKGRCRVKGFVEKPEMGKAPSNLAIIGRYLLTPKIFEILETQEPGAGNEIQLTDALQTLNQTEAVYAREFKGKRYDVGDKLGYMKTNIEYGLQHSEIGTSLSAYIIQLSKKLRTES

SEQ ID NO: 57813 - protein, 314 aa, Enterococcus faecium
MKKIRDLVIDEQFEQFVLIKSADVRIAKNGKKFIAFTFQDTSGTIDGKYWDASEEEINKFTAGTVVFLNGKREVYQGNPQVKILHMRLTRVDEPGEPSLYMERAPLKKEEMEEEINQLLFEITNAHWNRIVRYLLNKYQKQFFEFPAAKRNHHAFASGLAYHTLTMLHLGKSIADEYPELNRALLYAGIILHDLGKVIELSGPMSTEYTLAGNLIGHLVLIDEEITKACLALKISEADEDVLVLRHMVLAHHGLLEYGSPVRPRIMEAEILHQIDNIDASMQMMLTSIRQTEPGKYTDRIFGMDNRSFYVPKDL

SEQ ID NO: 57814 - protein, 233 aa, Enterococcus faecium
MEIIRVKNAEEGGKKAFEIIKEGMNKGAKVLGLATGSTPVTLYKEMTSSDLDFSEMTSVNLDEYVGLGGSDEQSYRHFMDVQLFDKKPFKETFVPDGKAEDLEAACKKYDQIIDAHPIDIQILGIGQNGHIGFNEPGASFDGTTSVVDLTESTINANKRFFDKAEDVPTKAVSMGIGSIMKSKEIVLMAFGESKADAIKGMIEGPVTNHLPASVLQNHDNVVVIIDEEAASKL

SEQ ID NO: 57815 - protein, 433 aa, Enterococcus faecium
MVINFIILFLMIAITSFFVASEFALVKIRRSRLEQLEKENVKNAKLALHVTHHLDNYLSASQLGITLTGLIIGWVGEGSVAALLEPVIGKLPFSSAISSTISVALGFILVTYIDVVIGELLPKSYSIVNTEKVVLFVVKPLHYFYKVMFPFIWVLNHSAAGLGKLLGVRLVSEGEETLSQEELTLVALNSYEKGELTKEEYHYLENVFEFDDTLAKDIQVDRTSMQVFEASETVKEAIKASIEQGHTRYPVILESKDNVLGYVTLPDLIKQSYKDDQLTVEQLIEEPIVTTETIPIKKLLTIMRKKGKHIAILKDEYGGTSGLVTIEDILEEIVGEIRDETDLDEALIAEQSDGSYIISGKLTLDDFQRYFHVEIPEFEETNFTTLAGFASSRYKEIKAGTIIEIASFRFTVLEYQHAHIDYFKVESTERKIE

SEQ ID NO: 57816 - protein, 315 aa, Enterococcus faecium
MAKRKVVVALGGNAILSTDASAKAQQEALMETAKYLVKFIEQGDELIISHGNGPQVGNLLIQQQAADSEKTPAMPLDTCVAMTEGSIGYWLQNAMGEVLKEKGIDKDVVSLVTQVIVDENDPSFKNPSKPVGPFYTEEEAKEQMNADSTVTFKEDAGRGWRKVVASPKPISIKEARVIETLVDQGVITVSVGGGGIPVVETATGLEGREAVIDKDFASEKLAEIIDADLLIVLTGVDNVYVNYQKPDQKKLETVTVSEMKQYIDEKQFAPGSMLPKVEAAIAFVEAKPNAKAIITSLENIENLLASEEGTIIVAD

SEQ ID NO: 57817 - protein, 338 aa, Enterococcus faecium
MNEELILAIESSCDETSVAVVRNGTEILSNIVASQINSHKRFGGVVPEVASRHHVEQITLCLEDALVEAGVSAEDLSAVAVTYGPGLVGSLLIGISAAKAFAWAHQLPLIPVNHMAGHIYAARLVKPFQFPLMALLVSGGHTELVYMQEDGSYEIIGETRDDAAGEAYDKVGRVLGLSYPSGKEIDQLAHQGKDNYHFPRAMIHEDNYDFSFSGLKSAFINLVHNAQQRGEDLDKNDLAASFQASVIDVLITKTLRACQNYPVKQLIIAGGVAANQGLREGLQDALAAKLPEVELVIPPLRLCGDNAAMIGAAAHVEMQKRNFASYQLNADPSLVLSE

SEQ ID NO: 57818 - protein, 174 aa, Enterococcus faecium
MLNQLAIAEVGNAMLGNVIVVSGSFLILLALLKHFAWGPISDILKKREDKIANDLDSAEQSRINSAKMEQEREQQLLASRSDAADIIKNAKESGELSRQNILKDAQEEAARLKSKAQADITVERDSALNSVKDDVAELSLQIAEKILNKELSPEMHESLINQYIEGLGSSNETR

SEQ ID NO: 57819 - protein, 133 aa, Enterococcus faecium
MAELKKMQDYEYDLPELVDQPEQQMPDSSSNQEIILPQSPAKRLKQISALEKIAVASVAIAIVALCVLTVMLRTNISGAEKEITSIQTEINDKKQEKTSLEQEKNELSRTERIKQIAEEKGLSINDDNLRKVK

SEQ ID NO: 57820 - protein, 170 aa, Enterococcus faecium
MYIRQTRKEEVEEVVEIINAAADFIASQGSPQWQNGQKPTKETILNDIERKESYVLIVEDQIAGTAALVSSVDPVYTKIDGSWKESTGPYLSIHRVALAESTRGKKLAKPFLEHLLTIAASKNIQDIRIDTYPANEPMEKTIYSAGFTYQGMIEFPFEHGERKAYQIIIN

SEQ ID NO: 57821 - protein, 335 aa, Enterococcus faecium
MLPEKMEQGFNQNLEAIQLLQNALGTSFLEAYVENAENLIDDYQVRVVDGVPTKETTQRITALYEELKKLSFEPEEWRRLSQLLLLKGSQTEHLQANHQLTPDSIGFLFVFLIEQLYTNKKAPVKILDIAAGMGNLLLTVLLNLSNAGYQTEGIGVDIDDTLLAVAASTSDLTQANVQYFHQDGLQELLIDPVDFAISDLPIGYYPNDEKAKEFLTSTEEGHSYAHHLLLEQSMKYVKPDGFGLFLMPSGFLETDQSEEIKKWFKEEGYLQGMIQLPDELFRNKQSQKSILILQKKGPQAQQVKEVLLVKLASLKEPEKVTEFFNEFKNWKSSAL

SEQ ID NO: 57822 - protein, 327 aa, Enterococcus faecium
MTTNFWKELPKPFFVLAPMEDVTDVVFRHVVKHAAAPDVFFTEFTNSDSFCHPDGKDSVRGRLTFTEDEQPMVAHIWGDKPEFFREMSIAMAEMGFQGIDINMGCPVPNVAERGKGSGLILRPEVAAQLIEAAKAGGLPVSVKTRIGYTEMSEMEEWISHLLHQDIANLSVHLRTRKEMSKVDAHWEVIPKIIALRDQIAPQTLITINGDIPDRQTGEELAEKYGVDGIMIGRGIFKNPYAFEKDPREHTEKELIGLLRLQLDLQDHYSEIIPRSITGLHRFFKIYIKGFPGANDLRVQLMNTKSTDEVREILETFEKEHPTLFSEQ

SEQ ID NO: 57823 - protein, 176 aa, Enterococcus faecium
MLNGMFAPQRAPETRSVCQTSELKLEENNVRTTYMAKPGEVERKWYVVDATDVPLGRLSTVVASVLRGKNKPTFTPHLDTGDFVIVINADKVKLTGKKATDKIYYRHSNYPGGLKSITAGELRAKNSRRLIETSVKGMLPKNTLGRKQFTKLNVYGGAEHPHAAQQPEVLDITNLI

SEQ ID NO: 57824 - protein, 407 aa, Enterococcus faecium
MKIGFFTDTYFPQVSGVATSIKTLKQELERHGHEVYIFTTTDPNADKLEKDVIRMPSVPFISFKDRRVVVRGMWYAYLVAKELELDLIHTHTEFGAGILGKMVAKKLKIPLIHTYHTMYEDYLHYIGKGKVIRQSHVKYLSRLFANHTTGVVCPSERVIDTLRSYGVIAPLRVIPTGIDIEKFKRSDITQQDISKLRESLGLQENHLMILSLSRISYEKNIQALINGFPQVISAYPNARLVIVGKGPYVEELEELISELQLEEFVQFTGEVDNNDVALYYKAADYFVSASTSETQGLTYTEAMAAGTPCVVEGNAYLNRLFDHPSLGKTFETDEDFAPALIDYISSEVPKDPKVLEAKLYDISSTHFGEAMIEFYQDMVVYHEEEMRRKEEEDSIERIKIKLNSFKR

SEQ ID NO: 57825 - protein, 290 aa, Enterococcus faecium
MYNQKSFKGNPVYGDLYLVPTPIGNLEDMSYRSVRMLQESDLIASEDTRNTQKLLNHFEIHTPQKSLHEHNYKERVPQLIALLKEGKTIAQVSDAGMPSISDPGHELVLACIKEGISVISIPGPTAGMTALIASGLVPQPFLFYGFLPRKKKEQKETLKKLKEQTVTLIFYESPYRITATLTNFLEIFGNRQVVLCRELTKVHEEYLRGSTEELLAYIEEHPVKGECCLLVEGNLFEMPVTEVDEELGTLKEQVEAKIASGEKPNAAIKAVALKNGLKKQEVYRQYHELD

SEQ ID NO: 57826 - protein, 313 aa, Enterococcus faecium
MDYQVLLYYNYTKIEEPEEFAKNHLAFCKSLDLKGRILVAEEGINGTVSGTVENTTAYMKAMKADPRFADTMFKIDPSEGHAFKKMFVRYRPELVSLKLEEDIDPNQVTGAYLSPQEFKEAILDEQTVVIDARNDYEYDLGHFRGAVRPDIRSFRELPDWIREHKEEFMEKRVVTYCTGGIRCEKFSGWLVREGFKDVGQLHGGIATYGKDPEVQGELWDGKMYVFDERIAVDINQVDKQIVGRDWFDGTPCERYINCSNPECNRQILASIENEEKHLGACSIECAKHPRNRYVQDHGISPEEAELRFTALIK

SEQ ID NO: 57827 - protein, 450 aa, Enterococcus faecium
MGIRSHFAIAVGKTSQWALKTFFKGGSSLPGKLALKVDPHILDSLAKDYQVVVVTGTNGKTLTTALTVNILRQQFDEVLTNPTGANMVQGIVSTFLQAKPKKGQKKFAVLEIDEASLSKVTEYMKPELFLFTNIFRDQMDRYGEIYTTYKMIVDGAAKSPNATIISNGDSPIFNSIETVNPRKYYGFDHEEDREQMAHYNTDGVLCPNCHHILHYKMITYANLGKYYCPNCDFKRPELDYRLTDMVRMDNVSADFVIDGHEYGIEVGGMYNVYNALAATAVAEYFNVDPDKIKQGLGYDEKVFGRQEVININGKKCTLVLVKNPVGINQVIDMIGLAPYPFSLVALLNANYADGIDVSWIWDGNFENFADMDIPAVISGGDRHTDMTLRLKVAGIPENKLTETKELPEVIEKIKELPTEHVYILATYTAVLQLRKELAAQGFIKGGMNRG

SEQ ID NO: 57828 - protein, 413 aa, Enterococcus faecium
MTVKRKLKRPEILAPAGTLEKLKTAIHYGADAVYIGGNAYGLRSRAGNFTYEEMAEGVAFAKEHDAKVYVAANMVTHEGNEDGAGEFFRSLRDVGISAVIVSDPALIEICATEAPGLPIHLSTQASATNFETLEFWKEEGLERVVLAREVSMEEVAEIRKNTDTEIEAFIHGAMCISYSGRCTLSNHMSMRDANRGGCSQSCRWKYGLFDMPFGQERNSLTDTGEVEEEFSMSAVDMSMIEHIPELIENGVDSFKIEGRMKSIHYVSTVSNVYKAAVDSYMEDPENYVCKQEWIDELWKVAQRELATGFYYNTPTENEQLFGERRKIPVYKFVGEVLSYDEATQIATIRQRNLFSVGDEIEFYGPGFSHFSQTVEVMHNEEGESIDRAPNPMMILTMPVAQPVKPGDMIRKRK

SEQ ID NO: 57829 - protein, 105 aa, Enterococcus faecium
MNKEELQMLGFEIVAYSGDARSTLLKLLKEVRQGNFEHVDSALKEADENLTLAHNSQTKILAEEASGKEMEMGFIFIHGQDHLMTTLLLRDLIQDFIVLYRQNQG

SEQ ID NO: 57830 - protein, 194 aa, Enterococcus faecium
MAQLFFKYGAMNSGKTIEILKVAHNYEEQNKPVVLMTSGIDTRDGLGVVSSRIGLKRNAMPIFEETDVFDVIQKMESKPYCVLIDEAQFLKKKHVIAFTRIVDELDIPVMAFGLKNDFRNELFEGSKYLLLYADKIEEMKTICWFCHKKAIMNLHYIDGNPVYEGDQVQIGGNEAYYPVCRKHYFHPSMITEGE

SEQ ID NO: 57831 - protein, 329 aa, Enterococcus faecium
MYIADSARYEKMEYRKSGHSGLKLPILSLGLWQNFGDYDPIHNQREILRGAFDMGITHFDLANNYGGPAGAAEKNFGRIFREDFQAYRDELIISSKAGYHMWEGPYGEWGSRKSIISSCDQSLQRMGLDYVDIFYHHRPDPDTPLEETAEALMQLVRQGKALYIGISNYNGEDTKKMTEILKRKEAPFIIHQMRYNMFSRALLEDDLSPVLEEEGLGAITFSPLAQGLLTNRYLHGIPEDSRAHRKEIPFLSEEQVGSTLEKIKALQTIAVSRGQSLAQMALAWNLRQKSVTSVLVGASRLSQLQESVRMMDNLDFSPEEELRIDQILE

SEQ ID NO: 57832 - protein, 74 aa, Enterococcus faecium
MVFEKIQEIIAEELGKETEEIKLTTDIQEDLEADSLDLFQIINEIEDEFDVKIETEDGIKTVQDLVTYVEKQTA

SEQ ID NO: 57833 - protein, 727 aa, Enterococcus faecium
MKVEEKQFDLEYINKYASQMTIGNGFFGIRGSQEEDYRNQVRGMFAAGVYNRPLGAESAELVNLPDVIRWEIKIDGEHFSLETMKVLAYERALDLEMGELKRYALIETAQGKKVEVITCRVADQNNLHQAALKVVIKPLTEDCQVDVKTGIDGQQTNFGTQQLVEKELRVFGDDLISASYQTTESKIDIGIAAKFNKAGVFQAKNRRITASFSEKIRKNTSFTLEKIIVLSTSLQQTDPFKKSIAQAQKSVSYTEILEQSMSYWTDFWHQHRITIQGDSSFDQLAMDFAAYHLQIMTPRNDPSVSVGAKGLTGEGYKGHVFWDTEIFILPFFLYQFPEVAKNLLLYRYDRLEGARQKARDYHYQGALFPWESAHTGQEETPKFAALNIKTGTRQEVASAAAEHHISADLAYAVQEYVQATEDQSFLETKGKTLIHETAAFWLSRAVKVDDHLEIHRVIGPDEYTEYIDNNAYTNYLAHYNVALAVKYQAGDPLFLKECQNFLDKLYLPVPNKEQLIPQDDTYLSKPVIDLTTYKERPGSQSILLDYARSEVNELQVSKQADLVMLLYLLPEYFSQPIVSKNLHYYENKTIHDSSLSKAIHAIEACRIQEMEWAYHLFQEACLIDLGPDPHSSDDGIHAASLGALWLAVIFGFSGITVTNGTLSISPRLPSAWEKISFPFIWKNHRLLFVLTKKQIVIKKETKETLPIFVNGDQYQLEKELILERRGK

SEQ ID NO: 57834 - protein, 220 aa, Enterococcus faecium
MELNRMIDHTILKADASKEAVMQIIEEAKKYHFYSVCINPAWVALAKEQLQGEPVAVCTVIGFPLGANTPETKAFETTDAINNGADEVDMVINIGALKSKDDQQVQKDIEAVVEAAKDRALVKVIIETSLLDREEIIRACEIAKAAGADFVKTSTGFSTGGAKVEDVRLMRETVGPEMGVKASGGIHNEEEAMAMIEAGATRIGTSAGVAIVSGSTGEGY

SEQ ID NO: 57835 - protein, 384 aa, Enterococcus faecium
MEKKLFNKYFIGITLINFIVYLIYYLLMVIMAVIASRHLTRQLSQAGFASGIYIIGTLLARLFMGKQLELFGRKFTLRGGAIFYLLSTLAYLYTPTIGALYLVRFLNGFGYGTVSTATNAIVTAYIPASKKGEGINYYGLSTSLAAAVGPFLGMILLNMTDFRFIIWFSIVLVFFVTIACLVFPVKNIPLSEEQKISLRSWNINSFIEKKALFITGIAFLMGLSYSSVLSFLSSYTKVIHLVAAGSFFFVVYALVITFTRPLTGRIFDVKGEQYVMYPSYLFLTAGLFLLSVTTNSVTLLISGALVGLGYGTFMSNGQAVCLKIVREHRISIALSTYFIGLDLGLGVGPYLMGMLKSLTSFRGLYVIAGVIPLICTALYLVNGR

SEQ ID NO: 57836 - protein, 152 aa, Enterococcus faecium
TPIGFLWLDADESGLTAVSFQPISESESANQRILTRTQEQFEEYFAGKRKEFDVPLSIKRGTPFQQNVWKALSTIPYGEIRTYKEVAVAVDSPKAVRAIGQANRTNPLPIVIPCHRVIGQNGKLTGYMGNAIDGVEIKRQLLLLERISAKLK

SEQ ID NO: 57837 - protein, 445 aa, Enterococcus faecium
FSSIQIIVFYYILMTVLSLVLFYMPIFREPDSHVSFVDMLFMAISTVSVTGLSTFDINSVFNDNGIILLEILFQVGGLGIMMISTAFVIFSKRRITLKQRQLIMTDMNQPRLSGIVRLIRITFAILIWFQLLFGTFFSIYFYYRGYFDRWRDAVFYGFYQAISAVTNSGFDVTGDSIKPFAHDYFFLILIMFLIFVGGIGFPVLMECREWLLYKRSNAKLPFRFSLFTKLAVLAFVILFVSGTVLIYLLEKDHLFQDSNMSVKWINSMFYSITTRNAGLQIHDLGDFQNTTLIIFSLLMFIGCSPSSVGGGIRTTTVAIIGLYLYSFLKSEDNINIFGRRIDQDDVRKSVVVFMLSLGMCFFCIVFLSATEEQTLISIIIEVTSAFGTTGLSLGITGDLSVVGKITIATLMFIGRIGMLYTLMLFVPKETRDLGYEYPSEKIIIG

SEQ ID NO: 57838 - protein, 238 aa, Enterococcus faecium
MKIGLIGSGQMGNRVEEVAQERGDTVLLLRTAPKEATTLAFTELPELLIDFSHPDNLEKILSYSLSYQLPLVIGTTGYTQSQFQEIKEHAKHVPVMYSANFSFGIMVMNQLIKQAAAMLQGWQIELIEKHHSRKKDAPSGTANMLLQTIQEVQKLQPVYNWQGKKREENQIGVHSIRAGSLPGEHDVLFAATDEIFTIKHESFSNRIFAAGAVEAADWLKDQSPGYYKLEDLLMDKGV

SEQ ID NO: 57839 - protein, 423 aa, Enterococcus faecium
MKGKKWLIGSLLVAATGILGACGGGSSAESDSDKEVTLTFWNGFTASDGEILQEIVNEFNKTNDKNIKIEMDIMTWANLNEKLPTAISSKKAPDFIALNYPDFAQYVENGAVQPLDDFWEYDGVDKSDFKETAIELGEVEGKQYFVPMQVQGMYMYWNNDLFKQAGLDTEQPPTTWEELTEMAPKLTDSSKNVSGFVFNKDGTAPLYNWMLANGGKLVNDDYTKSEFASPENLKTLKAIQKMIHVDKTGPESISGAEMDNLMNAGQLAIEINGPWLNNGLKANEIDYNVTTLPQGSDSDKKTAILDGVGYAIPASTDNNKKEAVYEFLKYWNTTEIGKKWSIENGFPAYLDSVAKDEEVKNDPIVSELSKQMDYAEPYLPGFTQISAINNDIINPLIEKLLAGEDPETLMNDADDAINQLLQK

SEQ ID NO: 57840 - protein, 429 aa, Enterococcus faecium
MRYSTILISTFAALSLSLTINQTVHTEEIETAKWTETKWANVNRITFQDEFSSFNSGVAKLRKGQTATIKAKIDYSGDLAPILQSAVTFENVDPALSIGYDENTLTIQHKQAIFTFTVTLNQDLLKPALFTVKVSDGLPNDHHHLTPYSQRQTIEQDSAIDSGGDLVEEPTDKPENENKPEVPPTENPDGEQKPEIEPGEEPDTETQPEPDNESKPEITPGEKPDVDPEEKPDVTPEPDTDSGNQTVPETNPDTDNETENPEKPEVAPEEKPDVTPEPDTDSGNQTVPETNPDTDNETENPEKPEVDPEEKPDVTPEPDTDARDQGIPEKINKKTIQEDGKKESKKSNLAILKINEEQLNKKSRIFDSAQSAETLKSSKDTTFASPETKNKQLPKSGESQNKVILWSGIILLSIATMLSAKRFKQNRSL

SEQ ID NO: 57841 - protein, 340 aa, Enterococcus faecium
MKKIGFLSFGHWMEQGSLVKSAQDAYLQSIDLAVEAEKIGVDGAFFRVHHFAPQIGSPFPLLAAIGAKTSKIEIGTGLIDMRYENPYYMAENAGLTDIITQGRVQLGVGRGSPEQVLDGWKYFGYDYSEEEIKEVTRERTLEFLELLEGKPFEEPNPQPMFPQGSGKLRIEPYSEGLRQRIWWGAGSQQTAIWAAQHGMNLQSSTLVNYESHEPFHIQQANQLRAYKEAWKQAGHDFEPRTLVTRSIQPITTDLDRRLFGQDGSPQQDAVGYLAYHRNPTIFGKTFAGEPDQLIKELAEDEAIKEADTVLVTIPNTLGVEYNMHLLETIVKDIAPELGWR

SEQ ID NO: 57842 - protein, 261 aa, Enterococcus faecium
IATPSRTKEILLKHGFSFKKSLGQNFLTEPNILRKIVETAQIDEHTNVIEVGPGIGALTEQLAKHAKQVVAFEIDDRLIPVLADTIQPYDNVTIVHQDILKTDLSTAVRETFHEELPLKVVANLPYYITTPIMMHFLESDLVVDELVVMMQKEVADRISAEPGTKAYGSLSIAVQYYMEASLAFIVPKTVFVPQPNVDSAILKLTRRDIPAVEVTDEKAFFRLTKAAFQQRRKTLWNNLQHSYGKDDQTKAWLAKSWKQLD

SEQ ID NO: 57843 - protein, 261 aa, Enterococcus faecium
MYKELENKVAVVTGGSKGIGTAIAQRFGKEKMNVVVNYNSDKEGAEKAVKAIEEAGGKTVSVQADVSSEEGIQRLLDTALENFGTLDVWVNNAGMENQHPTHELSLEDWERVLKVNLTGVFIGTKAALNYFTENNKKGNIINMSSVHEQIPWPTFAHYAASKGGVKLFTETVAMEYAPKGIRINSIGPGAIRTPINAAKFDDPEQKELLESMIPLGRVGEPKEIAATAAWLASDESSYVTGITLFADGGMTLYPSFQGGKG

SEQ ID NO: 57844 - protein, 290 aa, Enterococcus faecium
MIKHQNWKLCKMGKMTYREVLSRASSFLEDHGKEAYSIQFLFLERKQWKKLDWLLHMNEEISEEEQRLIETDLRLLLADHPPQYLLGYADFYDHRLKVTEATLIPRPETEELVEWCLDETPGVPLEVIDIGTGTGAIAISLKAARKNWHISAVDLSEEALEVAKENAQKEGTKISFYHGDTLGPVMDQQFDVIISNPPYISRNEWELMDESVRSFEPKMALFAENDGLAIYEKIAVEAPSVLKSNGKIFLEIGFRQGEAVKKIFQQAFPDKKVAIKKDLFGNERMIQVYG

SEQ ID NO: 57845 - protein, 480 aa, Enterococcus faecium
YIMAIDQGTTSSRAIIFDKKGRHIGSSQKEFTQYFPQESWVEHDANEIWNSVQSVIAGAFIESGIKPNQIAGIGITNQRETTVIWEKDTGRPIYHAVVWQSRQSAGIADNLKNEGYQEFFHEKTGLVIDAYFSATKIRWILDHVEGAQERAEKGELMFGTIDSWLVWKLTDGQAHVTDYSNASRTMLFNIHQLDWDQEILDLLNIPRVMLPKVTSNSEVYGYTQGYHFYGSEAPISGMAGDQQAALFGQMAFEPGMVKNTYGTGSFIVMNTGEKPQLSKNNLLTTIGYGINGKVYYALEGSIFVAGSSIQWLRDGLQMLQKASDSEDAAKRSTSEDEVYVVPAFVGLGAPYWDQAARGAMFGLTRGTTKEDIIKATLQSIAYQVRDIIDTMQDDTGIKIPVLKVDGGAANNEYLMQFQTDILNVPIQRAENLETTALGAAFLAGLAVGYWKDTDEIREFYEAGKLFEVQMEEERREKLYN

SEQ ID NO: 57846 - protein, 163 aa, Enterococcus faecium
MNDMYLFIVFAASAYVLQAVISWKQLKHFNQTYSELRRKGKVAIGKRPGKIRSGTIVMLAIDDHDQVLEVRKMQGVTSLAKFHSLPVYAGEDIHYIDRYHPSVRAEDRLTQAALENAREVYLRIEAGNEKSEQPSLPFIAMLNNFRIWKSTIKEKRSDKRWIS

SEQ ID NO: 57847 - protein, 187 aa, Enterococcus faecium
MSLIGKKIEEFNAHAYHQGEFLEVSEKDLMGNWSILCFYPADFTFVCPTELEDLQEQYSTLKSLGVEVFSCSTDTHFTHKAWHDTSDAIGKIEYVMIGDPSHQISRIFDVLDEEQGLAQRGTFIIDPDGIVQAMEINADGIGRDASALIDKIRAAQYVRTHPGEVCPAKWKESGETLKPSFDLVGKI

SEQ ID NO: 57848 - protein, 295 aa, Enterococcus faecium
MMKKVLLVVNPSSGGEQAKEFEQLAIAKLESVFDEVVVLHTKKAGDAKNFTREAATEGYHSVFVMGGDGTVNEGISGIAEQEHRPNFGFFPLGTVNDLARALGIPLEPEEAINHFSIESVKPLDIGKINDDYFMNVVAIGSIPESINDVDAEKKTKFGKLAYFMSGIKQLASTQSYSFHVEVDGKKEEIESSTLLIGLTNSVGGFETLLPNAKVDDGKLHLVYLKDSSLIDTLKTLPDLLKGVDESTKNLAYLTCEQLVVSLADEEELTTNVDGDEGDKLPVTIKVLPSHLQVYC

SEQ ID NO: 57849 - protein, 531 aa, Enterococcus faecium
MDHKEMRRVMQGAFVLTIASFIAKVLSALYRIPLQNLVGDEGFYVYQQVYPIYGIAMTLALSGLPQFISKYVAERKNPFERKQALQNLYPLVFWTGVFLWLFVFAFSSWIAWMMGDIQLKPLIQVVSFTFLLMPGLSFYRGNFQGRFLMEPTAVSQVVEQFVRVFVIVCSAFAFRKLGWTVYQTGTAAMSGAVFGGLCAYGILHYYEQKIHGGALSFRRFPLFKQPSKPLIRRFLVEGGLVSIYSGLLIFFQLIDSFFVKNALEVYGLSEYGAKIAKGVYDRGQPLVQLGLVIATALSATFLPALTRHLTNRIYRQFLQTAKIYLRLTTALALAASLGLALLLPYINYALFKDYAGNAALVLFVFSIAFTAVIQAYQSIAQSKNSFRPSLKGAGWGLLVKGLTTSFLTGLLGTAGASLSTLLGLGVTLWYFVRIETKELNAFWKERHFGRKLMFSLLCMTVVLLLYYGVLNIVFGPVTHRSTAFFVSVIGVGIGASVFIYAVIRLRLFTVREWLMLPFGKKILRLNKKIKK

SEQ ID NO: 57850 - protein, 258 aa, Enterococcus faecium
IPKAVLEGMEGKPVVVRTMDIGGDKELPYLQLPHEMNPFLGYRALRISLSEQGDEMFRTQMRALLRASVHGNLRIMFPMVATLKEFRAAKAIFEEEKQKLISEGKEVSDTIQVGIMIEIPAAAVLADKFAKEVDFFSVGTNDLIQYTMAADRMNERVSYLYQPYNPSILRLIKNVIDAAHAEGKWAGMCGEMAGDQTAVPLLVGMGLDEFSMSATSILKTRSLMKRLDTAKMAELADRALKECDMMEEVVELVHEYVK

SEQ ID NO: 57851 - protein, 830 aa, Enterococcus faecium
MEELFTERAQAVLEIAQEEAKRLKHQSVSSEHVLLALVVEQNGIAGKVLREMDLNETEIYEEIEHLIGYGGIRSYPKGVFLPYSPRMKQVFALASSEVKKTGSQKVGTEHILMSLLKDESIMATRIMINLGISLSKARQVLKQKMGLAGDSAGKGMNRRRNVNVQDKRQTPQGTPTLDSLARDLTKLAKENKLDPVVGRSREVKRLIQILSRRTKNNPVLVGEPGVGKTAIAEGLAQKIILGEVPEDMQEKRLMMLDMGSLVAGTKYRGEFEDRMKKVIDEIYNDGQVILFIDELHTLIGAGGAEGAIDASNILKPALARGELQTIGATTLDEYQKYIEKDSALERRFARIQVDEPTPEEAEVILQGLRTRYEEHHGVEITDEAVRAAVNLSVRYITSRQLPDKAIDLIDESAAKVRLDQTDHLTKSTVIKLEIDELVQEKEAAIQKQDFENAAQLRRQEKALRKKLQKVSAIEAKQEQGYSDRVTEEDVATVVSEWTGVPLQQLEKKESERLLELEGLLHERVVGQDEAVKAVSRAIRRARSGLKDPDRPIGSFMFLGPTGVGKTELAKALSEVMFGSEDALIRVDMSEFMEKYSTSRLIGSPPGYVGYDEGGQLTEKIRQKPYSVILLDEVEKAHPDVFNLLLQVLDDGHLTDSKGRKVDFRNTIMIMTSNIGATQIREEKNVGFNVQDVTKDHKAMQKRILEELKKAFRPEFLNRIDETVVFHSLSKDEIHTIVQIMSKAIIKRLKEQDIQVKITPSAIDVIGKAGFDPEYGARPIRRALQKEIEDRLSEALLGGEIRLGDHVTVGASKGKITLNVRGPKKETVGSL

SEQ ID NO: 57852 - protein, 366 aa, Enterococcus faecium
MALTAGIVGLPNVGKSTLFNAITKAGAEAANYPFATIDPNVGMVEVPDWRLQRLTELVHPKKTVPTTFEFTDIAGIVKGASKGEGLGNQFLSHIRQVDAICHVVRCFDDDNITHVEGRVDPLEDIDTINLELVLADLESINKRYTRVAKVAKTKDKDAVAELAVLDKIKPVLEEGKSARTIEFTEEEQKIVKSLFLLTTKPILYVANVSEDDVADADANHYVQEVRNFAAEENAEVIVVSARAEEEIAELDEEDKAEFLEALGIEESGLDQLIRAAYDLLGLATYFTAGEQEVRAWTFKKGIKAPQAAGIIHSDFERGFIRAETVSFEDLDHYGNMHAAKEAGRVRLEGKDYVVQDGDVMLFRFNV

SEQ ID NO: 57853 - protein, 134 aa, Enterococcus faecium
MGAELNQKLFSAADNLRSKMDASEYKNYLLGLIFYKYLSDRLLEQVVLLADESLEEYDTVSKQTMLYRELLSDEESKEDLIATIVDILGYAISPEYLFNVLADQAKQATFQLNDLNKAFLASHIYGKILSVKFE

SEQ ID NO: 57854 - protein, 171 aa, Enterococcus faecium
MTFTVPQADQVIKELLSFYKDQPEIVIGAGTVLDAVTARLAILAGAEYIVSPSFDQETAEMCNLYQIPYLPGCMTITEIKTALKSGVDIVKLFPGSAYGPSIISAFKAPMPQVNIMPTGGVSLDNMKEWFDAGVVTVGVGGNLLAPAATGDFDKVTEVAQQYAAKMKEIKR

SEQ ID NO: 57855 - protein, 240 aa, Enterococcus faecium
AGIFYAAMGTGNNSSTATSGNQNSAGETVVENVKVNVDSDITKAVDKVQDAVVSVINLQSQNQSSGFGGLFGQQEESSSSDDSNLEAYSEGSGVIYKKDGNTAYVVTNNHVVDGQQGLEVLMKDGTKVKAELVGTDAYSDLAVLKINSDKVETVASFGDSSALKVGEPAIAIGSPLGSEYANSVTSGIISSLNRQVTSTNESNETVNINAIQTDAAINPGNSGGPLVNIEGQVIGINSSK

SEQ ID NO: 57856 - protein, 336 aa, Enterococcus faecium
MKNIILTGDRPTGKLHLGHYVGSLKTRVAMQADEDNQLFVMIADMQALTDNAKNPEKVSSNVLQVALDYLAVGLDPAKSTLFIQSQIPELAELTMYYLNLVSVGRVRRNPTVKTEIEQKKFGESVPTGFFIYPVSQAADITAFKANLVPVGEDQKPMLEQTQEIVQSFNHTYGEVLVEPKGVFPPKGMGRLPGIDGNGKMSKSLGNGIYISDPADVLQKKVMSMYTDPNHIHVQDPGQVEGNMVFTYLDVFGTDKEAIEEMKAHYRRGGLGDVKIKRYLIDVLEAEFAPIRARREELEKDPSAVMEILRKGSEEAAKVAAQTLSEVKSAMGINYFH

SEQ ID NO: 57857 - protein, 279 aa, Enterococcus faecium
IDGRIKVIKTDENGQRLAGAKFEILSSDSQVIQEGITAENGEFLSEPLPVGSYQVRETEAPEGYLLDATVHDVFINEYSIEEVTLTIENILDTGGVELIKHAEGSGEVLQGAVFELQNREGETLQTGLTTGEDGKLAIDGLAPGAYQLVETQAPIGYELDATPIEFEIERSQTAVVELTKENRLTPGGVVLTKIDDQSGEILQGAVFELQNREGETLQTGLTTGEDGKLAIDGLAPGTYQLVETQAPIGYELDATPIEFEIERSQTAVVELTKENRLTP

SEQ ID NO: 57858 - protein, 470 aa, Enterococcus faecium
MIKIYNTLTRKKEEFIPIQKGHVGMYVCGPTVYNYIHIGNARSTIAFDTIRRYFEYRGYKVDFVSNFTDVDDKIIRTANELGITAPEVADRFIRAFEEDTKALNVEPATLHPRVMDHMPDILAFIQVLVEKGYAYESSGDVYYRTRKFENYGKLSDQSIDELEVGASQRTGEEQQQKEDPLDFALWKQAKPGEISWDSPWGKGRPGWHIECSVMATKHLGETIDIHGGGQDLEFPHHENEIAQSEAKTGKKFANYWMHNGYVTIGEDDEKMSKSLGNFITVHEMIKNVDPQVLRFFMATTQYRRPIRYSETTMKEAATNLQRLKNTFDNLKFRQETASENLADDADKIALLENLEQRFIEEMDDDFNAANGITVVYELAKWLNTYLDQPKVSAAVLAQGEALFSQWLSIFGILFTAEELLDEEIEQLIEERNQARSNRDFVRSDEIRDLLKEKGILLEDTPQGTRWRREA

SEQ ID NO: 57859 - protein, 231 aa, Enterococcus faecium
MKKEKKVSSSFIYFFGAFGGILFGYDIGVMTGALPFLQHDWGLAGKASLIGWITSSVMLGAILGGSLSGLLSDKLGRRKMILLSALIFMAGSVLSASAPHNGSYFLIAARILLGLAVGAASALVPAYMSEMAPARLRGRLSGINQVMIASGMLLSYVADYLLKGLPETMAWRVMLGLAAVPALILFFGVLALTESPRFLMQSGRLEEAARVLTFFGTKRTDGIDKSVLFKK

SEQ ID NO: 57860 - protein, 324 aa, Enterococcus faecium
MNKELNITQEWDKVFPKSNQVNHRKVSFPNRFGITLVADLYEPKEVSEKKLPAIAVSGPFGAVKEQSSGLYAQTMAERGFLTIAFDPSFTGESGGVPRYVASPDINTEDFQAAVDFLSVQKNVNPERIGIIGICGWGGMALNAAAIDTRVKATVVSTMYDMTRVTANGYFDVMDENARYEMREELNAQRIIDFKQGDYARAGGVVDPLPEDAPQFVKDYHAYYKTDRGYHVRSLNSNDGWNRTSGLSLMNAKLLHYIPEIRHAVLVIHGEKAHSRYFGEDAFKELKGDNKELMIIPGASHTDLYDQTDIIPFEKMATFFEENLV

SEQ ID NO: 57861 - protein, 569 aa, Enterococcus faecium
MRQSKMLIPTLREVPNDAEVLSHQILLRAGYIRQVSAGIYSYLPLANRVLEKLKRIMREEFEKIGAVEMLMPAILPAELWEESGRYETYGPNLYRFKDRNDRKMILGPTHEETFTDLMRNEINSYKKLPLNLYQIQPKYRDEKRPRFGLLRGREFIMKDAYSFHATEESLDETYKDYEKAYTEVFKRCGLEFRSIIGDGGAMGGKDSKEFMAISEIGEDTICYSTESDYAANLEMATSYYVSKKSHETQLELEKVATPNVKSIDEVADFFSVEPQKIIKSVLFIADEQPVLVLVRGDHEVNDVKLKNFLSADFLEEATEEEAQKYLGAEFGSVGPVGVSDDVKVYADRYVQDLANAITGANETGFHYKNVNPERDFTVLSYEDLRFVQEGDPSPDNNGVLAFTRGIEIGHIFKIGTRYSESMGATVLDENGREKFVIMGCYGIGVSRLLSAIVEQHSDEQGINWPKGIAPFDLHIVQMNLKDEYQTNLTNELEEAMTKAGYEVLVDDRNERAGVKFADSDLIGCPIRITVGKKAVDGIVEVKIKKTGEMVEVRKEELVNTLPILLNQGE

SEQ ID NO: 57862 - protein, 126 aa, Enterococcus faecium
MSYRKLGRTSSQRKAMLRDLTTDLLINERIVTTEARAKEVRSTAEKMITLGKRGDLHARRQAAAFVRNEVASVREENEDIVIESALQKLFNDIAPRYAERQGGYTRILKTEPRRGDGAPMVVLELV

SEQ ID NO: 57863 - protein, 251 aa, Enterococcus faecium
MIDLQKVNKLYHGKSVVKDVQLTIPEKKLTAFIGPNGAGKSTVLSMISRLIPKDTGEIYLDHNEVKAWKSNELAKKLSILRQSNEINVQITVKELVEFGRFPYTKGKLTTKDEEIVQESLEHLGLEEIADQSIDTLSGGQLQRAYIAMVLAQDTDYILLDEPLNNLDMNFAVQIMQILKNLVQEIGKTIVIVLHDINFAASYADEIVAMKDGQLFTQGTTQEMIKKDVLDELYEMDIRICEIEGRRFCLYF

SEQ ID NO: 57864 - protein, 136 aa, Enterococcus faecium
MEFIITSHGNIAIGFVDTLKMFFGDNLNCHVVTLGDAGIEEFRENIEKIVSQVKNQEVMVFADLIGGTPFNEFAKRSEVFQNGFQLLGGMNLGILIEAVNLRLQGKKSDDIIENLRNMNTIACLADMQRHTNEEDE

SEQ ID NO: 57865 - protein, 1173 aa, Enterococcus faecium
MDIIQLVGKDPQVKEWVSNLEEKMPRQLITGLAGSAKTLLFARAFKKTNKNMIILMPNLYYANQLAEDLQHVIPQDQIHLFPVDEVLSAEMAFSSPEARGERVATLNALQEKKAGIYLLPVASLHKRLPNKKTWLQAQLNWHIGDEIDVENLPRQLTLMGYVREEMVAKPGEFSIRGSIIDIYPLTTTYPVRVELFDVEIDSMRYFEAETQRSIEKTEEIWVSPTSEQVYGPEDLEHGIEQMQKMLEKRLAATTEEADREFLQDYFGQLTSSWQAGVPTEEAKFYSDLLYQESVTILDYFPSNSLLVVDDYQRIMETNREIEREAAEWQTQKISELRVFSEQTFSADIQKIVQKEKFTTTFFSLFQKGMGNLRFQAIHNFQYRTMQQFFGQMPLLKTEMDRWRKQKQTVVIFIPTKDRIRKAEQMLRDEDILVVETEKNALIRGQVQLVEGALQAGFELPQEKIVAITEKEIFQKTTKKQTRRQTVTNAERLKSYNELKAGDYVVHANHGIGKYIGMETLEVDGVHQDYMTILYQNDDKLFIPVTQLNLIQKYVASEAKAPRINKLGGSEWTKTKRKVSSKIEDIADDLIKLYAARESEKGYAFGPDDAYQKEFENAFPYSETDDQLRSAAEIKRDMEKEKPMDRLLVGDVGYGKTEVALRAAFKAIKESKQVAFLVPTTILAQQHYETMLERFEGFPVNIGLLSRFRTRKQQKETIEQLRTGQVDIVVGTHRILSKDIEFSDLGLLIIDEEQRFGVKHKERLKQLRAQVDVLTLTATPIPRTLHMSMLGVRDLSVIETPPANRYPIQTYVMEKNPGAIREAIHREMGRGGQVFYLYNRVETIEQKVEEIQELVPEARIGYAHGQMTEAQLENTLFEFIEGQYDVLVTTTIIETGVDIPNANTLFVENADYMGLSTLYQLRGRVGRSSRVAYAYFMYEQQKILNEVSEKRLQAIKDFTELGSGFKIAMRDLSIRGAGNLLGAQQHGFIDAVGFDMYSQMLSEAVSRKQGKNSQVEKTTVEIDLGVDAYLPETYVADQRQKIEIYKRIRELDSQEMLDELEDDLLDRFGEYPEEVAHLLTIGQIKMDGDRALLETIRKQEAHIVFTLSKVGTKRYSVEQLFEALTATKLKASLGVEKEQMVIRLTIPNQMEEAVWLQEIQKFVKALREQKYLSA

SEQ ID NO: 57866 - protein, 88 aa, Enterococcus faecium
MTEGRNQRKVYQGRVVSDKMDKTITVAVETKKNHPIYGKRMNYSKKYKVHDENNTAKVGDIVRIMETRPLSATKRFRLLEVVEEAVII

SEQ ID NO: 57867 - protein, 107 aa, Enterococcus faecium
MAMEKMREYHGLYHVLHGVLSPMEGTGPEDINISSLLQRLHDADVKEVIIATNATTEGEATAMYLSRLIKPAGIKVTRLAHGLSVGSDIEYADEVTLLKAVEGRREL

SEQ ID NO: 57868 - protein, 244 aa, Enterococcus faecium
MQNTFQSKSLYYQLVEILKQRIENSMVAHDKLPSERELTSFYGVSRTTVRLALQELEKMGYIYRQHGKGTFVSELRTNATDLAGAYSFTEQMRAMGKHPETKILAFKKIEATKYLASHLNVQLGEPLFQLDRLRLADDLPMMIEKSYLPVKLFMSLSQEILFLKPLYNLFSENFNQIVRLADEEFYASIVQKEDSELLNIPEGSPVLHLVRSTYNLENEVIEFTLSVARADKFHYKIRHLRSTN

SEQ ID NO: 57869 - protein, 730 aa, Enterococcus faecium
MSLKNKIRRFMEKKNLNPMNNRKKVGIILFATSIGLFFLFAVRFSYIVIGGHVAGTSLAEKTKQLYQGSEVVKAKRGTIYDRNGVALAEDASSYSIKAILSKTYTSGDKKLYVEEKNFDKIAEILHKNLSIDKKDALNILEDGAKKELYQVEFGSYGKNISQETKQNIEADMKKEGVAGLYFVDHQARMYPNGVFSSHFIGYAVPDKDENGLVGKLGLESAYNDILSGKDGKIIYQKDNFQNPLPGTVAEEEKAVDGQDIYTTLDSRLQSYLETLMDQVNEEYQPEELTAVLMKAKTGEILAMGQRPTFNPETMEGLTGKDAIWRNFLVQDSYEPGSTMKVFTTAAAIEEGEFNENETFQSGKIQVEDATINDHDFGEKGVLTMRQALSWSSNVGMVILEQRLGGRWYNYLQKLGFGQSTHSGLDDEVNGALPTSNIVDRAMSAYGQAVGVTNFQMMKAFTSIANNGTMIQPRYISKVVDPQTGEERTTQTEVLGQPFSKETTEKVREYMRDVVESENYGSAYGVYSVPGYNVSAKTGTAQIASDTGGYQTGDTAYLYSIVEMVPSEDPDYVLYLTMKHPKTYDRMALAKIANPLMKRAMDFKETEEDSDTETKTEKVSVADYRNLEADVAAADAQKSGLQPVVIGNGKKVQKQSTANGDQLISGEKLILYTGGDKLMPDVTGWSKADIMKLGKILGIEVSFDGDGYCVKQELAPYEKITEDKLSFTLEE

SEQ ID NO: 57870 - protein, 102 aa, Enterococcus faecium
MFVKKGDKVKVITGKDKNKEGVVLAAFPKKDKVIVEGVNVVKKHQKPSQAAPQGGIVEMEAPIHVSNVMVVDSTGVAGRVGYKEVDGKKVRVSKKTGEVLDK

SEQ ID NO: 57871 - protein, 478 aa, Enterococcus faecium
MDKKVLIKRFSEAIEKGNAAIFAGAGLSMSQGYVSWPELLNDPATEIGLDSKKETDLVTLAQYYKNENGGSRGILNQILMDNFGEELEISENHRILASLPIETYWTTNYDHLIEKSIREAYKNPQVKKNYTQLATTNPNVDTIVYKMHGDIDDVSSTVITRDDYEKYDDDSYALFKETLKGDLLTKTFLFLGFSFTDPNLERILSDIRWVLRENQRPHYCIMRKILKENFVDSEDFFDQERYNYELTKRRLQINDLSRFSINVVEVDDYSEITDILKSIRKKYLRKTIFISGSAVDYTPFTSESKGLKFVEKLAYRLSESGYRIVSGYGLGIGNSIVSGVLKQRRNLRKNNIQDVLSLRPLPLDMPHEWRRYRENIIAESGISIFVFGNKLESGEIVTADGMIEEFELSVQNENIVVPIGFTKGASKVLFDKIQENFSDYFDDSLKSKFQALEKLDTEGEVDKKVEQIVSLINSIQED

SEQ ID NO: 57872 - protein, 123 aa, Enterococcus faecium
MKMAHTCVRVKDLEASIEFYQKAFGFEESRRRDFPENKFTLVYLTLPGDDYELELTYNYDHGAYDLGDGYGHIAIAADDLEKLHEQHKAAGLEITDLKGLPGTTPSYYFVIDPDGYKIEVIRG

SEQ ID NO: 57873 - protein, 482 aa, Enterococcus faecium
MSHRITAEEVKAMNPKGIILSGGPNSVYDEKAFGIDEKIFDLGIPVLGICYGMQLITYKLGGKVKPAKNREYGKAELEITSAEAALFQNTPEKQTVWMSHGDLVTQAPTDFDVVATSKDCPIASIQNAERKMYGIQFHAEVRHSEYGNDLLRHFTLDVCQCTGDWTMDNFIDMEIAKIREQVGDKKVLLGLSGGVDSSVVGVLLQKAIGDQLTCIFVDHVLLRKGEAEQVMESLGGKFGLNIIKVDAKERFLSKLAGVSDPEEKRKIIGNEFVYVFDDEATKLAGEEGVSFLAQGTLYTDVIESGTETAQTIKSHHNVGGLPEDMQFKLIEPLNTLFKDEVRELGTQLGMPDSIVWRQPFPGPGLGIRVLGELTEEKLEIVRESDAILREEIANAGLDRDIWQYFTVLPGIRSVGVMGDGRTYDYTVGIRAVTSIDGMTADFARIPWEVLQKISVRIVNEVAHVNRIVYDITSKPPATVEWE

SEQ ID NO: 57874 - protein, 362 aa, Enterococcus faecium
MKILVTGGGTGGHIYPALAFVNYVKTQEPNAEFMYVGAKRGLENKIVPDTGMPFHTLEIQGFKRKISMHNIKTVRLFLKSIRQAKKILSDFQPDIVIGTGGYVSGAVVYAAAKMGIPTVIHEQNSVPGVTNKFLSRYVDRIALSFKDAASFFPENKAVLVGNPRAQEVADTKKSDILKTFDLDPEKKTVLIFGGSQGALKINQAVSVFLSEYIPSSYQVLYASGDRYYEEILNKINPEIQNISVQPYIKNMAEVMASSDLLVGRAGATSIAEFTALGLPAVLVPSPYVTNDHQTKNAMSLVHAGAAKMIADNELTGESLSQTVNEIMGDEELQKQMCRASKEQGIPDASKRLYDLVKQIIKK

SEQ ID NO: 57875 - protein, 381 aa, Enterococcus faecium
MTQPAIRYRLIKKEKHTGARLGELITPHGTFPTPMFMPVGTLATVKTMSPEELKEMGAGVILSNTYHLWLRPGEDLVEEAGGLHKFMNWDQPILTDSGGFQVFSLSDMRNIEEEGVHFKNHLNGSRMFLSPEKAINIQNKLGSDIMMSFDECPPFDESYDYVKKSVERTSRWAERGLKAHANPDRQGLFGIIQGAGFEDLRRQSAKDLVGMDFPGYSIGGLSVGEPKSEMNRVLEFTTPLIPENKPRYLMGVGAADSLIDGVIRGVDMFDCVLPTRIARNGTCMTSQGRLVVKNAKYAHDFRPIDEKCDCYTCKNYTRAYIRHLIKCDETFGIRLTSYHNLYFLLNLMKQVRQAIMDDNLLEFREAFFEEYGFNKENAKSF

SEQ ID NO: 57876 - protein, 730 aa, Enterococcus faecium
MLNKTLQKLQEKLGKAALPFLLFLFFIIICGVTFSSVKQKANDFREGQVAEESIRANKTIENTEETEQKRKLAAEAVTPEYTYQKDLADDQNNRIKQLFELIDKTNDAINKSYDEKIDKAKEDENIPKPTTEERIAALKKNFENVNAENVAFYQKLPNNFYSTIFEMTETEIHTVRDESLKLIDEQMSKQVRESELEAFKQEAEEQIQYLNVTPAQQQMIRYLVDQGIVVNDVLNEKKTEELKQSAREAVQPVMIFQGEIIVREGNQIDASAMKKLELLGLTNQTTSIFPLIAMVLAVLLQIGVLIYNSLQFQNAGERTKYVLFYVTAMSVSIVLMKFFQLFQTEQATYIPLFYPAAFAPLVLSFFLNRRAGIMAGIFQAVSALFIFYDSIGTNFLTIILMSYVFSGLMATIVRRKRISEQGSSAAMWVIIFPVMMDVILIVYQGMSFGDATTWLMLVCGFTGALFSFLLTIGLHPYIELMVNDDSVIVLNELSNPNHPLLKQLLEEAPGTYHHSMMVANLSANAVAEIGGRSLLTRVACYYHDIGKIKHASFFVENLPSGAENPHNFLLPEDSKHIIFGHVTDGAKILEDYNMPQMVIDICKQHHGTTLMRYFYIKAKERNPEVTEEQFRYPGPKPQSREAGIVNIADSCEAAVRAMEHPTSEKIESFVHNLIEERISDGQLDDSGLTLKEIRKVEKSLISGLSSTFHSRIKYPKMKTEVEKIKEEQEE

SEQ ID NO: 57877 - protein, 450 aa, Enterococcus faecium
MNLTIQEIAQAVGSECSALTKITNVEFDSRKITEGSLFVPLAGTRDGHEFIQQAITNGASASFWSLPVEQAPKNFPVIPVADPLKAMQQLATYYLEKVGAEVVAITGSNGKTTTKDLTASVLSEKYKTYKTQGNYNNNIGLPYTILHMPQDTEKIVLEMGMDHANEITELSLMAQPKAAAITMIGEAHIENLGSREGIAKAKMEITDGLVSDGLLVVPADEPLLTPLTATLVQTVTTFGIGNGDVHAEVTAKGKAQTDFVVEGETFTIPLPGSYNVTNALIAYTIGRFFGLSIPEIRQGLAHVSITQNRTEWLTAGNGAAILSDVYNANPTAMGLVLDTFKNLPTKGRRIAVLADMLELGKESLNMHAQMSEHIDPEKFAMIFLYGEQMHALKEELNQKYPQLPVFYLEKEKNKLIDAIKQNLEATDSIMLKGSNSMGLFEVVEQLQQMK

SEQ ID NO: 57878 - protein, 239 aa, Enterococcus faecium
MGRKWANIVAKKTAKDANNSRIYAKFGIEIYAAAKSGDPDPHANQKLRFVIDRAKTYNVPKHIIDRAIEKAKGAGDETYSELRYEGFGPSGSMVIVDTLTNNVNRTAADVRAAFGKNGGNMGVSGAVSYMFDNTAIFAFAGEDADEILEYLMEKDIDVRDVMEEEGQIIVYGEVADFHSIQEALKEKGITDFSIAEIQMIPQNEVTLSPEDQETFEKMIDALEDLEDVQHVFHNVALED

SEQ ID NO: 57879 - protein, 61 aa, Enterococcus faecium
MAKKSMIAKNKRPAKFSTQAYTRCERCGRPHSVYRKFHLCRICFRELAYKGQIPGVKKASW

SEQ ID NO: 57880 - protein, 459 aa, Enterococcus faecium
MFSKVLIANRGEIAVRIIRACRELGIQTVAIYSEADAEALHTQLADEAICIGPAKAVDSYLNVQEVLSAAIVTKAEAIHPGFGFLSENSRFASMCEECNITFIGPKSATIDAMGNKINARQLMQEANVPVIPGSTGVLSTVEEALEIADRIGYPVMLKAAAGGGGKGIRKVQSKEELPQHFSSAQQEAAAAFGNDDMYLEKIIYPARHIEVQILGDRFGHVIHLGERDCSLQRNNQKVLEESPSVVISQTKREALGDAAVRAAKAVNYENAGTIEFLMDEEGDFYFMEMNTRIQVEHPVTEMVTGIDLVKKQVEIAAGEPLNVCQEEVVFQGHAIECRINAENPAFHFAPSPGKIQNLLLPAGGMGLRVDSAVYPGYTIPPYYDSMIAKIIVHGNTRFEALMKMQRALSEFITEGIITNAEFQMDLISHPAVIAGDYSTAFLQEEFLPNWTPETEIGGA

SEQ ID NO: 57881 - protein, 416 aa, Enterococcus faecium
MREYKGLKIAVAGTGYVGLSIATLLAQSHTVTAVDIIPEKVELINNKKSPIQDDYIEMYLAKKELDLMATVDGVSAYKDADFVVIAAPTNYDSKKNFFDTSAVEAVIKLVMEVNPEAIMVIKSTIPVGYTASIREKTGSKNIIFSPEFLRESKALYDNLYPSRIIVGTDMEDERLVEAAQTFAKLLQEGAIKENVDTLFMGFTEAEAVKLFANTYLALRVSYFNELDTYAEMKGLNTQQIINGVCRDPRIGTHYNNPSFGYGGYCLPKDTKQLLANYEDVPENLIEAIVESNRTRKNFIADRVLELAGAYEANSHWDASKEKKVVIGVYRLTMKSNSDNFRQSSIQGVMKRVKAKGTTVVIYEPSLKDGEIFFGSKVVNDLDQFKAMCDSIIANRYDTCLDDIKEKVYTRDIFQRD

SEQ ID NO: 57882 - protein, 130 aa, Enterococcus faecium
MAQVQYIGTGRRKNAVARVRLVPGTGKITVNKKDVEEYIPHADLREVINQPFAVTETKGAYDVFVNVNGGGYAGQSGAIRHGIARALLEVDPDFRLALKRAGLLTRDARMVERKKPGLKKARKASQFSKR

SEQ ID NO: 57883 - protein, 431 aa, Enterococcus faecium
MNDSIKKMLRLIEKDLMITEVSYETFQKKKTLIVDAVFSPAPHTCRNCGSTVVDGNGKVIVVKNGKKETIVRFEQYNHMPLVMRLKKQRYTCKNCRTHWTTQSYFVQPRHSIANHVRYKIASLLTEKVSLSFIAKNCQVSLTTVIRTLKEFKSYLPKQSKRILPRVLMVDEFRSHASIEDKMSFICADGETGQLIDVLPTRKLPRLTSYFLGCTNPKEVKFLVTDMNAAYFQLTKRILPNAKVVIDRFHIIKHMNQAFNELRIREMNELRKVGQKSQAEKLKKNWRFLLKNRANINHYEYKTWKSFRAPKYPFLTEAMMIDRLLGFSTSLKEAYPYFHELVEAFRDKDPDLFFSLLAELPETLDDGFREKLQNLLTYEEGITNAMIYPYTNGKIEAKNTHIKTMKRVSYGFKSFENMRIRIFLINQLIKVR

SEQ ID NO: 57884 - protein, 493 aa, Enterococcus faecium
  MISC_FEATURE (462)..(462): X=any amino acid
LKFKELELSPELLKSVERAGFEEATPIQAETIPLALAGKDVIGQAQTGTGKTAAFGLPMLEKIDPDRHELQGLVIAPTRELAIQTQEELYRLGRDKKVRVQAVYGGADIGRQIRGLKDRPHIVVGTPGRMLDHINRHTLKLGTVQTLVLDEADEMLNMGFLEDIEKIISQVPDQRQTLLFSATMPPAIKNIGVKFMKNPHHVKIKAKEMTADLIDQYYVRAKEYEKFDIMTRLFDVQTPELTIVFGRTKRRVDELARGLEARGYRAEGIHGDLSQQKRMSVLRSFKSGHLDILVATDVAARGLDISGVTHVYNYDIPQDPESYVHRIGRTGRAGKGGMSVTFVTPNEMDYLHVIENLTKKRMTTLRPPTEKEAFKGQLGAAVEQIETKLAENGLDKYLQTADKLLEEYSAQDLVALLLKTTAKDPADAVPVKITPERPLPMQKTGYNKNGKRGGGNNRNRTXRRNYRGNKSNGGYSKNNNSQKMAGKRHNDKK

SEQ ID NO: 57885 - protein, 391 aa, Enterococcus faecium
MSKEMLNALDALEAEKGISKEIVIDALEAALVSAYKRHYGQAQNVEVEFDQKKGKIHVYAVKEVTEEVMDSQLEVSLKDALLINPAYEIGDTIRFEVTPKDFGRIAAQTAKQVILQRVREAERTIIYNEFSAYEKDIMQGIVERQDKRYIYVNLGKIEAVLSKQDQMPNEFYQPHDRIKVYVSRVENTSKGPQVFVSRSHPDLLRRLFEQEVPEVYDGIVEIVSIAREAGDRSKVAVRSNDPNIDAVGTCVGPKGQRVQAIVNELKGENMDIVEWNEDPAVFIANALNPAQVMDVIFDETNPKACTVVVPDYQLSLAIGKRGQNARLAAKLTNHKIDIKSESDMTEFYENQEQQKETEELHDEAIVQSDLTDDEYETIAFNNETVEEKPEA

SEQ ID NO: 57886 - protein, 501 aa, Enterococcus faecium
MSFSLEDIRHLLLKENLLKEFVSTRGWHLDVPEKAEFLQLSYDSRKADASTLFFCKGMNFKEEYLDSAIEQGIQYYVSEQPYENSAVGIIVTDIRKAMALLAMAFYDYPQNKLKVIGFTGTKGKTTAAYFTKAILDHTTNKKTALLSTMNTTLDGKTYFKSHLTTPESLDLYRMMSEAVENGMTHLVMEVSSQAYKTQRVYGLTLDVGIFLNISPDHISPIEHPTFDDYFYCKRQLILNSKTVVLNHESDYFDLLRETADLFQIPTITYGRSEESNYQVIRSDKGTHGFTLSSHEDRLAICDTAYDILLAGGFNQENAASAIIAAALTGASSQDAQDGLKEARVPGRMDQLIQSNGAHVYVDYAHNYLSLKTLLKFAKNEHPDGRVIVVLGSPGNKAISRRHDFGKVLSETADIAFLTADDPAFEDPKKIAEEINEAITNPDLIVHYEMDRPEAIRRALAESAPQDSVVIAGKGVDPYQKINGVDEPYEGDYAIVKRLIEE

SEQ ID NO: 57887 - protein, 594 aa, Enterococcus faecium
  MISC_FEATURE (270)..(270): X=any amino acid
MKKTKIVSTLGPASNSVEIISQLIESGANVFRFNFSHGDHEEQLSRMTMVREAVKKTGKDVGILLDTKGAEIRTTVQGTTEADFGRAGYIKFEVGDQTRISMDPEHVGSKEKIAVTYPGLFDDVHVGGHILFDDGLIDMQIIEKDEANRELVVEVKNAGMLGSRKGVNAPGVSISLPGITPKDADDIRFGLDNDIDFIAASFVRKAQDVLDIREILEEKDMTHVQIFPKIESQEGIDNIDEIIEVSDGVMIARGDMGVEIPAELVPMVQXRIIKKCNAVGIPVITATQMLESMQENPRPTRAEASDVANAVFDGTDATMLSGESANGDYPVEAVSTMARIDQEAENALSELGTFQLNEFDKTDVTETIGLSVARAAKNLGVKTIVAATESGYTAKMISKYRPDADILAVTFDERTKRGLMLNWGVYPTVAEKPSTTDEMFELAAKKAVELGFASEGDLILITAGVPVGERGTTNVMKIQMIGSKLLEAQGVGQKSVVANAVIASSAEEAVKKAKDGMVLVVPSTDKEYMPAIEKAAAVIVEEGGLTSHAAVVGIAQDIPVIVGAKGATTTITEGELITVDSRRGIVYRGETTAI

SEQ ID NO: 57888 - protein, 452 aa, Enterococcus faecium
LDARYAIILAAGKGTRMKSKLYKVLHPVSGKPMVEHIINRVSETKPDEVITIVGHGAEQVKAQLGERSKYALQAEQLGTGHAVLQAASFLEGKKGTTLVISGDTPLLTTETLNNLFEYHQGKNASATILTAQAENPTGYGRIIRDHIGIVEKIVEQKDATPEEALVQEINTGTYCFDNEALFDALSKVGTNNAQGEYYLTDIIEILKEEGHTVAAYQTDDFEESMGVNDRIALAKANEIMRKRINQMHMVNGVSFVDSATTYIDAGVEIGPDTLIEAGVQIQGNTVIGSDCVIGSHSKIVDSRIEDHVVIENSVIESSHVKKHADVGPYAHLRPKAEIGENVHIGNFVEVKNAQIGKGTKVGHLTYVGDATLGEEINVGCGVVFVNYDGKNKHHTTVGDHSFIGSSTNIIGPVEVAKNSSIAAGSTITDHIPEYALAIARARQVNKEGYAKK

SEQ ID NO: 57889 - protein, 548 aa, Enterococcus faecium
MIDLNNWRNFIPELSQKEVEIPHFDRASLRENGQKNPVWIHFGGGNLYRGFHAEIAQRLADLGELSTGVIVCETFDEEIIERAYQDFDDLILEVVMPSSGEFVKRILAATADSLYCHPDCSEHFDKMIRHFENPSLQLVTFAITEKGYRLKDTNNKYIGPIAVDIKNGPKKPSHTMSILAALLYKRFLSGAWPIALVSTDNFSQNGSQLRTSLLTIAKEWQKEGYVQNTFIQYLSNEEIVAFPWTMIDRITPNPSLSVSKMLAKEGFSNMSIFQTAKGNNIAPFVNTEDIHYLIMEDHFPNGRPKFEKAGVFLTDRATVDKADTMKVTTCLNPLHTSLAIMGCLLGYRSIAEEMKDPDLSLLVSEIGYNEGLPVVESPGIIDPKIFLEEVITVRFSNPNIPDMPQRIATDTSQKVAIRYGETIKKYMEIEVKDPQTLVFIPLTLAAWLRYLIGIDDQGKPFIPSPDPLLTDFQHKLSDIQLGTQDTSHIHEKMAPILSNKEIFGVDLYQAELGRKIEEMFIKMVAGPNAVRKTLQDYLQEHGGNLSWK

SEQ ID NO: 57890 - protein, 383 aa, Enterococcus faecium
MEFIGILCLILISTTIGSHISRRLGIPAVIGQLLVGVLLGQAGLNWVKPDILVHDFSEIGVILLMFLAGLESDLSLLKKYFRPGMFVALLGIIFPVVFGWLTGKAFQVSGNEAIFFGIILAATSVSISVEVLKELNVVNTKEGSTILGASVVDDILVVLVLSFSLSFLTGEASSNASLPLVLIEQLIYFVFIFLLVKWIAPFLLSFAEKVYANSSIIIVSLVICLGMSYVADLVGLSSVIGAFFAGIAVSQTKVKEEVYHNVEALGYAVFIPVFFVSVGLEVDFSDFSEQLLFISILTLVAILTKLLGGYFGAQIAGFSQHSSLMVGAGMISRGEMALIILQIGQQSQLIEPQYYSPLVIVILLSTLISPLVLKYFTKKVYEV

SEQ ID NO: 57891 - protein, 295 aa, Enterococcus faecium
MKLGFIGTGVMGSAVARHLLEAGHEVAVYNRTKAKADPLVTEGAIWADTPKAVAEQSNILFTMVGYPKDVEEIYYGQSGIFSADISGHILVDLTTSTPSLAEKIAKTAKEKGADALDAPVSGGDLGAKNGTLTIMVGGEEAVYDQVLPLFKEFGTTFTLHGSAGKGQHTKMANQIMIAGTMTGMTEMLVYAQKNGLDLKKVIETLSGGSAANWSLSNYSPRILKEDYTPGFFVKHFIKDLKIALEEAEKMDLVLPATTQALKLYEELADKGFENDGTQALIKLWWPEGKIPEKKS

SEQ ID NO: 57892 - protein, 737 aa, Enterococcus faecium
MTKEEILTGPGVIKLVSQYMGPEHVAFVEKACEYATAAHDGQFRKSGEPYIIHPIQVAGILADLKMDPHTVATGFLHDVVEDTEITLEDLREEFGDDVAMLVDGVTKLGKIKYKSHEEQLAENHRKMLLAMAQDLRVIMVKLADRLHNMRTLKHLREDKQRRIAQETLEIYAPLAHRLGISRIKWELEDTALRYLNPKQYYRIVHLMQTKREEREKYVSGTVEDIRIATEELGIFAEIYGRPKHIYSIYRKMKDQKKQFNEIYDLLAIRVIVDSIKDCYAVLGAIHTKWKPMPGRFKDYIAMPKANMYQSLHTTVIGPAGNPVEIQIRTQEMHEIAEFGVAAHWAYKEGKNEKVEPDGMTKQLSWFHEILELQDESYDASEFMEGVKGDIFSDKVYVFTPKGDVTELPKGSGPLDFAYSIHTDIGNKTTGAKVNGKMVQLDYKLKNGDIIEIMTSPNSFGPSRDWLKLVATSKARNKIKRFFKAQDREENVIKGHESVVKCITDLGFTPKDILTKNKLQEALDRFNYQTEDDLYAAVGYGEVSPLTMANRLTEKERKEQKIEQQKQEAEEIMNQPKKEPDKMKVRHEGGVVIQGVENLLIRISRCCNPIPGDDIVGYITKGRGISIHRRDCPNVQPDKPNVAERLIEVEWEDTSNTRKEYDADLEIYGYNRSGLLNDVLQTVNALTKNLNSVEARTNKDKMATIHLTVGIQNLSHLKSIVDKIKAVPDVYSVRRTNG

SEQ ID NO: 57893 - protein, 364 aa, Enterococcus faecium
MGKLGISIYPERSTFEKDKAYLDLAHKYGYQRVLTSWLQINDDKEKVLSEFKEVVDYANSLGMEVMVDINPALFEQLEISYDDLSFFHKMGAYGVRLDIGFTGAEEAKMTRNPFGIKIEINMSSGTNYVDNIMSYSPNTDNLLGSHNFYPHRYSGLGYEHFVFCSEKFRKYNLNTMAFVNSQSAEFGPWPTQDGLCTLEDHRDLEIATQVKHLILTGLIDDISIGNAYASEEELKEMAEAFNADYPTLKVDTEEGITENERICLFDNLHSYRGDRSEYILRSTMTRVYYKDKDFPPHNTRDMHHGDVLIDNEGYGQYKGETQIALKDMKNDGRVNVVGRISDDELFLLDFLKPWSSFKLIENKK

SEQ ID NO: 57894 - protein, 208 aa, Enterococcus faecium
MFGKIGSLVKNCLNKFSFTKLRRNFIMPVVSGAEFLKAARKGGYAVGGFNTNNLEWTQAILEAAEAKQAPVLIQTSMGAAKYMGGYKICKDLITDLVEAMNITVPVAIHLDHGDYEAALECIELGYTSVMFDGSHLPFEENLKLAKDVVEKAHAKGISVECEVGSIGGEEDGIIGNGELADIEECKQMVATVSTYLACVSVHAGPAHL

SEQ ID NO: 57895 - protein, 247 aa, Enterococcus faecium
MDQAKSLETACKLLRLSHVLPTLVRKDLDYSFETKEDWLMYLLEKELACREELKTARLLKQAKFPNKRTLEDYEWHDHICLPNATTKDELLSLSFIHQKENAVFVGTPGTGKTHLACGLGQLAAKSGIDTRFWRVSDLVNELEHHWKNNTLEVFKHRFDKVKLIILDEMGYVPFTKEGAELLFQLISDWYETKSVIVTSNLEFSKWNKVFVDARLTAALVDRLIHHAHILSFTGESFRLKNALSKSN

SEQ ID NO: 57896 - protein, 441 aa, Enterococcus faecium
MAKTGMYVGLDIGTTSVKVVVAEYIDSQMNIIGVGNAKSEGINRGIIVDIDKTVQAIQRAVRQAEEKAGIQIKGVSVGLPANMLEVENCQGMIAVNGDSKEITDEDVRNVASAALVRSIPPERQIVSILPQDFTVDGFEGIKDPRGMIGVRLEMYGLLFTGPKTIIHNIRKCVENAGLIVNEMVITPLALTESILSDGEKDFGTIVIDMGGGQTTTAVMHDKQLKFTNLDQEGGEFVTKDISIVLNTSFNNAEALKINYGDAYPERTSPDEEFPVDVIGQSEPVKVDERYLSEIISARMEQIFNKAKDALDQIEALELPGGVVLTGGAASLPGVVDLAQEIFGVNVKLYVPNHMGLRNPVFTNVISIVDYSANLSEVYQLAKIAVTGETSAARQMVVEQETTNTYESYEAPEETIYDEPEPKESGENVKNKIKGFFTNIFD

SEQ ID NO: 57897 - protein, 143 aa, Enterococcus faecium
MRVMGLDVGSKTVGVAISDPFGWTAQGVEIIRINEAEEEFGFDRLKELVAQYEVDRFVVGLPKNMNNSIGPRAEASMSYGEKIKELFSLPVDYQDERLTTVQAERMLVEQANTSRAKRKKVIDKLAAVMILQNYLDGSGKQLF

SEQ ID NO: 57898 - protein, 336 aa, Enterococcus faecium
MLKAFKFRMYPTEEQKQQLIRTFGCARFTYNHLLKKRQKSWQQTGVANFSLTPATLKKEYPFLKEVDSLALANAQLNLDRAFRNYFKGRASFPKLKTKKSMWQSYTTNNQTRTIYLENGYLKLPKQKELIKINQHRPVEGSIRSATISARYNEEFYVALLCDVSPVKKESLAKWIGIAYHPKTLIQTSRPLEVTLPKFHQTEEKLQHAQRKLNVKVRSAHHRKIRLDQASNYQKQKRKVMDLYLKQKNQREDYLEQLSGKLVKQYDYLFVESFPKEEAHADFSIHDWHKLITKLRYKSQWYNKKFLLINTDGAEESNSVRKSQVVEKMGRHSVIKG

SEQ ID NO: 57899 - protein, 312 aa, Enterococcus faecium
MNQEINLAQMQPIVYQQLQRSFEHGRIAHAYLFEGEKGTGKHEVGIWLAQHLFCTQMKDNLPCGKCNNCQRIEKKEHPDVLVIEPEGQTIKVDQIRRLQTEFSRSGYESRKKVFLIKEAEKMNSSAANSLLKFLEEPPGDFLAVLETDAVGRILPTIQSRCQVLHFQELSKEALIHRLQEEQIPLEKAKLLAFLTNSLGKAVEISQDEWFNDAKDLIYQWFVYLQKQDTQAFIYVQKKLVKSFKEKTQQFTGLSVLMFYYQEAQRQAVANGEYGKVKQINQIIERILIAEQKLRSNVSFQAVAEQFVLHTIF

SEQ ID NO: 57900 - protein, 324 aa, Enterococcus faecium
MCTSITYVTSDHYFGRNFDYEISYNEVVTVTPRNYKLNFRKVNDLDTHYAMIGIAAGIADYPLYYDATNEKGLSMAGLNFSGYADYKEIQEGKDNVSPFEFIPWILGQCSTVGEAKKLLKNINLANINYSDELPLSPLHWLLADKEKSIVIESMKDGLHIYDNPVGVLTNNPSFDYQLFNLNNYRVLSSETPKNNFSNQISLNAYSRGMGGIGLPGDLSSVSRFVKATFTKLNSVSGDSESESISQFFHILGSVEQQKGLCDVGDGKYEYTIYSSCCNVDKGIYYYRTYEDSQITAIDMNKEDLDSHKLISYPIIEKQQIKYIN

SEQ ID NO: 57901 - protein, 397 aa, Enterococcus faecium
  MISC_FEATURE (390)..(390): X=any amino acid
MSMFLDQVTIDVKAGKGGDGMVAFRREKYVPDGGPAGGDGGRGGDVILIVDEGLRTLMDFRFNRHFKAQPGENGMSKGMHGRGSEDTYVKVPQGTTVRDAETGALLGDLIENGQTLVVAKGGRGGRGNIRFASPRNPAPEIAENGEPGQERKIELELKVLADVGLVGFPSVGKSTLLSVISSARPKIGAYHFTTLVPNLGMVTTSDGRSFAAADLPGLIEGASQGVGLGTQFLRHIERTRVILHVIDMSGMEGRDPYEDYLAINKELSTYNLRLLERPQIIVANKMDMPDAQENLVKFKEQLNKEKEDEFADDIPVFPISGVTRQGLDALLNATADLLEVTPEFPLYEEELEEETVHYGFNPEGPEFQIDRDSDATWILSGEKIDQLFQXQFRLDET

SEQ ID NO: 57902 - protein, 375 aa, Enterococcus faecium
MKKIPKKMKKSVRYMALLTLERVNKGGAYSNLLLNEMIKQSELNQKDVGLFTELIYGTISHQRLLEFYVAPLIAKAKKVDDWVKTLLYLSVYQLEFLDKVPAHAILNEAVEIAKVKGNPGTGKFVNGVLRNYQRQGAPDLQGIADPIERLSVKISLPLWMTKRLVDQIGYEETEKLGLSLYQPSHASARVDTRRLSRDQAITVLQEEEITAEKSQVSPYGIVAKKGHLASSSLFHDGVMTIQDESSMLVAPSMQIEPEHHVLDACAAPGGKTTHIASFLDPSCGGEVVALDVHEHKVKLIEDNAARLGVSSAVYAQKMDAREVSKQFEAEQFDRILVDAPCSGLGLLRRKPDIRYKTQPDELANLPKIQLEILES

SEQ ID NO: 57903 - protein, 245 aa, Enterococcus faecium
MDVKGKNVFITGSTRGIGKAMALAFAKAGANIILNGRGEIPKEKIEEIEAFGVKCVGVSGDISDYEKAGQMIKEAEEKLGSIHVLVNNAGITNDKLVMRMDAEDFKKCLDINLIGTFNMTQHVLKKMMKQREGAIINLSSVSGLIGNIGQANYAASKAGVVGLTKSVAREAATRGITCNAIAPGFITTDMTEVLADKVKEQAEKQIPMQRFGQVEDIAQTAVFLAQNPYITGQVINVDGGLVMHG

SEQ ID NO: 57904 - protein, 813 aa, Enterococcus faecium
MKEVVMIDAARTPIGKYRGSLSPFTAVELGTLVTKGLLDKTKLKKDKIDQVIFGNVLQAGNGQNVARQIALNSGLPVDVPAMTINEVCGSGMKAVILARQLIQLGEAELVIAGGTESMSQAPMLKQYQSETNEYGEPISSMVNDGLTDAFSNAHMGLTAENVATQFSVSREEQDRYALSSQLKAAHAVEAGVFSEEIIPVKISDEDVLSEDEAVRGNSTLEKLGTLRTVFSEEGTVTAGNASPLNDGASVVILASKEYAENNNLPYLATIKEVAEVGIDPSIMGIAPIKAIQKLTDRSGMNLSTIDLFEINEAFAASSIVVSQELQLDEEKVNIYGGAIALGHPIGASGARILTTLAYGLLREQKRYGIASLCIGGGLGLAVLLEANMEQTHKDVQKKKFYQLTPSERRSQLIEKNVLTQETALIFQEQTLSEELSDHMIENQVSEVEIPMGIAQNFQINGKKKWIPMATEEPSVIAAASNGAKICGNICAETPQRLMRGQIVLSGKSEYQAVINAVNHRKEELILCANESYPSIVKRGGGVQDISTREFMGSFHAYLSIDFLVDVKDAMGANMINSILESVANKLREWFPEEEILFSILSNFATESLASACCEIPFERLGRNKEIGEQIAKKIQQAGEYAKLDPYRAATHNKGIMNGIEAVVAATGNDTRAVSASIHAYAARNGLYQGLTDWQIKGDKLVGKLTVPLAVATVGGASNILPKAKASLAMLDIDSAKELAQVIAAVGLAQNLAALRALVTEGIQKGHMGLQARSLAISIGAIGEEIEQVAKKLREAEKMNQQTAIQILEKIREK

SEQ ID NO: 57905 - protein, 268 aa, Enterococcus faecium; identical to SEQ ID NO: 57742

SEQ ID NO: 57906 - protein, 505 aa, Enterococcus faecium
  MISC_FEATURE (320)..(320): X=any amino acid
  MISC_FEATURE (322)..(322): X=any amino acid
PDAGKTTITEQLLLFGGAIRQAGTVKGKKTGNFAKSDWMEIEKQRGISVTSSVMQFDYQGKRVNILDTPGHEDFSEDTYRTLMAVDSAVMVIDSAKGIEAQTKKLFQVVKKRGIPIFTFINKLDRDGREPLELLEELEELLDIESYPMNWPIGMGKGLEGLYDIYHNRVEFYRPENYQDERLVELDEDGLLPENHPLTENSLYEQVLEEVELIKEAGDAFNQEKIARGDQTPVFFGSALTNLGVQTFLETFVELAPAPYGHKTQDDQMVSPYEEEFSGFVFKIQANMNPAHRDRIAFVRICSGTFERGWMSGWNVQIKNXNXAMSHNLWQIREKTSKKAVAGDIIGVYDTGNYQIGDTLFEGKLKVAYEELPSFTPELFMKVTAKNVMKQKSFHKGIYQLVQEGAIQLYKTYLTEEYIIGAVGQLQFEVFQYRMLNEYNAEVIMSPMGHKIARWIDPEDLDEKMSSSRNILARDRFDQPLFLFENQFAERWFADKYPNVKLKSLM

SEQ ID NO: 57907 - protein, 433 aa, Enterococcus faecium
MEEIIVRGGNQLNGTVRIEGAKNAVLPILAASLLAEEGITTLDNVPILSDVFTMNQVIRHLNVDVDFDEQKNQVTIDASRQLEIEAPYEYVSQMRASIVVMGPLLARNGHAKVAMPGGCAIGKRPIDLHLKGFQALGAKIIQKNGYIEAIADELIGNTIYLDFPSVGATQNIMMAAVKAKGTTIIENVAREPEIVDLANILNKMGAQVYGAGTETMRIEGVDHLHAVNHSIVQDRIEAGTFMVAAAMTQGNVLIADAISEHNRPLISKLIEMGAEIIEEEGGVRVIGPKHILPTDVKTMPHPGFPTDMQAQMTAIQLVAEGTSVVTETVFENRFQHLEEMRRMNAHVKIDGNVAIMDGNHELQGAEVYATDLRAAAALVLAGLKANGITRVRNLNYLDRGYYNFHIKLQQLGADVERVDMDQTSAEKTAQTIA

SEQ ID NO: 57908 - protein, 311 aa, Enterococcus faecium
MNKEEIVESLATITILFDEPLMNYTFTKTGGPADVLAFPKKQEEVKQIIDYCRIHDIPWMVLGNASNLIVQDGGIRGVVIMLTEMKQIHVKGTMVIAEAGASLIDTTYAALAESLTGFEFACGIPGSVGGAVYMNAGAYGGEIKDVFAEVDLLLEDGTLKTLTKDEMVFSYRHSKVQELRAIVLEARFSLQTGDYEAIKARMDELTELRQSKQPLEYPSCGSVFKRPVGHYTGQLIQQAGLQGLKWGGAQVSEKHAGFIVNIDHATATDYIELIAHIQEVIKEKFDVSLETEVRIIGEKQAISETSRSLAN

SEQ ID NO: 57909 - protein, 431 aa, Enterococcus faecium
MNDSIKKMLRLIEKDLMITEVSYETFQKKKTLIVDAVFSPAPHTCRNCGSTVVDGNGKVIVVKNGKKETIVRFEQYNHMPLVMRLKKQRYTCKNCRTHWTAQSYFVQPRHSIANHVRYKIASLLTEKVSLSFIAKNCQVSLTTVIRTLKEFKSYLPKQSKRILPRVLMVDEFRSHASIEDKMSFICADGETGQLIDVLPTRKLPRLTSYFLGCANPEEVKFLVTDMNAAYFQLTKRILPNAKVVIDRFHIIKHMNQAFNELRIREMNELRKVGQKSQAEKLKKNWRFLLKNRANINHYEYKTWKSFRAPKYPFLTEAMMIDRLLGFSTSLKEAYPYFHELVEAFRDKDPDLFFSLLAELPETLDDGFREKLQNLLTYEEGITNAMIYPYTNGKIEAKNTHIKTMKRVSYGFKSFENMRIRIFLINQLIKVR

SEQ ID NO: 57910 - protein, 181 aa, Enterococcus faecium
MLFLRKYTFVFKKKVVSDYLNNEGGYKYLAHKYQINRTLVRHWVRIYNYHGWEGLVGGGKSYTTKFKLDVIEYMETNGLSIQETAKKFNIGSNRTLSKWIEQYEEGGASSLESQKRGRKISMNSKLNIPKKLKDESLEEEVIRLRAENAYLKKLETLIQEQDLSKKKSRLKQSFSSKKNLN

SEQ ID NO: 57911 - protein, 282 aa, Enterococcus faecium
MKKKIFGFAAALLLTVGLAACGNNSDSKDSANKADDTTLKVGASPTPHAEILEHVKPLLKDEGIDLEIVKFDDYVLPNQSLEEGDIDANYFQHIPYLNKEIKEKGYDFVNAGAVHIEPMGLYSKKVKDVSELKDGATIITSNSESDWGRIITILQDAGLVKVKDGVDLETATFDDIEENPKNLKFNHTIDPSLLASTYQNDEGDLVAINANFAYGAGLNPLEDAVLLEKDNSPYVNIIATRKGDEDSDKIKKLIEVLHRKEVQEWITDKWGGSVKPVKADAK

SEQ ID NO: 57912 - protein, 52 aa, Enterococcus faecium
MSKIIGIDLGTTNSAVAVLEGNEAKIIANPEGNRTTPSVVSFKNGEIQVGEV

SEQ ID NO: 57913 - protein, 881 aa, Enterococcus faecium
MTEENNLSTKYNPQEVEAGRYQHWLEQDLFKPSGDKKAKPYSIVIPPPNVTGKLHLGHAWDTTLQDMLIRQKRMQGYDTLWLPGMDHAGIATQAKVEAKLREQGISRYDLGREKFIDQVWEWKEEYASHIREQWAKMGLSLDYSRERFTLDDGLSEAVRKVFVTLYEKGLIYRGEYIINWDPQARTALSDIEVIHKDIEGAFYHMSYELADGSGVVEIATTRPETMLGDTAIAVHPEDERYQALIGKKVILPLVNKQIPIIADEYVDMEFGTGVVKITPAHDPNDFEVGNRHDLPRVNVMDDDGTMNELAGKYAGMERFAARKAIVQDLKEIGRLIKIDTMIHSVGHSERTGVVVEPRLSTQWFVKMAPLAKKAIDNQETDQAVEFFPPRFNQTFLRWMENVHDWVISRQLWWGHQIPAWYHKETGEMYVGMEAPADSENWVQDPDVLDTWFSSALWPFSTMGWPDTESEDYKRYFPTSTLVTGYDIIFFWVSRMIFQSLEFTGERPFENVLIHGLIRDEQGRKMSKSLGNGIDPMEVIEKYGADALRWFLSNGSAPGQDVRFSYEKMDASWNFINKIWNASRFVIMNIEGMTVEEIDLSGEKSVADRWILTRLNETIERVTELFDRFEFGEAGRQLYNFIWDDFCDWYIEMSKEVLYGDDAVSKQTTRSILVHTLDQILRLLHPIMPFVTEEIWEHIPHQGNSLVVAEYPVVRPEFDDETASKGMEVLKELIRAVRNIRSEVNTPLSKPITLLIKTNDAKIDQFLVENTSYIERFCNPEELTISSEITAPDLAMSAVLTGAEIFLPLAGLINIEEEIKRLEKELEKWTSEVKRVQGKLSNERFVSNAPEEVVEAERAKEKDYLEKQTAVKERIESLRTIQ

SEQ ID NO: 57914 - protein, 146 aa, Enterococcus faecium
MKLHELKPAEGSRQVRNRVGRGTSSGNGKTAGRGQKGQKARSGGGVRLGFEGGQTPLFRRLPKRGFTNVNRKDYAVINLDVLNRFEDGAEVTPVALVEAGIVKNEKAGIKVLANGELNKKLTVKAAKFSKAAQEAIEAAGGSIEVI

SEQ ID NO: 57915 - protein, 689 aa, Enterococcus faecium
MIELGKKLNGRYQITGNIGSGGMANVFLAHDLILDRDVAVKVLRFDFQNDQTAIRRFQREALAATELVHPNIVSVYDVGEEDNMQYLVMEYVKGMDLKRYIQTHYPVPYETAVNIMQQILSAISLAHNHQIIHRDLKPQNVLIDNEGVVKITDFGIAIALSETSITQTNTMLGSVHYLSPEQARGSMATKQSDIYALGIILYEMLTGSVPFDGESAVTIALKHFQDDLPSIKALDPNVPQALENVILRATAKEPADRYKSAEEMSDDLSTVLSPARANEEKWQPHVMDNETKVITPLTEDAPMPDSFKSMPLPKDKPENETLPEEEEVLPDPKKKGQKKWWLILLAILAVLGIGTAVFFASGGRGEVVVPDVSDLSEASARETLAKAKLEVATKTEEIADDKIEEGNVVKTDPAAGTTVKQKREVTLYISSGTKKIKLDDYSGKSYEDAEASLKELGFSADLIQKEEEFSSEVESGMIISQSPSEDTEVDPKTDTITFTVSKGPETVTLSSHVGENYETVRNWLVTQGFNINNISATYDYSDTVPSGSIISQDPASGEVVAEETYINFVVSQGTEPKLNDISGYTKSEAQSYLASVGAEYIGHETSEYSNTVDKDKVIRTVPGAGTTITKGMVVNVIYSKGPDPASSSSEKDSSDSSSSSSSSSSTSNSSKEESSSSTSSSASTSESSK

SEQ ID NO: 57916 - protein, 159 aa, Enterococcus faecium
MNIKIISVGKLKEKYLIQGINEYVKRLNAYAKIELIEVPDEKAPENLSEAQMRQVKEKEGERILAKIKEQEYVYALAIEGKNPTSESFAKQIDQLGIQGKSHLVFVIGGSLGLSEAVMKRSNAQISFGKMTYPHQLMRLILVEQIYRAFRINAGAPYHK

SEQ ID NO: 57917 - protein, 530 aa, Enterococcus faecium
MGAELNQKLFSAADNLRSKMDASEYKNYLLGLIFYKYLSDRLLEQVVLLADESLEEYDTVSKQTMLYRELLSDEESKEDLIATIVDILGYAISPEYLFNVLADQAKQATFQLNDLNKAFVQLASTYNQFNGLFDDVDLQSKKLGTDEQQRNVTITEVIKKLNDVEVLGHDGDVIGDAYEFLISQFASEAGKKAGEFYTPHMVSDMMAQIVTLDQKERRFFSVFDPTMGSGSLMLNVRNYLTHPDNVKYHGQELNTTTYNLAKMNLILHGVDAEEMNLRNGDTLNKDWPTDEPYTFDAVVMNPPYSANWSADTTFLDDSRFNRYGKLAPKSKADFAFLLHGFYHLKETGTMAIVLPHGVLFRGAAEGVIRQKLLEDGSIYAVIGMPANLFFGTSIPTTVIVLKKNRQTRDVLFIDASREFVKGKNQNKLSEENIQKILETYAERKDVEKYAHLANFDEIKENDYNLNIPRYVDTFEEEEPIDMVHVGNDIKKIRQEQQVLEKELLEAISSLQTTPENEAWLQGALEVFKHE

SEQ ID NO: 57918 - protein, 547 aa, Enterococcus faecium
MAYQFKLPDIGEGIAEGEIVKWFVKPGDTINEDDTLLEVQNDKSVEEIPSPVTGTVKNVIVPEGTVANVGDVLVEIDAPGHEDNEGDSGVAAESQTPAKPAAEPTVDTESAGSSSEGVFQFKLPDIGEGIAEGEIVKWFVKPGDTINEDDTLLEVQNDKSVEEIPSPVTGTVKNVIVPEGTVANVGDVLVEIDAPGHNSAPSTSAPSAEAPKEKVETSGSASVVEAADPNKRVLAMPSVRQFAREKDVDISQVTATGKGGRVTKEDIENFLAGGPSSAPAKSEAPEAAAPKEAAPAAESKPAAPAKPFKSNLGDLEERVAMTPTRKAIAKAMVNSKHTAPHVTLHDEVEVSKLWDNRKRFKEVAAANGTKLTFLPYVVKALTATVKKYPVLNASIDDANQEIVYKHYYNIGIATDTDHGLYVPNVKDADRKGMFAIADEINEKAKLAHDGKLSAEDMRNGTITISNIGSVGGGWFTPVINYPEVAILGVGTIAQQPIVNAEGEIVVGRVMKLSLSFDHRIVDGATAQQAMNNIKRLLADPELLMMEG

SEQ ID NO: 57919 - protein, 84 aa, Enterococcus faecium
  MISC_FEATURE (63)..(63): X=any amino acid
  MISC_FEATURE (64)..(64): X=any amino acid
  MISC_FEATURE (65)..(65): X=any amino acid
  MISC_FEATURE (66)..(66): X=any amino acid
  MISC_FEATURE (67)..(67): X=any amino acid
  MISC_FEATURE (68)..(68): X=any amino acid
  MISC_FEATURE (69)..(69): X=any amino acid
  MISC_FEATURE (70)..(70): X=any amino acid
  MISC_FEATURE (71)..(71): X=any amino acid
MPNIESAIKRVRTSENANVKNSSQTSAMRTAIKKFEDAVSSGADNVDALYKEAVKAIDMAESXXXXXXXXXNRDKSRLSKKIAK

SEQ ID NO: 57920 - protein, 122 aa, Enterococcus faecium
MIQAESRLKVADNSGAREILTIKVLGGSGRKTANIGDVIVATVKQATPGGVVKKGDVVKAVIVRTKSGARRTDGSYIKFDENAAVIIRDDKSPRGTRIFGPVARELRENNFMKIVSLAPEVL

SEQ ID NO: 57921 - protein, 166 aa, Enterococcus faecium
GYENKVKANIESRAQSMKMADFIFRVVVPEEKETEVKNGKEKEIVHKTFPGYVLVEMIMTDASWYVVRNTPGVTGFVGSHGAGSKPAPLLPEEVNHILRSIGMSLRQNDLEVEVGEVVKIIEGAFAGLEGQVTEVDGEKEKLKVNIDMFGRETSTELDFDQVDKID

SEQ ID NO: 57922 - protein, 492 aa, Enterococcus faecium
MKDTGSSKQITTMTFIGMTCALVASVRNIPDVAATSWTMIFYMLVAVLLYAFPISLISGEFAGMFPQKGGPELWVSNALGKKWGFVVSWLLWVQMFPGMVMVASALAPLFGNIIDNVPLGLNSKFTLVVILVVYWIITFLNLKFDMAKIGGKVGVWLGLYVPLTMMLLLGFAAWIKVGIVPTGTLGSFSWDKLIPDTTTASSFVYFAPIMFIFTGIEMSSVYITRLENPVKTYIRGVFAALIFIFFVNILNALVVANVVPKGQMELNNIAQSISIYCQILGLPHLIVNLFSLLVFIGVAVQLSAWASGPAKTVTESARKGAYPPKFNFWKTNQFDVSKSVILTQSVIISIFALFYLLIPGVNQAFLMLVNSTTVIYCIVYVIMGIAVLRLRYTHAKLNRPFRIGKKEKKSNLGVWTVVIVLFAAIGFSVGLTMKAGTWINLIAVTAISVILFVVPLCIEKIKKPSWEQEVAMLLEKEKGELDGKTGNETDSN

SEQ ID NO: 57923 - protein, 212 aa, Enterococcus faecium
MTSLKTLLFGTTLAAGAAFFMGTTAHADEAYTVQSGDTLSTISQKYVGDNSLINAIAESNSISDINLIYSGQQLTIPTEGSAQAAAEPQAAVQEAPVQAEPVQAEQPVVQETVQTETQAAPVAETQPAPAVTETAATPASTSSAKEWIAQKESSGSYTATNGRYIGRYQLDSSYLNGDYSAANQERVAEQYVTSRYGSWEAAKAFWEANGWY

SEQ ID NO: 57924 - protein, 215 aa, Enterococcus faecium
MSELIQTYGPIFVDGFKITLFSSVLALVFSLIIGTLMAIFQLSKNKVVSALAKAYVEFFRNIPLLIIVMFFYVVVPIYWFNLDGFQAGTIGLTIYTSAFIAETVRSGIQTVPKGQTEAGLSSGFTYSEIMRYIVLPQAFKIVIPPLGNQFINLVKNSSILAIVAGLDLMYQGDLIASETFNTFDTYIIVGLFYLVITLPLSYLMVYLEKKWAVRS

SEQ ID NO: 57925 - protein, 139 aa, Enterococcus faecium
MNIQEIKEIIPHRYPMLLIDRVEEMVEGERIVAKKNVTINEPFFQGHFPEEPVMPGVLIVEAMAQAGAVALLSLEQFKGKTAYFGGLDKAKFRKKVTPGDTLYLEVEILKVKASAGIGKGIAKVDGKKVAEAELTFMIG

SEQ ID NO: 57926 - protein, 161 aa, Enterococcus faecium
MINNVTLVGRLTKDPDLRYTASGTAVATFTLAVNRNFANQNGNREADFINCVIWRKPAETMATLAKKGGLIGVVGRIQTRTYDNQQGQRVYVTEVVADNFQLLESKAATESRAHADQSSTSPSTATFEQRDTATPNNNGLNASQNPFGGQSIDISDDDLPF

SEQ ID NO: 57927 - protein, 906 aa, Enterococcus faecium
MKILRIEIAAFGKWRQKSFDFYSGNQLIYGGNEAGKSTIYQFIQAILFGFPSKGRKKKDYTPKDGSAYGGKIWLKHPVYGEFAVERYKQQNRGKSKVWLGDQVGSDELLEKLIAPLTKELFQQVFTFQQEQLMELDHLREKELHDALISLGITGSSQVFQKRQEYYQKAQQLFKKKGQKLLINQKLNEWKELQEKIHQKQEQEAYFGKLIQQEQEYESQQQQLLAQLKEANKQFSLARQQELNFSLYEEWQSLKKNSTTGLPDEQLLLDLESFSKRYQQTNERLEELEATLEKHSGMDQQSARYYFYLEQEQELKDLQQLQFTAEQLNEEWQRLQIETRETNSELKILEQRWHWQKNPLPEEFLYEEEWKHLLAEERRIADLESQISVRLQIAKEQQEMIEAEVNDLEETYPALLQNQSEIAPVSSSKPYMLMAGGAIIIAGIFVPMPLKVILLLIGAGMIGYFFYKRQPKIKTKNDFSEIKGMWQEKLGQLDLALAQLAEAEEKQKRTGEEKQILQQEVYRFADHRHLGKMDTLKLMKEYGQEVIDYQKLYGVFERKHKREQEIQEKLRQIDQKFEFVKEWLPIQDKTISEKMVLLSRFIQEMEQMKFARSYQQNTLLKQEINQLKKKQKVWIQEYSEQLTQAGLSYPSEVPVFLQKAKQAEQQMKRYNELSEMLTPLFPEELTKEKLSVRLRQLKEKQSQLQQEEKEASENRQRLQLQVEELQRDGTLDELYQQASRQKAKLQELLEEWGALEIAGTFLGDLSTEMSERQLPQLLRAAGDYLGILTKGNYQKILLKNDTLTLTDGYTEFPIYELSTGTKDQLIMAMRFAYLSLEANRSICPIIIDDGWLHYDHQRKYQLAELLAKFGEKYQIICFSSDKEMVSYYHEMNQIVKQLEGANNEKNS

SEQ ID NO: 57928 - protein, 474 aa, Enterococcus faecium
MDTEQQKKGIGLIPLAALVIGSAIGGGVFGIMTDISGSAGGPAIFSWVLVGTAMLMLSLSINNINKKRPDLKGGIFSYAEEGFGRFAGFISGWGYWLTCWLGNVAFATLLMSALGYFFPVFEGGQNLASIVMSTVFLWGYAWLVNRGVENASFVNAIVTFCKLVPLFLFIVVAISTFSIQQFIDNFSSDIILNANGQPIPFSSQVLSCIMVMLWVFVGIEGASVVGSRAKKQSDVGKATILGIFGLIIIYVLVSMLPYGTMTMNQLQTIKAQPAMGYVFEMMVGKWGAVVINGGLIISLVGVWLSWTILPIETMGNMAEDGLLPKAWGKLNKNGAPTYAIVLTTLCTNVFLLSLLFTDSAYNFAYTLGTAAIFFTWLFLGLYQMKLSYQRKEWVQFLVGLLASAFQVWAMLVVAFNEVMLVLVLFLPGIYFYLKARKEQNEPVQHIHLDKILLIGVTMVGVIAMVLFATGMLHV

SEQ ID NO: 57929 - protein, 611 aa, Enterococcus faecium
MKRKVRFFRSVNFKIAITFILILLISIEIIGAYFIRGLERSTINTFIKDMNQTVESLATTISPELNRKDNADDEEVNANIKRFIENSATSDIIEIRVVDEKGIIRGTTDVNEQSAVGKKNDYVDINDFTTKRYVALDNDDKRVNINVQPILSPTGDAVIGALYVKSNIEQKYSEINNTAVIFFTASLIAAFISMIVSVLVARSITQPIGEMREQAIRIARGDYSRKVKVHGQDELGQLADTFNQLAERIEEAQDTMEAERNRLDSVLSHMTDGVIATDRRGKVITINDMAVSLLDIKNEEAIGQSILTLLDIEEEYTLRKLLEDPNEMVLDRSTSTLESDQMILRVDFSMIRRESGFISGLVAVLHDVTEQEKTERERREFVSNVSHELRTPLTSMRSYIEALSEGAWKDEEVAPNFLKVTLDETDRMIRMINDLLNLSRMDTGNTQLQLEYVNFNELVNFVLDRFDMMVGNQEKNYKIRREFTQRDLWVEVDTDKIIQVVDNIMNNAIKYSPDGGTITCRLLETHNNVVLSITDQGLGIPKKDLNRVFERFYRVDKARARAQGGTGLGLAISREVIKAHRGAIWAESKEGKGSTFYISLPYEPYEEEWWE

SEQ ID NO: 57930 - protein, 188 aa, Enterococcus faecium
IRIKRYKSYKGTVGKNAKNVLKRNFSVDTPNKKWVTDVTEFKIKGRKIYLSPYLDLYNGEIISYSISTSPTYKLIEEMLQQAIKKKGTEGSLILHSDQGWQYQMPQYQKKLKENNIIQSMSRKGNCLDNSVIENFFGVLKSEFFYREKFRSIEIFQSKLNEYIRWYNNKRIKLKLNGLSPVEYRKQSI

SEQ ID NO: 57931 - protein, 167 aa, Enterococcus faecium
MLFLRKYTFVFKKKVVSDYLNNEGGYKYLAHKYQINRTLVRHWVRIYNYHGWEGLVGGGKSYTTKFKLDVIEYMETNGLSIQETAKKFNIGSNRTLSKWIEQYEEGGASSLESQKRGRKISMNSKLNIPKKLKDESLEEEVIRLRAENAYLKKWNGNTFFDKNYKVL

SEQ ID NO: 57932 - protein, 325 aa, Enterococcus faecium
MFKGKARAYTNIALIKYWGKKNEELILPMNNSLSLTLDAFYTETEVIFSDSYMVDEFYLDGTLQDEKATKKVSQFLDLFRKEAGLSLKASVISQNFVPTAAGLASSASGLAALAGACNTALKLGLDDLSLSRFARRGSGSACRSIFGGFVEWEKGHDDLSSYAKPVPSDSFEDDLAMVFVLINDQKKEVSSRNGMRRTVETSSFYQGWLDSVEGDLYQLKQAIKTKDFQLLGETMERNGLKMHGTTLAAQPPFTYWSPDSLKAMDAVRQLRKQGIPCYFTMDAGPNVKVLVENSHLSEVQETFTKLFSKEQVITAHAGPGIAIIE

SEQ ID NO: 57933 - protein, 465 aa, Enterococcus faecium
MKKYQFPANFWWGSAASGPQTEGRISGDGKGENIFDYWYKKEPQKFFDQVGPEKTSQVYTKYQEDVQLMKQTGHNSFRTSIQWSRLIPDESGTINEEAVRFYHRYFDELIENGIEPFVNLYHFDMPMYLQEKGGWLNRETVEAYEKYAKSCFELFGSKVKKWFTHNEPIVPVEAGYLYRWHYPEESDMKKAIQVGYHEALASALAIKSYHEMEQGGVIGIILNLTPSYPRDESNPEDVKAAQIADAFFNRSFLDPAVKGEFPSELIEIVKELDLMPVIHAEDLTVIKENTVDLLGINYYQPRRVKAKETPIDTKNGPMPEDYFDNYEMPGRKMNPYRGWEIYEQGIYDILINVRDHYGNIDCFISENGMGVENEARFIKEDGMIHDDYRIEFVQSHLKYVHQAIQEGANCLGYHMWTCMDNWSWTNAYKNRYGFISVDLAQDGKRTIKKSGHWFKDVSDKNGFEA

SEQ ID NO: 57934 - protein, 357 aa, Enterococcus faecium
MKKLQSLFLGILIIIAVLLLGVRQLEKTSGMSGAKVLTIYNWGDYIDPSLITKFEKEYGYKVNYETFDSNEAMFTKIQQGGTNYDIAIPSEYMIQKMIKEKLVLPLDHSKIKGLNNIDPRFLDLDFDPDNQYSIPYFWGTLGIVYNDKFFDANQIKHWDDLWKPELKDSLMLIDGAREVMGLSLNSLGYSLNSKNMAQLTEAANKLNHLTPNVKAIVADEIKMYMINEEASVAVTFSGEAADMMWENEHLHYVIPPEGSNLWFDNIVMPKTVKNKEGAYDFINFMLEPENAAQNAEYIGYSTPNEEAKALLPKDISSDEQFYPSDDTISHLEVYKDLGSKYLGIYNDLFLEFKMYRR

SEQ ID NO: 57935 - protein, 433 aa, Enterococcus faecium
LLQQSFIRHGNEQGFWQQGSRILAAVSGGVDSMVLLHLLLQVQRQIGFSLGIVHINHQLREESAEEAAYLRSYCEEKNLPLYVSIWEDPAKSAIETEARNFRYQEFTRVMEEGQYDTLMTAHHGDDQIETVLMKIVRGGQLNTFSGIKEVQPFATGRLIRPLLSFSKEDLYTYAAESQLVYFEDQTNQLLDIQRNRLRHLVVPQLKQENTQALRHFQQFSQQIQWADQVIQKYMGQLIEKEVEQWEEQFRFSAEMIEEMTDAERYYFFYSFFDKAFSKTGIILKEQQMESILDQWQQKKSQWQLSIGNNWILKREYHFVVLSKKEKQATSQTEDQRLLLIPEQGIYLNETEWIGLVKPENAGDIKATDSWSLFSHDIWIPADVQLYVEKRKAGDRPIKLTENLTKKVSRYFIDQKVPIHKQHAWIITDAKEYI

SEQ ID NO: 57936 - protein, 230 aa, Enterococcus faecium
MKIGIIGAMEEEVKISRENLSEPLSWERAGALFISGSLGNHEVIVVRSGIGKVLASITTSLLIQQYGVNMVINTGSAGGIGEGLQVGDIVISDKVAYFDADATGFGYNPGQLPGMPLYYEASTYLRSEMVKAAKATNLNAKEGLIVTGDTFVDSPDKIKEILTNFPEALACEMEGAAVGQTARQFNIPFLIVRAMSDTADHSATQSFDEFIEDAGKRSAEMVIEFVKHLV

SEQ ID NO: 57937 - protein, 445 aa, Enterococcus faecium
NFDIFRFKPFINEALTAKGFKQPTEVQERLIPLIAIRKNIIGQAQTGTGKTHTFFLPLFEKINAEKEEVQVVITAPSRELAAQIYEAATQIAKFSTPEIRVSNFVGGTDKQRQLNRLHHQQPQVVVGTPGRILDMMNEQALKIHTAFAFVVDEADMTLDMGFLNEVDQIASRLPEKLQFLVFSATIPEKLRPFLRKYMENPIIEEIKPKAVISEDIENWLISTKGKDENQMIYQLLTIGHPYLAIVFANTKQHVDEIADYLKNQGLKVAKIHGDITPRERKRVMRQVQNLEYQYVVATDLAARGIDIEGVSHVINAEIPEDLDFFIHRVGRTGRNGLKGTAITLYSPNDEQAIDAIEKLGVSFEPKEIKNGEIVKTYDRNRRAKREKSKDVLDPTLIGLVKKKKKKIKPGYKKKIDWAIAEKNKKERKIERRQQSRTARKNKKNS

SEQ ID NO: 57938 - protein, 112 aa, Enterococcus faecium
MEIEKTNRMNALFEFYSTLLTEKQMNYMELYYADDFSLGEIAEEYEVSRQAVYDNIKRTSKILEDYEKKLHLFSNYIVREQVLENMTAYITDKYPEDKKLLEYVQQIQAIEE

SEQ ID NO: 57939 - protein, 201 aa, Enterococcus faecium
MILENKLGLTNQVELAKVEEKLSKQKAKELYDCGKINEIEVGTFKGLSEIHEFLFSDIYDFAGKIRSVNIAKGNFRFAPVMYLEHSLQHIDQMPQTSFEEIIKKYVEMNIAHPFREGNGRSTRIWLDLILKEELQKVVDWNLIDKADYLSAMERSPINDLEIRYLISNALTDKIDDRELYMKGIDVSYFYEGYSEYTIDDL

SEQ ID NO: 57940 - protein, 148 aa, Enterococcus faecium
MNILYISISGNTRAFAKHLAEYAEKMHAEDPVNPEVTLKEIHENSDFTKETEPFFTFVPTYLDGGNGLDNGDTEILTETMREYLEHEDNHKLCLGVVGSGNKNFNNQYCLTAKQYAQTFGFPFLADYELRGTPSDVTRIYQILAENNK

SEQ ID NO: 57941 - protein, 869 aa, Enterococcus faecium
MNIEKMTTTLQEAIAEAQQIAVTRKHQDIDIAHVWKIFLQSNHFGRNFYTDAGLDVESFEHEIDRLLDEYPVVSGGNVQYGQNLSQNFFRLLNEADQIRESFGDEFLSTEVVILALMKLKNYPLTVYLNKNGLSEKELRKNIEEMRGGERVTSQNQEEQYKALEKYGVDLVQQVKSGKMDPIIGRDEEIRDVIRILSRKTKNNPVLIGEPGVGKTAIVEGLAQRIVRKDVPENLKDKTIFSLDMGALIAGAKFRGEFEERLKAVLKEVKKSDGRILLFIDEIHNIVGAGKTEGSMDAGNLLKPMLARGELHLIGATTLDEYRQYMEKDKALERRFQKVLVKEPTVEDTISILRGLKERFEIHHGVNIHDNALVAAATLSDRYITDRFLPDKAIDLIDEASATIRVEMNSMPTELDQVTRRLMQLEIEEAALKKESDDASKKRLKNLQEELAELREEANAMKMQWETEKEEVNSVSAKRAEIDKAKHELEDAENNYDLERAAVLRHGTIPQLEKELKELEAKAKDSEIKMVQESVTENEIAQVVGRLTGIPVTKLVEGEREKLIKLNETLHKRVIGQDEAVDAVSDAVIRSRAGLQDPNRPLGSFLFLGPTGVGKTELAKALAENLFDSEDHMVRIDMSEYMEKHAVSRLVGAPPGYVGYEEGGQLTEAVRRNPYTIVLLDEIEKAHPDVFNILLQVLDDGRLTDSKGRVVDFKNTVLIMTSNIGSQLLLEGVTADGTIPEAVAEQVNTLLRGNFKPEFLNRIDDTILFTPLSLDNVKGIVDKMVAQLAQRLEHQEILLTISDEAKTWIAENAYEPAYGARPLKRFITKEVETPLAKEIVAGHVMPKSKVTITLLDGQLHFKTEELEEIV

SEQ ID NO: 57942 - protein, 1142 aa, Enterococcus faecium
MKKVLVANRGEIAVRVFRACTELGIKTVGIYAEEDEYSVHRFKADEAYLVGQGKKPIDAYLDIEGIISIAKECGADAIHPGYGLLSENLNFAQRCEEEGIIFVGPKLHHLDIFGDKIKAKAAAIEAGIASIPGTDGPIASIDDALEFAKQYGYPIMIKAALGGGGRGMRVAHDEKSAREGYERAKSEAKAAFGSDEVYVEKYIANPKHIEVQILGDTHGNVIHLFERDCSVQRRHQKVVEVAPCVSMNEQQRQKICQAAVQLMKYVGYVNAGTVEFLVEGDDFYFIEVNPRVQVEHTITEMITDIDIVTTQLLIAQGLDLHKEIGLPQQEGIKLNGSAIQCRITTEDPLNNFLPDTGKIDTYRSPGGFGVRLDVGNAYAGYVVTPYFDSLLVKVCTHGATFETAIQKMERCLKEFRIRGVKTNIPFMLNVITHPEFQSGNAKTTFIDSTATLFEFPRLRDRGNKTMKYIGEITVNGFPGIESGEKPFYEEPRMPKDLITRTDYVTAKNVLDAKGADALVEWIKGQENLLLTDTTFRDAHQSLLATRVRTKDFKQIARLTGEGLPELFSSEMWGGATFDVAYRFLNEDPWQRLRKIRSLMPNTLLQMLFRGSNAVGYSNYPDNVLVEFVKEAAAQGIDVFRIFDSLNWTPQMEKSIQAVRDTGKIAEAAICYTGDINDPSRAKYNVQYYKDMAKELEQLGAHIIAIKDMAGLLKPQAAYRLISELKETTDLPIHLHTHDTSGNGIITYSAASKAGVDIVDVAMSAMSGNTSQPSMSSLYYALVNGPRLPEITIENAQKLNHYWEDVRMYYKPFENGLNAPETEVYMHEMPGGQYSNLQQQAKAVGLGHRWDEIKQMYHTVNLMFGDIVKVTPSSKVVGDMALFMVQNDLTEEDIYEKGETLSFPESVVTFFQGELGQPVGGFPKKLQKIILKGRPALNERPGLLAESVDFNEVKKELAEKIGYEPKQDEVLSYLMYPQVFLDYQKAYNQFGDVTLLDTPTFFQGIRLGETINVQIERGKTLIIRLDEIGEPDIEGNRVLFFNLNGQRREITIKDNSIISTVQTRLKAEPTNREQIGATMSGSVLDVLVKKGDNVKKGDTLMITEAMKMETAIEARFDGEVAHVYVSSGDTISSGDLLIEVTEK

SEQ ID NO: 57943 - protein, 199 aa, Enterococcus faecium
MPLLNRGAIANFFGLADEEEYEYQDYPETTKKAVQPTKKNTTQNQSTHSVSAANTHEKQKTATSRPVTHESIQPAEKKKVIELHQSPTKTVAKERTASRTSTQPKANLAGKITVMEPRAYSEAMAIAKRIIAGEATLVNFHLVEEKQARRIVDFLTGTVYALDGDIKRVGDEIFLCTPTGMEIDSSTAQSFADANLFDL

SEQ ID NO: 57944 - protein, 285 aa, Enterococcus faecium
  MISC_FEATURE (57)..(57): X=any amino acid
EVNGTVDVPKGKSFFKTLLAYSGPGALVAVGYMDPGNWSTSITGGQNFQYLMMSVIXMSSLIAMLLQYMAAKLGIVTQMDLAQAIRARTSKTLGVILWILTELAIMATDIAEVIGAAIALYLLFDIPLVIAVFITVLDVFVLLLLTKVGFRKIEALVVCLIFVILFVFVYQVGLSNPDWHSLFAGFIPNSHTFSDSPVIGGETPLTGALGIIGATVMPHNLYLHSAVSQTRKIDHQDEEDVAQAVRFSTWDSNIQLSMAFLVNALLLIMGVAVFKTGSVQDPSFF

SEQ ID NO: 57945 - protein, 486 aa, Enterococcus faecium
MTKVRVRYAPSPTGHLHIGNARTALFNYLFARHNDGDFIIRIEDTDQKRNIEDGEKSQLENLAWLGMNWDESPENPGEYGPYRQSERKEIYQPLIDQLLASNRAYKCYCTEEELEAEREAQRARGEMPHYAGTCANLTPEEQAEKEAQGLESVVRFRVPRNTEYAFTDMVKGAISFESDNIGGDFVIQKRDGMPTYNFAVAVDDHLMKITHVLRGDDHIANTPKQLMIYEAFGWTPPTFGHMTLIINSETGKKLSKRDESILQFIEQYRELGYLPDAMFNFIALLGWSPVGEDEIFEHQELIKMFDPKRLSKSPAAFDAKKLQWVNNHYIKAMDLDAFTDMCLPYLIADGRVAENPDEKTIEWVKKIVSLYQPQMSYAAEIVDLSTLFFNEHPVLNEAAKEVLAGETVPTVLHAFKAQLEQMEVVDAPTVKAAIKAVQKETGVKGKNLFMPIRVAVSGQMHGPELPETIELLGREKSLAHLNQVLN

SEQ ID NO: 57946 - protein, 66 aa, Enterococcus faecium
MPKQKTHRGSAKRFKRTGKGGLKRFRAFTSHRFHGKTKKQRRQLRKASMVSSGDFKRIRQQLAKMK

SEQ ID NO: 57947 - protein, 508 aa, Enterococcus faecium
  MISC_FEATURE (421)..(421): X=any amino acid
MNVSIGLDIGTTQTKAVAFTDEAQEAASAYFRYPLIQETQGMAEQDQELIFQGVCTVIKEVIKQLPSDTIIQFVSFSSAMHGLILLDEEKTPLSRMITWADNRAADEAEKLKYTVLGKEFYRQTGTPIHPMTPLNKIKWLQNSQPELFKKTAYFVGIKDYIFYRLFGELISDYGTASGTGYFDIHEFQWAEEVLDYLNIRIEQLPQVFPSTYQVTGLPSKTAAELGLPNDISFVLGGADGPLSNLGLGAFGDTIAALTVGTSGALRFITTQPQFHPEMETFCYVLDQKHWVVGGATSHGAGIFDWAGAYIFTGSRSSAKEKGENPYDALLSAIAFVPAGANGLIFHPYLLGERAPLWDADALWSFIGLQRQHTEKEMMKAILEGICLNLYRILKGVCPGNQLTEIRATGGYCSISDIFVRXWLDVLGYPLDKTLLSQKASALGAVILGWRSIGKIQSISEAQELIELKEQVGVQETDHKKYQKIYPLFVSTQKHFSTDLSAICSTARR

SEQ ID NO: 57948 - protein, 293 aa, Enterococcus faecium
MAYQALYRVWRSQRFEDIVGQKAVTQTLKNAIVSHKTSHAYLFTGPRGTGKTSAAKIFAKAINCPNSKDGEPCNECEMCRSITAGTQEDVIEIDAASNNGVEEIRFIRDRANYAPTKAAYKVYIIDEVHMLSTGAFNALLKTLEEPKESVIFILATTEPHKIPATIISRTQRFDFKRINTADIVEHLEFILKESTISYEPAALNVIARSAEGGMRDALSILDQAISFSEGTITLDDAMQVTGSLTDEMMDSYLSACVKKEVPEALETLNQILAAGKESRRFLEDMLQYMPLTC

SEQ ID NO: 57949 - protein, 719 aa, Enterococcus faecium
MSLKNLQDVSYFKLNNEINRPVNGQIPLNKDKEALVAFFEENVKPNTMTFPSIMEKINYLIDQEYIEAEFIQLYSPSFIEKLYQFLDEQHFSFKSFMAAYKFYSQYALKTNDGSAYLETYEDRVAFNALYFANGDEELALALADEMIHQRYQPATPSFLNAGRKRRGELVSCFLTQVTDDMNSIGRSINSALQLSRIGGGVGITLSNLREAGAPIKGYEGAASGVVPVMKLFEDSFSYSNQLGQRQGAGVVYLNVFHPDIIAFLSAKKENADEKIRVKTLSLGVIVPDKFYELTRKNEDMYLFSPYSVEKEYGVPFSYVNITAEYDHLVANPNIRKQKIKARDLENEISKLQQESGYPYVINIDTANRENPIDGKIIMSNLCSEILQVQTPSVINGKQEYEVLGTDISCNLGSTNIVNLMQSPNFGQSVRTMTRALTFITDASDIDVVPPIQNGNKLNHTIGLGAMGLHTYLAKEQMEYGSEDSLDFTNIYFMLLNYWTLVESNNIARERKQVFHNFEKSAYADGTYFEKYVTGEFQPKSEKVKALFEGIFIPTAEDWNALKQAVMKDGLYHQNRLAVAPNGSISYINDTSASIHPITRMIEERQEKKIGKIYYPAPYLSNETIPYYTSAYDMDMRKVIDVYATAQQHVDQGMSLTLFMRSEIPEGIYEWKTTTKQTTRDLNILRHYAFHKGIKSIYYVRTFTDDAEEIGSNQCESCVI

SEQ ID NO: 57950 - protein, 115 aa, Enterococcus faecium
MAEQITSAKATAKTVRTSPRKARLVIDLIRGKSVADAISILKFTPNKSAGIIEKVLMSAVANAENNFDLDVENLVVSEAFVNEGPTMKRFRPRAKGSASPINKRTSHITVVVSEK

SEQ ID NO: 57951 - protein, 305 aa, Enterococcus faecium
MKDKLIIGKNAIDTPTDFETIQEGIDYLAGLPDSHPKVLIVKEGRYDEYIESRLSNFKLVGAGTVVISGNRFAKQEYLDGSQLGTFRSATFFLEGSNVVLENLHIENTAGPGEKVGQAVALFNSGDRVSLKNCRLSGYQDTLCTGPLPDLQKDGTPFCTPASANPEYCRQTYEYCWIEGTVDFIFGGADAVFHQCHIHSLASKNPGYITAASTPKNQKTGYRFESCTLTAEPDTRNVYLGRPWRPYANVLFEACKIGGHVHPTGWDNWDDKKNEQTVKFSERNNNYETSIKRPEWIHLEKQGVQK

SEQ ID NO: 57952 - protein, 391 aa, Enterococcus faecium
LSPTPRACRSCGSTVVDGNGKAIIVKNGKKETIVRFEQYNHMPLVTRLKKQRYTCKNCRTHWTAQSYFVRLSHSIADHVRYKIASLLTEKVSLSFIAKSCQVSLTTVIRTLKEFKSYLPKPSKKILPRVLMVDEFRSHASIEDKMSFICADGETGNLIAVLPTRKLPRLTSYFLGCTNPEEVEFLVTDMNAAYFQLTKRVLPNAKVVIDRFHIVKHMNQALNELRIREMNELRKAGQKSQAEKLKKNWRFLLKNRASINHYEYKTWKSFRAPKYPFLTEAMMIDRLLEFSAPLKEAYPFFHELVEAFRDKDLTYFSSLLAELPETLDDGFREKLQNLLTYEEGITNAMIYPYSNGKIEAKNTHIKTMKRVSYGFKSFENMRIRIFLINQLI

SEQ ID NO: 57953 - protein, 113 aa, Enterococcus faecium
MSEERIYIPKKGDIVWIDFDPSVGKEIQKRRPGLVVSRYEFNRKTMFSVICPITSTIKNLPTRYSLPEELDIKGQVIITQLKSLDFKERKLKKIENLPLQDMAKIDQIIQYMF

SEQ ID NO: 57954 - protein, 355 aa, Enterococcus faecium
MYTIMEIINYLFGGISMKQKIAVLGPGSWGTALAQTLAENGHDVRIWGNVPEQIDEINKYHTNQHFLPDLTIPESIIGYKELAEAVDNADAILFVVPTKAIRSVAQELIGKMNTKPIIIHASKGLEQDTHKRISEVLAEEIPEEKRQAIVVLSGPSHAEEVAVHDITTITAASIDQKAAAYVQKLFMNDYFRIYTNNDVIGVETGAALKNIIAIGAGAIHGLGFGDDAKAAIMTRGLAEISRLGVAMGANPLTFIGLSGVGDLIVTCTSVHSRNWRAGNLLGQGHKLEEVLENMGMVVEGVATTKAAVELAQQLGVEMPITQTIYNVLYNGEDIKKAAKEIMLRDGKMENEFSLR

SEQ ID NO: 57955 - protein, 1208 aa, Enterococcus faecium
MKSLAGHVVKYGKHRERRSFARISEVLELPNLIEIQTDSYQWFLDEGLREMFEDILPIDDFNGNLSLEFVDYELKEPKYTVAEARAHDANYSAPLHVTLRLTNRETGEIKAQEVFFGDFPLMTEQGTFIINGAERVIVSQLVRSPGVYFHGKVDKNGKEGFGSTVIPNRGAWLEMETDAKDISYVRIDRTRKIPLTVLVRALGFGSDDTIFEIFGDSETLRNTVEKDLHKNASDSRTEEGLKDVYERLRPGEPKTADSSRNLLNARFFDPKRYDLANVGRYKVNKKLDLKTRLLNLTLAETLVDPETGEIIVEKGTVLTHQVMETLAPFIDNGLNSVTYYPSEDGVVTDPMTVQVIKVFSPRDPEREVNVIGNGYPEAAVKTVRPADIIASMSYFLNLMEGIGNVDDIDHLGNRRIRSVGELLQNQFRIGLARMERVVRERMSIQDTETLTPQQLINIRPVVASIKEFFGSSQLSQFMDQTNPLGELTHKRRLSALGPGGLTRDRAGYEVRDVHYSHYGRMCPIETPEGPNIGLINSLSSYAKVNKFGFIETPYRRVDRETGRVTDQIDYLTADIEDHYIVAQANSPLNEDGTFAQDVVMARAQSENLEVSIDKVDYMDVSPKQVVAVATACIPFLENDDSNRALMGANMQRQAVPLINPQAPWVGTGMEYKSAHDSGAALLCKHDGVVEYVDASEIRVRRDNGALDKYDVTKFRRSNSGTSYNQRPIVHLGEKVEKGDTLADGPSMEQGEMALGQNVLVGFMTWEGYNYEDAIIMSRRLVKDDVYTSIHIEEYESEARDTKLGPEEITREIPNVGEDALKDLDEMGIIRIGAEVQDGDLLVGKVTPKGVTELSAEERLLHAIFGEKAREVRDTSLRVPHGGGGIVHDVKIFTREAGDELSPGVNMLVRVYIVQKRKIHEGDKMAGRHGNKGVVSRIMPEEDMPFLPDGTPIDIMLNPLGVPSRMNIGQVLELHLGMAARQLGIHVATPVFDGASDEDVWETVREAGMASDAKTVLYDGRTGEPFDGRVSVGVMYMIKLAHMVDDKLHARSIGPYSLVTQQPLGGKAQFGGQRFGEMEVWALEAYGAAYTLQEILTYKSDDVVGRVKTYEAIVKGEPIPKPGVPESFRVLVKELQSLGLDMRVLDIEETEIELRDMDDEDDDLITVDALTKFAEQQTAKELEKKAAEQVEDEKDDVIQNFETAEDNLD

SEQ ID NO: 57956 - protein, 457 aa, Enterococcus faecium
MDKLLNLFVSIVSQPSILVSLIALLGLVLQKKKFSEVIQGTIKTFVGFLVLIGGAGLISNSLTPFASMFQTALHTQGVVPSNEAVVAIALQQYGTPTALIMLVGMIVNILLARFTRYKFIFLTGQAMLYVSCLTAVILVSAGFTANLWMILLGGVFEGTLLTITPALCQPFMKNITGNNQVALGHTGNIGYASSGWIGKFFGNKDRSTEDIKIPKSFSFLRDSTVSIMLLMSIVYVALALLAGPGFVERELSNGDNAVIFALIQAGTFTAGFVIVLQGVRMVLAEIVPAFQGIAKKLVPDSKPALDVPIVFPYAPNAVLIGFFVSFFVGTLSMFAMIGLQTTVIIPGVVGHFFCGAASGVFGNSTGGRRGAVLGSAFNSLLISWLPLFILPVLGDLKIASSTFADTDYLVPGLVLGKLGEYGQIALTVGIIAFFLLVVLSSFLFAGKRTNIVSKEQN

SEQ ID NO: 57957 - protein, 252 aa, Enterococcus faecium
MTKEIISSKDLHLYYGKKEALKGIDLSFNQGEITAMIGPSGCGKSTYLRSLNRMNDLIPNVTITGSVLYKDKDIYGPKTDVVELRKEIGMVFQQPNPFPFSIYENVIYGLKLKGEKDKKVLDQVVEESLKAASVWDDVKDKLHKSALSLSGGQQQRVCIARVLAVNPEIILLDEPTSALDPVSTGKIESMLLELRERYTMIIVTHNMSQASRISDKTAFFLDGHLIEYNDTKKIFMNPEKQETEDYISGRFG

SEQ ID NO: 57958 - protein, 384 aa, Enterococcus faecium
MYQLTLPQKIIYGDQAIKETGKIAGNLGLKTLIITDKLIVSLNLLEGVLASLKEENLTWKIFDGVDREPTDQIVAEALAFYQQEDYDSIIAVGGGSCIDTAKAVAVLINNSGSYAEFASGQLIAQNPLPLIAIPTTAGTGSEVTDVTVITDTQKDIKYMMKQAAFLSYAAIVDPQMSRTSPASVTAATGLDALCHALESYISKKAQPITRLFSLSAIKLIMENLPIAYSEPENLIARENLAQAAMEAGIAFSNASVTLIHGMSRPVGALYHIPHGISNAILLEAVIDYTKPVIISELAGIAKYLNPEKEGTDQELAECFFQELQDLIEKLAVPNYASFGIEKAAFIASLDKMANDAIASGSPNNNPLVPTIEEIKMIYLASWQE

SEQ ID NO: 57959 - protein, 115 aa, Enterococcus faecium
MNPLIEELTKEQLRSDIPAFRPGDTVRVHAKVVEGTRERIQLFEGVVIKRRGAGISETYTVRKVSNGVGVERTFPLHTPRVAKIEVVRYGKVRRAKLYYLRALHGKAARIKEIRR

SEQ ID NO: 57960 - protein, 526 aa, Enterococcus faecium
MAKNELTLEELAKQIYKGAGGMGNVESIVHCMTRVRMKIINDDLVNVSELKAIPGVLGVVEDEQLQVIIGPGKVNKVAQQMVDLAGVKLGEKLSSVSTATANSSASGKDRVNERAQEMKAAQKSKQKPSKIKSVLKDISNIFVPMIPAFVGTGIVAGIAAVLANLVTAGTLDAATWQQYIDVMNILKNGMFSYLVIYTGINAAQVFGATPTLGGVIGAVVMLTGMNPEAPLKNLFTGEALAAGQGGILGVIFAVWLLSIVEKKLHKVVPDAVDIIVTPTLSLIAIGLIEIFFIMPLAGFISDGMVGGINWVLGVGGAFAGFVLGTLFLPMVMFGLHQILTPIHVQMIDETGRTLLLPILAMAGAGQVGAALALWIRCKKDKELTEMIKGALPVGILGIGEPLIYGVTLPLGRPFITACIGGGIGGAVIGMIGNVGAIAIGPSGAALIPLISDGKWLGYILGLLAAYAGGFVATFFFGIPKDRLEKEELATETATVNEVPEKVVPQTSAESVTILSSVADGTVVSLA

SEQ ID NO: 57961 - protein, 242 aa, Enterococcus faecium
MIGQTLEDYCKKLRLSHIITNIPRASFEAPEQFITDLFRLELETRQQIKLERMEKLAKFPVPKSLKNYEWHEDIFLPSHLDKETLVSLDFLKRQENIVCVGSPGTGKTHLAIALGRKACSEGVSTKFFRVNNLVEQLENALKKQQLASFKKRFETTELIILDEMGYLPLTKEGAELLFQLISDWYEQKSIIITSNLEFSQWNRVFMDSRLTAALVDRLIHHAHIISFKGESFRLKNSLSKSY

SEQ ID NO: 57962 - protein, 347 aa, Enterococcus faecium
MSLQAQLQSLKEATLVKITAAQDLNELNQIRVETLGKKGPITEVLRGMKDLSPEERPKVGSFANEIRDLLTEEIERKKQVLEEEALNAALAKETIDVTLPGRKVKHGTRHIVTQIMEEIEDIFVGMGYQIVEGYEVESDHYNFERMNLPKDHPARDMQDTFYISDEILIRTHTSPVQARTMEKHDFSKGALRMISPGKVFRRDTDDATHSHQFHQIEGLVVDKNITMGDLKGTLEVVMKKMFGKDREIRLRPSYFPFTEPSVEVDVSCFKCGGAGCNVCKYTGWIEILGAGMVHPNVLKMSGIDPEEYSGFAFGLGPDRVAMLRYGVNDIRNFYQNDLRFLSQFKGE

SEQ ID NO: 57963 - protein, 101 aa, Enterococcus faecium
MTEHNHSHDHEGHEHITLVDDQGNETLYEILLTVDGQEEFGRNYVLLYPAGVSEDEDVELQAYAYIENEDGTEGELEQIETDAEWDMIEEVFNTFMAEEEE

SEQ ID NO: 57964 - protein, 327 aa, Enterococcus faecium
  MISC_FEATURE (236)..(236): X=any amino acid
SMRAISIKHPGSVDVLEQIEVPVPKPKQGELLIKVHTAAVNRTDIMKRESVSLKPPYPILGVEVAGEVVENKSDISTFTPGTKVYGLVNLGGYAEYAVMPADRAILLPDTLDYVSAAGISEVFLTAYQTLYWLGKLQEGETVLIHAGASGVGTAAIQLARQLSHAKIIVTAGSEEKLAFCKELGADELINYKKQDFQEEVRKITEGRGVDVILDFIGASYWEKNLASIAVDGVGSXLGMLGGTIVPEIDLGVLIGKRVQLLGTLLTPRSDQYKAELAQTFMQKAGPFLENGKIRPIIDRTFQFSAVKQAHEYMEANKNIGKIILKIT

SEQ ID NO: 57965 - protein, 483 aa, Enterococcus faecium
MNDATELAKELKEKEFSFQELVTDIQKKIKKQNHELNAFVALEPFESNSHELLIPQSEKGPLAGIPFPLKMLGQEKKGWLATSGSRLFETHRASHTSNYVRQAEAIGLVPFGQTNAPEFGFKNITDPVIYGPARNPWNLECTPGGSSGGAAAAVSSGIVPLAGASDGGGSIRIPASFCGLIGLKPSRGTMPVGPYAWRGWQGAAIDFGLTVSMRDTEALFYGMRSIHSGAPYQVSPVEWQTHPRKKRLKIAFCVDSPIHSQISEEAVLAVKKAVDFLGKEGHDLTEIPYPLDGRKLITSYYQMNGAETAAMIRSIETGIQRAVRKEELEPISWTLFQYGQKLSAATYIDSLHVWDEAAIVMENLHQEYDLFLSPTTAFTAPKISEDLQSDAIRAQMEHISDCSEVEGLDVVSSMFEESLKITPYTQLANLTGQPAISLPTHLTKENMPLGIQFMAARGREDLLFQIGYLFEANHQFHLPNPWK

SEQ ID NO: 57966 - protein, 294 aa, Enterococcus faecium
MKVSQKIILSILLLLTLVVGYFSIEFIHGFSSAKQSSTVKKVEPKSVPTTLNVALIGSDARSKDENGRSDSLLVAQYNQKTQQAKLISIMRDSYVDIPGYGMNKINAAYSYGGVDLLNQTLKENFKFEAPYYASITFQDFIDCVNELFPGGVKIDAEKSLDLDGVYINKGEQVMDGNTLLQYARFREDKEGDFGRIRRQQQVIKAISQQLKDVTSIFKLPKAVGKLLGSIQTNLPESVLLDCGMDFLKDNNKKIDTLSVPVDGSWDFNDNTPSGSVLELDLTKNQEAIKKFLNN

SEQ ID NO: 57967 - protein, 377 aa, Enterococcus faecium
MDIMFLAFSLSSMITSFHISGTQAGFISTITNLGMLIGGIFFGIIADKYGRVKVFSQTVLLFSIASLLMYFASNIYLVYLFRFIAGVGAGGEYGACMSLISESFSKKQIGRASSVAGIGAQVGAALAAILAAVIIPTFGWKMLYVVGVLPVLMVLFIRRGLTEPKEFKSVQSAEKKTKLSRLFESKHLAWQTCGLSIMVTVQIAGYFGLMNWLPSIMQNRLGLSVSGSSLWMVSTILGMSLGMMTFGIIMDKLGPKLAFSLFLICSSLSVYLLVLAHSQWSLVAAAVIVGYFINGMYGGYGAVISSLYPTEIRATANNFIMNLGRAVGGFSSIVIGFLMDHYSLTAVILFLSGIYLVSLLVLTTLTGVTALRESLQH

SEQ ID NO: 57968 - protein, 419 aa, Enterococcus faecium
MKKRSVKQLGLGLISLGILGGLAACGNGNSSAEGEADEGKTLTVSVDSGYKDYINEIKNTFEKENDVKIKLVEKDMFDQLESLALDGPAGKGPDVMMAAYDRIGALGQQGHLAEVKLGNEAAYDETDKAQVTYDGKIYGEPAVIETLVLYYNKDLVDTAPSTFKDLENLSKDSRFAFESEAGKNTGFLAKWTDFYYSYGLIAGYGGYVFGDDGTNPSDIGLNNAGAVEGISYATDWFKNVWPKGMQDIKSAGDFASQQFMSNKTAAIIDGPWQAQTYKENNINYGVAKIPTLNNGQPYQPFGGGKGWVVSNYAKNKDLSQKWLDYVTNQENQEKFFEMVNEIPANQQARETAKAKNDELTTAVIEQYETAQAMPNIPEMGEVWTGAENLMFDAASGSKTPKESADEAVKTISEAIEQKY

SEQ ID NO: 57969 - protein, 367 aa, Enterococcus faecium
EELQCIGCGAVIQTNKPGELGYTPQTALEKGLASGEVYCQRCFRLRHYNEIQDVSLTDDDFLRLLNELGQKDALIVNVVDIFDFNGSLIPGLHRFVGDNPVLLVGNKVDILPKSLKKTKLTQWMKERAYEAGIRPVDVLLTSAKKSHEMTELLEKIEEYRDGRDVYIVGVTNVGKSTLINQIIKNTAGVQDVITTSQFPGTTLDKIEIPLMDGHFLIDTPGIIHRHQMAHYLGKKDLRIIAPLKEIKPKVYQLNEGQTLFLGGLARFDFISGNRASFIAYVSNDVNIHRTKLEKADEFYQKHVGGLLQPPRPDEVEAFPELVRFEFSVKEKTDIVFAGLGWITVTAPVVIAGWAPKGVDVLKRKALI

SEQ ID NO: 57970 - protein, 71 aa, Enterococcus faecium
MNYIAAAIAIMGAAIGAGYGNGQVISKTIESMARQPEMSGQFRTTMFIGVALVEAVPILGVVVALILVFGV

SEQ ID NO: 57971 - protein, 881 aa, Enterococcus faecium
MPQKTKNTPMMEQYLSIKAQYQDAFLFYRLGDFYELFYEDAIKASQLLELTLTSRNRNAEEPIPMCGVPHHAAQGYIDALIEKGYKVAICEQVEDPKTTKGMVKREVIQLVTPGTVMDSKGLSAKDNNFLTAVVSQGNEFGFAYADLSTGELKTARLHDEEAVLNEASALQTKELVLGSEITDTLREQLSGRLGLVFSQQNEMEENAEFSFLTSELVDPLEKEATGKLLTYLSVTQKRSLAHIQKAVEYQPDHFLKMDYYSKFNLELSQSIRTGKKHGTLLWLLDETKTAMGGRLLKQWLDRPLIQAKQIKARQEMVASLLDSYFERIDLQSALTKVYDLERLAGRVAFGNVNGRDLIQLKTSLEQVPMIRGLIEGIDQGQWQSLLSEMQPMDHLVQLIDQAIQDDPPLQITEGNIIKDGFNEQLDMYRSAMRNGKKWLAELEAKERQETGIKNLKIGFNRVFGYYIEITKANLGNAELEKYERKQTLANAERFITPELKELETQILEAEEKSVDLEYQLFLAVREEVKKAIQPLQVLAKAISAVDVLQSFATISERYQYVRPELVSDKHQLLIKDGRHPVVEKVLGHQEYIPNSVEMAEDEMILLITGPNMSGKSTYMRQLALTVLMAQMGCFVPAKQAVLPIFDRIFTRIGASDDLIAGQSTFMVEMMEANQALRYATPNSLILFDELGRGTATYDGMALAQAIIEYIHRHVQAKTLFSTHYHELTVLEKELPQLKNVHVGAVEKDGEVVFLHKMMDGPADKSYGIHVAKIAGLPSNLLERAADILHTLENGDNGHHTVPAEVEEKTKTAKQEQIKPPAEKVNQDHIQDRVKEENQQLSLFSELSENETEVIESLKQINLLEMTPMDALNTLYELQKQL

SEQ ID NO: 57972 - protein, 389 aa, Enterococcus faecium
MAFESLTERLQQAMGKIRKKGKVSEADVKEMMREIRLALLEADVNLQVVKDFTKRVRERAVGAEVLESLSPAQQIVKIVDEELTITLGSETAELNKSPKIPTVIMMAGLQGAGKTTFTGKLANYLKKNENARPLLIAGDVYRPAAIDQLKVLGQQLDVPVFDMGTEVSPVEIVRQGMELAKEKKNDYVLIDTAGRLHIDETLMDELKQIKELTQPNEILLVVDAMTGQDAVNVADSFNQQLGITGVVITKLDGDTRGGAALSIRSVTGAPIKFIGSGEKLTDLEVFHPDRMASRILGMGDMLTLIEKAQQDYDEKKAEELAQKMRENSFDFNDFIEQLDQVMGMGPLEDLIKMIPGMNQVPGIENVKVDPKDVERKKAMVYSMTPAERA

SEQ ID NO: 57973 - protein, 254 aa, Enterococcus faecium
MIDLHCHILPGIDDGAENLEASIAMAEKAIQQGITHILCTPHHNNGKYSNEKSQVISLVASLQAELEKRQLPLTLLEGQEVRITGTLIEDTHRDKILFTDLDDTYLLIEFPTLEVPLYTERLFFELLELGKTPVIVHPERNAHFRKDPNHLLPFLDMGCLAQLTAPSYVGVFGKDIQKTAKTMVKHNLVQMAASDAHGVSKRTFYLKECYEQIAKDFGKEKVVQMKQVAKDLINGDEISYPIYEEVKKKKFGLF

SEQ ID NO: 57974 - protein, 189 aa, Enterococcus faecium
MTSLIEKQIVNKEIRVTDPLFEVIHQIQAENEEPLAALNTGYHEPADIRKRLENIISDKVDDTVTVLLPFYTDFGKHISIGKNVFINRQVMFVDLGGICLEDSVLIGPRVNLITVNHLTDPKERRGLSVKPIHIKKNAWIGAGATILPGVTIGENAIVAANATVTKDVPDNTIVAGIPAKIVKPVERII

SEQ ID NO: 57975 - protein, 341 aa, Enterococcus faecium
MKKVAIIGAGQVAEKVHAAYYQKRSDVLELAAVVDPVSQRAEDFCRRTGFSHAYTSVTQMLNEISPDIVSVCTPNRFHFEHVLAALEANASVMCEKPPAMTADQARKMAETADKNGQILAYGFQHRFSDEATMIKNHLDVLGDIYYVEANALRRSGVPGWGTFIDKELQGGGPLIDYGIHMLDTAMYITGFPKVKSVRAYSFQKIGTKKNSGKFGKWDPSKFTVEDAIFGTLELENGKIIQLNTSFALNIREDKLNVAFCGDQAGANLYPGELFEDVDGKLVSLQKTTPVNDPHELSMAHFVNRALGDQTQMIADGWQGYVIQNLVENLYRSAETGEVITL

SEQ ID NO: 57976 - protein, 250 aa, Enterococcus faecium
MEYTIKKMSEISGVSPRTLRFYDEIGLLKPARINSSGYRIYGKKEVDRLQHILFYRTMAFKLDDIQEVLDNPSFDHQKALIKHQQMLLEKRAQIDTLLTTVQQTLDMYEGGRKMSDKEKFEGFKQQKLKENEESYGQEIRQKYGKKKVTASNEKWMNMDKETYEEMQTVEKQMLFDLTLYLKEPEDESLADRIFQAHKKWFSYSWPEYQPKAHKGLGMMYEADERFTAYYDERSGHGAAKALNEIIQKKA

SEQ ID NO: 57977 - protein, 451 aa, Enterococcus faecium
MELKEDLGVKSKSTELKRKLGLGTVIALGVGTTVGSGIFSSLSEVAGAAGSSLILVLSFLIGGLVQIPANLCYAELASAYPEDGGGYIYFREAGSKPLAFLGGWISFWATDPPSISIMALAIANYLGFFIPISGLSLKLVSVLFVLVFMYLHIRTVEGGGTFQNIITVLKILPFILIIGIGLFNLNGELLLSSTPLQGASTGFMALIAGISATTWSFDGMSAPVYMSGEIKNPKKNIPKGLIFTTFIVLAIYVGLTFVASGILSVDELASSDAPIALLASKIPVIGSFAGTFVAVTAVIVIIGSLSSCIMFQPRIEYAMAKDGLFFKSFGKVHPKYETPYFSIMIQCFYAIVLIFATDISGLLGYFTLVALLKSFLTFGTIFILRRKKSGYDPSYKTPFGYLMPVVAMFMNGTLIYSTFLWAPVGGLIAAVVAVATGLPAFYFWNKRNSVG

SEQ ID NO: 57978 - protein, 554 aa, Enterococcus faecium
MDEKMKQGSKSVVESLINHHVDYVFGIPGAKIDGVFNELEDQGPELIVTRHEQNAAFMAQAIGRITGEPGVVIATSGPGASNLATGLVTATAEGDPVLAIAGQVKRSDLLKLTHQSMDNAALFQPITKYSAEIQDPETISEVIANAYRMAKSSKKGASFISIPQDVVDAPVQGNVIKPLSDPKLGSASADDIRYLAERIREAKLPVLLVGMRGSSEKETLAIRQLVGKTALPVVETFQAAGVISRELEAHFFGRVGLFRNQPGDMLLKRSDLVIAIGYDPIEYEARNWNAEKDARIIVIDEAPAEIDPFMQPERELIGDISATLDLLTGSLEPQQVSEDAKEYLASLQAELTERDIVQSKGEAGILHPLEVINTLQSKVTDDMTVTVDVGSHYIWMARHFRSYEPRHLLFSNGMQTLGVALPWAISAALVRPNTQIVSVSGDGGFLFSAQDLETAVRKKLNIVHLIWNDGHYNMVEFQEKMKYQRASGVDFGPVDFVKYAEAFGAKGIRATSVEELEKALEEGFATEGPVIIDIPIDYRDNEKLGETILPDQFY

SEQ ID NO: 57979 - protein, 362 aa, Enterococcus faecium
MKNKFRKIVGTIAILTASILLSACGNSGSADDSTGYVGIAMPTKSAERWIADGNNMVSELEKLGYKTDLQYGEDKVENQVAQIENMITKGVDTLVIASIDGSALTDVLAKAKEADIKVIAYDRLLMNSENVDYYATFDNFGVGVSQAAYIEEHLGLKEGKGPFTIELFGGSPDDNNALINYNGVMSVLQPYMDNGQLVVPSGQTSFSQIATLRWDGSTAQARMDNLLSANYTDQTLDAVLSPYDPISLGIISSLKGVGYGSESKPLPVITGQDATVAGVKSIIAGEQTQTIFKDTRILAKNTIEMIKAISDGEEVPVNDTETYDNGVKTVPTYLANTVSVDKDNYQAELIDTDYYKESDLKN

SEQ ID NO: 57980 - protein, 638 aa, Enterococcus faecium
WQKKSPDYNDSSIQVMEGLEAVRKRPGMYIGSTDSRGLHHLVYEIVDNAVDEALSGYGSEIDVTIHEDNSITVADSGRGMPVGMHASGIPTVEVIFTVLHAGGKFGQGGYKTSGGLHGVGASVVNALSKWLIVTIVRDGVEYQQKFKNGGKPDGTLKKIGKTKKANGTTVHFLPDDTIFSTTKFSYEILAERLRESAFLLKGVKISLSDLRGEEPVKEIFHYEEGIKEFVDYLNEEKDTLTPVVYFSGEKEGIEVEVAYQYNDGYSENVLSFVNNVRTKDGGTHEAGMKAAMTKSYNEYARKVGLLKERDKNLEGSDFREGLAAVLSIRVPENLLQFEGQTKEKLGTPVARTVVDNVISEQMGFYLQENSEMSQMLVRKAIKAREAREAARKAREESRNGKKRKKGESLLSGKLTPAQSRNPKKNELYLVEGDSAGGSAKQGRDRKFQAILPLRGKVINTEKAKMQDILKNEEINTMIYTIGAGVGPEFSIEDCNYDKVIIMTDADTDGAHIQVLLLTFFYRYMKPLIEAGKVYIALPPLYKVSKGQGKKQVIEYAWTDDELAAMIKKVGKGYMLQRYKGLGEMNAEQLWETTMDPTSRTLIRVRIDDAAQAERRVTTLMGDKVEPRRKWIENHVQFT

SEQ ID NO: 57981 - protein, 740 aa, Enterococcus faecium
MKTLKEPTAEEIKKKRIYAEWGLTDEEYRMIEEDILGRMPNYTETGLFSVMWSEHCSYKNSKPVLRKFPTSGPHVLQGPGEGAGIVDIGDGLAVVFKAESHNHPSAVEPYEGAATGVGGIIRDIFSMGARPIALLDSLRFGELDNPRTKYLLEEVVAGIGGYGNCIGIPTVGGEIAFDPCYEGNPLVNAMCVGLIEHKHIQKGQAAGVGNSIMYVGAKTGRDGIHGATFASEEFNQEEEQQRSAVQVGDPFMEKLLLEACLELILHHSDSLIGIQDMGAAGLVSSSAEMASKAGSGLILTLDEVPQRETGMTPYEMMLSESQERMLICVKSGEEEKIQELFQKYDLDAVTIGKVTDDGQYRLYHQGEEVANLPVDALAEDAPVYHKEMKEPARIVEFQQLAPYQPVIEEPGQVLLDLLQQPTIASKRSIYETYDSQVQTNTVVRPGSDAAVMRVRGTNKALAMTTDCNARYLYLDPKIGGQIAVAEAARNIIASGGKPLAITDCLNYGSPDKPEVFWELSTSADGIAAACETLGTPVISGNVSLYNETDGQAIYPTPMIGMVGLIEDHKHITTQEFKKSGDLIYILGKTFADFDGSELQKMQLGRIEGVIRNFDLSIEKRNQELVLTAIQNGLIESAHDCSEGGLAIALAESAFKHQLGISVQFELSSAQLFAETQSRFVLTVAPENKTRFEEMMGDAAVLAGKVTDEAIIEISATDGQIKIETAVARKCWEDAIVCLMK

SEQ ID NO: 57982 - protein, 316 aa, Enterococcus faecium
MRYGRLVALLVILSSISLFIGVSNVQLSELLQLDGQSLQILLVTRLPRTICLILVGATSSICGLIMQHLTQNKFVSPTTAGTMDSARLGILVAMIFLPGASLIVRSLTAFSFAFAGTLLLLSLTRLFLQKNQLMLPLIWVMLGNIIGSVATFICLQFQLVQNMTSWLQGNFATVIRGNYELFVCVVPLLLLVWLFAYRFTIIGLGESFAVNLGIDYQKMQFLGIGLVSLASAVMLIMVGSIPFIGVIIPNLVSRIYGDQVHKTIGVTALAGSLFLVFCDLVARVLIFPYEIPVSVIVGIIGGAIFLYLLIRGRRYA

SEQ ID NO: 57983 - protein, 267 aa, Enterococcus faecium
MEFSMDMFRLDGKVALVTGAVYGIGFEIARSLATAGAKIVFNNLNQESVDEGIAHYKEAGIDAKGYVCDVTDEEAVQAMVQQIKEDVGSVDILVNNAGIIKRTPMIEMDAADFRQVIDVDLNAPFIVSKAVIPDMIEKGGGKIINICSMMSELGRETVSAYAAAKGGLKMLTKNIASEYGQYNIQCNGIGPGYIATPQTAPLRETQENGERHPFDQFIVGRTPAARWGEPIDLAGPSVFLASSASDFVNGHVLYVDGGILAYIGKQP

SEQ ID NO: 57984 - protein, 180 aa, Enterococcus faecium
MKLDKYTVGRRYGKALFELAIDSNQAEEIYQDLVSLRQIYEQVPGLGNMLSDVRLEPHEKREIMDKLVSGYDGIVKNFLEVVYAYNRMDDLLFMIEEYERRYDEHQGLLLGSVTTAVPLSDEQRIQLEKNVAKTMNYQSVELKQIVDSSIIGGAIVEANHRVIDGSIRTQLENMRNQLNR

SEQ ID NO: 57985 - protein, 717 aa, Enterococcus faecium
MMKDFMKKILNTSWLEKIRKGAQEPKNKTFRRSHVPFRLNFLFFIIFTLFVALIARLGYLQIVNGEEMEARVKSTSTITVQESTPRGMIYDSTGKALVTNKANQAITYTRGTQVTAKDLLEIATKLNSLIDVPVDENLTDRDKKDFWLADPKHLKEATKRLSAKEKQLGNSEQYSAMVNKVTADEINLNEEQLKIATIFKRMNSAYELNTVYIKNSGVTDQELAVVAERASELPGVSTGTDWTREYNAASSLKSILGSVTTEKQGLPADEAEKYLAKGYSRNDRVGQSYLEKQYEDVLQGTKTQYEVSLDNEGNVSNQKEIFSGEKGSNLMLSMNAEFQSKVEEILKRNYQTLINNGKAQYSPGAYAVAMNPQTGEVLAMTGFSHEQGSKEITENALGTITSAFAPGSVVKAGTLTAGWASNAISGNQVLIDEPIRLQGASEKSSVFNRSGQVALDAVKALELSSNTYMIKVALKMLGLDYTPGMGLPSLDEEAKAYQQLRDSFKEFGLGTTTGIDLPNESPGISRSVDYMKKFNADNGKEWYTPGNFTDLAFGQFDTYTPIQLAQYASTVANGGKRVQPHLVKAIYGNDENGNLGEVKKEIGTTVENTVNISAENMAILREGFHQVVHGTDPYTTAKPLASAKMDLSAKTGTAETVAEGHPDITTVNSNIVAYGPTDNPEIAISVVLPNLLDEQDHMNLTIAKEIMDAYYDMFMAK

SEQ ID NO: 57986 - protein, 191 aa, Enterococcus faecium
MKLTVFCGSRFGNKESYKFIAQTLGKYMAQEEIELVYGGSYSGIMGVISKTVLENNGKVTGIYPNGLFETELPGKDVTTFIPTETIDERKVLLFEKGDAVLVFPGGLGTLEEFSQLLSWIAIGLTPDKPIGILNIGGYYSGLQQLLETFAKEDFMDKKWLDQVIFSNNPLELVNELRAVSIKNQLLLKEAK

SEQ ID NO: 57987 - protein, 519 aa, Enterococcus faecium
RMYKRQLLELIRVNLLYVNPQLTNKAREKGKKGKRLTIYLLSQNLFSGLIFLLIYGFAMFAMNFVKLPGFFTYYVALFGMLGLTQSISVIYNIFFEGNDLQVFLPLPFDQEQVFSAKILVVALTIIPFVFPLLVMFILTGWRADLGILLTIIISILLFSLFLIILFCLASLIVFGLARTAVFKKHRKTVSSILLGSSMLIAFAGIMWMNHQTGTIENELTDRHPISILLPFYDAASQPLSQQGLLGWGILAITALGFFLAVKQLIVPKLTEQLTDSNSEFKIKRTHKKNQNVHQLLFSYNAQLVKEPNLIMQVLSSSLLTPIIFILAFALGGEIKLTDLDNKLIGVVFLVGIALAFLTVNQTSFISNLISLDQENFLFIRSLPISMNQYLKEKFRFGWILQSFLTGGIALLSGLSFQLPLFFIPSLLFGSLFGCYLLSLRYFARDYRLLLLNWTNINQLFNRGSGSLGLVATMMGSLIISIILIVLYGMLALFYPFWLVNIPVIGLVLILSALWIVYYQ

SEQ ID NO: 57988 - protein, 191 aa, Enterococcus faecium
MLSFIFSSTVLGELSDFYGYFSMWDTFLHAFSGFLAGGVGFSLVYLLNKNTKTMNLTPLLLAVVSFCFSMTVGVMWEFVEFSADKLLQFDMQKDTIIQQINSVELSKDGNTVYHVPDITRTIIESQNADGKTDKTIIQNGYLDVGIMDTMKDLFVNFIGAVVFSVFGYLYSRNDYQKFTFIKNFIPKKIKR

SEQ ID NO: 57989 - protein, 209 aa, Enterococcus faecium
MNVEQSIAKDLLEIEAVFLNPSNPFTWASGIKSPIYCDNRITMSYPKVRKEIAKGLASKIKEAYPEVQVIAGTATAGIPHAAWVAEILDLPMVYIRSKAKDHGKGNQIEGRIFEGQKMVVIEDLISTGGSVLEAAEAAKREGADILGVAAIFTYELPKGKANFEKAEIPLMTLTNYSVLIEAALEDRYIDEQELTLLKEWKKDPENWQI

SEQ ID NO: 57990 - protein, 297 aa, Enterococcus faecium
QLTASTADSPEQQPLDITESGTVEGLLAETKVTYTITPAEGEQIASVAVNGAKEVNYDAKTFTVGTNNLSITAEFKAGPDTSTEKPTDPSEEVPSTPDPETPNKPDVGNNNNNNGSNNSNNNNNNSNSGNSSNQTNPSGSNNNGNTQREPNHPNNGSSNGGTNNASSRPNTANQSGIENPSSASSDFVVKSPIDAVLPTNTTNVQQAIVREAFKHLGKPYVWGAKGPNTFDCSGLTYYVYMKATGHYIGGWTGEQQYAGTQIPVSQAQPGDLVFWGPSSGVTHHVGIYIGNGQFIHA

SEQ ID NO: 57991 - protein, 397 aa, Enterococcus faecium
LSIKNNETGVFAIGGLGEIGKNTYGVQFQDEIILIDAGIKFPEDDLLGIDYVIPDYSYIIQNLHKVKALVITHGHEDHIGGIPYLLKQANIPIYAGPLALALITNKLDEHGLLRDAELHEINEDTIIRFRKTSVSFFRTTHSIPDALGIVVKTPSGNIVATGDFKFDFTPVGEPANLHKMARIGEEGVLCLLSDSTNAEIPTFTKSEKTIGHSILKIFSKIEGRIIFASFASNIFRLQQAADAAVATGRKIAVFGRSMENAIVNGQRLGYIKVPDGTFVDAHEINRLPANETMILCTGSQGEAMAALSRIANGTHRQIQIQPDDTVIFSSSPIPGNTTSVNHLINLLSEAGAEVIHGKINNIHTSGHGGQEEQKLMLRLMKPKYFIPVHGEYRMLKV

SEQ ID NO: 57992 - protein, 255 aa, Enterococcus faecium
MAQIISVANQKGGVGKTTTTVNLGACLASLGKKVLLVDMDAQGNATSGVGIRKPDVTRDIYDVLVNELPIDEATLITEHENLSIVPATLQLAGAEIELTSMMARESRLKGSLAEVSSQYDYILIDCPPSLGHLTINSFTASDSILIPVQCEYYALEGLSQLLNTVRLVQKHFNPELEIEGVLLTMYDARTNLGNEVVEEVRKYFREKVYETIIPRNIRLSEAPSHGKPIIDYDPRSRGAEVYQALAKEVVSREEK

SEQ ID NO: 57993 - protein, 145 aa, Enterococcus faecium
MQSLPFDMIELNRSFKTKEEAIRYCGQMLVEAGCVDEEYIDAMVDRDKMLSVYMGNFIAIPHGTDEAKKYVKKSGICVVQVPDGVDFGTEEEEKIATVLFGIAGVGDEHLQLVQQIALYCSDMDNVVQLADALSKEEVTENLAIA

SEQ ID NO: 57994 - protein, 250 aa, Enterococcus faecium
MPFGFSGVLDGAALVFFAFLGFDAVAMAAEEVKNPQKDVPRGIIGSILIATVLYIIVTLILTGIVPYTELGVNDPVAFAMRYVGHGTVGAVIAVGAILTLLTVTISMMYSLARLLFAVSKDGLLPKFMTEIDQKHRTPKKATYAAGVAAVFFAGFFPLNVLAELTNIMALAYLMLVSLGLLKLRKMFGKPKAGEFKVPFVPLLPIVSILTCIVLMLRLQTVTWIVFGIVMVIGLIIYFGYGYGHSKMNEK

SEQ ID NO: 57995 - protein, 89 aa, Enterococcus faecium
MAISKERKNEIINEYARHEGDTGSPEVQIAVLTEEINHLNEHARVHKKDHHSYRGLMKKVGHRRNLLAYLRKTDVQRYRELIKRLGLRR

SEQ ID NO: 57996 - protein, 315 aa, Enterococcus faecium
MAEIRIGHSQVYAEQLGLGANAVGGHNLFDGLEDETGKQVVRTALNSGINLIDTAYAYGNGRSEELIGEVLKEKEYDRSRVVIATKAAHVPNKGRTFDNSPEFLKQSVEDALKRLQTDYIDIFYIHFPDESTPKNESVATLHELKEAGKIRAVGVSNFTLEQLKEANADGYVDVVEDKYSLIHRQAEKELFPYLEKNKISFVPYFPLASGLLTGKYELGEEKQFGEGDPRKRNPDFQGERFREILTAVDVLRPIAKRYQATPAQLVLAWYMKNPRVSVVIPGAKRPEQVSDNVQALDLHLSNEDYQTIDEAFRGF

SEQ ID NO: 57997 - protein, 432 aa, Enterococcus faecium
MEQIQIIDSKNHVGETVTIGAWVANKRSSGKIAFLQLRDGTAFFQGVVVKSEVSEEVFQTAKNLHQETSVLVTGEIREDSRSKFGYEIGITNVEVVSESHDYPITPKEHGTDFLMDHRHLWLRSSRQHAIMQIRNEIIRATYEFFNQHHFVKIDPPILTGSAPEGTTDLFETNYFDQKAYLSQSGQLYMEAAAMAFGKVFSFGPTFRAEKSKTRRHLIEFWMIEPEMAFTHQEESLEVQEQYVAFLVQNVLDHCEYALDVLGRDKEVLKTYTKLPFPRITYDDAIELLKKNGFDDIEWGEDFGSPHETFIANSFEQPVFILNYPKAIKPFYMKPHPTREDVVICADMIAPEGYGEIIGGSERATDYDFLLEQIRNHGLDEKEYSWYLDLRKYGSVPHSGFGLGLERTVTWIAGIDHVREAIPFPRLLNRIYP

SEQ ID NO: 57998 - protein, 346 aa, Enterococcus faecium
MNNPKFSIIVPVYNAEATIGRTIDILKELDYEEYEVVLVNDGSTDQTQEIIQELIENDERFELITTTNQGPGLARNEGIRQSKGEYLLFFDADDTPVKTILSDYDHLLEKSPKADLVVSSFVFRTMDEGRIVSEKENLVTECHYLTHEEFIKDMYQLMNEQLMYVVWNKCYRSDILKNNQILFKTYNSCEDRIFNLHYYEYCHQVIMNPKVEYIYEFEGGKGITNQYRPNKFETFKEFYSLANTVTDDINKDGMAALLLKGTTSVIFSIYSTSARTSKEKKDEAKQILSDPVIREAKQIAKTDSSAKKITKLLYNMPAPLFLSAVKVGSFVEVKMPGLMAALKRVY

SEQ ID NO: 57999 - protein, 38 aa, Enterococcus faecium; identical to SEQ ID NO: 42402

SEQ ID NO: 58000 - protein, 67 aa, Enterococcus faecium
MADLKGRSKDMKDKVVGEGKEAYGKATDDKSKETEGKAQSLGADIKEKARNLGDEVKDKFSRKDEKK

SEQ ID NO: 58001 - protein, 244 aa, Enterococcus faecium
MNTEELTNKLIQDIEQEKYKYAQAIPSERDFVQIYEMNRSAVKKAIQQLVNKEYLLKIHGKGTFVKKNIHEHLQIKFHGLSELLEREGIQPSSLILASEIKPAGHIVGKALQLEPTEEVFHLVRLRSGDGEPISIEDTYIPLNLIPDLQAFDFQIFSFYSTLAAYHYQIENIYQTISSSKVRNKEARLLKTSLNRPVISLAITAVTTNEQAVEYTEVVVLPEFAAIYTKNVHQGKEMKIYAQID

SEQ ID NO: 58002 - protein, 345 aa, Enterococcus faecium
MSEKELMKVVGFYEGLPIDDPKSFIDEKEQIPVPSSRDLLVKVNAVSVNPVDTKLRQDNGIRNALRILGFDGVGKVVAVGDEVQKFSVGDRVFYAGTTTRAGSNQEYQLVDERIVALAPKNLSDEEAAALPLTSLTAYELLFEKFGLTPEENANRGKKILVINGSGGVGSILNQLAHWAGLEVYATASPKNFEWLKKTGVDYPIDYHHDLSKSFRELGIDQVEYVAVLFDITRYFDQIKHLVRPFGHVGTIVGIKEPLDIGVWKNQSISFDWEYMFAKTDYNYEIETQGEALAHIAALANEGIIRSTLSKVYSDGMNAKNLKQATKDVETGHMLGKVVVSGPFNG

SEQ ID NO: 58003 - protein, 286 aa, Enterococcus faecium
MTIQWFPGHMAKARREVSEKMKYVDIVFELVDARLPLSSRNPMLDQIIQQKPRLVLLNKADLADPQQTKLWQEYFRKQGHLALAITAQESKGIKGLVPAAKEALKEKRARDAARGIKPRAIRAMVLGIPNVGKSTLMNRLVGKKIAQTGNKPGVTKGQQWLRLGNELELLDTPGILWPKFEDEEIGKKLALTGAIKDQLVHLDDLAIYGLDFFARYYSGRISDRYGLSIEQEEKLAPELLMDITAKRGYKEDYDRGSELVVHDIRQGKLGRYTLDRCEEMEQKSDD

SEQ ID NO: 58004 - protein, 248 aa, Enterococcus faecium
MVRYKAIIAYDGTNFNGFQKQPNGRTVQEEVEKTLQKMANGKEITVFGSGRTDAGVHAIGQVIHFDYPEERPLERMRFALDTQSPEDIAVRQVEIVSEDFHARYLVKEKTYQFRVDIGKPRSPFRRHYASYFPYPLDLEKIQRALPDLLGTHDFTSFCASGSSIEDKIRTIYEAKMEVNETKDELLFTFRGNGFLYKMIRILVGTLLKIGNGRLPEDSIPDIIAKKDRNAAGPTAHPEGLYLYEVKYE

SEQ ID NO: 58005 - protein, 726 aa, Enterococcus faecium
MTENLNQTIIQLVQKELSDYRPKQLTTVLNLLNEGNTVPFIARYRKEMTGSLDEVQIREIEERYAYLENLEKRKTEVIRLIDEQGKLTPELEAEITQAVKMQQVEDLYRPYKQKRRTKATIAKEKGLEPLAKWLMQLTDGEVQSEAEKYIDKEKEVSSAEEALHGAHEIIAEQVSDNAKFRTWIRSYTYNKGMYVSNVKDEQADEKGVYEMYYDFAEPVHKMVSHRILATNRGEKEDILKVFFQVDEAAILAYLDRQIVKNPASPSSSFVREAYQDSYKRFIQPAIERELRNELTEKADEQAIAIFGENLRNLLLQPPLKGKVVLGFDPAYRTGCKLAVVDATGKVLAIEVIYPHKPAAQAKREAAGPAFIQLINKYQVDMVAIGNGTASRESELFVAEQLKSADHKTYYAIVNEAGASVYSASEIARKEFPHLQVEERSAVSIARRLQDPLAELVKIDPKAVGVGQYQHDVSQKRLAEQLDFVVETAVNQVGVDVNTASPQLLQHISGLNKTTAQNIVIYREENGEFTARTQLKKVPRLGPKAYEQAIGFLRVPGGKNILDNTGIHPESYSIAKEILTSVQLSEKELGTEEAVEKLTRLSVEKLAESLSVGEETLADILAGLTQPGRDMRDEMPAPLLRTDVLSMEDLKPGMELTGTVRNVIDFGAFVDIGVKQDGLVHISKLSKKFVKHPTDVVSVGDIVTVWIEQVDTKKGRISLTMLSPYEE

SEQ ID NO: 58006 - protein, 396 aa, Enterococcus faecium
MSSKELTMYLEKELDQLKEKGLYNTIDILESENGACIIVDGKKMINLASNNYLGFANREELKKACIEATETYGVGAGAVRTINGSLKIHQQLEEKIAEFKGTEAAIAFQSGFNCNMGAISAVMTKEDAILSDELNHASIIDGCRLSGAKIIRIKHQDMKDLEKKAKEAIESKKYKKIMYITDGVFSMDGDIARLPEIIPIVEKYGLITYVDDAHGSGVTGKGAGTVKHFGLSDKIDMQMGTLSKAIGVVGGYVAGSKTLIDWLKARSRPFLFSTSLTPGAAAAALASITLMQEHPELVEKVWENANYFKEELKKVGYNIGMSETPITPVILGDEKVTQTFSKKLIEHGIYAKPIVYPTVPLGTGRIRNMPTAEHTREMLDEAVAVYQKIGKEMEII

SEQ ID NO: 58007 - protein, 376 aa, Enterococcus faecium
MKVTLNRASFMQELQTVQRAISSKTTIPILTGVKITLTQEGLTLTGSNADISIETFLSVENEKANMQIESTGSIVLQARFFSEIIRRLPEETFTLEVLENKQVAITSGKANFIVNGLDADNYPHLPVVESHNQMKLPVHVLTKLINETVFAVSQHESRPILTGVHFILSDNSLLAVATDSHRLSQRVIPVEQAADHFDIVIPGKSLIELSRSLTNEEEIVEISIMENQVLFKTETMYFYSRLLEGNYPDTNRLIPSSFNTEVEFSVPSFLAAIERASLLSHEGRNNIVRLSIRPDAVVLYGNSPEIGKVEESLSYTASSGDPLDISFNPDYMKAALRAFGDMSIKVKFISAIRPFTLEPTEDGVQFIQLITPVRTN

SEQ ID NO: 58008 - protein, 238 aa, Enterococcus faecium
MNSDMTQIMGEFIGTLILVLLGDGVCAAVNLNKSKAQASGWIVIAFGWGLAVTMAVYISGFMGPAHLNPAVSLAMAMTGAISWNLVVPFIIAQVLGAFAGAILVWLSYLPHWNATKDESAILGTFATGPAIRNYPANVITELIGTFVLVLGLLAFGQNEFAPGTNVFAVGGLILAIGLSLGGPTGYAINPARDFGPRLAHAVLPIANKGTSDWAYSWVPIAGPMIGAIIAVGVYSLMV

SEQ ID NO: 58009 - protein, 251 aa, Enterococcus faecium
MTESIQSIKERLKSIQRIDDPTLESLRNDPRKGVQQALASFERRLKKEALIKEKYEEMFCFEKQGYAQGHQWIAGIDEVGRGPLAGPVVAAAVILPKNEIILGLNDSKQLSEKKRELLYQQVQEKALAIGIGIVDQQTIDDVNIYEASKLAMIQAVEKLSIVPSYLLIDAMTLDLPIQQEKIIKGDARSVSIAAASIIAKVYRDQLMKEYDVLYPGYGFSHNAGYGTKEHLEGLERQGITPIHRKSFAPVK

SEQ ID NO: 58010 - protein, 346 aa, Enterococcus faecium; identical to SEQ ID NO: 57670

SEQ ID NO: 58011 - protein, 226 aa, Enterococcus faecium
MTDFFKTYLPNVYLIPDEFVEATKQTLYMSFWTAFIGGMIGIILGVTLVVTRPNGLLANRLLFEILDKLINIIRSIPFIILLSLLALTTRFLVGTTIGAKAALVPLIFGVVPFFARQIENALLEVDPGVIEAAEAMGTSPIGIILRVYLLEGLPGIIRVSALTIINVIGLTTMAGAVGAGGLGNLAISRGYNRFQTDVTIVATLLILILVFLSQFISNQLIKKITH

SEQ ID NO: 58012 - protein, 92 aa, Enterococcus faecium
MGRSLKKGPFVDEHLMKKVEAQAGVEKKKVIKTWSRRSTVFPSFVGYTIAVYDGRKHVPVYIQEDMVGHKLGEFAPTRTYRGHAADDKKTKR

SEQ ID NO: 58013 - protein, 354 aa, Enterococcus faecium
MNRKDEHVSLAKAFHDKQKNEFDFVRIIHNPLPQIAVSDVDLSTQAVGFTLSSPFYINAMTGGSEKTKKINQDLAIVAREADLMIATGSVSAALKVPSLADTYTIMRQEYPHGKIIANIGAGTSVERAKEAIRLFHADALQIHLNAPQELVMPEGDRDFTNWKVLIQETQTAIDVPLIVKEVGFGMTRETLNDLAALGVHTVDISGRSGTSFTQIENARRSKRELSYLADWGQSTVSSLLEANEADTSMEILASGGIRNAYDIFKALCLGANAVGTSGTVLTHLMNHGVEETIILMKQWQEELRLLYTMVGATNTAALHQQSLIFSGPVKDWCEARGIDLVKYGRRTEKSVGQK

SEQ ID NO: 58014 - protein, 1042 aa, Enterococcus faecium
MKPKKLQLKNFGPFINETVDFSRLTEAPLFLISGKTGAGKTTIFDGITFALFGETSGRLRSGKEMRSLFATPDEETSVTFSFEHQQMSYEIERKPEQVLAKRKGNGTKKQAAKVTLTIFDGKGKEIKQITKRTEADQLIRELMNLDAKQFSQIVLLPQGEFRNFLVSSSSDKETVLRHLFGTQFFQQFNERLKEKAKQQQQKLDHLEQELHLLQKRFVLVKEEEPAAGFEAVLAQWTNHQAILEKQITEEKEALTELQEKQKQLENSYYRFESLKKSYEEKTILINKQKELAAQKDEIEEKKRWIGYYEFTQRLVEPIQRLQEIKVEKIELSQKSSEQTKKLAMTTQNYEEWQKNEANRVRRQTKIKEAAQKLQNKQMMVPIVESLRSKKQDAEQLTISLDKEELNAEKLYQNLAIYQERTRILQENLLDQEKLQEDRLAFGQLKYLDEKQQEIEKQKAKDTGSLAQIREELKKATEEITKNSQLLKEQTEQAEQLKSQWAKQQIARLQLFLRPGEPCLVCGSTEHPIQQLKHEQPNKEDILKVEQQLAEAESAVERTQQIIAKSEAHENNLQQQLSDLEQKIMATNIQLAEQEEHLQQALKKAFPEITEQKTKTTLVVIEQSLDRRKSKMANARIELEEIRQQAEKLEQQLAVYKQQQTEKNNQLQQLQGEIKSLEQQLQDTDSNCLEEEIRRLEKQLEEDSNQLAVEQKAGVQLLQDLHTLRTQLDLQHEQIEKIDEKIEKEQERIAKKLESQSYFSTIEEICAFAQQQAQYKENQRTVTSYHEEQLVTADRLRQLENIQLTETFPDTEEISQQLEEIRRMIEIKQEKIYGLQEQKISNQKIYDECLSIYHTSQTKLDELTQLQQLSQTFNGENPKKTSLERYVLQVYLQEVLQVANDHLQRLTKNRYQFELADTIGSYRGKTGLEINIYDDQAGMSRSAHTLSGGESFIAALSLALALADVIQTQAGGVAIDALFIDEGFGSLDEEALEMAMEALETIESEGRMIGIISHVRELKERVLQQIRIDTEGSGQSKIRYQLG

SEQ ID NO: 58015 - protein, 143 aa, Enterococcus faecium
MLMGEFQHNIDAKGRLIVPSKLREELGEKFVLTRGLDGCLFGYPMSEWENLEAKLNEMPLAKKDARTFVRFFYSAATECELDKQGRINIPSTLRNYAALTKGCVVIGVSNRIEIWDETRWQDFSAAAEENFDEIAESMIDFGL

SEQ ID NO: 58016 - protein, 1020 aa, Enterococcus faecium
MYLKRIEIAGFKSFADKTVIDFENSVTAVVGPNGSGKSNITEAIRWVLGEQSAKSLRGGKMPDIIFAGSDTRKQLNIAEVTVILDNSDHYLPLEYNEISVTRRYRRTGESEFFINKQSCRLKDIQELFLDSGLGKESFSIISQGKVEAIFSSKPEDRRGIFEEAAGVLKYKQRKKKAEQKLFETEDNLSRVQDIIHELEEQLTPLAAQSEAAKEFLRLKETLTQTDVSLMVAEIKTAKKDWDNKQAQLAKFNLELGKLSESIQEQESILAKQRKENAQADRLIEKNQQVLLDLSEKLKQTEGQKDVLQERTKHTQKSSQEYQTSLAEAQKKVKHFEKLQESLMKAAAEKETEIQKAEANLIKTQQELEKYQKSTKELLAELRDQYVDLMQEQAAVGNELKYLERQYIQETAKSKQTLAKQSEVEASVDRLILQKEELTQKQAQLKSSLTETKEKLEMIQQNGKKFQEALAKEQPKMYQLMNQVQQLRARKKSLQEIQENYFGFYQGVRLVLQHKQQLSGIVGAVAELIDVPADFTLAIEAALGGAAQHVIVENEKDARQAITYLKQQRGGRATFLPLTTIKPRQLPAHILTQAAAVEGFIGIASEQVSYPDQIQTVVQNLLGTILLAKDLTSANAIAQTIRYQYRVVSLEGDVMNAGGSMTGGANKRGNQGSLFVQNQELKRLTSEFEEADKQLQAQEKKVQELQQETARLAEEQEVLRTRGEQLRFEEQEATNQLQNIINELERFEKEKQISTFETRELQQFIEDYEKQTNELKDKQTDLESQRQKIDEEIKSLSQESDQMEARRAQVQSQKAQEQADLAVLKEQFNHLQIQLRGARVQKAEATERQEAIEKQLATLTADFSDHEVTEESLEKQINELSAQRETLKAELAKAKEQRDRRQKEIDKLEAVLAERNREQKARLSEQSKLEVQKDRAEMILDNHLTYLQSEYQLTFEKASQDYQETTDIEDSRTKVSSLKEQIEKLGPVNLNSIEQYEQVSERHTFLATQRDDLLAAKNQFV

SEQ ID NO: 58017 - protein, 448 aa, Enterococcus faecium
MAHIHFDYSKVAPFVNEQELGYMQSQVTAAHNELREGTGAGSDFRGWIDLPTNYDKEEFARIKEAAKKIQSDSEVLVVIGIGGSYLGARAAIDFLNHTFFNLLDSNTRKAPQIFFAGNSISSTYIADLIEVIGDRDFSVNVISKSGTTTEPAIAFRVFKELLVKKYGQEEANKRIYATTDKAKGAVKVEADAEGWETFVIPDDIGGRFSVLTAVGLLPIAVSGADIDALMQGAADASKAYSSDKLEENEAYQYAAMRNILYRKGKVTELLINYEPGMQYFSEWWKQLYGESEGKDQKGIYPSSANFSTDLHSLGQFIQEGRRNIFETVVKVEKPRKSITIPEQAEDLDGLGYLQGKEVDFVNTKAFEGTLLAHTDGDVPNLLVKIPEMDAYTLGYTMYFFEIAVGISGYLNGINPFDQPGVEAYKKNMFALLGKPGFEDLAKELNERL

SEQ ID NO: 58018 - protein, 379 aa, Enterococcus faecium
MLVSFSMVIRFFLTILLSLILTPVFKIISVQTGMVDKPNERRINKVPMPSAGGLPIFISFVISTLFLFRKIIPQSYIVPILIASLVIIVTGVLDDKYELTPKQKSIGILIASLIIYFVADIRIDSFTLPFIGYIQLGWLSFPVTIFWIFGITNAVNLIDGLDGLAAGISLIGLITIGIIGYFFLHASTVYIPVVIFCLVASIIGFFPYNFYPAKIYLGDTGALFLGFMMAVLSLQGLKNVTFVSSISLLIVMGVPVTDTFFAIIRRKANRVSFSTADKKHLHHRLISLGFTHKGAVLTIYAMALMFSFTAMVMNYTGRIGTIILIIAMLFAAILLFELIGLINEKHQFILKTLRFLGNKEYRTQVKQKYLKKWNRHIDE

SEQ ID NO: 58019 - protein, 446 aa, Enterococcus faecium
MVKKQITGEEIKRIIEEENVRFLRLMFTDILGTIKNVEVPVSQIDKVLENKMMFDGSSIEGFVRIEESDMYLYPDLSTWMIFPWESAHGKVARLICDIYNPDGTPFAGDPRGNLKRALKDMRDLGFTSFNLGPEPEFFLFKLDEDGGITTTLNDKGGYFDFAPTDLGENCRRDIVLELESLGFEVEASHHEVAPGQHEIDFKYADVVDACDNIQTFKLVVKTIARKHGLHATFMPKPLFGINGSGMHCNMSLFNDEGNVFYDKDGELELSETAYHFLGGLLKHARAYTAVCNPTVNSYKRLVPGYEAPVYVAWSGRNRSPLVRVPESRGLSTRLELRSVDPSANPYLAMAVLLQAGLDGIRNQITPPAAVDRNIYVMDEEEREAAHIQDLPSTIHNAIKELRKDNVMIDALGQHIFSNFVEAKRLEWAAFRQTVSEWEREQYLELY

SEQ ID NO: 58020 - protein, 633 aa, Enterococcus faecium
MEHYEADAYDVIVVGAGHAGSEAALAAARMGSKTLLLTINLDMVAFMPCNPSVGGPAKGVVVREIDALGGEMGKNIDKTYIQMRMLNTGKGPAVRALRAQADKHAYSTEMKHTIEKEPNLTLRQGIVEELIVEDGVCHGVVTSTGASYRAKAVVITAGTALRGEIIIGELKYSSGPNNSQPSIGLANHLKELGFAIERFKTGTPPRVKSSTIDYSVTEEQPGDKEPNHFSFSTPDSAYKLDQESCWLTYTGETTHQIIRDNLHRAPMFTGIVEGVGARYCPSIEDKIVRFADKPRHQLFLEPEGLNTEEVYVQGLSTSLPEDVQVNMLHSIAGLEKVEMMRTGYAIEYDVVEPHQLRPTLETKVVENLYTAGQTNGTSGYEEAAGQGLIAGINAALKVQGKEPLVIKRSDGYIGVMIDDLVTKGTNEPYRLLTSRAEYRLLLRHDNADLRLTEMGHRVGLVKEDQYKNYLKKKEAVEQEIKRLMNVRIKPTEEVQDFLATINAAPLKDGVLASDFLRRPEITYAELLRFIPENEELTRKEIEQVEVQIKYEGYIKKAMEKVEKLKRMEAKKIPENIDYAAINGLATEAKQKLQKIQPETIAQASRISGVNPADLSILMVYIEQGKIAKVSEPA

SEQ ID NO: 58021 - protein, 69 aa, Enterococcus faecium
MKQQFSIEGMSCNHCAARVEETVSALDGVQKVKVNLKKANGTVKFDETKVQSEKICQAINGLGYKAEVI

SEQ ID NO: 58022 - protein, 329 aa, Enterococcus faecium
MVGIILASHGQFAEGILQSGSMIFGEQENVKAVILKPSEGPDDLRAKLEEAVASFDNQDEVLFLVDLWGGTPFNQSNTLFEEHKDKWAIVSGLNLPMLIEAYASRFSMESAHEIAAHIIETAKDGVKVKPEELEPAEAPKAAVEDAQPKGALPEGTVVGDGKIKYVLARVDSRLLHGQVATAWTKAVQPNRIIVVSDAVSKDDLRKRLIEQAAPPGVKANVIPISKMIEVAKDPRFGNTKALLLFENPEDVLTAVEGGVDIKELNVGSMAHSVGKVVVSKVLSMGQEDVEAFEKLEQKGVKFDVRKVPNDSRDNMDDILKKAKAELAKA

SEQ ID NO: 58023 - protein, 260 aa, Enterococcus faecium
MMEFQLDQEWRLRPIKGDTGKTYIGMRDEDKVFIKRNTTPMLAALSREGITPKLVWTKRTGNGDTLTAQEWLEGRLLTPNEIGQRNDVIDVLYHLHHSNSLKTMLTRIGGRVMTPEKMLQKYEKELPEELQKNQFLQIVHRFLREQIPSIDKENLSVVHGDVNHRNWLVCKNYLYLVDWDSIMFADPAVDIATILGNYVPLSSWNQWLISYGIRPTDEMLEKFHWYAAMNLLQEITRYCKREDHRRMNEEILQLKRIFSG

SEQ ID NO: 58024 - protein, 453 aa, Enterococcus faecium
MEVFQTIINYVLNLGSAIFVPLIILILGLLAGMKLKKAFMSALTLGIAFSGMSMVIGYMSNAVSPASEALAKNTGISLPALDLGWTGAASITWSWSYAFIFFAVTIGVNFVLLLFNWTKTLNVDMWNVWGKALTAYLVYYVSGSLAAGFLTAMVQVILELKLGDMFQKHIQDLTGIPLVTVTHFMTSAAVLLLPFNMIMDKIPALNKRADTNALKKKIGIFSENSVMGFIIGLGLGFAAAYGVSGSLNLAIQTATALSLFPMISKMFMQSLSPLADAMSEFMKKRFKDREVYIGLDWPILAGRSEIWVTAILLVPVFIGYAIILPGNQVLPLAGIINYSIAVGGLLLTGGNLARMLILGIITMPIYLYGATYLAPILSDLAEKSGAVEGIKKGQLITWSSIEGPEFRVLFAEAFNRNILAIVGCVIFLGLFVLLYKYMIKAKVPSERYAELQK

SEQ ID NO: 58025 - protein, 294 aa, Enterococcus faecium
  MISC_FEATURE (63)..(63): X=any amino acid
  MISC_FEATURE (81)..(81): X=any amino acid
  MISC_FEATURE (88)..(88): X=any amino acid
  MISC_FEATURE (96)..(96): X=any amino acid
  MISC_FEATURE (102)..(102): X=any amino acid
  MISC_FEATURE (292)..(292): X=any amino acid
KITLAKNAVFNILYKALTVVFPLITVSYVSHILGAEGIGEVTSVHNFVTYFYNGCFLGYSNVXCESYCKKGTRAMEYLQIXFSLNYLXLMHLQLLXVYSYIXLLYLFRDYNQLSLIFCSLIVLNYFNIEWVYQGFEEYKYITVRSFIIKLVSLIFMLLFVKKKTDIVIYAGVVCFGISGNYIMNMLRLNKYVNFTIRNIKLKQHLKPIMILFVSVIAIELYSLIDVTMLTHMTSSAHVGYFSNAVKIVKLIANTFIAMGAVLLPRLSLYYAEKNSFKMEETIHNFLKTPFVXLS

SEQ ID NO: 58026 - protein, 333 aa, Enterococcus faecium
MREIDTCIVGATGLVGQTMLKVLEEYDFPVGRLKLLASKRSAGKVCVFKKKKHTVQELTETSFEGYDLALFSAGASVSKEFAPIARSQGLFVIDNSSAWREDSDIPLIVPEVNLEDYTLNRLIANPNCSTIQAVLPLKALQEAFGIQRVNYSTYQAVSGSGQKGIEDLHRTQNDEEPVLYPYNISQTVIPEIDQPLENGYTKEEQKMINETRKILHQPALPVSATCVRVPIENGHGVSVAVQLQKEFTTEEIRECLSQFPGIQLEDDLAAHKYPTSILARGTDMVYVGRIRKDTSLENGLLFYTTADNIRKGAAANAVQIAAALMQKIAEVAR

SEQ ID NO: 58027 - protein, 314 aa, Enterococcus faecium
MLNYSLGQKEGEKMTEATWEQKFLRYLIVERGYSEKTKEAYEEDILHFKHFLEESGDADLLKAEYFTVRVYLSALADHRPSYSRNSISRKIASLRSFYQYLLKEEVIKENPFSYVHLKKKNLRLPRFFYENEMQALFDSVAGDSPLDLRNRALLEVLYGSGIRLSECSSLSVSDIDFDSEVMLIHGKGNKERYAPLGSFAQDALQEYFREGRQVLMTKYHEEHDIVFVNHHGKPITPTGIEYVLNQMIKKSSLDSDIHPHMLRHTFATHLLNNGADLRTVQELLGHANLSTTQIYAHVTKESLQKNYRSFHPRA

SEQ ID NO: 58028 - protein, 407 aa, Enterococcus faecium
MTTTISTNQLKDLIQYRLPEYQALALDIHEHPEVSNYEFYSSAALIKQLEKERFWVEKEVAGHRTAFDARYISNKPGPTIAFLAEFDALPGIGHACGHNLFGTYSVLAASIVKQFIDETGGEIRVYGTPGEEGGENGSAKGSFVREGFFEDVDVALCVHPAFRYGKTTESLANDPVDIKFYGVASHAAAAPEKGVNALEALIQVFNGINALRLQLPKDVNIHGIITDGGVAANVIPDYAAGRFYLRAGNRQTLDKVYEKVENIVRGAAISTGTTFEFGLFQNAVDDVIVTPSFDDLFFQHAKEAGVPDEEIETEQRTSLGSSDVGNVSQVIPTIQPTVAISETYIAGHTEEFKAAAKSDKGLASIAIAAELLANTALDLLKEPKLLERIKQEHQEIVARKKQEGATF

SEQ ID NO: 58029 - protein, 1049 aa, Enterococcus faecium
MKISHREEAEVEEQLIRVLGEGHNQWTYRPDLKSEEDLWVNLRQKIISNNQAELNDFPLTDKEFETIKTELLLRTKTPFDAAKWLKGENGMARITIEREDPQLGSVSLILYSNQDIGGGISTYEVVHQIAKRGSNIEARDRRFDVTLLINGLPIVQIELKQVTAKDSFYQAFNQIKKYAEEGMFRNNIFSTLQLFVVSNEQTTRYFANALPKDLHPKFLFSWRTKDNKKVENLYEFCKQVLNIPDAHRLIADYTIVSEDQDNKILMVLHPYQVHAIQALFIAANKHQSGYVWHATGSGKTLTSFVSTKLLARKSGIDRTIMLVDRKDLDNQTTTEFTKFASEFNTGISSGNAKANSLIVGTGSAKELSETLLADANANVVIITTRQKLDAALKYAKKQEEKKGTNRFQKLMGQHIVFVVDECHRALSAENMEEIKKMFPKSTWFGFTGTPIFPENRKQAKGQLARTTHDQYGEVLHTYTIKNALEDGSVLGFQVEHENTVEPTSLENKIYRKLKEVETYAEYSPEQINRMIDQMEPVKKESYLDPTVFEADEHIQKVIHKMFRPDNAYTKFDFRNGRPTKSAILTTSSIDMAKKYYRAIKEMTKEPDWLTKEFPNQPIREGRTMEDPDFPRIAITYSLEENSRDSSVQQEEMQKIIEEYNQYYDTSWSLADIERYNGDINNRLARKRAEFKQFGKQIDLVIVVDRLLTGFDAPTIQTLFVDRNLEYAGLIQAFSRTNRTYPEKTKGLIVTFRKPATMEKNVEDATKLYSEAKEESGLIYPSYQESKKRFKQAYGKLKEVSSMESIDEHTPLEIRIEYVKAFQELNRAYESLVTYDDYNDDMVKSSTLNNQIQLLEEQIGVYETVKGSLIEEEPEKEGEDFSTIEFYSENTTKLYDIDSTYIDQLLGTYAANSSDAREEIEKALAKLNKTEGVKEVYRQILNAFDVGTLDSNEDIFVIKRRYFTQASDDLIHVFSNEWFVSEKELHASNLQYMPGEDPIPNMKAIINSKDYEGYKANHPEAKPFKYPQEMKRAWRKMLDDELIPLENELR

SEQ ID NO: 58030 - protein, 461 aa, Enterococcus faecium
MEKIVILHTNDLHSHLENWPRIRRFLDQRKRENEKKEKTTTIAVDLGDFVDRWHPLSEATNGQENILLMNEVGYDAATIGNNEGVGNSKEELNHLYDHAEFDIILDNLFDKNTLQPPAWTKPYKIITTKHQTKIGLIAFTAPFPLTYNPNGWDIRNPYDILPELVEDLRSQVDVLVLMSHLGIQDDFQIAKEIPAIDVILGSHTHHLFREGHVINDVQIAAAGKYGQYVGEVHLTIDEEKKILKHSAKAIPTETMTAFTEDEQEINSYLERGHELLKEKEVADLPFSLSLDIFNEHSFIQVAFEAVKERGKTEAAILNSGLFLTEIPKGRVNQDQLHTALPHPMHLLNVTLGGNDLIRLVLEIEKNRNFLRNYPMKGMGFRGKIFGQMVYNGITYDSINHQVFWKNKPIDLNKNYTFTTVDHLMFVPFFPTIEIAGKNEFLFPEFIRSVVGDYLKAHYPIK

SEQ ID NO: 58031 - protein, 448 aa, Enterococcus faecium
MQIYDYIVIGGGSGGIASANRAGMHGAKVLLIEANELGGTCVNVGCVPKKVMWQASTILETIERDASSYGIQADLKNVDFAGLVERREKYIDFLHGAYQRGLDSNHVEAIKGYATFIDSQTIEVNGETYRAPKILIATGGRASKMTIPGGEYAIDSNGFFELTELPKRAIVLGAGYIAAELSGVFRGLGSEVMWAYRKERPLRTFDKMLSDNLIQMYQEAGIKTYAHHIAKEITKNNDEYTVLFENGETLTGDCVLFAGGRVPNTEKLGLENTNVELDKKGFIKVDKYQNTTDEHIFAVGDVIGKLDLTPVAIAAGRRLSERLFNGKKDSYLDYKLVPTVVFTHPPIATIGLTEEEALEKYGENELKVYRSRFTPMYFALNDYRQKCEMKLICVGKEERIVGLHAIGVGVDEMLQGFAVAIKMGATKEDFDNTVAIHPTGAEEFVTMR

SEQ ID NO: 58032 - protein, 303 aa, Enterococcus faecium
MKKIIGAFVFAIIIIIICFQIDVFGQKKIVGQTVSSTNSTVTKTKESFDDTEQETLIKIGKNDRTLYTDDSLTTPLATINGGELAEFLSETKNAYQIKTNDGYTGYLALEDGTKVTKNIQTKPEELSDAVIVLDPGHGGNDTGALSNDEQTEEKDITLSTAIKVKKALEDAGATVYLTHTTDELVQLGDICDYSEEKKADVFISLHADSTEYANEATGITTYYYYGQEETLAQTIADSFTDLPLDSRGISTGNYQVLRENLQPSILIEMGYMNNDSDLKELVTDSYQQQIAASLTQALTTYFQ

SEQ ID NO: 58033 - protein, 225 aa, Enterococcus faecium
MKVLIVLTNVEKYEKIERPTGLWLSELTHFYDVLVKNGIDADFVSPKGGYVPLEPQSVLNMDEIDWAYYEDEDFRNRALGNTLRPDDVDANDYAAVYYAGGHGTMWDFPEAIDLGKVASQIYRNEGLVSAVCHGVVGLLPVTDESGKSILAGRTVTGFSNEEEEANGTTNEVPFLAEDALKEKGANYQSGAAFSEVVQIDGRLLTGQNPQSAHQLGEAVVEALKN

SEQ ID NO: 58034 - protein, 254 aa, Enterococcus faecium
MQRYFLKESYESKDYFVLEGENYHHIVRVMRMEPEDEVFLAFNDQIAIVAEITEITEEAVYLKEIKKEENQKELPSSITIASGYPKGEKLDWIVQKSTELGAQAFLGFPASASVVKWDAKKRMKRQQRLEKIAQEAAEQSHRQIVPSVELLETKQDLFERLDDYDVVLVAYEESAKQGEKSNAAKILSETKPDSRILAVFGPEGGLSRDEVDYFVEHKGILCGLGPRILRTETAPLYLLSAASYQWELMNPSFS

SEQ ID NO: 58035 - protein, 231 aa, Enterococcus faecium
MEIMLDTANTKSIYSCQQFLNLTGVTTNPTILKKEGASNFFSHMKEIKKIIGQIPIHIQTIGRTEEEMIEDARVIIEELGKDTFIKVPVNQAGLQAIKKLKKEGYLITGTAIYTELQGYLAINNGADYIAPYYNRMQNQGIDAMKVIDSLRTEIERTQRPTKILAASFKNCEQVTTAIRSGAHAITLGKELLDQVLEMPSIDKAVRGFQEDWVQTFQAETIGELKKVADYF

SEQ ID NO: 58036 - protein, 232 aa, Enterococcus faecium
MANYELNIAHLYGNLMNTYGDNGNLLMLKYIAEKMGVSCHTEIVSIHEPFDADKYDLVFFGGGQDFEQLIISKDIQKKKDSLINYIENDGVMLAICGGYQLLGHYYMGANGEKIQGISALDHYTLSQENNRFIGDIVIHNEEFNETYYGFENHNGRTFLGEGERPLGKVVQGQGNNGEDQSEGVIYRNVFGSYFHGPILARNENLAARLIRLALEQRYGKELDLPYLEGQTA

SEQ ID NO: 58037 - protein, 431 aa, Enterococcus faecium
MNDSIKKMLRLIEKDLMITEVSYETFQKKKTLIVDAVFSPAPHTCRNCGSTVVDGNGKVIVVKNGKKETIVRFEQYNHMPLVTRLKKQRYTCKNCRTHWTAQSYFVQPRHSIANHVRYKIASLLTEKVSLSFIAKNCQVSLTTVIRTLKEFKSYLPKQSKRILPRVLMVDEFRSHASIEDKMSFICADGETGQLIDVLPTRKLPRLTSYFLGCANPEEVKFLVTDMNAAYFQLTKRILPNAKVVIDRFHIIKHMNQAFNELRIREMNELRKVGQKSQAEKLKKNWRFLIKNRANINHYEYKTWKSFRAPKYPFLTEAMMIDRLLGFSTSLKEAYPYFHELVEAFRDKDPDLFFSLLAELPETLDDGFREKLQNLLTYEEGITNAMIYPYTNGKIEAKNTHIKTMKRVSYGFKSFENMRIRIFLINQLIKVR

SEQ ID NO: 58038 - protein, 500 aa, Enterococcus faecium
MKDMKALQNGSDIRGIALPVEGYEVNLTTDMVKKIGWGLANWIKKKKKSTDPNKKWTIGIGHDSRISGPALKEALIQSLKEQGIHVIDFELATTPAMFMSTQFEQFSCDAAVMLTASHLPYYYNGIKFFTSEGGAEKEDIAFILSQQQKIKSEQTGSVEKADLLTPYAQDLVTKIKKGIGTLESKPLNGWKIIVDAGNGAGGFFAEKVLNSLGADSTGSQFLEPDGRFPNHIPNPDNKEAMESIKQAVLANEADLGIIFDTDVDRSAVVSASGTVINRNNLIAVLSTIVLKEHPGTRIVTNSPTSSHLQRFIEEKGGIQVRYISGYRNVINKALELNRLGKDTQLAIETSGHAAFKENYFLDDGAYVIAKILMLLPELKRKGITLDEQIKELKQPVEVQEIRLKLFSDEPREQGNKILEEMKRLLEEEKGMNFDPENEEGIRYDLEEPYGNGWFLIRLSLHEPLLVLQIENDEFGKNKLALVKLAKLFGHFSDLESLTAE

SEQ ID NO: 58039 - protein, 278 aa, Enterococcus faecium
MPELPEVETVRKGLERLVVGKTIQKVQVLWPKIIEQPETPIFEASLVGETIQSIGRRGKFLIFHLDHCELISHLRMEGKYQFTKENTPIDKHTHVLFFFEDGSQLRYNDVRKFGRMTIVEKGASATYRGIMKLGPEPLPDSFLLADFANGLKKSHKAIKPLLLDQRLVTGLGNIYVDEALWEAKIHPEQPANTLRPKEVEQLRLSIIDVLDRAIEAGGTTIRSYLNALGESGGFQVALHVYQQTGKPCIRCGTPIVKTKVAQRGTHYCPNCQRLKIAK

SEQ ID NO: 58040 - protein, 228 aa, Enterococcus faecium
MDKSFSETYLDFKQINPETMNQAILDTLYMTLISMVLVTIIGLVLGLILYSIGRKNKPYARIIYGIVSIISNIFRSTPFMILMVLIIPFTKAIVGTMLGAQAAIPALVLSAAPFYARLVEIAFREVSPGVLEAADAMGASYWEIIWKVLIPESIPALISGLTVTTISMIGFTAMAGAIGAGGLGGLAWQEGYQRGNLTVTFVATLIILLIVFIVQGIGDFLTKKTDKR

SEQ ID NO: 58041 - protein, 589 aa, Enterococcus faecium
MAQRTIYCGLVSEQQLEQTVTLKGWVQKRRDLGGVIFIDLRDREGIVQIVFNPEINKEAWEIADKCRSEYVIEVTGEVRRRGENAVNPKMATGEFEVIASEIVILNQAKTPPFQIEDDQAISDEIRLKYRYLDLRRPKMTKNIKLRNATTKAIRHYLDDNDFLDIETPYLGKSTPEGARDYLVPSRVHAGHFYALPQSPQLFKQLLMNAGFDRYYQIVRCFRDEDLRGDRQPEFTQVDIETTFLTAEEIQTYTEGLIAKVMKEVRGIEVTLPFPRMTYDEAMARYGSDKPDTRFDMELIDLSDTVKEVEFKVFQMALENGGVVKALNAKGAADRYSRKDMDQLGQYVGQFGAKGLAWLKVEEDGLKGPIAKFMGEATEAIIKATDAKPGDLLMFGADKSEIVAAALGAIRTRLGKELGLIDESKFNFLWVTDWPQFEFSEEEGRYVSAHHPFTMPKEEDIPLLAEDPAKVYAEAYDIVLNGYELGGGSIRIHTRELQEKVLETLGFTKEQMEEQFGFLLTALDYGFPPHGGIALGLDRFAMLLAGEDNIREVIAFPKNGKAADVMSDAPSMVSPLQLFELNIDVTNIEE

SEQ ID NO: 58042 - protein, 423 aa, Enterococcus faecium
MLDVKMMRQNIEEVQEKLMTRGVKKETLAEFMELDENRRKLLVKSEELKKYRNDVSAEIAQLKRAKEDASAKIAEMKEVGGNIKALDTEIAEVDEKLKQIATTLPNLPHDSVPVGTDEEDNVEIRRWSEPRTFAFEPKPHWEIAENLDILDFERGAKVAGSRFVYYKGLGARLERAVYNFMLDQHIYEHGYTEMITPYIVNSKAMFGTGQFPKFKEDVFQLENTDLTLIPTAEVPLTNYYNDEILDGADLPIYFTALSPAFRSEAGSAGRDTRGLIRLHQFNKVEMVKFSDVEHSYEELEKMTADAEDILKKLHLPYRVMALSTGDMGFSAAKTYDLEVWIPAQDTYREISSCSNCEDFQARRAMIRYRDNDGKIHYTHTLNGSGLAVGRTVAAILENYQNEDGSVTVPEALVPYMGNLKVIK

SEQ ID NO: 58043 - protein, 258 aa, Enterococcus faecium
MIFDSHTHLNAEQFNEDIPETIQRAQEMGVTKMAVVGFDTPTIEKSLQLSHDYPNIYSIIGWHPTEAGSYTKEIENKLQEQLTLPKVVALGEIGLDYHWMEDPKEVQDKVFRRQIAIAKEMNLPISIHTREALEDTYQILKEEDVRDIGGIMHSFSGDYEWAKRFLDLGMHISFSGVVTFKKALDVQEAAANVPIERLLVETDAPYLAPVPFRGKRNEPGYTRYTVEKIAELRNLPTEEVAAQTWTNAHRLFGLSEHG

SEQ ID NO: 58044 - protein, 333 aa, Enterococcus faecium
MMSNSSVIDAMCYNNSVKSKMKWRKDMDGLLPLWKERGMTSHDCVFKLRKILHTKKIGHGGTLDPDVDGVLPICIGKATKVIEYLTDSGKIYVGEITLGFSTTTEDRSGERVETKPVDMSLSEKKIDEVMASFIGEITQIPPMYSAVKVNGKRLYEYARNNETVERPVRKAQIYRFIRTSELTRDEVTGTISWRFEVECGKGTYVRTLAVDTGKKLGYPAHMSDLTRTASAGMSQKDALTLEEVAQAVKNGTIDDCLLPIEKGVERFKRVDITDEVWQKVKNGMRLDYTVFALPEMPSEEIALFYKGKVVSIYQPNPKEKNKLKPSKVLRNEE

SEQ ID NO: 58045 - protein, 604 aa, Enterococcus faecium
  MISC_FEATURE (130)..(130): X=any amino acid
  MISC_FEATURE (132)..(132): X=any amino acid
  MISC_FEATURE (133)..(133): X=any amino acid
  MISC_FEATURE (141)..(141): X=any amino acid
  MISC_FEATURE (142)..(142): X=any amino acid
KGSLFERIGDVLKKTNKVRNVQKVVKALFKREEEISTGIEDGFGIPHAKSKYVTKPALCFFHTAKLTDYSGIDEMPIEYIFAIVVPEKSADMHLEILSTLSRRLMNADFRKGIKEATTPADIIRQISQEXKXXESLSEYRXXRKRRKIIMKIVGVTACPTGIAHTYMSAEKLEVTARNLNHQAKFETQGVKTENQLSEQEIKEADAIILAVDKEIELDRFAGKKVKRVSTSRAIKEPQVVIDEALRDIGVFVVSNEKEPAANEKKPTIYNHFMNGVNYMLPFVIAGGIIIALSFAFGITAADPNSADYNVLAAAFSRIGGDTAFAMMVPALGAGIATSIAGKAGFAPGIVAGLLASTGGSGFLGGMIGGVLAGYICDFLANKISVKKEFSAIYQLIVVPFLSILIIGLLMVFVIEQPITWVLDALTNWLNSLGNTSGLLFGLLIGIMMAADMGGPINKSTSTFSIGLMSAGVNAPIAACMAAGMTPPLGIALATLLFKHKFTKEERTSGQSCWILGASYITEGAIPFAVSDPIRVIPSLMTGSAVAAGISMAVGVTSMAPHGGIWVMLIPNVMNNLPMYVLAIASGTVTTAFMLGLLKKTVKEK

SEQ ID NO: 58046 - protein, 325 aa, Enterococcus faecium
MKVFDYEDIQLIPNKCIVNSRSECDTTVTLGKHTFKMPVVPANMQTIIDETIAEFLAENGYFYIMHRFDEAARIPFIKKMKKRGLITSISVGVKKEEYSFIEKLAEESLNPDYITIDIAHGHANSVIDMIQHIKKYLPETFVIAGNVGTPEAVRELENAGADATKVGIGPGKVCITKIKTGFGTGGWQLAALRWCAKAARKPIIADGGIRTHGDIAKSVRFGATMVMIGSLFAGHEESPGETKVENGIVYKEYFGSASEFQKGEKRNVEGKKIWIQHKGSLKDTLVEMQQDLQSSISYAGGRDLEAIRKVDYVIVKNSIFNGDTI

SEQ ID NO: 58047 - protein, 303 aa, Enterococcus faecium
WLLGSGLVSILLFLSGCVRMDSNGNPDTSGIVYRVLVHPMGQAITYLVENFNWSYGWAVIAMTVIVRIIILPLGISQSKKTMIQSEKMQALKPQVEAAQQKLKAATTREEQMAAQAEMQQVYRENGLSMTGGIGCLPLLIQMPIFSALYFTARYTEGIRESSFYGIDLGSPSMVLVAIAGVAYLLQGYISTIGIPEEQKKTMRTMLIVSPAMIVFMSISAPAGVTLYWVVGGVFSCLQTFITNVMMKPRLKAQVAEELKQNPPKQVVTPRKDVTESAKPADNKQPKNSTNNKGRNAGKQQKRK

SEQ ID NO: 58048 - protein, 95 aa, Enterococcus faecium
  MISC_FEATURE (57)..(57): X=any amino acid
KTAHKEADFVVIFAPTNYGSECVIELVMSVTSEALGIIKFTIPVGYTKNGRKKYYQXILFSSEFLRESKLLMDNLYPIRIIIVGYDDESREIVQV

SEQ ID NO: 58049 - protein, 339 aa, Haemophilus influenzae
MAIKIGINGFGRIGRIVFRAAQHRDDIEVVGINDLIDVEYMAYMLKYDSTHGRFDGTVEVKDGNLVVNGKTIRVTAERDPANLNWGAIGVDIAVEATGLFLTDETARKHITAGAKKVVLTGPSKDATPMFVRGVNFNAYAGQDIVSNASCTTNCLAPLARVVHETFGIKDGLMTTVHATTATQKTVDGPSAKDWRGGRGASQNIIPSSTGAAKAVGKVLPALNGKLTGMAFRVPTPNVSVVDLTVNLEKPASYDAIKQAIKDAAEGKTFNGELKGVLGYTEDAVVSTDFNGCALTSVFDADAGIALTDSFVKLVSWYDNETGYSNKVLDLVAHIYNYKG

SEQ ID NO: 58050 - protein, 262 aa, Haemophilus influenzae
MMYKAVFSDFNGTLLTSQHTISPRTVVVIKRLTANGIPFVPISARSPLGILPYWKQLETNNVLVAFSGALILNQNLEPIYSVQIEPKDILEINTVLAEHPLLGVNYYTNNDCHARDVENKWVIYERSVTKIEIHPFDEVATRSPHKIQIIGEAEEIIEIEVLLKEKFPHLSICRSHANFLEVMHKSATKGSAVRFLEDYFGVQTNEVIAFGDNFNDLDMLEHVGLGVAMGNAPNEIKQAANVVTATNNEDGLALILEEKFPE

SEQ ID NO: 58051 - protein, 302 aa, Haemophilus influenzae
MSIKILSESEIKQVANSYQAPAVLFANPKNLYQRRAKRLRDLAQNHPLSDYLLFAADIVESQLSTLEKNPLPPQQLEQLNTIEPLNAKTFKRNSIWREYLTEILDEIKPKANEQIAATIEFLEKASSAELEEMANKLLAQEFNLVSSDKAVFIWAALSLYWLQAAQQIPHNSQVENAENLHHCPVCGSLPVASMVQIGTSQGLRYLHCNLCESEWNLVRAQCTNCNSHDKLEMWSLNEELALVRAETCGSCESYLKMMFQEKDPYVEPVADDLASIFLDIEMEEKGFARSGLNPFIFPAEEA

SEQ ID NO: 58052 - protein, 330 aa, Haemophilus influenzae
MISLESQVLERHISFFDGKSVLFAGGISDSFPQTLASKCSSIQIWSCYFDYARTQSAVNFSVEFQGQADLIVYYWTKNKQEVNFQLIQLLAQASIGQEILIIGENRCGVRSVEKTLSPYGEIAKIDSARRCGLYHFSLQNKPHFELKNFWRTYQHSTLENLTIYSLPGVFSAAELDTGTELLLSTIDNKIKGKVLDLGCGAGVIGSMIKKRTPNAQITMTDIHAMALESARKTLSENQLQGEVYASDVFSDIEGKFDLIISNPPFHDGIDTAYRAVTELITQAKWHLNQGGELRIVANSFLPYPELLRQHFNDYQVLAQTGKFKVYSVKN

SEQ ID NO: 58053 - protein, 302 aa, Haemophilus influenzae
MTEQFDKTYCGFIAIVGRPNVGKSTLLNKILGQKISITSRKAQTTRHRIVGIKTEGAYQEIYVDTPGLHIEEKRAINRLMNRAASSAIGDVDLIIFVVDGTHWNADDEMVLNKLRNAKAPVVLAINKVDNIKNKDDLLPFITDLSSKFNFAHIVPISAQRGNNVHELEKIVRQSLREGVHHFPEDYVTDRSQRFMASEIIREKLMRFTGEELPYSVTVEIEQFKVNERGTYEINGLILVEREGQKKMVIGAGGQKIKTIGMEARADMERLFDNKVHLELWVKVKSGWADDERALRSLGYMDE

SEQ ID NO: 58054 - protein, 349 aa, Haemophilus influenzae
MSNLFFVILLAVGFGVWKVLDYFQLPNTFSILLLILTALSGVLWCYHRFVVLPKRHRQVARAEQRSGKTLSEEEKAKIEPISEASEFLSSLFPVLAVVFLVRSFLFEPFQIPSGSMESTLRVGDFLVVNKYAYGVKDPIFQNTIIAGEKPQRGDVIVFKAPQQALIRTGLGATRAAFAENLALSSKDNMSGVDYIKRIVGKGGDRVIFDVEQKTLKVVYGKEGKPCEIDCETKAFEYTQNPTNPAFPNELELTEKGDVTHNVLISEYRRYSDLEFFPQEGMQTAEWLVPEGQYFVMGDHRDHSDDSRFWGFVPEKNIVGKATYIWMSLEKEANEWPTGFRFERFFTAIK

SEQ ID NO: 58055 - protein, 500 aa, Haemophilus influenzae
MTTREQRIEKYHADRSVYQAVPKSESLSRTAKDRKLCTSLEEAIKRSGLKDGMTVSFHHAFRGGDFVVNMVMNKIAEMGFKNLTLASSSLIDSHFPIVEHIKNGVVTKIYSSGLRGELAEQISRGLLNEPVNIHSHGGRVHLVKSGELKIDVAFLGVPCCDTFGNANGFTGKSKCGSLGYARVDAEYADKVVLLTEEFVEYPHHPISIAQDQVDLIVQVEAVGDPKKIGGGATRMTTNPRELLIARKCAEVIFASGYFKDGFSLQTGSGGAALAVTRFLEEKMRRENITADFALGGITASMVALHEAGLIKKLLDVQSFDSVAAESLARNPNHIEVSANQYANYSSKGASVERLDMVILSALEIDTKFNVNVLTGSDGVIRGASGGHCDTAASAQVAIIVAPLVRGRIPTVVENVITCVTPGENVDILVTDHGVAVNPKRPDLIEALSKTDIPLFTIEQLCERAYSITGKPKEIEFTNKPVAVVRYRDGSVIDTVYQVKD

SEQ ID NO: 58056 - protein, 291 aa, Haemophilus influenzae
MKLRRSMLFVPGSNAAMLSNSFIYKPDSIMFDLEDAVALKEKDSARLLVAHALQHPLYKEIETVVRVNPLDSEFGLLDLNSVVRAGVDVVRMPKTESAQDVLDMDHAITEIEKACGREAGSTKMLAAIESPLGITQANQIAFASKRLIGIALGAEDYVRNLKTERSPEGIELLFARCSILQAARAAGIQAFDTVYSNANNEEGFLKEAALIKQLGFDGKSLINPRQIELLHNLFAPTQKDVEQAKRIIEAAVEAERQGAGVVSLNGKMIDAPIIDRAKLVLERAKSGIREE

SEQ ID NO: 58057 - protein, 320 aa, Haemophilus influenzae
MSTPFKMERGVKYRDAAKTSIIPVKNIDPNQDLLKKPEWMKIKLPASSAKIESIKNGMRRHGLHSVCEEASCPNLHECFNHGTATFMILGAICTRRCPFCDVAHGKPLPPDPEEPQKLAETIQDMKLKYVVITSVDRDDLPDRGAGHFSECVKAVRELNPNIKIEILVPDFRGRITQALEKLKDNPPDVFNHNLENVPRLYKEIRPGADYEWSLKLLREFKEIFPNIPTKSGLMVGLGETNEEILQVMQDLRDNGVTMLTLGQYLQPSRHHLPVARYVPPTEFDEFRDKANEMGFEHAACGPFVRSSYHADLQASGGLVK

SEQ ID NO: 58058 - protein, 155 aa, Haemophilus influenzae
MKITLIAVGTKMPSWVTTGFEEYQRRFPKDMPFELIEIPAGKRGKNADIKRILEQEGKAMLAACGKGKVVTLDIPGKPWTTPQLAEQLEAWKNDGRDVCLLIGGPEGLSPECKAAAEQSWSLSPLTLPHPLVRVVVAESLYRAWSLTTNHPYHRE

SEQ ID NO: 58059 - protein, 592 aa, Haemophilus influenzae
MDYSQEAITSLIWILQTLAITSVVFSFGIFLLVRFTQWGKQFWMFAGGYLSPKRSIKPILFFLLIVAMTLLSVRISLVNSEWYKNMYTSLQEFNEHVFWQQMGLFCVIAASSVSAALVSYYLEQRFVINWIEWLNEQLVNKWMAHRAYYKTQYLSENLDNPDQRIQQDVQSYVKTTLSLSTGVIDAVTSMISYTILLWGLAGPMIVLGVEIPHMMVFLVFGYVIFTTLIAFWLGRPLISLNFINERLNANYRYSLIRIKEYAESIAFYAGEKVEKNQLYQQFNAVIHNMWVIIFRTLKFSGFNLVVSQISVVFPLLIQVGRYFEKQIKLGDLMQTLQVFGQLHANLSFFRSTYDNFASYKATLDRLTGFCYAIEKANNKSQTQIHNHPTDVIFKNLSIQNPLGHTLIKHLNITLPQGTSLLIQGKSGAGKTTLLRTIAGLWSYAEGEINCPTHNQLFLSQKPYVPQGNLMSALAYPNNADNISHTQAVEILNKVQLGHLAEQLEKEQDWTRILSLGEQQRLAFARLILHKPAVAFLDEATASMDEGLEFSMYQLLQQELPQTTIISVGHRSTLKTLHQQQLILQDKGQWQVL

SEQ ID NO: 58060 - protein, 378 aa, Haemophilus influenzae
MQFFVCLTKSFSTFCQTKLTFILNGIIMLFKKIRGLFSNDLSIDLGTANTLIYVKRQGIVLDEPSVVAIRQDRVGTLKSIAAVGKEAKLMLGRTPKSIVAIRPMKDGVIADFFVTEKMLQYFIKQVHSGNFMRPSPRVLVCVPAGATQVERRAIKESAIGAGAREVYLIEEPMAAAIGAKLPVSTAVGSMVIDIGGGTTEVAVISLNGIVYSSSVRIGGDRFDEAIISYVRRTFGSVIGEPTAERIKQEIGSAYIQEGDEIKEMEVHGHNLAEGAPRSFTLTSRDVLEAIQQPLNGIVAAVRTALEECQPEHAADIFERGMVLTGGGALLRNIDILLSKESGVPVIIAEDPLTCVARGGGEALEMIDMHGGDIFSDEI

SEQ ID NO: 58061 - protein, 342 aa, Haemophilus influenzae
MKERIKAICLEKPNNVVVKEVPYPEKSDNDVLIQVESMGICGSDIGAYRGTNPLVTYPRILGHEIVGRVIESGIGMSDGVRVGDRVIVDPYVCCGQCYPCSIGRTNCCESLKVIGVHIDGGMQEVIRHPAHLLTKVPDNLPIHQLPLAEPLTIALHALHRTTLKSGEHIVIIGAGAIGLMAALAAVQYGAIPILVDILEQRLEYAKSLGIEHIVNPHKEDDIKRIKEITSGRMAEVVMEASGANISIKNTLHYASFAGRIALTGWPKTETPLPTNLITFKELNIYGSRTSKGEFEEALDMLATNKINASHIITKCIKFEEIPSFISDLSDHPENYLKINAVF

SEQ ID NO: 58062 - protein, 266 aa, Haemophilus influenzae
MSHITKIKNWNTNLRKNMENIVNRTYTRIGQLLKQDISQGIYSIGDKLPTEREISEKFGVSRTIVREAMVMLEVEKLVEVKKGSGVYVVRTPESIHMEHSDLPDVGPFELLQARQLLESSIAEFAALQATKKDILNLKQILNREKELLTQNQDDYSADKDFHLALAEITQNDVLVKLQEQLWQYRFNSAMWAQLHSRILQNDYHHLWIEDHQTILSAIQKKNANEARKAMWQHLENVKVKLFELSDVEDPHFDGYLFNTNPVVVGI

SEQ ID NO: 58063 - protein, 587 aa, Haemophilus influenzae
MQEQKLQENDFSTLQTFKRLWPMIKPFKAGLIVSGVALVFNALADSGLIYLLKPLLDDGFGKANHSFLKMMAFVVVGMIILRGITNFISNYCLAWVSGKVVMTMRRRLFKHLMFMPVSFFDQNSTGRLLSRITYDSQMIASSSSGSLITIVREGAYIISLFAVMFYTSWELTIVLFIIGPIIAVLIRLVSKIFRRLSKNLQDSMGELTSATEQMLKGHKVVLSFGGQHVEEVHFNHVSNDMRRKSMKMVTANSISDPVVQVIASLALATVLYLATTPLIAEDNLSAGSFTVVFSSMLAMMRPLKSLTAVNAQFQSGMAACQTLFAILDLEPEKDDGAYKAEPAKGELEFKNVSFAYQGKDELALNNISFSVPAGKTVALVGRSGSGKSTIANLVTRFYDIEQGEILLDGVNIQDYRLSNLRENCAVVSQQVHLFNDTIANNIAYAAQDKYSREEIIAAAKAAYALEFIEKLPQVFDTVIGENGTSLSGGQRQRLAIARALLRNSPVLILDEATSALDTESERAIQSALEELKKDRTVVVIAHRLSTIENADEILVIDHGEIRERGNHKTLLEQNGAYKQLHSMQFTG

SEQ ID NO: 58064 - protein, 145 aa, Haemophilus influenzae
MSRASLSLLDLAGVKPYQMKKDEEYMNEEQILHFRKILNAWHEQIVEEASRTVAHMQDEVTNFPDPADRATQEEEFSLELRNRDRERKLMKKIEATLKKLDTDDFGYCDCCGEEIGIRRLEARPTADLCIDCKTLAEIREKQVAG

SEQ ID NO: 58065 - protein, 452 aa, Haemophilus influenzae
MPKARAKKSEQTRRYDKNVIKAAQFDISPRDFSRNALNVVEKLQRQGFEAYIVGGCIRDLLLGKKPKDFDVATNARPEQIQNIFQRQCRLVGRRFRLAHIMFGRDIIEVATFRANHSDARNENQAKQSNEGMLLRDNVYGTIEQDAARRDFTVNALYYNPQDNTLRDYFEGIKDLKAGKLRLIGDPVTRYQEDPVRMLRSIRFMAKLDMFLEKPSEQPIRELAPLLKNIPPARLFDESLKLLQAGQGVKTYRLLRQYGLFEQLFPALSAYFTEKEDSFAERMIVTALTSTDERVADKLRINPAFLFAAFFWYPLREKVEILKNEGGLNNHDAYALAGNEVLDLFCRALAAPRRHTAVIRDIWFLQLQLLKRTGSAPMRTMEHPKFRAGFDLLAMRAEIEGGETIELAKWWHEYQFSNGEQREQLIQEQQRLHPKPKKKYYRPRRRKTTCSAE

SEQ ID NO: 58066 - protein, 160 aa, Haemophilus influenzae
MITAYIALGSNLNTPVEQLHAALKAISQLSNTHLVTTSSFYKSKPLGPQDQPDYVNAVAKIETELSPLKLLDELQRIENEQGRVRLRRWGERTLDLDILLYGNEIIQNERLTIPHYDMHNREFVIVPLFEIASDLVLPNSQIITELVKQFADHKMIKLNP

SEQ ID NO: 58067 - protein, 432 aa, Haemophilus influenzae
MKTKILFFLFFSTFSFSIFAAPITIAIDPGHGGKDPGAISRNLGIYEKNVTLSIAKELKALLDKDPHFRGVLTRKSDYYISVPERSEIARKFKANYLISIHADSSKSPDRRGASVWVLSNRRANDEMGQWLEDDEKRSELLGGAGKVLSHNNDKYLDQTVLDLQFGHSQRTGYVLGEHILHHFAKVTTLSRSTPQHASLGVLRSPDIPSVLVETGFLSNSEEEKKLNSQTYRRRIAYMIYEGLVAFHSGKTNTLVKDNLVQNIKQNDIKKSGKNNRTSEQNINEDNIKDSGIRHIVKKGESLGSLSNKYHVKVSDIIKLNQLKRKTLWLNESIKIPDNVEIKNKSLTIKENDFHKKQNSLVNNTNKDLKKEKNTQTNNQKNIIPLYHKVTKNQTLYAISREYNIPVNILLSLNPHLKNGKVITGQKIKLREK

SEQ ID NO: 58068 - protein, 629 aa, Haemophilus influenzae
MPIKILSPQLANQIAAGEVVERPASVVKELVENSLDAGANKIQIDIENGGANLIRIRDNGCGIPKEELSLALARHATSKIADLDDLEAILSLGFRGEALASISSVSRLTLTSRTEEQTEAWQVYAQGRDMETTIKPASHPVGTTVEVANLFFNTPARRKFLRTDKTEFSHIDEVIRRIALTKFNTAFTLTHNGKIIRQYRPAEAINQQLKRVAAICGDDFVKNALRIEWKHDDLHLSGWVATPNFSRTQNDLSYCYINGRMVRDKVISHAIRQAYAQYLPTDAYPAFVLFIDLNPHDVDVNVHPTKHEVRFHQQRLIHDFIYEGISHALNNQEQINWHTDQSAVENHEENTVREPQPNYSIRPNRATAGQNSFAPQYHEKPQQNQPHFSNTPMFPNHVSTGYRDYRSDAPSKTEQRLYAELLRTLPPTAQKDISDTAQQNISDTAKIISTEIIECSSHLRALSLIENRALLLQQNQDFFLLSLEKLQRLQWQLALKQIQIEQQALLIPIVFRLTESQFQAWQQYSDDFKKIGFEFIENQAQLRLTLNKVPSALRTQNLQKCVMAMLTRDENSSSFLTALCAQLECKTFNALADALNLLSETERLLTQTNRTAFTQLLKPVNWQPLLDEI

SEQ ID NO: 58069 - protein, 261 aa, Haemophilus influenzae
MHKNLFHWLMERGYQVLVEKEVAITLELPFEHLATLEEIGHRAQLAIVIGGDGNMLGRARVLAKYDIPLIGINRGNLGFLTDIDPKNAYSQLEACLERGEFFVEERFLLEAKIERASEIVSTSNAVNEAVIHPAKIAHMIDFHVYINDKFAFSQRSDGLIVSTPTGSTAYSLSAGGPILTPNLNAIALVPMFPHTLTSRPLVVDGDSKISIRFAEHNTSQLEVGCDSQITLPFTPDDVVHIQKSEHKLRLLHLKIIIITMC

SEQ ID NO: 58070 - protein, 459 aa, Haemophilus influenzae
MLKIFNTLTREKEIFKPIHENKVGMYVCGVTVYDLCHIGHGRTFVCFDVIARYLRSLGYDLTYVRNITDVDDKIIKRALENKETCDQLVDRMVQEMYKDFDALNVLRPDFEPRATHHIPEIIEIVEKLIKRGHAYVADNGDVMFDVESFKEYGKLSRQDLEQLQAGARIEINEIKKNPMDFVLWKMSKENEPSWASPWGAGRPGWHIECSAMNCKQLGEYFDIHGGGSDLMFPHHENEIAQSCCAHGGQYVNYWIHSGMIMVDKEKMSKSLGNFFTIRDVLNHYNAEAVRYFLLTAHYRSQLNYSEENLNLAQGALERLYTALRGTDQSAVAFGGENFVATFREAMDDDFNTPNALSVLFEMAREINKLKTEDVEKANGLAARLRELGAILGLLQQEPEKFLQAGSNDDEVAKIEALIKQRNEARTAKDWSAADSARNELTAMGIVLEDGPNGTTWRKQ

SEQ ID NO: 58071 - protein, 381 aa, Haemophilus influenzae
MRSIFSLFLEDVMTQQYAIDTLLAQAGNRSDERTGAVSAPIFLSTAYGHCGIGESTGFDYTRTKNPTRTVLEETIAKLENGDRGFAFSSGMAAIQVLMTLFTAPDEWIVSSDVYGGTYRLLDFSYKNNNSVKPVYVNTASASAIEAAINPNTKAIFIETPSNPLMEECDVVEIAKLAKKHNLMLIVDNTFLTPVLSRPLDLGADVVIHSGTKYIAGHNDALVGLIVAKGQELCDRIAYIQNGAGAVLSPFDSWLTIRGMKTLSLRMKRHQENAQAIAEFLKAQPQVESVLYPNKGGMLSFRLQDEAWVNTFLKSIKLITFAESLGGTESFITYPATQTHMDIPESERVARGITNTLLRFSVGIEDVEDIKADLLQAFANLK

SEQ ID NO: 58072 - protein, 425 aa, Haemophilus influenzae
MNLYNIKHPEEQVTFSQAVRQGLGRDQGLFFPEVIPQLNNINELLELPLVERSQKILGALIDGELPQATLDAMVKNAFTFPAPLEKVEENIYALELFHGPTLAFKDFGGRFMAQALAAVRGDGKITILTATSGDTGAAVAHAFYGLENINVVILYPKGKISPLQEKLFCTLGGNIRTVAINADFDACQALVKQAFDDVELRQAIGLNSANSINISRLLAQVCYYFEAVAQLPKEKRDNVVVSVPSGNFGNLTAGLIAKTLGLPIKRFVASTNANDTVPRYLKSGNWDPKTTVATLSNAMDVSRPNNWPRVEELFKRNGWDLTDLGSGMLSDSETEDTLKAMQSKGYLCEPHGAIAYQVLKDQLKASETGIFLCTAHPAKFKESVERILGIQLPLPETLDKHNQLPLLSDEMDNDFAQLRAYLLKS

SEQ ID NO: 58073 - protein, 314 aa, Haemophilus influenzae
MLRIYAPASSANISVGFDTLGAAISPIDGSLLGDVVQIESISTGFELESAGYFVRKLPKEPQKNIVYQAYVLFSEQLKLRGANVKPLRLTLEKNMPIGSGLGSSACSIVAALVALNQFHNEPFSKMELLEMMGELEGRISGSIHYDNVAPCYLGGVQFMVQSLGNICQKLPFFDNWYWVLAYPGIEVSTAEARAILPKSYTRQNVIAHGRHLGGFVHACHTHQENLAAIMMKDVIAEPYRESLLPNFAEVKQATRDLGALATGISGSGPTIFSIAPDLQTAIKLSSYLESHYLQNNEGFVHVCKVDNEGTREIK

SEQ ID NO: 58074 - protein, 815 aa, Haemophilus influenzae
MRVLKFGGTSLANPERFSQAAKLIEQAHLEEQAAGVLSAPAKITNHLVALSEKAALNQSTDTHFNEAIEIFYNIINGLHTENNQFDLNGTKALIDAEFVQIKGLLEEIRQAGKVEDAVKATIDCRGEKLSIAMMKAWFEARGYSVHIVDPVKQLLAKGGYLESSVEIEESTKRVDAANIAKDKVVLMAGFTAGNEKGELVLLGRNGSDYSAACLAACLGASVCEIWTDVDGVYTCDPRLVPDARLLPTLSYREAMELSYFGAKVIHPRTIGPLLPQNIPCVIKNTGNPSAPGSIIDGNVKSESLQVKGITNLDNLAMFNVSGPGMQGMVGMASRVFSAMSGAGISVILITQSSSEYSISFCVPVKSAEVAKTVLETEFANELNEHQLEPIEVIKDLSIISVVGDGMKQAKGIAARFFSALAQANISIVAIAQGSSERSISAVVPQNKAIEAVKATHQALFNNKKVVDMFLVGVGGVGGELIEQVKRQKEYLAKKNVEIRVCAIANSNRMLLDENGLNLEDWKNDLENATQPSDFDVLLSFIKLHHVVNPVFVDCTSAESVAGLYARALKEGFHVVTPNKKANTRELVYYNELRQNAQASQHKFLYETNVGAGLPVIENLQNLLAAGDELEYFEGILSGSLSFIFGKLEEGLSLSEVTALAREKGFTEPDPRDDLSGQDVARKLLILAREAGIELELSDVEVEGVLPKGFSDGKSADEFMAMLPQLDEEFKTRVATAKAEGKVLRYVGKISEGKCKVSIVAVDLNNPLYKVKDGENALAFYTRYYQPIPLLLRGYGAGNAVTAAGIFADILRTLQH

SEQ ID NO: 58075 - protein, 237 aa, Haemophilus influenzae
MNIQHNLNLIQQKIETACKEENRNQNTVKLLAVSKTKPISAILSAYQAGQTAFGENYVQEGVEKIQYFESQGINLEWHFIGPLQSNKTRLVAEHFDWMQTLDRAKIADRLNEQRPTNKAPLNVLIQINISDEESKSGIQPEEMLTLAKHIENLPHLCLRGLMAIPAPTDNIAEQENAFRKMLELFEQLKQVLPNQQIDTLSMGMTDDMPSAIKCGSTMVRIGTAIFGARNYSTSQNK

SEQ ID NO: 58076 - protein, 368 aa, Haemophilus influenzae
MQLDKYTAKKIVKRAMKIIHHSVNVMDHDGVIIASGNSTRLNQRHTGAVLALRENRVVEIDQALAQKWNFEAQPGINLPIHYLGKNIGVVGISGEPTQVKQYAELVKMTAELIVEQQALLEQESWHRRYKEEFILQLLHCNLNWKEMEQQAKFFSFDLNKSRVVVLIKLLNPALDNLQNLINYLEQSEFAQDVAILSLDQVVVLKTWQNSTVLSAQMKTLLPADYSKQDYKIAVGACLNLPLFEQLPLSFQSAQSTLSYGLKHHPRKGIYVFDEHRLPVLLAGLSHSWQGNELIKPLSPLFSEENAILYKTLQQYFLSNCDLYLTAEKLFVHPNTLRYRLNKIEQITGLFFNKIDDKLTLYLGTLLEH

SEQ ID NO: 58077 - protein, 631 aa, Haemophilus influenzae
MKEKIMSQNQETRGFQSEVKQLLQLMIHSLYSNKEIFLRELISNASDAADKLRFKALSNPALYEGDGDLRVRVSFDADKGTITISDNGIGMTREQVIDHLGTIAKSGTKEFLTALGQDQAKNSQLIGQFGVGFYSAFIVADKVTVKTRAAGEEADKAVLWESAGEGEYSVADIEKKSRGTDVILHLREDEKEFLNEWRLREIIGKYSDHIGLPVEMLTKEYDDEGKECGEKWEKINKSDALWTRSKNDVSDEEYKAFYKHLSHDFVDPVTWAHNKVEGNQAYTSLLYVPAKAPWDLFNREHKHGLKLYVQRVFIMDDAEQFIPNYLRFMRGLIDSNDLPLNVSREILQDNKITAALRKALTKRSLQMLEKLAKDDAEKYLQFWKEFGLVLKEGPAEDFANKETVAKLLRFASTHNDGSEQTVSLEDYILRMKEGQKAIYYITADSYVAAKNSPHLELFNKKGIEVLLLSDRIDEWMLSYLTEFDGKQLQSITKADLDLGDLADKESETQKQQDEAFGSFIERVKNLLGERVKTVRLTHNLTDTPAVVSTDNDQMTTQMAKLFAAAGQPVPEVKYTFELNPEHHLVKKVADIADETEFADWVELLLEQAMLAERGSLENPAAFIKRINKLLG

SEQ ID NO: 58078 - protein, 462 aa, Haemophilus influenzae
MFENLSDRLSKTLRNITGKGRLTEDNIKETLREVRMALLEADVALPVVREFIAKVKESALGEEVNKSLTPGQEFLKIVQRELEKAMGEANESLNLATQPPAVILMAGLQGAGKTTSVGKLAKFLRERHKKKVLVVSADVYRPAAIKQLETLAQSVGVDFFPSDVKQNPVDIAKSALADAKLKFYDVLIVDTAGRLHVDTEMMDEIKQVHAALNPIETLFTVDAMTGQDAANTAKAFNEALPLTGVILTKVDGDARGGAALSIRQITGKPIKFLGVGEKTEALEPFHPDRVASRILGMGDVLSLIEDLERSVDREKAEKMAQKFKKGDDFTLDDFREQLIEMKKMGGMMSMLEKLPGAKNLSEHVKNQVDDKMFVKMEAIINSMTLKERANPDIIKGSRRRRIALGSGTQVQDVNKLLKQFDEMQRMMKKMRKGGMAKMMRGMQGLMGGGLGGLGGLGGMFKR

SEQ ID NO: 58079 - protein, 429 aa, Haemophilus influenzae
MIDPNLLRNNLAEVAEKLKVKRNFMLDTEKLTALEDQRKNLQVTTENLQAERNARSKAIGAAKARGEDIAPLLAEMDDMGNQLTEAKAQLDAVLAEINQIALSIPNLPADEVPLGKDDTENKEILRWGTPRTFDFEVKDHITLGEEANGLDFAAGAKLAGARFAVMKGQIAKMHRALAQFMLDLHTEQHGYLETYVPYLVNHATLYGTGQLPKFGEDLFHTLALEGEQPYALIPTAEVPVTNLVRDVIIDEAELPIKMTAHTPCFRSEAGSYGRDTRGLIRMHQFDKVEMVQIVDPDKSMEALEELTGHAEKVLQLLNLPYRKVLLCTGDMGFGSCKTYDLEVWVPAQNTYREISSCSNMWDFQARRMQARCKAKGDKKTRLVHTLNGSGLAVGRTLVAVLENYQNADGSITVPEELRPYMGGLDVIGK

SEQ ID NO: 58080 - protein, 185 aa, Haemophilus influenzae
MKFNIPIFLTIFRVILIPFFVIAFYLPIESSPFITTLIFFIAGVTDWLDGYLARKWKQTTRFGAFLDPVADKVMVVAALVLIVEHQHTFWITIPAIIMISREIIISALREWMAELGERSKIAVSWWGKWKTTAQMLALGGLLWRYNNYMEIAAIILLYIAAILTIWSMIQYLQVAKGSLLDNIQL

SEQ ID NO: 58081 - protein, 632 aa, Haemophilus influenzae
MGWASFNLTWAWFLPVIVYGALPLLRLPQQTQAKTELFLTALSVLFMFISATVYKISMGYSVIVLLVGYTALATLSLAKLKVMQGDKFIIASLLCIILLIFFFIVYPTLAIFVSMFYDGDTFAPQQVMRILTQSYIVRVITNSLFLSGFVGIVSTVFGLAFALYTTRIARRTAFIGKIFSILPIVTPPFVVGLGVTLMLGRSGYVTEFLSTNFGFSSHNWLYGFNGIAIAQILAFAPISFMILDGALKSVHPSIEEASYTLRANRYQTFYQIIFPLLRPALANSFLIVFIQSLADFSNPLVLGGSFDVIATQIYFYIAGSQLDYASASTLGSMLLIFSLAIFIIQYIWIGNRSYVTVSGKSYRGDVQELPNGLKYTIIGMLGFWVIFNMALYGSIFYGSFTVNWGVNYTLTLKNYAMLFGQGLSDGAWPSLINTLIYAGIAAPLTAFFGLLIAYIVVRKDFQGKKSLEFLTMLCFAVPGTVAGVSYILAFNNAPLYITGTGIIVIISMVMRDLPIGMRAAIAGLGQLDKSLDEASLSLKGSSWKTLCFIVLPLLKPALLSALVTSFVRAMTTVSAIIFLVTADTRVYRIYFKSCGRRRIRHCDCIRFYFNCCDDGNYFVFRLDCRRYAYFPF

SEQ ID NO: 58082 - protein, 391 aa, Haemophilus influenzae
MKKFALIVGIVALAIFSFLYIQLYRVQSAINEQLAQQNIAVQSINLSLFSPALSLENIKTTQFSAQKIEAKFSFLPLLYGNAALHSLNIQQLKLTQNTQNPANVSIEISPFSLKQLLSKKVILNGENHIRIEFNKPIYGKTKTFHFSFHKANLDFSTSESTPLQFVDASLNNQPIGYIETHTAHQQIVTYIKPQCDNDCLAVLKYQQIDNQSAVNFSGKYFPVQRLFALLNLPEMLSGHADFDLDFSFSSSSLIQGKLNFLAQNGEILGVNLLDMVAQYFPINYNNDLLQNKELNTRFEQFYLQLFLQQNQLIAEKIELKTPALLGQGKGIIDLNRMECNVDINLNSTDQRYQNLTLPINFFGNCNSPQYKINFTKKFRHQLIDAIKEKLR

SEQ ID NO: 58083 - protein, 396 aa, Haemophilus influenzae
MSLYLKAEKIQSWRVLIMACAGFIFNTTEFVPVAMLSDIAQSFDMQTADTGLMMTVYAWTVLIMSLPAMLATGNMERKSLLIKLFIIFIVGHILSVIAWNFWILLLARMCIALAHSVFWSITASLVMRISPKHKKTQALGMLAIGTALATILGLPIGRIVGQLVGWRVTFGIIAVLALSIMFLIIRLLPNLPSKNAGSIASLPLLAKRPLLLWLYVTTAIVISAHFTAYTYIEPFMIDVGHLDPNFATAVLLVFGFSGIAASLLFNRLYRFAPTKFIVVSMSLLMFSLLLLLFSTKTIIAMFSLVFIWGIGISCIGLSLQMRVLKLAPDATDVATAIYSGIFNAGIGAGALFGNLATTYLGLNEIGYTGAALGLIGFIIFITTHLKYRHTFLLQNK

SEQ ID NO: 58084 - protein, 504 aa, Haemophilus influenzae
MATPVVALVGRPNVGKSTLFNRLTRTRDALVADFPGLTRDRKYGHAHIAGYDFIVIDTGGIDGTEEGVEEKMAEQSLLAIDEADIVLFLVDARAGLTAADIGIANYLRQRQNKITVVVANKTDGIDADSHCAEFYQLGLGEIEQIAASQGRGVTQLMEQVLAPFAEKMENADENDRTSEEEQDEWEQEFDFDSEEDTALIDDALDEELEEEQDKNIKIAIVGRPNVGKSTLTNRILGEDRVVVFDMPGTTRDSIYIPMERDGQQYTLIDTAGVRKRGKVHLAVEKFSVIKTLQAIQDANVVLLTIDARENISDQDLSLLGFILNAGRSLVIVVNKWDGLDQDVKDRVKSELDRRLDFIDFARVHFISALHGSGVGNLFDSIKEAYACATQKMTTSLLTRILQMATDEHQPPMIGGRRIKLKYAHPGGYNPPIIVVHGNQMDKLPDSYKRYLSNYYRKSLKIIGSPIRLLFQEGSNPFAGRKNKLTPNQLRKRKRLMKFIKKAKR

SEQ ID NO: 58085 - protein, 381 aa, Haemophilus influenzae
MKYALINCVIYTKYDVLRDFAVIINGEIIEAVIPQAELETGIKTIDLQGNNLTAGFIDLQLNGCGGVMFNDQTSVETLEIMQETNLKSGCTSFLPTFITAPDENIKSAVKIMREYLNKHKNQALGLHIEGPYLSIEKKGVHRPEYIREITPEMKDFLCENGDVITKMTIAAENPTINYTPDFVKAGIIVSVGHSNATYEVAKAAFHKGATFATHLHNAMSPISSGREMGVVGAVLDSDVYTGIIVDGVHINYGNVRIDKKIKGDKLCIVTDSIAAAGAPPELESFTFVGKTIYIKEGRCYDANDTIAGASITMMESIKNAVEYVEIPLAEAIRMSNLYPARAIGIDDRLGSVEKGKIANLAVFTPNYQVIGTVVNGKWKEN

SEQ ID NO: 58086 - protein, 270 aa, Haemophilus influenzae
MRFIPLQTEQQVSCWAAQHIINRINDFKPTAERPFVLGLPTGGTPLKTYQELIRLYQAGKVSFKHVVTFNMDEYVALPEEHPESYHSFMYNNFFNHIDILPENINILNGNTDDHNAECRRYEEKIKSYGKIHLFMGGVGVDGHIAFNEPASSLSSRTRIKTLTQDTLIANSRFFNNDVTQVPKYALTIGVGTLLDAEEVMILATGHQKALAVQAAVEGSINHLWTVSALQMHRHFLLVCDEAAQQELKVKTVKYFTELEGAVAGTDYQDK

SEQ ID NO: 58087 - protein, 329 aa, Haemophilus influenzae
MMKLTKLFLATAISLGVSSAVLAADYDLKFGMNAGTSSNEYKAAEMFAKEVKEKSQGKIEISLYPSSQLGDDRAMLKQLKDGSLDFTFAESARFQLFYPEAAVFALPYVISNYNVAQKALFDTEFGKDLIKKMDKDLGVTLLSQAYNGTRQTTSNRAINSIADMKGLKLRVPNAATNLAYAKYVGASPTPMAFSEVYLALQTNAVDGQENPLAAVQAQKFYEVQKFLAMTNHILNDQLYLVSNETYKELPEDLQKVVKDAAENAAKYHTKLFVDGEKDLVTFFEKQGVKITHPDLVPFKESMKPYYAEFVKQTGQKGESALKQIEAINP

SEQ ID NO: 58088 - protein, 410 aa, Haemophilus influenzae
MENEMSQNGSDRDPWSKPGQSNDQQPGNSSNNNGWNNNQNRGNQEQSPPDIEEIFNNLLKKLGGGNKKSGQNNGSSQGNTPFHFGKVIPLAVAIGAIIWGVNGFYTIKEAERGVVLRFGELHSIVQPGLNWKPTFVDKVLPVNVEQVKELRTQGAMLTQDENMVKVEMTVQYRVQDPAKYLFSVTNADDSLNQATDSALRYVIGHMSMNDILTTGRSVVRENTWKALNEIIKSYDMGLEVIDVNFQSARPPEEVKDAFDDAIKAQEDEQRFIREAEAYAREKEPIARGDAQRILEEATAYKDRIVLDAKGEVERLQRLLPEFKAAPDLLRERLYIQTMEKVMANTPKVMLDGNNGNNLTVLPLEQIMGKKSVTSAPSAVNSSPAFTAPERQNSYQPQPTTVAPIRQGRFN

SEQ ID NO: 58089 - protein, 76 aa, Haemophilus influenzae
MSIEERVKKIIVEQLGVKEEDVKPEASFVEDLGADSLDTVELVMALEEEFDIEIPDEEAEKITTVQSAIDYVQNNQ

SEQ ID NO: 58090 - protein, 242 aa, Haemophilus influenzae
MQGKIALVTGSTRGIGRAIAEELSSKGAFVIGTATSEKGAEAISAYLGDKGKGLVLNVTDKESIETLLEQIKNDFGDIDILVNNAGITRDNLLMRMKDEEWFDIMQTNLTSVYHLSKAMLRSMMKKRFGRIINIGSVVGSTGNPGQTNYCAAKAGVVGFSKSLAKEVAARGITVNVVAPGFIATDMTEVLTDEQKAGILSNVPAGRLGEAKDIAKAVAFLASDDAGYITGTTLHVNGGLYLS

SEQ ID NO: 58091 - protein, 312 aa, Haemophilus influenzae
MKKFAMVFPGQGSQTVGMLADLATEYPIVIETFKQASDALGYDLWYLVQQGPAEELNKTWQTQPALLAASVAIYRVWKEKFPQLKPEVMAGHSLGEYSALVCAGVLDFQDAIKLVELRGKLMQQAVPEGTGAMYAIIGLDNEAIINACKQAEEGEVVSAVNFNSPGQVVIAGAKAAVERAAALCKEAGAKRALPLAVSVPSHCALMKPAAEQLAVTLENIQINTPTISVLNNVDVKAETEGTEIRTALVRQLYSPVRWTETVEKMAQDGVLVLAEVGPGKVLNGLTKRIVGDLQAISVNDVASFNAVEEFLV

SEQ ID NO: 58092 - protein, 316 aa, Haemophilus influenzae
MNSRILSTGSYLPSHIRTNADLEKMVDTSDEWIVTRSGIRERRIAAEDETVATMGFEAAKNAIEAAQINPQDIELIIVATTSHSHAYPSAACQVQGLLNIDDAISFDLAAACTGFVYALSVADQFIRAGKVKKALVIGSDLNSRKLDETDRSTVVLFGDGAGAVILEASEQEGIISTHLHASADKNNALVLAQPERGIEKSGYIEMQGNETFKLAVRELSNVVEETLLANNLDKKDLDWLVPHQANLRIITATAKKLEMDMSQVVVTLDKYANNSAATVPVALDEAIRDGRIQRGQLLLLEAFGGGWTWGSALVRF

SEQ ID NO: 58093 - protein, 456 aa, Haemophilus influenzae
MTKHYDYIAIGGGSGGIASLNRAASYGKKCAIIEAKHLGGTCVNVGCVPKKVMFYGAHIAEAINNYAPDYGFDVEVKKFDFSKLIESRQAYISRIHTSYNNVLAKNNIDVINGFGKFVDAHTIEVTLADGTKEQVTADHILIATGGRPYRPNIKGQEYGIDSDGFFALTELPKRAAVIGAGYIAVELSGVLNSLGVETHLLVRRHAPMRNQDPLIVETLVEVLAQDGIQLHTNSTPSEIVKNADGSLTVRCDGQSDVTVDCVIWAAGRVPTTDKIGLENAGVETNEHGYVKVDKYQNTNVKGIYAVGDIIENGIELTPVAVAAGRRLSERLFNNKPTEYLDYSLVPTVVFSHPPIGTVGLTEPQAIEQYGAENVKVYKSSFTAMYTAVTQHRQPCKMKLVCVGKDEKVVGLHGIGFGVDEMIQGFAVAIKMGATKADFDNTVAIHPTGSEEFVTMR

SEQ ID NO: 58094 - protein, 418 aa, Haemophilus influenzae
MTALYVQNKINGKIILPFSHSMTNVLRLNRSYGRTMLISNTYNQHFPQLTQEQLARNATKKVICGMSGGVDSSVSAFILQQQGYQVEGLFMKNWEEDDDTDYCTAAADLADAQAVCDKLGIKLHKINFAAEYWDNVFEHFLTEYKAGRTPNPDILCNKEIKFKAFLEYAAEDLGADYIATGHYVRRAGDNENAKLLRGLDPNKDQSYFLYTLSHKQVGQSLFPVGEIEKPIVRAIAEDLGLITAKKKDSTGICFIGERKFKDFLARYLPAQPGNIRTVDDEIIGRHDGLMYHTLGQRKGLGIGGLKNAGDEAWYVVDKDVENNELIVAQGHDHPRLFSKGLIASQLHWVDREPIRESLRCTVKTRYRQQDIPCVIEPIDDETIRVIFDEPQSAVTPGQSAVFYLGEVCLGGGIIAERI

SEQ ID NO: 58095 - protein, 378 aa, Haemophilus influenzae
MEIKQINSTIKSRAAVAFAPNQPLQIVEIDVEMPRKGEVLIRNTHTGVCHTDAFTLSGSDPEGVFPVVLGHEGAGVVVAVGEGVLSVKPGDHVIPLYTAECGECEFCRSGKTNLCVSVRDTQGKGLMPDCTTRFSYQGQPIYHYMGCSTFSEYSVVAEVSLAKINPEANHEQVCLLGCGVTTGIGAVHNTAKVQEGDSVAVFGLGAIGLAVVQGARQAKAGRIIAIDTNPAKFELAKQFGATDCLNPNDYDKPIKDVLLDINKWGIDHTFECIGNVNVMRQALESAHRGWGQSIIIGVAGAGQEISTRPFQLVTGRVWKGSAFGGVKGRSELPQMVEDSMKGDIQLEPFVTHTMPLDKINEAFELMHEGKSIRTVIHY

SEQ ID NO: 58096 - protein, 449 aa, Haemophilus influenzae
MSKVASLDAFLTKVAQRDGYQPEFLQAVREVFTSIWPFLEANPKYRSEALLERLVEPERAFQFRVAWTDDKGQVQVNRAFRVQFNSAIGPFKGGMRFHPSVNLSILKFLGFEQIFKNALTTLPMGGAKGGSDFDPKGKSDAEVMRFCQALMAELYRHVGADTDVPAGDIGVGGREVGYLAGYMKKLSNQSACVFTGRGLSFGGSLIRPEATGYGLIYFAQAMLAEKGDSFAGKVVSVSGSGNVAQYAIEKALSLGAKVVTCSDSSGYVYDPNGFTTEKLAALFDIKNTKRGRVKDYAEQFGLQYFEGKRPWEVQVDIALPCATQNELELSDAQRLIKNGVKLVAEGANMPTTIEATEALLAADVLFGPGKAANAGGVATSGLEMAQSSQRLYWTAEEVDAQLHRIMLDIHANCKKYGTIEGQENINYVVGANVAGFVKVADAMLAQGVY

SEQ ID NO: 58097 - protein, 287 aa, Haemophilus influenzae
MIFIFISLFAKIFFNYNDFFTNSHVKIMAKSLLNYQFHQVKQTINTPVLIFIHGLFGDMDNLGVIARAFSEHYSILRIDLRNHGHSFHSEKMNYQLMAEDVIAVIRHLNLSKVILIGHSMGGKTAMKITALCPELVEKLIVIDMSPMPYEGFGHKDVFNGLFAVKNAKPENRQQAKPILKQEINDEDVVQFMLKSFDVNSADCFRFNLTALFNNYANIMDWEKVRVFTPTLFIKGGNSSYIKIENSEKILEQFPNATAFTINGSGHWVHAEKPDFVIRAIKRFLNKN

SEQ ID NO: 58098 - protein, 1111 aa, Haemophilus influenzae
MIRKLMKIPPFFTALFASAMFTLSVSQGVLAANSTNVLPTEQSLKADLANAQKMSEGEAKNRLLAELQTSIDLLQQIQAQQKINDALQTTLSHSESEIRKNNAEIQALKKQQETATSTDDNAQSQDYLQNSLTKLNDQLQDTQNALSTANAQLAGQSSISERAQAALTENVVRTQQINQQLANNDIGSTLRKQYQIDLQLIDLKNSYNQNLLKNNDQLSLLYQSRYNLLNLRLQVQQQNIIAIQEVINQKNLQQSQNQVEQAQQQQKTVQNDYIQKELDRNAQLGQYLLQQTEKANSLTQDELRMRNILDSLTQTQRTIDEQISALQGTLVLSRIIQQQKQKLPTNLNIQGLSKQIADLRVHIFDITQKRNELYDLDNYINKVESEDGKQFTEAERTQVKTLLTERRKMTSDLIKSLNNQLNLAISLELTQLQITQISDQIQSKLEQQSFWVKSNNPINLDWVKMLPRALIEQFNGMLKKLGFPTNYDNLPYLLMYFLGLFIVGGAIFKFKNRIKQQLNKINREIHRLDTDSQWSTPLALLLTAFLTLSSTLWFLAVCQMIGFFFFKNPEEFWHWSFSMAGYWWFFTFWISLFRPNGIFVNHFESSKENAQRFRGVIQRIIVVVVLLLNTSVFSNVTDAGLANDVLGQINTIAALIFCAAIIAPRFNRVLRSYEPETNKHHWLIRIVQIGFRLIPVGLIVLIVLGYYYTALNLIEHFIHSYIAWCVWWLVRNTIYRGITVSSRRLAHRRLAEKRRQKALENNYENISSDDVVAVGEPEESLALNDVRSQLLRFVDLFIWTALLGIFYYVWSDLVTVVSYLREITLWQQTTTTDAGTVMESITLFNLLVALVIVGITYVLVRNISGILEVLIFSRVNLSQGTPYTITTLLTYIFIAIGGAWAFATLGMSWSKLQWLFAALSVGLGFGMQEIFANFVSGIILLFERPIRVGDVVTINEVSGTVAKIRIRAITLIDFDRKEVIVPNKSFVTGQVTNWALSNTMTRLVISVGVAYGSDLTLVRQLLLQAADEQPTILRDPKPSAYFLTFGASTLDHELRVYVEQVGDRTSTTDALNRRINELFAEHNIDIAFNQLDVFIKNNDTGEEIPFVDVKK

SEQ ID NO: 58099 - protein, 357 aa, Haemophilus influenzae
MAGNTIGQLFRVTTFGESHGIALGCIVDGVPPNLELSEKDIQPDLDRRKPGTSRYTTPRREDDEVQILSGVFEGKTTGTSIGMIIKNGDQRSQDYGDIKDRFRPGHADFTYQQKYGIRDYRGGGRSSARETAMRVAAGAIAKKYLREHFGIEVRGFLSQIGNIKIAPQKVGQIDWEKVNSNPFFCPDESAVEKFDELIRELKKEGDSIGAKLTVIAENVPVGLGEPVFDRLDADLAHALMGINAVKGVEIGDGFAVVEQRGSEHRDEMTPNGFESNHAGGILGGISSGQPIIATIALKPTSSITIPGRSINLNGEAVEVVTKGRHDPCVGIRAVPIAEAMVAIVLLDHLLRFKAQCK

SEQ ID NO: 58100 - protein, 116 aa, Haemophilus influenzae
MSNIIKQLEQEQLKQNVPSFRPGDTLEVKVWVVEGSKRRLQAFEGVVIAIRNRGLHSAFTLRKVSNGVGVERVFQTHSPAVDSIAVKRKGAVRKAKLYYLRERSGKSARIKERLGA

SEQ ID NO: 58101 - protein, 246 aa, Haemophilus influenzae
MWIGVISLFPEMFKAITEFGVTGRAVKHNLLKVECWNPRDFTFDKHKTVDDRPYGGGPGMLMMVQPLRDAIHTAKAAAGEGAKVIYLSPQGRKLDQGGVTELAQNQKLILVCGRYEGIDERLIQTEIDEEWSIGDYVLTGGELPAMTLIDAVARFIPGVLGKQASAEEDSFADGLLDCPHYTRPEVLEGLTVPPVLMSGHHEEIRKWRLKQSLQRTWLRRPELLEGLALTDEQRKLLKEAQAEHNS

SEQ ID NO: 58102 - protein, 178 aa, Haemophilus influenzae
MKNMEQQHIEVVGKLGSTYGIRGWLRIYSSTEQAESIFDYQPWFLKIKGEWQSIELENWRYHNHEIIVKLKGVDDREAAQILANVEIGVDLSVFPELEEGDYYWHDLIGCTVVNLEGYTMGTVTEMMETGSNDVLVVKANTKDAFGKQERLIPFLYEQVVKRVDLTTKTIEVDWDAGF

SEQ ID NO: 58103 - protein, 82 aa, Haemophilus influenzae
MVTIRLSRGGAKKRPFYQIVVADSRSPRDGRFIERVGFFNPIAQGNAERLRINLERVNHWVAQGASLSDRVASLVKEAQKAA

SEQ ID NO: 58104 - protein, 603 aa, Haemophilus influenzae
MLLSKKSASFALSAFAMLFTSVALAKEAPQAHKAVELSILHINDHHSYLEPHETRINLNGQQTKVDIGGFSAVNAKLNKLRKKYKNPLVLHAGDAITGTLYFTLFGGSADAAVMNAGNFHYFTLGNHEFDAGNEGLLKLLEPLKIPVLSANVIPDKNSILYNKWKPYDIFTVDGEKIAIIGLDTVNKTVNSSSPGKDVKFYDEIATAQIMANALKQQGINKIILLSHAGSEKNIEIAQKVNDIDVIVTGDSHYLYGNDELRSLKLPVIYEYPLEFKNPNGDPVFVMEGWAYSAVVGDLGVKFSPEGIASITRKIPHVLMSSHKLQVKNAEGKWTELTGDERKKALDTLKSMKSISLDDHDAKTDMLISKYKSEKDRLAQEIVGVITGSAMPGGSANRIPNKAGSNPEGSIATRFIAETMYNELKTVDLTIQNAGGVRADILPGNVTFNDAYTFLPFGNTLYTYKMEGSLVKQVLEDAMQFALVDGSTGAFPYGAGIRYEANETPNAEGKRLVSVEVLNKQTQQWEPIDDNKRYLVGTNAYVAGGKDGYKTFGKLFNDPKYEGVDTYLPDAESFIKFMKKHPHFEAYTSSNVKFNASTDALPKK

SEQ ID NO: 58105 - protein, 241 aa, Haemophilus influenzae
MFKRLSLYTLLLCLVPFFIWGISYQWHGNSQLTQADYWLYLLTETGSVPYALITCVLFTLLFAFLFKNPKQWILGVIVMGISVIATQAAKTGAKALFEEPRPFTVYLAEQTHSTPENFYKNDRTLRAEIAKNFYSMDAITPAWLVHHYENETGYSFPSGHTIFAATWLMLAVGFTQLLGNRSFKAKLLVVGIAVWGLLMLISRVRLGMHYPIDLLVATLLAWLINSIIFAFLKKKAIFVMK

SEQ ID NO: 58106 - protein, 224 aa, Haemophilus influenzae
MTTNKDHFMAKIQLVAQANLPTEYGIFKMVGFEFPDTKKEHVALVMGDISNADEPVLARIHSECLTGDALHSLKCDCGFQLATALKQIQEEGRGVLIYHREEGRGIGLINKIRAYSLQDKGMDTIEANLALGFKADERNFEVCADMFELLGVKKVRLMTNNPEKVETMKKAGINVVERVPLNVGENRYNTKYLDTKAKKMGHYIVHNNDEQHLMTCPHCQEEII

SEQ ID NO: 58107 - protein, 523 aa, Haemophilus influenzae
MTNIHYHKILILDFGSQYTQLIARRVREIGVYCELWAWDVTEQQIREFAPTGIILSGSPESTTEENSPRAPEYVFNAGVPVLGICYGMQTMAMQLGGLTETSDHREFGYASVSLENSTALFANLNDNLTASEPKLDVWMSHGDKVTRLPENFKVTGTTLTCPIAAMSDESRRFYGVQFHPEVTHTKKGLELLTNFVVNICGCETKWTAENIIEDAVARIKEQVGDDEVILGLSGGVDSSVVALLLHRAIGKNLHCVFVDNGLLRLHEGDQVMEMFGDKFGLNITRVDAESRFLGELAGVSDPEAKRKIIGKVFVDVFDDESKKLTNVKWLAQGTIYPDVIESAASKTGKAHVIKSHHNVGGLPDYMKLGLVEPLRELFKDEVRKIGLALGLPAEMINRHPFPGPGLGVRVLGEVKKEYCDLLRRADAIFIEELRNSGWYEKTSQAFSVFLPVKSVGVMGDGRKYDWVISLRAVETIDFMTAHWAHLPYDLLGKVSNRIINEVNGISRVVYDISGKPPATIEWE

SEQ ID NO: 58108 - protein, 436 aa, Haemophilus influenzae
MFSRKDIIVLGMMIFALFLGAGNIIFPPMEGFSSGQHWTSASLGFVLTGVLMPFITLVVVAILGRGEELTKDLPKWAGTGFLVILYLTIGSTFAMPRITNVAYEMAWLPLGLTENNANVRFVFSLIFNLIAMGFMISPNTIISSVGKFMTPALLVLLIAVAITVFISPLSEIQAPSNAYENSHSLLIGLTSGYQTMDVLAAIAFGGIVARALSAKNVTKTKDIVKYTISAGFVSVILLAGLYFSLFYLGATSAAVAEGATNGGQIFSRYVNVLFGSAGTWIMAGIIVLASLTTLVGVTSASADYFSKFSVRFSYPFWAALFTAMTITVSQYGLTDLLRITIPALLLIYPVAIVLVLLQFLRKKLPSIKFTYNSTLLVTVCFSLCDSLNNVKMLPESINSLLKHFPLSSEGMAWLVPTLVMLVASIFIGKALHKTHS

SEQ ID NO: 58109 - protein, 709 aa, Haemophilus influenzae
  MISC_FEATURE (287)..(287): X=any amino acid
MNPIVKQFKYGQHTVTLETGAIARQATAAVMASMDDTTVFVTVVAKKDVKEGQDFFPLTVNYQERTYAAGKIPGGFFKREGRPSEGETLIARLIDRPIRPLFPEGFFNEIQVVATVVSVNPQISPDLVAMIGASAALTLSGVPFNGPIGAARVGFIDNQFVLNPTMAEQKQSRLDLVVAGTDKAVLMVESEADILTEEQMLAAVVFGHQQQQVVVEAIKEFAKEAGKPRWDWVAPQPNTDLINKVKAIAEARLGDAYRITEKQLRYEQIDAIKADVIAQITAEDEEXSEGKIVDIFTALESQIVRGRIIAGEPRIDGRTVDTVRALDICTGVLPRTHGSAIFTRGETQALAVATLGTERDAQIIDELTGERQDHFLFHYNFPPYSVGETGMIGSPKRREIGHGRLAKRGVAAVMPSLAEFPYVVRVVSEITESNGSSSMASVCGASLALMDAGVPIKAAVAGIAMGLVKEEEKFVVLSDILGDEDHLGDMDFKVAGTREGVTALQMDIKIEGITPEIMQIALNQAKSARMHILGVMEQAIPAPRADISDYAPRIYTMKIDPKKIKDVIGKGGATIRSLTEETGTSIDIDDDGTVKIAAVDSNAAKNVMGRIEEIVAEVEAGVIYKGKVTRLADFGAFVAIVGNKEGLVHISQIAEERVEKVSDYLQVGQEVNVKVVEIDRQGRIRLTMKDLAPKQETEINQEDSVEEQE

SEQ ID NO: 58110 - protein, 613 aa, Haemophilus influenzae
MTDKITFNDLGLPEFILKAVSDLGFETPSPIQQSCIPHLLNGNDVLGMAQTGSGKTAAFALPLLAQIDPSEKHPQMLVMAPTRELAIQVADACELFVKYAQGTRIVTLYGGQRYDIQLRALKQGAQVVVGTPGRILDHIRRGTLNLSELRFIVLDEADEMLRMGFIDDVETVMAELPENHQTALFSATMPEPIRRITKRFMNDPQEVKIKVNNENAPDIDQSCWYVHGVRKNEALLRFLEVEDFDAAIIFARTKTGTLDITELLEKNGFRSAALNGDMTQQLREQTLDRLRNGSLDIVVATDVAARGIDIERISLVVNYDIPLDAESYVHRIGRTGRAGRSGRALLFVEPRERRLLRNIEHLMKKGINEVELPNHLVLQECRRKKFVAKITKQLEHHDLEQYRSLLEDLFTADQDQENIAAAMLMLLQGKQKLILPPDPPMEKRRRERNDRGDRRENPRSAERRGERKGYGNPQPMDLYRIEVGRADGVEVRHIVGAIANEGDINSRYIGHIKLYDDYTTVELPQGMPKELLQQFAKTRVLNKQMQMSFLGAVKSDNSRGSDDFNGKRKGRGGDFRGERGRERGNDNRGNRKFNEKSNRTFSDKPRRDRRSSF

SEQ ID NO: 58111 - protein, 462 aa, Haemophilus influenzae
MVFPWQFLRHTEENHYTAIQARGSLYVGTINNQISYFINKDSERGFEYELAKAFADTLGVELEMKIFDNQEQLFDELDKHNIDLAAAHLLYHPKNAERFQIGPAYHSASWQLAYRKNENRPKNLGNVKKDIYISNNLALEETLKELQKQYPQLIWKRNQALTQEELLLQLAEGKIPYVIANSIDIAAIQQIKPELAIAFDITDEANVHWYLPNNPYRDLQTALLNFMNNAEETGLLDNLKEKYLGHISQFDYVDTRSYMNAIENTLPQFSPLFEKYKGELDWRLLAAVAYQESHWNPDATSPTGVRGIMMLTKNTAQHMKISDRTDPEQSIKAGSEYLHWLISQLPESIEKEERIWFALVAYNIGLGHLIDARRLTQNLGGNPDNWFDVKKNLPLLAEKRYYSQLKYGYARGYEAHQYVENIRRYMNSIVNYHRVQENQTTNDNANNESAVKNLEEIKENKD

SEQ ID NO: 58112 - protein, 382 aa, Haemophilus influenzae
MKYELDKTSGNARRGRLVFERPQGTFSVETPAFMPVGTYGTVKGMTPEEVRATGAEILLGNTFHLWLRPGQEVMRKHGDLHDFMQWHRPILTDSGGFQVFSLGKLRKITEEGVKFQNPINGERIFLSPEKSMEIQYDLGSDIVMIFDECTPYPATFDYAKKSMEMSLRWAKRSRDRFDELGNKNALFGIIQGGVFEELRKVSLEGLVNIGFDGYAVGGLAVGEPKEDMHRILEYICPQIPADKPRYLMGVGKPEDLVEGVRRGIDMFDCVMPTRNARNGHLFVTDGIVKIRNAKYRDDTSPLDPECDCYTCKNYTKAYLYHLDKCGEILGARLNTIHNLRYYQRLMAEIRQAIEDDRFDDFVVEFYARMGKPVPPLQLADKS

SEQ ID NO: 58113 - protein, 363 aa, Haemophilus influenzae
MRVSDFNFDLPDELIARYPKTDRVSCRLLQLNGENGEIFHRTFSDVLDLIDEGDLLIFNNTRVIPARMFGRKASGGKIEVLVERMLDEHRFLAHIRSSKSPKEGAELFLGEDKLGENNGIKAVMKARHGALFEVELSDKSTALLDVLQTIGHMPLPPYIDRPDEEADQECYQTVYSKVPGAVAAPTAGLHFDENLLEKLKAKGVNFEFVTLHVGAGTFQPVRVENIEDHVMHAEYVEVSQEVCNAIIATKKAGKRVIAVGTTSVRSIESAALSAEEFGNPDLIEPYFSDTSIFIYPGKKFRVVDCLITNFHLPESTLIMLVSAFAGYKNTMNAYKHAVKEKYRFFSYGDAMFINKNSNVRGLE

SEQ ID NO: 58114 - protein, 943 aa, Haemophilus influenzae
MENIDIRGARTHNLKNINLTIPRNKLVVITGLSGSGKSSLAFDTLYAEGQRRYVESLSAYARQFLSLMEKPDVDSIEGLSPAISIEQKSTSHNPRSTVGTITEIYDYLRLLFARVGEPRCPDHNVPLTAQTISQMVDKVLSLPEDSKMMLLAPVVKNRKGEHVKILENIAAQGYIRARIDGEICDLSDPPKLALQKKHTIEVVVDRFKVRSDLATRLAESFETALELSGGTAIVAEMDNPKAEELVFSANFACPHCGYSVPELEPRLFSFNNPAGACPTCDGLGVQQYFDEDRVVQNPTISLAGGAVKGWDRRNFYYYQMLTSLAKHYHFDVEAPYESLPKKIQHIIMHGSGKEEIEFQYMNDRGDVVIRKHPFEGILNNMARRYKETESMSVREELAKNISNRPCIDCGGSRLRPEARNVYIGRTNLPIIAEKSIGETLEFFTALSLTGQKAQIAEKILKEIRERLQFLVNVGLNYLSLSRSAETLSGGEAQRIRLASQIGAGLVGVMYVLDEPSIGLHQRDNERLLNTLIHLRNLGNTVIVVEHDEDAIRAADHIIDIGPGAGVHGGQVIAQGNADEIMLNPNSITGKFLSGADKIEIPKKRTALDKKKWLKLKGASGNNLKNVNLDIPVGLFTCVTGVSGSGKSTLINDTLFPLAQNALNRAEKTDYAPYQSIEGLEHFDKVIDINQSPIGRTPRSNPATYTGLFTPIRELFAGVPEARARGYNPGRFSFNVRGGRCEACQGDGVLKVEMHFLPDVYVPCDQCKGKRYNRETLEIRYKGKTIHQVLDMTVEEAREFFDAIPMIARKLQTLMDVGLSYIRLGQSSTTLSGGEAQRVKLATELSKRDTGKTLYILDEPTTGLHFADIKQLLEVLHRLRDQGNTIVVIEHNLDVIKTADWIVDLGPEGGSGGGQIIATGTPEQVAKVTSSHTARFLKPILEKP

SEQ ID NO: 58115 - protein, 168 aa, Haemophilus influenzae
MAGINKVIIVGHLGNDPEIRTMPNGDAVANISVATSESWNDRNTGERREVTEWHRIVFYRRQAEICGEYLRKGSQVYVEGRLKTRKWQDQNGQDRYTTEIQGDVMQMLGGRNQNAGGYGNDMGGAPQSSYQARQTNNGNSYQSSRPAPQQAAPQAEPPMDGFDDDIPF

SEQ ID NO: 58116 - protein, 195 aa, Haemophilus influenzae
MKQKIVLATGNKGKVKEMADVLSDFGFEVIAQTDLGIESPEETGLTFVENALLKARYASEKSGLPAIADDSGLVVSALNGAPGLYSARYAGEEGNDAKNREKLLAELAHIAQEQRQAKFVSCIVFLQHPTDPSPIIAEGECCGVIGFEEKGENGFGYDSLFFSPEQGCTFAELETAEKKKISHRAKALSVLKSKL

SEQ ID NO: 58117 - protein, 905 aa, Haemophilus influenzae
MYKLNVISLIILTTYTGATYASARDLPQGSSVVVGEANVSTIGNKMTIDQKTPTTQIDWHSFDIGQNKEVEFKQPDANSVAYNRVTGGNASQIQGKLTANGKVYLANPNGVIITQGAEINVAGLFATTKDLERISENGNGNGNKFTRKLKDGQVVKEGQVINKGKIKAKDFVVLNGDKVINEGEIDATNNGKVYLSSGYNFTFTLSDSSISVALEDNAVQSIVQNEGIIKAGDITLNAKGRNQALDSLVMNNGVLEATKVSNKNGKVVLSADDVQLNNKSDIKGESEVVFTNEPKNKIKITSQTGSKVTSPKINFTGKSVNINGDFGRDDSKAHYNEEHKRLDTEVNIDVPDNENIRIAEKDNTGTGTGTDSFIQTGALSSLLANNGKVNLKGKDVNISGRIHIDSFRGSDSLLKLTNQGHIKINHADIHSTGRLFFITSLQNEKDSQSDITITDSKINLGNGAMGLGRSLDKENCDNQRWCRTETSQRKKFDVHMRNVVFDQVDDVVVAGGFKKVNLDNIVATGKTNFYIDGGVSRNNSRYEYGVLDLDKRTLLSELDQRRRRWKYYNDLDLDMNKAYWHRFDMFATKNTGRSTIKDTEINISNSKINLKNGFVHLLAEKIKLDNSKIDITFDKDNSQDISTQINRLGMNGKVSMVNSHIKIVGDEKSDISAKAPYATMFLIGELIGEKSSIFVKSHQGYTFRTDGDTKIAGKNSKDDLKITAINTGGRTGKEVIINGAPGSIDNDANIANMAFTIGDNANTKTTIENADITALAPNGGTAYLSSKGVEIEVNPNSNFTFFELPREKNFNQTKIKGDSTKLSERGFARLYDKINGVRASNLSAEQLNVTDASEKIINTKLVSSLDVEKLVSVAVCDAGKGCEEQQFGDKGNNTKVSVGELETEQ

SEQ ID NO: 58118 - protein, 199 aa, Haemophilus influenzae
MSLFALFYMLFAYLLGSISSAILICRIAGLPDPRQNGSHNPGATNVLRIGNRKSALAVLIFDMLKGMIPVWAGYYLGLTQFELGMVALGACLGHIFPIFFQFKGGKGVATAFGAIAPISWAVAGSMFGTWIFVFLVSGYSSLSAVISALLVPFYVWWFKPEFTFPVALVCCLLIYRHHDNIQRLWRGQEDKVWAKFKKK

SEQ ID NO: 58119 - protein, 567 aa, Haemophilus influenzae
MYTKGSVSTRIAKYLFIILIVAGVISSLSLAIMSSNKYDAEAINISGSLRMQSYRLLYEMQEQPESVETNLRRYHISLHSSALLEVQNQFFTPNVLKHSYQNILQRWTNMEKYARQQDVKNYSKQLTDYVADVDYFVFELQRFSEQKWILGVSVLGFAMLLILLMVSYVIWYTNREVVKPLHLMTKASMQVQMRQFNHIPLDTRKQNELGTLARVFTQMSTELGQLYSRLEEAVNEKTQKLRQTNRTLSTLYQSAQLLNTNTINDKILNQVLNYIFISDHLNFVKVEVMGAEHWDITLGKQDANNELQIETLSVDNEELGVLSWQAGLPCPDPRIMQNLAQMLARALYFHKNLRQKEQLLLMEERSIIARELHDSLAQVLSFLQIQLTLLKHNLKKEDEQSKEKSLAIIANFEQALSGGYAQLRELLATFRLTIQEANLQLALKQVIDSLRSQTTMQMNVNCQLPSQSLNPQQLVHVLQIVREATTNAIKHSQGTVIEISARINAEGEYEILVEDDGVGIPNLEEPEGHYGLNIMAERCRQLNAQLHIHRREQGGTQVKITLPHTLY

SEQ ID NO: 58120 - protein, 341 aa, Haemophilus influenzae
MQNLQPFHTFHIQSNAREIIEAHSIEQLQQVWANSKSENLPTLFLGQGSNVLFLDDFNGIVILNRLMGITHEQDANFHYLHVNGGENWHKLVEWSINNGIYGLENLALIPGCAGSAPIQNIGAYGVEFKDVCDYVEVLNLNTNETFRLDTEQCEFGYRESIFKHRYQQGYVITAVGLKLKKDWQPILKYGSLVEFDPKTVTAKQIFDEVCHIRQSKLPDPNEVGNAGSFFKNPVVSSEHFEEIKKHHENLPHFPQADGSVKLAAGWLIDQCNLKGFQIGGAAVHKKQALVLINKNGATGQDVVKLAHHVRQTVAEKFGVYLQPEVRFISATGEVNSEQIIT

SEQ ID NO: 58121 - protein, 480 aa, Haemophilus influenzae
MKLDAPFNLDPNVKVRTRFAPSPTGYLHVGGARTALYSWLYAKHNNGEFVLRIEDTDLERSTPEATAAIIEGMEWLNLPWEHGPYYQTKRFDRYNQVIDEMIEQGLAYRCYCTKEHLEELRHTQEQNKEKPRYDRHCLHDHNHSPDEPHVVRFKNPTEGSVVFDDAVRGRIEISNSELDDLIIRRTDGSPTYNFCVVVDDWDMGITHVVRGEDHINNTPRQINILKAIGAPIPTYAHVSMINGDDGQKLSKRHGAVSVMQYRDDGYLPEALINYLVRLGWGHGDQEIFSREEMINYFELDHVSKSASAFNTEKLQWLNQHYIRELPPEYVAKHLEWHYKDQGIDTSNGPALTEIVTMLAERCKTLKEMARSSRYFFEEFETFDEAAAKKHFKGNAAEALAKVKEKLTALSSWDLHSIHEAIEQTAAELEVGMGKVGMPLRVAVTGSGQSPSMDVTLVGIGRDRVLARIQRAIDFIHAQNA

SEQ ID NO: 58122 - protein, 161 aa, Haemophilus influenzae
MSEISTALSLENCPCQSSHHYADCCGKFHLRQAFPETAEQLMRSRYTAYVLKNIPYIVVTTVPSQQTLLKPRLLQEWADNTTWLGLEILKTESLTKTQSAVEFKAIFQGEECEQAHQERSIFVKIEDRWYFVDPTVSLPTMKQPCVCGSGKKFKHCCGGFL

SEQ ID NO: 58123 - protein, 455 aa, Haemophilus influenzae
MISVFDMFKVGIGPSSSHTVGPMKAGKQFIDDLIKRNQFEQTTEIHVDVYGSLSMTGRGHSTDIAIIMGLAGYLPHNVDIDMISGFIEKVKQTALLPINVGQKIVKFDFENNLIFHRTFLKLHENGMTITALDENRTELYRQTYYSIGGGFIVDEAHFGKEEKNTVQVPYPYKNAEDILKHCSDNGLMLSTVMLENEIALNGKEAVSAHLENVWKTMQACIEHGIHTEGILPGPLRVPRRAASLYRALQANTNLSNDPMRVIDWVNMFALAVNEENAAGGRVVTAPTNGACGIIPAVLAYYEKFISPLTPEIIERYLLAAGMIGSLYKMNASISGAEVGCQGEVGVACSMAAAGLAEILGGNPLQVCIAAEIAMEHNLGLTCDPVGGQVQVPCIERNAIASVKAINASRMALRRTTNPRVTLDKVIETMYETGKDMNAKYRETSQGGLAVKIVCN

SEQ ID NO: 58124 - protein, 412 aa, Haemophilus influenzae
MKSTEKLKWNKFDATWMLNLFGTAVGAGVLFLPINAGMGGFWPLVLMAIIVGPMTYFAHRGLAYFVLSSKNPGSDITEVVEEHFGKTAGKLITLLYFFAIFPILLIYGNGITNTVDSFIVNQLGMASPNRVILSFVLIAVLISVMLFNEKVMLKITEWLVYPLVLILFVLSIYLIPEWNSAVLYEFPTVGGFLTTLWLTIPVLVFSFNHSPAISSFTCSQFREYKTFDGAERHISHTEKGASTILLFFVMFFVFSCVLTLTPEELVAAKEQNISILSFLANKFDNPYISYFGPLVAFLAITSSFFGHYMGAREGLEGLYLKMKGEAVNRKKLNYATALFFLLTLWGVAIINPSILGLIESLGGPIIAMILFIMPMYAIRKIPAMKRYSGRFSNVFVTIMGLIAISAVVYGLL

SEQ ID NO: 58125 - protein, 722 aa, Haemophilus influenzae
  MISC_FEATURE (475)..(475): X=any amino acid
MLDLTPQSKKISIQIGGMTCQSCANRIEKVLNKKPFVQQAGVNFAAEEAQVVFDATQASEAQIIEIIHKTGFSAHIKQANELPIEENTSIPWRLIVLWIINIPFLIGMLGMIGGSHNLMLPPIWQFALASIVQLWLAIPFYRGAIGSIRGGLTNMDVLVSTGTLTIYLYSAFMLFYHANHAMGHVYFEASVMVIGFVSLGKFLEDRTKKHSLNSLSMLLQLTPKKVTVLRNEKWIEIALDQVNIGEIIRANQGERIAADGVIESGNGWCDESHLTGESRPEEKQKGGKVLAGAMVTEGSIIYRANQLGSQTLLGDMMNALSDAQGSKAPIARFADKVTSVFVPVVLVISLVTFALTYILTNDSVSSLIHAVSVLVIACPCALGLATPAAIMVGLGKAVNAGVWFKDAAAMEETAHVDTVVLDKTGTLTKGELEISALWQPQSAVYSEDDLYRFAAAVERQANHPIAKAIVQAAEXKMLEIPTALFSKMEVGQGIQAELEQVGTIKVGKPDYCGLILPKNLEDIWQIASIVAVSINDEPIGAFALTDTLKNDSLHAIQRLQQQNIDVVIMSGDQQSVVDYIAKQLGIKKAFGKLTPRDKAEQIQKLKDLGHIVAMVGDGINDAPALASANVSFAMKSSSDIAEQTASATLMQHSVNQLVDALFIARATLKNIKQNLFFALIYNILGIPLAAFGFLSPIIAGAAMALSSISVLMNALRLKKVRF

SEQ ID NO: 58126 - protein, 68 aa, Haemophilus influenzae
MKTITLNIKGIHCGCCVKNLTQVLTELDGVQSADVQLEGKANITFDENRVNVAQLIEVIEDAGFDATE

SEQ ID NO: 58127 - protein, 68 aa, Haemophilus influenzae
MKTITLNIKGIHCGCCVKSLTQVLTELDGVQSADVQLEGKANITFDENRVNVAQLIEVIEDAGFDATE

SEQ ID NO: 58128 - protein, 105 aa, Haemophilus influenzae
MANWDGKYISPYAEHGKKSEQVKKITVSIPIKVLEILTNERTRRQLKSLRHATNSELLCEAFLHAFTGQPLPTDADLMKERNDEIPEDAKVLMRELGVDPESWEY

SEQ ID NO: 58129 - protein, 420 aa, Haemophilus influenzae
MHLTELKNTPVSDLVKLGEEQMGLENLARLRKQDIVFAILKQHAKSGEDIFGGGVLEILPDGFGFLRSADSSYLAGPDDIYVSPSQIRRFNLQTGDKIEGKIRPPKEGERYFALLKVDQVNDDKPEVSRSKILFENLTPLHANSRLRMERGNGSTEDLTARILDLASPIGKGQRGLIVAPPKAGKTMLLQNIAQSITHNYPDVELIVLLIDERPEEVTEMQRSVKGEVIASTFDEPATRHVQVAEMVIEKAKRSVEHKKDVVILLDSITRLARAYNTVTPASGKILSGGVDANALHRPKRFFGAARNVEEGGSLTIIATALVDTGSKMDEVIFEEFKGTGNMELHLSRKIAERRVFPAIDFKRSGTRKEDLLTTADELQKMWILRKILNPMDEVDAMEFLIDKLMMAKTNEEFFEVMKRS

SEQ ID NO: 58130 - protein, 299 aa, Haemophilus influenzae
MNDEQQNSNQSENTKKPFFQSLFGRFFQGELKNREELVEVIRDSEQNDLIDQNTREMIEGVMEIAELRVRDIMIPRSQIIFIEDQQDLNTCLNTIIESAHSRFPVIADADDRDNIVGILHAKDLLKFLREDAEVFDLSSLLRPVVIVPESKRVDRMLKDFRSERFHMAIVVDEFGAVSGLVTIEDILEQIVGDIEDEFDEEEIADIRQLSRHTYAVRALTDIDDFNAQFNTDFDDEEVDTIGGLIMQTFGYLPKRGEEIILKNLQFKVTSADSRRLIQLRVTVPDEHLAEMNNVDEKSE

SEQ ID NO: 58131 - protein, 522 aa, Haemophilus influenzae
MKNLNRILLSIKFMNKYFTYLIAIISGLLGVFAFSPFDYWPLAYVSLLGLLYVAKNPKKSTALLSTFLWAMGFFCFGVSWLNVSIHQFGGASLGVSYFLVGLLAAYLALYPMLFTYLVHHFKVQSAVIFAVIWTLTEFLRGWIFTGFPWLQFGYTQIDSPFYGIAPIFGVTGLTFFTVWASAVIFNLVSSLFKTKNLKLVLANALLLIIVGGLSAYSSRIHFVKSVEDKAISVTLAQGNIEQNLKWDPNYFYSTLAIYQKLITENLGKTDLIILPESALPTLENAITPFFEGLERAAKETKTEIMVGTVFQDTKSGKLLNSIMTAGNPDFPYQPNTQNRYNKHHLVPFGEYVPLESILRPLNSVFNLPMSAFQSGEAVQPSLIAKKRAFSPAICYEIIFGEQVRQNLKQDTDYLLTLSNDAWFGDSIGPWQHLQMARMRALELGKPLIRATNTGISVFVDAQGKVLAQAPQFIETTLTYKIAPAEGKTPYSVLGNMPLYALSLLFLLLHSMMAFIRRKMNIL

SEQ ID NO: 58132 - protein, 245 aa, Haemophilus influenzae
MRIPRIYHPISLENQTQCYLSEDAANHVARVLRMTEGEQLELFDGSNHIYPAKIIESNKKSVKVEILGRELADKESHLKIHLGQVISRGERMEFTIQKSVELGVNVITPLWSERCGVKLDAERMDKKIQQWQKIAIAACEQCGRNIVPEIRPLMKLQDWCAENDGALKLNLHPRAHYSIKTLPTIPAGGVRLLIGSEGGLSAQEIAQTEQQGFTEILLGKRVLRTETASLAAISALQICFGDLGE

SEQ ID NO: 58133 - protein, 139 aa, Haemophilus influenzae
MGITALAFDFGTKSIGCAIGQSITGTAQALPAFKAQDGIPNWEAIEKCLKEWKPDVVIVGLPLNMDGTEQDLTLRARKFANRLQGRFGVNVHLQDERLTTTQARSEIFERGGFKALKKGKIDGVSACLILESWFEYAEY

SEQ ID NO: 58134 - protein, 297 aa, Haemophilus influenzae
MKNLALIDLFLNEYWIEKGLSENTVQSYRLDLTALCDWLDKNDLSLETLDAVDLQGFLGERLEKGYKATSTARMLSAMRKLFQYLYREKYRVDDPSAVLSSPKLPSRLPKYLTEQQVSDLLNTPNVEVPLELRDKAMLELLYATGLRVTELVSLTIENMSVQQGVVRVIGKGNKERIVPMGEEAAYWVRQFMLYGRPVLLNGQSSDVVFPSQRAQQMTRQTFWHRVKHYAILADIDADALSPHVLRHAFATHLVNHGADLRVVQMLLGHTDLSTTQIYTHVAKERLKRLHERFHPRG

SEQ ID NO: 58135 - protein, 588 aa, Haemophilus influenzae
MMRTHYCGALNRNNIGQDVTLSGWVHRRRDLGGLIFIDMRDRDGIVQVCFDPKYQDALTAAAGLRNEFCIQIKGEVIARPDNQINKNMATGEVEVLAKELRIYNASDVLPLDFNQNNTEEQRLKYRYLDLRRPEMAQRLKTRAKITSFVRRFMDDNGFLDIETPMLTKATPEGARDYLVPSRVHKGKFYALPQSPQLFKQLLMMSGFDRYYQIVKCFRDEDLRADRQPEFTQIDVETSFLTAPEVREIMERMVHGLWLDTIGVDLGKFPVMTWQEAMRRFGSDKPDLRNPLEMVDVADIVKDVEFKVFNEPANNPNGRVAVIRVPNGAEITRKQIDEYTQFVGIYGAKGLAWAKVNDINAGLEGVQSPIAKFLNEDVWKGLAERVNAQTGDILFFGADKWQTTTDAMGALRLKLGRDLGLTRLDEWQPLWVIDFPMFERDEEGNLAAMHHPFTSPKDFSPEQLEADPTSAVANAYDMVINGYEVGGGSVRIFDPKMQQTVFRILGIDEEQQREKFGFLLDALKFGTPPHAGLAFGLDRLTMLLTGTENIRDVIAFPKTTAAACLMTEAPSFANPQALEELAISVVKAE

SEQ ID NO: 58136 - protein, 241 aa, Haemophilus influenzae
MVKDTLFSTPIAKLGDFIFDENVAEVFPDMIQRSVPGYSNIITAIGMLAERFVTADSNVYDLGCSRGAATLSARRNINQPNVKIIGIDNSQPMVERCRQHIAAYHSEIPVEILCNDIRHVEIKNASMVILNFTLQFLPPEDRIALLTKIYEGLNPNGVLVLSEKFRFEDTKINHLLIDLHHQFKRANGYSELEVSQKRTALENVMRTDSIETHKVRLKNVGFSQVELWFQCFNFGSMIAVK

SEQ ID NO: 58137 - protein, 135 aa, Haemophilus influenzae
MQILHTMLRVGDLDRSIKFYQDVLGMRLLRTSENPEYKYTLAFLGYEDGESAAEIELTYNWGVDKYEHGTAYGHIAIGVDDIYATCEAVRASGGNVTREAGPVKGGSTVIAFVEDPDGYKIEFIENKSTKSGLGN

SEQ ID NO: 58138 - protein, 743 aa, Haemophilus influenzae
MVAVRGSHLLNPQDFVIEQWCTGLKLAEQTEKSLIDAWYYARDLMNAYPDEMKNATLMLQSGVEMVEILHELNMDAETLLTAMLFPIVANKLTDWESLKEKFGAKITKLLKGVLEMDNIRQLNASHSANALQVDNVRRMLLAMVDDFRCVIIKLAERITFLRDAEHRCAEEDKVLAVKECSYIYAPLANRLGIGQLKWELEDYCFRYLHPEQYRAIAKLLQERRLDREHYIADFVSELSGYLRENIEQVEVYGRPKHIYSIWRKMQKKHLEFSGLYDVRAVRIIVQKLQDCYTALGIVHTQFKHLPKEFDDYVANPKPNGYQSIHTVVLGKGGKPIEVQIRTQQMHDDAELGMAAHWKYKEGNTGSMSAYEEKIAWLRKLLAWQDDITDSGEVLAELRSQVFDDRVYVFTPKGEVVDLPTGSTPLDFAYAIHSEIGHRCIGAKVAGRIVPFTYQLQMGDQIDIITQKNPNPSRDWLNPNLGFTHTAKSRAKIQAWFKKQDRDKNIPAGKELLDNELALLNLSIKQVEPYALPRYNLKNLDDLYAGIGSGDIRLNNLIHFLQSKLIKVTAEEADQEILRHVANKSAVNSQQKSEKNNGCVIVEGVDNLMHHIARCCQPIPGDAIVGYITMGRGISIHRADCEQFLDLQAAHPERVVESIWGENYASGFHINIRIVAGDRNGLLRDITTVLANEKISVLGVSSRADTKKQLATIDMEIELHNVESLSKILARLAKLDDVIEAKRL

SEQ ID NO: 58139 - protein, 118 aa, Haemophilus influenzae
MYKTTGLTHLINSTKYSLQGLKSAFKNETAFRHECFLACILIPLTFFLGETKIEIILMISSVLLVMALELLNSAVETVVDRIGTERHELSGRAKDQGSASVFIALCIVGIVWGGILFF

SEQ ID NO: 58140 - protein, 197 aa, Haemophilus influenzae
MTALLKIGLVSVSDRASAGVYQDQGIPELQAWLEQALVDPFHLETRLIPDEQPVIEQTLKELVDEQGCHLVLTTGGTGPAKRDVTPDATLAVADREMPGFGEQMRQVSLHFVPTAILSRQVGVIRKESLILNLPGQPKAIKETLEGVKDKEGNVLVKGIFSAVPYCLQLINGLYIDTKPEIIESFRPKSARRENLEK

SEQ ID NO: 58141 - protein, 214 aa, Haemophilus influenzae
MKIILLGAPGAGKGTQAQFIMNKFGIPQISTGDMFRAAIKAGTELGKQAKALMDEGKLVPDELTVALVKDRIAQADCTNGFLLDGFPRTIPQADALKDSGVKIDFVLEFDVPDEVIVERMSGRRVHQASGRSYHIVYNPPKVEGKDDVTGEDLIIRADDKPETVLDRLAVYHKQTSPLIDYYQAEAKAGNTQYFRLDGTQKVEEVSQELDKILG

SEQ ID NO: 58142 - protein, 215 aa, Haemophilus influenzae
MIEQLIQQAQPYWQQYIEHEFVQQLAKGTLPKACFQHYLKQDYLYLFHYSRAFALGVFKAKNFAEMETPRKTLEILCQEIQLHLNYCREWGISEQEIFTTQESAACIAYTRYLLDCGMTGSLAELYAAVTPCALGYAQVARYITQHYPRLPNNPYQTWIDTYASEEFQQAAQETVDFLTALCKPLNPSQLAEIQQIFTTATRMEIAFWQMGLDLA

SEQ ID NO: 58143 - protein, 306 aa, Haemophilus influenzae
MDSFSTSIWVNDVTVRYNNGHTAIHNMTFSLNSGTICALVGVNGSGKSTLFKSIMGLVKPQQGEIKLCDLPISQALKRNLVAYVPQSEEVDWQFPVSVYDVVMMGRYGYMNFLRIPKAIDKQKVQEAMQRVNIEHLAHRQIGELSGGQKKRVFLARALAQQSPIILLDEPFTGVDVKTENAIVDLLQQLREEGHLILVSTHNLGSVPDFCDQVVMINRTVIAAGKTEDTFNQHNLEIVFGGVLRHIKLLGENLHNDEDKRSVTVLTDDEKAVVFYGETKQDPPAPTTQNCHFEDCPYKSAVKNKRD

SEQ ID NO: 58144 - protein, 303 aa, Haemophilus influenzae
MNPTTEQVLSPGEIFRQTREALNLSLEDVAKEITLRPSILEQLENNEFIQKSTPAIFVKGYVRSYAKFLRLPDSVWENIVFAETEKNDLGKNARSTRAVNQYSSHNRWIGRLTAIVFMIVIGMTGLWWWQSYQQNTQERDDLVQSYVASTENNQPATALVTTEESNKTVPETAAPVSQPVEITNNLLPEIAQENSVSQPKNDEKSVSEIQSAVENPSISPTLPIAKGDLVIEILTNSSWISVKDNARHVLAQKEYKQGEILTFNGNEFSLIVGAPSNVRITYKGENYPLKVDGRVAKFKLSQP

SEQ ID NO: 58145 - protein, 368 aa, Haemophilus influenzae
MSAFQPTIKRRESTKIYVGNVPIGGDAPIAVQSMTNTRTTDVEATVAQIKSLERVGADIVRVSVPTMDAAEAFKQIKQQVNVPLVADIHFDYRIALKVAEYGVDCLRINPGNIGREDRVRAVVDCARDKNIPIRIGVNAGSLEKDLQEKYGEPTPEALLESALRHVEILDRLNFDQFKVSVKASDVFLAVESYRLLAKAIKQPLHLGITEAGGARAGAVKSAVGLGMLLAEGIGDTLRVSLAADPVEEIKVGFDILKSLRIRSRGINFIACPTCSRQEFDVIGTVNALEQRLEDIITPMDVSIIGCVVNGPGEALVSDLGVTGGNKKSGYYLDGERQKERFDNEDIVNQLEAKIRAKVARQDPKNRII

SEQ ID NO: 58146 - protein, 423 aa, Haemophilus influenzae
MAKTIQAIRGMNDCAPTESPLWQWIEAQVRNVLNSYGYSEVRMPIVESTPLFARAIGEVTDVVSKEMYTFWDNDEQLTLRPEGTAGCVRAAIEHGWIYNNEQRLWYIGPMFRHERPQKGRYRQFHQVGVEVFGIANPEIDAELIMLTYRLWKALGIDQHVTLQLNSIGSLEARANYRSALVGFLENHQDLMSDEEKERLVRNPLRILDTKNPELQKVLDNAPKLLDYLDDESRTHFEQLCSLLDAVGIQYEINPKLVRGLDYYNKTVFEWVTSALGAQGTVCGGGRYDGLVEQLGGHATPSIGFAMGLERLVLLVQEVNPNVPAKSAVDIYVVYQGEGATLAAFELAEKVRSELPHLNTMLHCSSGNFKKQFKRADKSGATLALVIGESEVQNKQVVVKHLQGGTDQQTLDLVNIIDYLQTQF

SEQ ID NO: 58147 - protein, 126 aa, Haemophilus influenzae
MAYSEKVIDHYENPRNVGSLDKKDSNVGTGMVGAPACGDVMQLQIKVDDNGIIEDAKFKTYGCGSAIASSSLITEWVKGKSLEEAGAIKNSQIAEELELPPVKVHCSILAEDAIKAAIADYKAKQG

SEQ ID NO: 58148 - protein, 150 aa, Haemophilus influenzae
MKLTSKGRYAVTAVLDIALNADGGPVSLADISERQHISLSYLEQLFAKLRKDGLVKSVRGPGGGYQLGLPSEQISVGMIIAAVNENIHVTKCLGRENCKNGVECLTHELWEDLSLRIESFLNEITLAELVNKRNVKRQSHRDFNNLLVNQ

SEQ ID NO: 58149 - protein, 245 aa, Haemophilus influenzae
MDIFFVISGFLITGIIITEIQQNSFSLKQFYTRRIKRIYPAFITVMALVSFIASAIFIYNDFNKLRKTIELAIAFLSNFYLGLTQGYFDLSANENPVLHIWSLAVEGQYYLIFPLILILAYKKFREVKVLFIITLILFFILLATSFVSANFYKEVLHQPNIYYLSNLRFPELLVGSLLAIYHNLSNKVQLSKQVNNILAILSTLLLFSCLFLMNNNIAFIPGITLILPCIFTALIIHTTSQNNIR

SEQ ID NO: 58150 - protein, 363 aa, Haemophilus influenzae
MGFKCGIVGLPNVGKSTLFNALTKAGIEAANYPFCTIEPNTGVVPMPDPRLDALAEIVKPERILPTTMEFVDIAGLVAGASKGEGLGNKFLANIRETDAIGHVVRCFENDDIVHVAGKIDPLDDIDTINTELALADLDSCERAIQRLQKRAKGGDKEAKFELSVMEKILPVLENAGMIRSVGLDKEELQAIKSYNFLTLKPTMYIANVNEDGFENNPYLDRVREIAAKEGAVVVPVCAAIESEIAELDDEEKVEFLQDLGIEEPGLNRVIRAGYALLNLQTYFTAGVKEVRAWTVSVGATAPKAAAVIHTDFEKGFIRAEVIAYEDFIQFNGENGAKEAGKWRLEGKDYIVQDGDVMHFRFNV

SEQ ID NO: 58151 - protein, 439 aa, Haemophilus influenzae
MSDNIYSVSQLNSAARQMLEGNFCQIWLTGEISNFTQPVSGHWYLTLKDENAQVRCAMFRMKNLRVAFRPQNGMQVLVRANVSLYEPRGDYQLIIDSMHPAGEGLLQQQFEALKMKLAAEGLFAQNLKKTLPHFSKAVGIITSSTGAALQDILHILARRDPSLKVVIYPTAVQGKEATAEIVQMIELANARQEVDVLIVGRGGGSLEDLWCFNEEEVARAIFRSTLPIISAVGHETDVTIADFVADLRAPTPSAAAELVSRNQDELLQQLRHQQQRLDMAFDRLFTRKSQRLKQLALRLQNQHPQNQLRAQQAKNEQLTHRLQLAILRQFENTQQKFTALSVRLKQNPLPYRIQRYQQGLEQLKVRLNFCVNRQVTERQNKLATLCGKLDGLSPLKVLARGYSIAENPQGKAIVSVKDVNQGDFITTQVADGKIVSKVL

SEQ ID NO: 58152 - protein, 274 aa, Haemophilus influenzae
MKNTFVYQAEKPVIKLLQITDPHLFKDESAELLGVNTQASFAQVLKEIQQENNEFDVILATGDLVQDSSDEGYIRFVEMMKPFNKPVFWIPGNHDFQPKMAEFLNQPPMNAAKHLLLGEHWQALLLDSQVYGVPHGQLSQHQLDLLKETLGKNPERYTLVVLHHHLLPTNSAWLDQHNLRNSHELAEVLAPFTNVKAILYGHIHQEVNSEWNGYQVMATPATCIQFKPDCQYFSLDTLQPGWREIELHSDGSIRTEVKRIQQAEFFPNMQEEGY

SEQ ID NO: 58153 - protein, 95 aa, Haemophilus influenzae
MTVKCKAEESLTCSCVDVGTIIDGSDCSVEVHQFYSTEADANAVLERLTKKARNTESDPCEIKSEIVAVENGVQLNASFTFSCQAEAMIFELANR

SEQ ID NO: 58154 - protein, 459 aa, Haemophilus influenzae
MKKFNQSLLATAMLLAAGGANAAAFQLAEVSTSGLGRAYAGEAAIADNASVVATNPALMSLFKTAQFSTGGVYVDSRINMNGDVTSHATIITSSSGIKAIEGGSASARNVVPGAFVPNLYFVAPVNDKFALGAGMNVNFGLKSEYDDSYDAGIFGGKTDLSAINLNLSGAYRVTEGLSLGLGVNAVYAKAQVERNAGIIADSVKDNQVKTALTVQQEPLKFLDKYLPSKDTSVVSLQDRAAWGFGWNAGVMYQFNEANRIGLAYHSKVDIDFTDRTATSVEANVIKAGKKGDLTLTLPDYLELSGFHQLTDKLAVHYSYKYTHWSRLTKLNASFEDGKKAFDKELQYSNNSRVALGASYNLDEKLTLRAGIAYDQAASRHQRSAAIPDTDRTWYSLGATYKFTPNLSVDLGYAYLKGKKVHFKEVKTIGDERSLTLNTTANYTSQAHANLYGLNLNYSF

SEQ ID NO: 58155 - protein, 190 aa, Haemophilus influenzae
MCFSFYKTRRKMTALYYTYYPSPVGRLLILSDGESITHIDFEKEQYAPNPKWHKQDELPVFQKVRLAFERYFNGEVECFSNIPLKPEGTAFQQAIWQALREIDYGELSTYGELALRINNPKAVRAVGGAVGSNPISIIIPCHRILGKDRTLTGFGGGLEAKRFLLQLEKIPYIDKGTENTKPRFFKKYHE

SEQ ID NO: 58156 - protein, 223 aa, Haemophilus influenzae
MIPQTLEQLLSQAQSIAGLTFGELADELHIPVPIDLKRDKGWVGMLLERALGATAGSKAEQDFSHLGVELKTLPINAEGYPLETTFVSLAPLVQNSGVKWENSHVRHKLSCVLWMPIEGSRHIPLRERHIGAPIFWKPTAEQERQLKQDWEELMDLIVLGKLDQITARIGEVMQLRPKGANSRAVTKGIGKNGEIIDTLPLGFYLRKEFTAQILNAFLETKSL

SEQ ID NO: 58157 - protein, 430 aa, Haemophilus influenzae
MDLLSDIEKQLQKATAQAFLIALSGGLDSTVLLSLFAKLCQKQPHLPPLSIRAIHIHHGLSPNADSWAKHCQDLCDQFQIPLIIERVQVDKTNGIEAGAREARYQAIKKYLQTQEMLVTAHHLNDQTETFFLALKRGSGLKGLGAMQQQSVLFGMPILRPLLGFTRTQLENYAQKEKLNWITDESNEDNRYDRNFLRNEILPELRERWAHFDLAVQRSAQHCFEQQQLINDLLSEIFTEHCQIKNQFKLCQFRQYSLAKQTALLRMWLAENQLEMPSKRQLTQLINDVIFAKEEANPQFQLVNKVIRRYQDSLYLTKPFSDLTKCTLKLEQNTLNLPDDLGNLTVQENEHNLIFYWQDYSVTLEKTNLPISIRFGYSGKVKHYPKRPREDIKKIWQELGVPPWERNRIPLIFYGNELKSAVGFFRVLKSS

SEQ ID NO: 58158 - protein, 315 aa, Haemophilus influenzae
MNQEYLDFELPIAELEAKIEALRAASDDKVDLTDEIKRLQKKSNELTKKTFANLDAWQVSRMARHPNRPYTLDYIEHIFTEFEELAGDRAFADDKAIVGGLARLDGRPVMVIGHQKGRSVKEKVQRNFGMPAPEGYRKALRLMEMAERFKLPIITFIDTPGAYPGIGAEERGQAEAIARNLREMAQLTVPVICTVIGEGGSGGALAIGVGDKVNMLQYSTYSVISPEGCASILWKSAEKASTAAEVMGLTASRLKELNLIDSIVQEPLGGAHRSYLEIAENLKLRLKEDLAELDELSKEELLNRRYERLMSYGYC

SEQ ID NO: 58159 - protein, 475 aa, Haemophilus influenzae
MPVQHVKLARDRRKKRAYIKVGVFFVAILLILTGILLTIKSKPEENSIFSTFDSGEYHELNTSPNENSTALQPDENATSYDDELQAKDDEVDEVKLSSDDLDTLPQHAQDALNGLLDAADQAIRITDQFSYTVTEGDTLKDVLVLSGLDDSSVQPLIALDPELAHLKAGQQFYWILDKNDNLEYLNWLVSEKEERIYERLEDGKFKRQVIEKKSIWRKEVLKGEIQNSLNSSLREKGLDTRQISQLSNALQWQVSLRKLKKGTQFAILVSREYLGDKLTGQGNVEALRISSGGKNYYAVQAANGRYYNQQGETLGKGFARYPLQRQARVSSPFNPNRRHPVTGRIRPHKGVDFSVSQGTPVIAPADGTVEKVAYQAGGAGRYVMLRHGREYQTVYMHLSKSLVKAGQTVKKGERIALSGNTGISTGPHLHYEFHINGRAVNPLTVKLPGTSSGMTSAERKQFLVRVREAERMLKP

SEQ ID NO: 58160 - protein, 265 aa, Haemophilus influenzae
MLMQSIYLSKIREQNPLIHNITNIVAANFSANGLLALGASPLMSANVEEMQEVPKISQALVINIGTLIGKDREAMLQAGKTANEVGIPVVLDPVGVGATSYRRETIRELLAEVKFALIRGNAGELAAIAGETWQAKGVDAGQGEVDLKAVAEKVAQRYGCTVLISGAVDIVSDGTQTATVHNGTSLFPKVTASGCLLSAVCAAFLAVSEGNYFSATLEACVAYTIAGECAAQGLTTQVGQFQIRLLDELAALSPETIGQRGRINE

SEQ ID NO: 58161 - protein, 226 aa, Haemophilus influenzae
MKNIQKILPLYFVAGTQDCRHLGENLSENLLFVLKQALEGGITCFQFRDKGKFSLEHTPSAQKALAINCRDLCREYGVPFIVDDNVDLALEIEADGIHVGQSDMPVQEIRAKTDKPLIIGWSVNRLDEAKIGENLAEIDYFGIGPIFPTQSKENPKPTLGMAFIQTLRNAGITKPLVAIGGVKLAHVKTLREFGADGVAVITAITHADNVQAATKALREASDEYAK

SEQ ID NO: 58162 - protein, 460 aa, Haemophilus influenzae
MTTQFKPELLSPAGSLKNMRYAFAYGADAVYAGQPRYSLRVRNNEFNHANLKIGIDEAHSLGKKFYVVVNIAPHNSKLKTFIKDLQPVIDMKPDALIMSDPGLIMLVRENFPNIDIHLSVQANAVNWATVKFWKQMGLTRVILSRELSIDEIAEIRQQVPDIELEIFVHGALCMAYSGRCLLSGYINKRDPNQGTCTNACRWEYKMEEGTTDDVGNIVPKIDPAQQIEVKNVAPTLGEGAVTDKVFLYTESQKPDEQMTAFEDKHGTYFMNSKDLRAVQHVEKLTALGVHSLKIEGRTKSFYYCARTAQVYRKAIDDAAAGKPFDESLMDTLESLAHRGYTEGFLRRHTHDEYQNYEYGYSISDRQQFVGEFTGKRNEQGMAEVAVKNKFLLGDNVEMMTPQGNINFKIEKMLNRKNETVDAALGDGHFVFLNVPQDINLNYALLMRNLVNTNTRNPHSN

SEQ ID NO: 58163 - protein, 610 aa, Haemophilus influenzae
MCGIVGAVAQRDVAEILINGLHRLEYRGYDSAGVAVINKQNELQRIRCLGKVKALDEAVSEKPLIGGTGIAHTRWATHGEPSETNAHPHSSGTFAVVHNGIIENHEELRELLKSRGYVFLSQTDTEVIAHLVEWEMRTTDSLLDAVKKAVKQLTGAYGMVVMDSRHPEHLVAARSGSPLVIGLGIGENFLASDQLALLSVTRRFIFLEEGDIAEITRRTVDIYDTHGNKAKREIHESNLENDAAEKGKFRHFMQKEIYEQPTALINTMEGRINHENVIVDSIGNGAKGILEKVEHIQIVACGTSYNAGMVARYWFESLAGVSCDVEIASEFRYRKFVTRPNSLLITLSQSGETADTLAALRLAKEKGYMAALTICNVAGSSLVRESDLAFMTRAGVEVGVASTKAFTTQLAALLMLVTALGKVKGHISVEKEREIIKAMQSLPAEIEKALAFDTEIEALAEDFAEKHHALFLGRGAFYPIAVEASLKLKEISYIHAEAYAAGELKHGPLALIDADMPVIVVAPNNELLEKVKSNIEEVRARGGQLYVFADKEAGFTPSEGMKIITMPKVNDIVAPIFYTIPMQLLSYYVALIKGTDVDQPRNLAKSVTVE

SEQ ID NO: 58164 - protein, 136 aa, Haemophilus influenzae
MRFVTIFRNPAFNSSQVRLSFAQFLRQIRKDTFKESNFLFNRRYKFMNKTDLIDAIANAAELNKKQAKAALEATLDAITASLKEGEPVQLIGFGTFKVNERAARTGRNPQTGAEIQIAASKVPAFVSGKALKDAIK

SEQ ID NO: 58165 - protein, 864 aa, Haemophilus influenzae
MRIAKLILNTLLTLCILGLVAGGMLYFHLKSELPSVETLKTVELQQPMQIYTADGKLIGEVGEQRRIPVKLADVPQRLIDAFLATEDSRFYDHHGLDPIGIARALFVAVSNGGASQGASTITQQLARNFFLTSEKTIIRKAREAVLAVEIENTLNKQEILELYLNKIFLGYRSYGVAAAAQTYFGKSLNELTLSEMAIIAGLPKAPSTMNPLYSLKRSEERRNVVLSRMLDEKYISKEEYDAALKEPIVASYHGAKFEFRADYVTEMVRQEMVRRFGEENAYTSGYKVFTTVLSKDQAEAQKAVRNNLIDYDMRHGYRGGAPLWQKNEAAWDNDRIVGFLRKLPDSEPFIPAAVIGIVKGGADILLASGEKMTLSTNAMRWTGRSNPVKVGEQIWIHQRANGEWQLGQIPAANSALVSLNSDNGAIEAVVGGFSYEQSKFNRATQSLVQVGSSIKPFIYAAALEKGLTLSSVLQDSPISIQKPGQKMWQPKNSPDRYDGPMRLRVGLGQSKNIIAIRAIQTAGIDFTAEFLQRFGFKRDQYFASEALALGAASFTPLEMARAYAVFDNGGFLIEPYIIEKIQDNTGKDLFIANPKIACIECNDIPVIYGETKDKINGFANIPLGENALKPTDDSTNGEELDQQPETVPELPELQSNMTALKEDAIDLMAAAKNASSKIEYAPRVISGELAFLIRSALNTAIYGEQGLDWKGTSWRIAQSIKRSDIGGKTGTTNSSKVAWYAGFGANLVTTTYVGFDDNKRVLGRGEAGAKTAMPAWITYMKTALSDKPERKLSLPPKIVEKNIDTLTGLLSPNGGRKEYFIAGTEPTRTYLSEMQERGYYVPTELQQRLNNEGNTPATQPQELF

SEQ ID NO: 58166 - protein, 281 aa, Haemophilus influenzae
MLSYHHSFHAGNHADVLKHIVLMLILENLKLKEKGFFYLDTHSGVGRYRLSSNESEKTGEYKEGIGRLWDQTDLPEDIARYVKMIKKLNYGGKELRYYAGSPLIAAELLRSQDRALLTELHPSDYPILRNNFSDDKNVTVKCDNGFQQVKATLPPKERRGLVLIDPPYELKDDYDLVVKAIEEGYKRFATGTYAIWYPVVLRQQTKRIFKGLEATGIRKILKIELAVRPDSDQRGMTASGMVVINPPWTLETQMKEILPYLTKTLVPEGTGSWTVEWITPE

SEQ ID NO: 58167 - protein, 121 aa, Haemophilus influenzae
MHAIFDLIKDNIMFGKGGLGGLMKQAQQMQEKMQKMQEEIAQLEVTGESGAGLVKITINGAHNCRRIDIDPSLMEDDKEMLEDLIAAAFNDAVRRAEELQKEKMASVTAGMPLPPGMKFPF

SEQ ID NO: 58168 - protein, 200 aa, Haemophilus influenzae
MQSSPLLEHLIENLRCLPGVGPKSAQRMAYHLLQRNRSGGMNLARALTEAMSKIGHCSQCRDFTEEDTCNICNNPRRQNSGLLCVVEMPADIQAIEQTGQFSGRYFVLMGHLSPLDGIGPREIGLDLLQKRLVEESFHEVILATNPTVEGDATANYIAEMCRQHNIKVSRIAHGIPVGGELETVDGTTLTHSFLGRRQID

SEQ ID NO: 58169 - protein, 651 aa, Haemophilus influenzae
MRLFIAEKPSLARAIADVLPKPHQRGDGFIKCGDNDVVTWCVGHLLEQAEPDAYDPKFKQWRLEHLPIIPEKWQLLPRKEVKKQLSVVEKLIHQADTLVNAGDPDREGQLLVDEVFSYANLSAEKRDKILRCLISDLNPSAVEKAVKKLQPNRNFIPLATSALARARADWLYGINMTRAYTIRGRQTGYDGVLSVGRVQTPVLGLIVRRDLEIEHFQPKDFFEVQAWVNPESKEEKTPEKSTALFSALWQPSKACEDYQDDDGRVLSKGLAEKVVKRITNQPAEVTEYKDVREKETAPLPYSLSALQIDAAKRFGMSAQAVLDTCQRLYETHRLITYPRSDCRYLPEEHFAERHNVLNAISTHCEAYQVLPNVILTEQRNRCWNDKKVEAHHAIIPTAKNRPVNLTQEERNIYSLIARQYLMQFCPDAEYRKSKITLNIAGGTFIAQARNLQTAGWKELLGKEDDTENQEPLLPIVKKGQILHCERGEVMSKKTQPPKPFTDATLLSAMTGIARFVQDKELKKILRETDGLGTEATRAGIIELLFKRGFLTKKGRNIHSTETGRILIQALPNIATQPDMTAHWESQLTDISQKQATYQQFMHNLNQILPDLVRFVDLNALRQLSRIKMIKSDRAKPKSAVKKSSKSNGETD

SEQ ID NO: 58170 - protein, 556 aa, Haemophilus influenzae
MKLFLTQSANVGDVKAYLLHEVFRAAAQKANVSIVGTPAEADLVLVFGSVLPNNPDLVGKKVFIIGEAIAMISPEVTLANALANGADYVAPKSAVSFTGVSGVKNIVAVTACPTGVAHTFMSAEAIEAYAKKQGWNVKVETRGQVGAGNEITVEEVAAADLVFVAADIDVPLDKFKGKPMYRTSTGLALKKTEQEFDKAFKEAKIFDGGNNAGTKEESREKKGVYKHLMTGVSHMLPLVVAGGLLIAISFMFSFNVIENTGVFQDLPNMLINIGSGVAFKLMIAVFAGYVAFSIADRPGLAVGLIAGMLASEAGAGILGGIIAGFLAGYVVKGLNVIIRLPASLTSLKPILILPLLGSMIVGLTMIYLINPPVAEIMKELSNWLTSMGEVNAIVLGAIIGAMMCIDMGGPVNKAAYTFSVGLIASQVYTPMAAAMAAGMVPPIGMTVATWIARNKFTVSQCDAGKASFVLGLCFISEGALPFVAADPIRVIISSVIGGAVAGAISMGLNITLQAPHGGLFVIPFVSEPLKYLGAIAIGALSTGVVYAIIKSKNNAE

SEQ ID NO: 58171 - protein, 313 aa, Haemophilus influenzae
MASVVTITLNAAYDLVGRLNRIQLGEVNTVETLGLFPAGKGINVAKVLKDLGVNVAVGGFLGKDNSADFEQMFNQHGLEDKFHRVDGKTRINVKITETEADVTDLNFLGYQISPQVWQQFVTDSLAYCLNYDIVAVCGSLPRGVSPELFADWLNQLHQAGVKVVLDSSNAALTAGLKAKPWLVKPNHRELEAWVGHPLNSLEEIIAAAQQLKAEGIENVIISMGAKGSLWINNEGVLKAEPAQCENVVSTVGAGDSMVAGLIYGFEKGLSKTETLAFATAVSAFAVSQSNVGVSDLSLLDPILEKVQITMIEG

SEQ ID NO: 58172 - protein, 499 aa, Haemophilus influenzae
MLELSESNIHLNANAIDKQQAIEMAVSALVQAGNVENGYLQGMLARELQTSTFLGNGIAIPHGTLDTRLMVKKTGVQVFQFPQGIEWGEGNIAYVVIGIAARSDEHLSLLRQLTHVLSDEDTAAKLAKITDVAEFCAILMGETIDPFEIPAANISLDVNTQSLLTLVAINAGQLQVQSAVENRFISEVINNAALPLGKGLWVTDSVVGNVKNALAFSRAKTIFSHNGKAVKGVITVSAVGDQINPTLVRLLDDDVQTTLLNGNSTEILTALLGSSSDVETQSVEGAVVGTFTIRNEHGLHARPSANLVNEVKKFTSKITMQNLTRESEVVSAKSLMKIVALGVTQGHRLRFVAEGEDAKQAIESLGKAIANGLGENVSAVPPSEPDTIEIMGDQIHTPAVTEDDNLPANAIEAVFVIKNEQGLHARPSAILVNEVKKYNASVAVQNLDRNSQLVSAKSLMKIVALGVVKGTRLRFVATGEEAQQAIDGIGAVIESGLGE

SEQ ID NO: 58173 - protein, 432 aa, Haemophilus influenzae
MIMELFHTILAIVALILSSAVVSSAEISLASPRKLKLQSLANKGDVRPLQVLKLQEHPGRFITVVQILLNMVAILGGGIGESALSPYIADILNRSFEGSWIAPTASTIAFILVTCLFILFADLIPKRIAITYPEMVALSVVGIMNFSMYVFKPLVWFFDTIANVFFRLFRISTVREDGMTSEDIFAVVEAGAEAGVLKTQEHYLIENIFDMQARTVTSTMTTRENIVYLDRTFSRQEVMDTLSRDSHSKIVICDNGLDKILGYIESHTLLTMYLQNENVVLTDPKLLRKALFVPDTLSLYEVLELFKSTGEDFAIIVNEYALVVGIVTLNDVMSIVMGELVSNEEEYIVSRDENSWLIDGATPLEEVTRVLDIAYFPDEENYETISGFMMYMLRKIPKKTDSVVYGKYKFEVIDTENFKIDQILVSLVKEQE

SEQ ID NO: 58174 - protein, 260 aa, Haemophilus influenzae
  MISC_FEATURE (165)..(165): X=any amino acid
MFIVDSHCHLDALDYENLHKNISDVVEKAHARDVKHLLAIGVTLSRFEQAYDSLREFNNVSLACGVHPLDFEEEPYDAERLLRLAQDPKVIAIGEIGLDYYYSADNKAAQQAVFGSQIDIANQLDKPVIIHTRSAGDDTIAMLRQHRAEKCGGVIHCFTETMEFXKKALDLGFYISCSGIVTFKNAEAIREVIRYVPMERLLVETDSPYLAPVPYRGKENQPAYTREVCEYVATLKGVSAEAFAQITTQNFERLFKIRVE

SEQ ID NO: 58175 - protein, 327 aa, Haemophilus influenzae
MTALYPWLMPIYHQIAQTFDEGLGHHAVLIKADSGLGVESLFNALAQKIMCVAQGDKPCGQCHSCHLMQAHSHPDYHELSPINGKDIGVDQVRDINEMVAQHAQQNGNKVVYVQGAERLTEAAANALLKTLEEPRPNTYFLLQADSSASLLATIYSRCQVWNLSVPNEEIAFEWLKSKSAVENQEILTALAMNLGRPLLALETLQEGFIEQRKNFLRQFWVFYRRRSPLELLPLFDKERYVQQVDWILAFLSDCLKHKLEIDSHRQVADLGRGIEQFSDEQTALGLLQAIKIMQKVRSDLLTINGVNVELMLLDGLTRLVTEVFETQ

SEQ ID NO: 58176 - protein, 210 aa, Haemophilus influenzae [sequence omitted]

SEQ ID NO: 58177 - protein, 263 aa, Haemophilus influenzae
MRYSIQDFIQLIAQLRNPNGGCPWDLKQNYESMISCLTEETYEVIEAIEKKDIPNLREELGDLLLQVVFFSQLAREDKYFAFDDVLQDVAEKIVRRHPHVFGDAKAGDETEALSRWNEMKAKEKQGKSEETSILDNVPRALPSLTRAAKLQKRCSKVGFDWEEISPVFDKVREELEEVQAEINRTSIEQNKVEEEIGDLLFATVNLARHLKCDPEDALRKANLKFERRFRAVEQAVQQQGKQVNNVPLIELDLLWDEVKKQEN

SEQ ID NO: 58178 - protein, 803 aa, Haemophilus influenzae
MAKNTQRTMPVLPLRDVVVFPYMVMPLFVGRAKSINALEEAMNDDKQILLVSQREADLEEPTPEDLFDVGTIANIIQLLKLPDDTVKVLVEGQNRAKINSLEDGEKCFSAQITPIETTYGDEKELVVAKSAVLSEFENYLTLNKKVPTDILNALQRIDDVDRLADTMAAHLPVSIRHKQNALELANVQERLEYLLGMMESEADILQVEKRIRGRVKKQMEKSQRNYYLNEQIKAIRKEMDGGENEDTIDEVEQLHQKVEAAGMPADVRDKVENELQKLKMMSAMSSEATVIRSYIEWMIQVPWHQRSKVKKDIVKAQQVLDTDHYGLDRVKERILEYLAVQARLNKVKGPILCLVGPPGVGKTSLGQSIANATGRKYVRMALGGVRDEAEIRGHRKTYIGALPGKLIQKMAKVGVKNPLFLLDEIDKMASDMRGDPASALLEVLDPEQNTTFNDHYLEVDYDLSDVMFVATSNSMNIPGPLLDRMEVIRLSGYTEDEKLNIAMRHLLAKQIERNGLKKGELTVEESAILDIIRYYTREAGVRGLEREISKICRKAVKNLLVNPKLKSITVNSDNLHDYLGVKRFEFGKADTQNRIGEVTGLAWTEVGGDLLTIETASVVGKGKLSFTGSLGDVMKESIQAAMTVVRARADKLGINAEFHEKRDIHIHVPDGATPKDGPSAGIAMCTALISCLTGNPVRADVAMTGEISLRGKVLPIGGLKEKLLAAHRGGIKTVLIPKENVKDLEEIPENVKQNLAIHAVETIDEVLGFALENPPEGIEFVKVEAKPKAPRRKVTSKSERAVN

SEQ ID NO: 58179 - protein, 280 aa, Haemophilus influenzae
MSQFISLTQYQLIEVQGADAEKYLQGQLTSDVVRLASGATTLTAHCDPKGKMNAIYRLFKVSSEQFFLLVKKDILPSGLDALKKYAVFSKVSFDLRDWQIIGVIGEKCGKITPNFSLEIDEKRSILLNETELPVNFNGDEKIWEVADIQAGLPNLSPQTQNEFIPQALNLQAIEQAISFTKGCYIGQETVARAKYRGANKRAMFIFKVQTQQEAEIGSEIEMQLEANWRKTGTITSAVNLDGVLWLQVVMNNDIDSEQQFRLLNSEILLERVQLPYSITE

SEQ ID NO: 58180 - protein, 287 aa, Haemophilus influenzae
MIYSMTAFARLEVKKDWGDAVWEIRSVNQRYLENFFRLPEQFRGLENTLREKLRQNLTRGKIECSLRIETKKQANAELNLNKELANQVIQSLQWIKAQAGEGEINLTDVLRYPGVVEAQEQDLDAISQDLLTAFDDLLTDFIAMRGREGEKLNDIIQQRLDSIAVETDKVRSQMPAVLQWQRERLLQRFEDAQLNLDPQRVEQEMILLAQRIDVAEELDRLQMHVKETTNILKKGGAVGRKLDFMMQELNRESNTLASKSINADITASAVELKVLIEQMREQIQNLE

SEQ ID NO: 58181 - protein, 303 aa, Haemophilus influenzae
MTNTTMQPNRLRIALQKKGRLSQDCAILLKQCGVKINWNEQRLIAYAENLPIEILRVRDDDIPGLIFDGVVDLGIIGENVLEEEELGRRAANETVTYKKLRQLDFGDCRLSLAVDRDCHYENVKDLANRRIATSYPHLLKRYMNENGVSFKSCLLNGSVEVAPSAGIAYAICDLVSSGATLEANGLKEVDVIYRSKACLIQRAEPLESTKQALVDKLLTRIQGVQQAAESKYIMLHAPKEKLEKITALLPGVENPTILPLASDTTRVAMHVVSQENLFWETMEQLKEAGASSILVLPIEKMME

SEQ ID NO: 58182 - protein, 513 aa, Haemophilus influenzae
MQLNSTEISELIKKRIAQFDVVSEARNTGTIVSVSDGIIRIHGLSDVMQGEMIALPGNRYAMALNLERDSVGAVVMGPYADLAEGMEVQCTGRILEVPVGRGLLGRVVNTLGQPIDGKGEIENDGFSPVEVIAPGVIDRRSVDQPVQTGYKAVDSMVPIGRGQRELIIGDRQTGKTALAIDAIINQRNSGIKCIYVAIGQKASTIANVVRKLEEHGALANTIVVAASASESAALQYLAPYAGCAMGEYFRDRGEDALIVYDDLSKQAVAYRQISLLLRRPPGREAYPGDVFYLHSRLLERASRVNEDYVEKFTKGEVKGKTGSLTALPIIETQAGDVSAFVPTNVISITDGQIFLESNLFNSGIRPAVNPGISVSRVGGSAQTKVIKKLAGGIRTALAQYRELAAFAQFASDLDDATRKQLSHGEKVTELLKQKQFTPLSVAEQAVILFAVEFGYLDDVELSKIASFETALLDYSNRNHAEFMQELNKTGNYNDEIKDTLKSILDGFKANSAW

SEQ ID NO: 58183 - protein, 177 aa, Haemophilus influenzae
MSELTTIARPYAKAAFDFAIEQSAVEKWTEMLGFAAAVAEDETVKAYLSSSLSAQKLADTVISICGEQLDQYGQNLIRLMAENKRLSAIPAVFEEFKHHVEEHQAIAEVEVTSAQPLNATQIEKIAAAMEKRLARKVKLNCNVDNALIAGVIVRTEDFVIDGSSRGQLTRLANELQL

SEQ ID NO: 58184 - protein, 156 aa, Haemophilus influenzae
MNLNATLIGQLIAFALFVWFCMKFVWPPIINAIETRQSQIANALASAEAAKKEQADTKNLVEQELSAAKLQAQDILDAANKRRNEVLDEVKAEAEELKAKIIAQGYAEVEAERKRVQEELRLKVASLAVAGAEKIVGRSIDEAANNDIIDKLVAEL

SEQ ID NO: 58185 - protein, 84 aa, Haemophilus influenzae
METVITATIIGASILLAFAALGTAIGFAILGGKFLESSARQPELASSLQTKMFIVAGLLDAIAMIAVGISLLFIFANPFIGLLN

SEQ ID NO: 58186 - protein, 262 aa, Haemophilus influenzae
MSGQTTSEYISHHLSFLKTGDGFWNVHIDTLFFSILAAVIFLFVFSRVGKKATTGVPGKMQCLVEIVVEWVNGIVKENFHGPRNVVAPLALTIFCWVFIMNAIDLIPVDFLPQFAGLFGIHYLRAVPTADISATLGMSICVFFLILFYTIKSKGFKGLVKEYTLHPFNHWAFIPVNFILETVTLLAKPISLAFRLFGNMYAGELIFILIAVMYSANMAIAALGIPLHLAWAIFHILVITLQAFIFMMLTVVYLSIAYNKADH

SEQ ID NO: 58187 - protein, 203 aa, Haemophilus influenzae
MKAKLVSLLAQANIKISDQQIQQLINLVNLLNKWNKAYNLTSVRDPQEMLVKHILDSLVVSPYLQGDRFIDVGTGPGLPGLPLAIINPSKQFVLLDSLGKRISFIRNAIRELRLTNVTPVLSRVEEYQPEDKFDGVLSRAFASLKDMTDWCHHLPKENGYFYALKGIYQEDEINELNKKYTIQKVIELSVPELIGERHLIVLR

SEQ ID NO: 58188 - protein, 118 aa, Haemophilus influenzae
MRGRTRIGKFTTCGERNPKKVARTQPTKKDLKTQNPILHSDQGWLYQMVGYQAILRENSIQQNMSRKGNYLDNNAMENFFGRLKTECYYDKRFETFKQLKKQLMSIFIITTMITFRGN

SEQ ID NO: 58189 - protein, 175 aa, Haemophilus influenzae
MTTIVSVRRNGQVVVGGDGQVSLGNTVMKGNARKVRRLYNGKVLAGFAGGTADAFTLFELFERKLEMHQGHLLKSAVELAKDWRTDRALRKLEAMLIVADEKESLIITGIGDVVQPEEDQILAIGSGGNYALSAARALVENTELSAHEIVEKSLRIAGDICVFTNTNFTIEELPN

SEQ ID NO: 58190 - protein, 139 aa, Haemophilus influenzae
MKKTALLNAQLSHCIATLGHTESLTICDAGLPIPLSVERIDLALTAGVPSFLQTLNVVTNEMYVERVVIAEEIKEKNPEILTALLTQLQKLESHQGNQIQVEFVSHETFKKFTLESKAIVRTGECSPYANVILYSGVPF

SEQ ID NO: 58191 - protein, 323 aa, Haemophilus influenzae
MMKNETSNFQIGRFLIEQRSFIALIILIAIVSMINPDFFSVDNILNILRQTSVNAIIAVGMTFVILIAGIDLSVGSVLALTGAIAASMVSIELPIFLVIPVVLLIGTLLGGISGVIVAKGKVQAFIATLVTMTLLRGITMVYTDGRPITTGFSDNADLFASIGTGYVLGIPVPIWIMSIVFAVAWYILKDTPIGRYIYALGGNEAATQLSGINVNKIKVFVFAVSGFLSALAGLIVTSRLSSAQPTAGVSYELDAIAAVVVGGTSLMGGKGRVMGTLIGALIIGFLNNALNLLDISSYYQMIAKALVILVAVLADNYLGTKKL

SEQ ID NO: 58192 - protein, 292 aa, Haemophilus influenzae
MKKLTALTSAVLLGLAVSSSASAQDTIALAVSTLDNPFFVTLKDGAQKKADELGYKLVVLDSQNDPAKELANIEDLTVRGAKILLINPTASEAVGNAVAIANRKHIPVITLDRGAAKGNVVSHIASDNIAGGKMAGDFIAQKLGDNAKVIQLEGIAGTSAARERGEGFKQAIDAHKFNVLASQPADFDRTKGLNVTENLLASKGDVQAIFAQNDEMALGALRAVKAANKKVLIVGFDGTDDGVKAVKSGKMAATIAQQPELIGSLGVVTADKILKGEKVEAKIPVDLKVISE

SEQ ID NO: 58193 - protein, 239 aa, Haemophilus influenzae
MNDLTLSPIAIIHTPYKEKFSVPRQPNLVEDGVGIVELLPPYNSPEAVRGLEQFSHLWLIFQFDQIQQGKWQPTVRPPRLGGNQRVGVFASRATHRPNPLGLSKVELRQVECINGNIFLHLGAVDLVDGTPIFDIKPYIAYADSEPNAQSSFAQEKLPVKLTVEFTEQAKSAVKKREEKRPHLSRFIRQVLEQDPRPAYQQGKPSDRIYGMSLYEFNVKWRIKAGTVNCVEVIEIEKDK

SEQ ID NO: 58194 - protein, 328 aa, Haemophilus influenzae
MLHFAHIFQNKVHTMNITKPFPLPTGYFGIPLGLAALSLAWFHLENLFPAARMVSDVLGIVASAVWILFILMYAYKLRYYFEEVRAEYHSPVRFSFIALIPITTMLVGDILYRWNPLIAEVLIWIGTIGQLLFSTLRVSELWQGGVFEQKSTHPSFYLPAVAANFTSASSLALLGYHDLGYLFFGAGMIAWIIFEPVLLQHLRISSLEPQFRATMGIVLAPAFVCVSAYLSINHGEVDTLAKILWGYGFLQLFFLLRLFPWIVEKGLNIGLWAFSFGLASMANSATAFYHGNVLQGVSIFAFVFSNVMIGLLVLMTIYKLTKGQFFLK

SEQ ID NO: 58195 - protein, 1415 aa, Haemophilus influenzae
MKDLVKFLKAQSKTSEDFDVIKIGLASPDMIRSWSFGEVKKPETINYRTFKPERDGLFCARIFGPVKDYECLCGKYKRLKHRGVICEKCGVEVTQTKVRRERMGHIELASPVAHIWFLKSLPSRIGLLLDMPLRDIERVLYFEMYIVTEPGMTDLERGQLLTEEQYLDAEDRWQDEFEAKMGAEAIQDLLKGMDLEAECEKLREELQETNSETKRKKITKRLKLLEAFVQSGNKPEWMVMTVLPVLPPDLRPLVPLDGGRFATSDLNDLYRRVINRNNRLKRLLDLIAPDIIVRNEKRMLQESVDALLDNGRRGRAITGSNRRPLKSLADMIKGKQGRFRQNLLGKRVDYSGRSVITVGPYLHLHQCGLPKKMALELFRPFIYAKLESRGYATTIKAAKKMVEREDAIVWDILAEVIREHPILLNRAPTLHRLGIQAFEPILIEGKAIQLHPLVCAAFNADFDGDQMAVHVPLTLEAQLEARALMMSTNNVLSPANGDPIIVPSQDVVLGLYYMTREKVNGKGEGMLLQDPREAEKAYRTGEAELHSRVKVRITEYVKNEAGEFDAKTTLTDTTIGRAILWMIAPKGMPYSLFNQTLGKKAISKLINEAYRRLGLKEAVMFADQIMYTGFAYAARSGSSVGIDDMEIPAKKYEIISAAEEEVAEIQEQFQSGLVTAGERYNKVIDIWAAANERVAKAMMENLSQEEVINREGNPEKQASFNSIFMMADSGARGSAAQIRQLAGMRGLMARPDGSIIETPITANFREGLNVLQYFISTHGARKGLADTALKTANSGYLTRRLVDVAQDLVIVEDDCGTHEGLVMTPLIEGGDEKVPLRELVLGRVAAEDILKPGTEEVLIPRNTLLDEKLCDVLDANSVDSVKVRSVVTCDTDFGVCAKCYGRDLARGHLINQGEAVGVIAAQSIGEPGTQLTMRTFHIGGAASAAAKESSVQVKNTGTVHLMNAKFVTNDESKLVLTSRNTELTITDAFGRTKEHYKVPYGAVLSKGDGQEVTAGETIANWDPHTMPVVSEVSGFVKFVDIIDGLTVTRQTDELTGLSSIVVQDVGERATAGKDLRPTIKLVDANGNDIFLPETDVLAQYFLPGKAIVSLDDGTAVKVGEPLARIPQESVGTKDITGGLPRVADLFEARKPKEPAILAEISGIVSFGKETKGKRRLLITPAEGETYEEMIPKWRQLNVFEGEMVQRGDVISDGAETPHDILRLRGVRAVTEYIVNEVQDVYRLQGVKINDKHIEVIVRQMLRKAVITKAYDSEFLEGEQVEVARVKIVNRQREAEGKPPVEFERELLGITKASLATESFISAASFQETTRVLTEAAVAGKRDELRGLKENVIVGRLIPAGTGFAYHQNRHKHRLVDDVVAKLSEEDEAAIADEFVITADDATQNLATLLNSEIED

SEQ ID NO: 58196 - protein, 1343 aa, Haemophilus influenzae
MGYSYSEKKRIRKDFGKRPQVLNVPYLLTIQLDSFDKFIQKDPEGQQGLEAAFRSVFPIVSNNGYTELQYVDYRLEEPEFDVRECQIRGSTYAAGLRVKLRLVSYDKESSSRAVKDIKENEVYMGEIPLMTDNGTFVINGTERVIVSQLHRSPGVFFDSDKGKTHSSGKVLYNARIIPYRGSWLDFEFDPKDNLFARIDRRRKLPATIILRALGYTTEEILNLFFDKITFEIAGDKLLMTLVPERLRGETASFDIEANGKVYVERGRRITARHIKALEKDNISQVVVPSEYILGKVASKDYVDLESGEIICPANGEISLETLAKLAQAGYTTIETLFTNDLDYGPYISETLRVDPTYDKTSALYEIYRMMRPGEPPTPESSEALFNNLFFSAERYDLSTVGRMKFNRSLAFPEGEGAGILSNEDIIAVMRKLIDIRNGRGEVDDIDHLGNRRIRSVGEMAENQFRIGLVRVERAVKERLSLGDLDAITPQDLINPKPISAAVKEFFGSSQLSQFMDQNNPLSEVTHKRRISALGPGGLTRERAGFEVRDVHNTHYGRLCPIETPEGPNIGLINSLSAFARTNDYGFLETPYRKVVDGQVTEEIEYLSVIDEANYIIAQANSNLDENNRFTDAFVTARGERGESGLYKPEDIHYMDVSTQQVVSVAAALIPFLEHDDANRALMGANMQRQAVPTLRADKPLVGTGMEKPIALDSGVAVVAKRGGTVQYVDASRIVIKVNEDETIAGEAGIDIYNLIKYTRSNQNTCINQIPCVNLGDPINRGEVLADGPSTDLGELALGQNIRVAFMPWNGYNFEDSMLVSERVVQQDRFTTIHIQELSCVARDTKLGAEEITADIPNVGESALSKLDESGIVYVGAEVKGGDILVGKVTPKGETQLTPEEKLLRAIFGEKASDVKDSSLRVPNGTSGTVIDVQVFTRDGVEKDKRALEIEEMQLREAKKDLTEELEILEAGLFARVRNLLISSGADAAQLDKLDRTKWLEQTIADEEKQNQLEQLAEQYEELRKEFEHKLEVKRKKIIKGDDLAPGVLKVVKVYLAVKRQIQPGDKMAGRHGNKGVISKINPVEDMPYDENGQPVEIVLNPLGVPSRMNIGQILETHLGLAAKGIGDQINAMLKQKQEVEKLRSYIQKAYDLLGNGSQKVDLSTFTDEEVLRLAGNLRKGLPVATPVFDGADEAEIKELLKLGGLPTSGQITLYDGRTGEKFERPVTVGYMYMLKLNHLVDDKMHARSTGSYSLVTQQPLGGKAQFGGQRFGEMEVWALEAYGAAYTLQEMLTVKSDDVNGRTKMYKNIVSGNQHMEPGTPESFNVIMKEIRSLGLNIELDEE

SEQ ID NO: 58197 - protein, 229 aa, Haemophilus influenzae
MAKLTKKMKAIKAGVDSTKAYEINEAIAVLKQFATAKFVESVDVAVNLGIDPRKSDQNVRGATVLPHGTGREVRVAVFTQGANADAAKEAGADLVGMEDLAEQIKKGEMNFDVVIASPDAMRVVGQLGQVLGPRGLMPNPKVGTVTPNVAEAVKNAKSGQIRYRNDKNGIIHTTIGKANFSEVQLKENLQALLAALNKAKPTTAKGIFIKKVSISTTMGAGVAVDQASL

SEQ ID NO: 58198 - protein, 142 aa, Haemophilus influenzae
MAKKVQAYVKLQVAAGMANPSPPVGPALGQQGVNIMEFCKAFNARTESLEKGLPIPVVITVYADRSFTFVTKTPPAAVLLKKAAGIKSGSGKPNKDKVGKVTLDQVRQIAETKAADMTGATIETKMKSIAGTARSMGLVVEE

SEQ ID NO: 58199 - protein, 514 aa, Haemophilus influenzae
MLASLQDILDTVKANNLTYHQKLMTLGNIAERLFDPRDLLGYTDEEWGFLQNQMICDLCEGYAIYRPRYILPDYNVYIQKGCEFLELPPPKDLDEALDGLLILYSHVPSITTYPVYIGRLDVLLEPFITDEEKDYIKIKRFLNHIDKTVPDSFCHANIGPYDTKAGRLILRAVIDLEAPTPNMTIRYDKSKTSREFAELAAKACLLVSKPSFANDAYYISDLGEEYGVASCYNALPECGGAYTLTRLRLGTIARTCKSADEMLNELLPRVAKCALSTMDKRHKFVVEESNFFNSSFLEKEGFIKRTNFTGMFAIVGLADATNHLLQCEGLNETFGKSVRGDEIATAIMDKLKEITDAHEGVYAERTGNRYLLHAQVGASNHEEDKRNAPAHRIRVGEEPTLLAHLKQSAPFHKYFPSGTGDLFAFDQTYVDHCDAVVDIIDGAFSLGYRYITTYLKNTDLIRVTGYLVKKSEVEKYRKGEVALRDTTWYGSGTDECANVFDRQLRDEKDVIAEK

SEQ ID NO: 58200 - protein, 359 aa, Haemophilus influenzae
MAKLLDIVKPGVVTGEDVQKVFAYAKEHNFAIPAVNCVGSDSVNAVLETAARVKAPVIIQFSNGGAAFYAGKGIKPTSGTRPDVLGAIAGAKQVHTLAKEYGVPVILHTDHAAKKLLPWIDGLLDAGEKHFAETGRPLFSSHMIDLSEESMEENMAICREYLARMDKMGMTLEIEIGITGGEEDGVDNSDVDESRLYTQPSDVLYVYDQLHPVSPNFTVAAAFGNVHGVYKPGNVKLKPSILGESQEFVSKERNLPAKPINFVFHGGSGSSREEIREAIGYGAIKMNIDTDTQWASWNGILNFYKANEAYLQGQLGNPEGPDAPNKKYYDPRVWLRKMEESMSKRLEQSFEDLNCVDVL

SEQ ID NO: 58201 - protein, 386 aa, Haemophilus influenzae
MSVIKMTDLDLAGKRVFIRADLNVPVKDGKVTSDARIRATIPTLKLALEKGAKVMVTSHLGRPTEGEFKPEDSLQPVVDYLKNAGFNVRLEQDYLNGVDVKDGEIVVLENVRVNKGEKKNDPELGKKYAALCDVFVMDAFGTAHRAQASTYGVAEFAPIACAGPLLAAELDALGKALKEPARPMVAIVGGSKVSTKLEVLNSLSKIADQIIVGGGIANTFIAAAGHNVGKSLYEADLIPVAKELAANTDIPVPVDVRVGLEFSETAAATEKVVNEVKDDESIFDIGDKSAEQLAEIIKNAKTVLWNGPVGVFEFPHFRKGTEIISHAIANSDAFSIAGGGDTLAAIDLFGIADKISYISTGGGAFLEFVEGKVLPAVEILEKRAKN

SEQ ID NO: 58202 - protein, 86 aa, Haemophilus influenzae
MALLITSKCTNCDMCLPECPNEAISIGDEIYVIDPILCTECVGHYDTPTCQKVCPITNCIKPDPEHQETEEQLWERFVMIHHSDKL

SEQ ID NO: 58203 - protein, 193 aa, Haemophilus influenzae
MAKLYFYYSTMNAGKSTTLLQSSYNYRERDMNTLVYTAAIDDRFGVGKVTSRIGISQDAFLFRSETNLFDEINEHLKKEKVHCVLVDEAQFLSKQQVYQLSDVVDKLKIPVLCYGLRTDFQAELFEGSKYLLAWADQLEELKTICYCGRKANFVLRLNDQGEVIKEGAQIQIGGNDSYLSVCRLHYKEKCGQI

SEQ ID NO: 58204 - protein, 342 aa, Haemophilus influenzae
MKILGIETSCDETGVAIYDEEKGLIANQLYTQIALHADYGGVVPELASRDHIRKTAPLIKAALEEANLTASDIDGIAYTSGPGLVGALLVGATIARSLAYAWNVPAIGVHHMEGHLLAPMLDDNSPHFPFVALLVSGGHTQLVRVDGVGKYEVIGESIDDAAGEAFDKTAKLLGLDYPGGAALSRLAEKGTPNRFTFPRPMTDRAGLDFSFSGLKTFAANTVNQAIKNEGELIEQTKADIAYAFQDAVVDTLAIKCKRALKETGYKRLVIAGGVSANKKLRETLAHLMQNLGGEVFYPQPQFCTDNGAMIAYTGFLRLKQGQHSDLAIDVKPRWAMAELPAI

SEQ ID NO: 58205 - protein, 71 aa, Haemophilus influenzae
MPVIKVRENESFDVALRRFKRSCEKAGILAEVRAREFYEKPTTIRKRENATLAKRHAKRNARENARNTRLY

SEQ ID NO: 58206 - protein, 593 aa, Haemophilus influenzae
MKGSIPRPFIDDLLTKSDIVDVINTRVKLKKAGRDYQACCPFHHEKTPSFTVSQKKQFYHCFGCGAHGNAISFLMDYDKLEFIEAIEELAAMAGLEIPYEKRVNHSGKPQANYQTKRNLYELMQEIATFYQNQLPLNTQAQEYLQQRGLSPEIIERFQIGFVPNAMDTVLRKFGVNREEQQKLIELGMLSRNDRGNIYDKFRNRIMFPIRDKRGRTVAFGGRVLTDEKPKYLNSPETITYHKGKELYGLYEALQTNDEPKQLLVVEGYMDVVALAQFGVDYAVASLGTSTTSEQIQLILRSTEQVVCCYDGDRAGRDAAWRALENALPYLEDGRQLKFIFLPDGEEPDTYIRQYGKEKFEEYIESAQSLSEFMFAHLSPQVDFSTKEGRGKLVALAAPLIHQIPGEMLRLSLRNMLAQKLGIFDQTQLENLIPKKLEQANTQQKVTHNKIKKTPMRMVISLLMQNPELVKRMSESGVQALRAEAGFEILEKLTALCRQREGITTGQILEYFRNTSYSNPLEILATWDHLLDESDIINAFSQNYRRLNIQAIERDIEMLIAKERTEGLTNEEKTVLVHLLAGKEQQKKQLVNPL

SEQ ID NO: 58207 - protein, 629 aa, Haemophilus influenzae
MEKNQQSTAEQYSEQIEQLMELGRTQGYLTFAEINDLLPEDAIDPEYYDKLLQTLQNDAGIPVLDEAPESDDMMLSDTIPDEDAVEEATQILSNVESEIGRTTDPVRMYMREMGTVDLLTREDEISIAKRIEGGIDEVQTSISAYPEALNGLLKNYDDVEKGNFRLTDLITGFVDPNAEIEEHNGLDEDFSDEDDEEESSNADVEDNEDEEDNESESTSDSSDSDNSIDPEVAREKFQQLREQHSKTLAVIEKHGRSGKRAQDQIALLGEIFKQFRLVPKQFDLLVLSMKEMMKRVRYQERQLQKILVDIAGMPKDDFEKIITTNGSNSEWVAKALKSSKPWAKRLIKYEDRIYEALNNLAITEENTKLTITQMRDICDAVARGEQKARRAKKEMVEANLRLVISIAKKYTNRGLQFLDLIQEGNIGLMKAVDKFEYRRGYKFSTYATWWIRQAITRSIADQARTIRIPVHMIETINKLNRISRQLLQEMGREATPEELAERMGMPEDKIRKVLKIAKEPISMETPIGDDDDSHLGDFIEDSTLELPLDSATAQSLKVATHEVLEGLTPREAKVLRMRFGIDMNTDHTLEEVGKQFDVTRERIRQIEAKALRKLRHPSRSETLRSFLDE

SEQ ID NO: 58208 - protein, 225 aa, Haemophilus influenzae
MSNTVATMINKRNIMRNYIKIGVAGPVGAGKTALIEKLTREIASKYSVAVITNDIYTQEDAEFLTKNSLLPPERIMGVETGGCPHTAIREDASMNLEAVDEMVTRFPDVEIVFIESGGDNLSATFSPDLADVTIFVIDVAQGEKIPRKGGPGITRSDLLVINKTDLAPFVGADLSVMERDARRMRNGQPFIFTNLMKKENLDGVIGWIEKYALLKNVEEPASLVR

SEQ ID NO: 58209 - protein, 194 aa, Haemophilus influenzae
MVESKATLEEYVQTQLLQNWIYNDGAYLSLAFDAMCEGNFDRLCELDWQLSATKVARESREGSFKLGVRLLKIFIRYETHTLLTAYQQAIAEKRVQGYFPIVFAMVAQAMGLSKADTLYAFYYNAAVGVITNGVKLIPLSQMDGQDILFDLRGSLVQAVELSLDPDEEWLGAATLANDIRAMQHEVLYTRLYMS

SEQ ID NO: 58210 - protein, 572 aa, Haemophilus influenzae
MALTISRAQYVATYGPTVGDKVRLGDTNLWATIEQDLLTKGDECKFGGGKSVRDGMAQSGTATRDNPNVLDFVITNVMIIDAKLGIIKADIGIRDGRIVGIGQAGNPDTMDNVTPNMIIGASTEVHNGAHLIATAGGIDTHIHFICPQQAQHAIESGVTTLIGGGTGPADGTHATTCTPGAWYMERMFQAAEALPVNVGFFGKGNCSTLDPLREQIEAGALGLKIHEDWGATPAVIDSALKVADEMDIQVAIHTDTLNESGFLEDTMKAIDGRVIHTFHTEGAGGGHAPDIIKAAMYSNVLPASTNPTRPFTKNTIDEHLDMLMVCHHLDKRVPEDVAFADSRIRPETIAAEDILHDMGVFSIMSSDSQAMGRIGEVVIRTWQTADKMKMQRGELGNEGNDNFRIKRYIAKYTINPAIAHGIAEHIGSLEVGKIADIVLWKPMFFGVKPEVVIKKGFISYAKMGDPNASIPTPQPVFYRPMYGAQGLATAQTAVFFVSQAAEKADIRAKFGLHKETIAVKGCRNVGKKDLVHNDVTPNITVDAERYEVRVDGELITCEPVDSVPLGQRYFLF

SEQ ID NO: 58211 - protein, 100 aa, Haemophilus influenzae
MHLTSREQEKLMLFLAGELAAKRKARGVKLNYPETIAYIASHLQEAAREGMSVAEVMQYGATLLTVDDVMEGVAEMVHEVQIEATFPDGTKLVTVHNPIR

SEQ ID NO: 58212 - protein, 548 aa, Haemophilus influenzae
MAAKDVKFGNDARVKMLKGVNVLADAVKVTLGPKGRHVILDKSFGAPTITKDGVSVAREIELEDKFENMGAQMVKEVASKANDAAGDGTTTATVLAQAIVNEGLKAVAAGMNPMDLKRGIDKAVSAVVSELKNLSKPCETAKEIEQVGTISANSDSIVGQLISQAMEKVGKEGVITVEDGTGLEDELDVVEGMQFDRGYLSPYFINKPETATVELDNPYLLLVDKKISNIRELLPVLEGVAKAGKPLLIIAEDVEGEALATLVVNTMRGIVKVAAVKAPGFGDRRKAMLQDIAILTAGTVISEEIGMELEKATLEDLGQAKRVVINKDNTTIIDGIGDEAQIKGRVAQIRQQIEESTSDYDKEKLQERVAKLAGGVAVIKVGAATEVEMKEKKDRVDDALHATRAAVEEGIVAGGGVALVRAAAKVAASLKGDNEEQNVGIKLALRAMEAPLRQIVTNAGEEASVVASAVKNGEGNFGYNAGTEQYGDMIEMGILDPTKVTRSALQFAASVAGLMITTECMVTDLPKDDKADLGAAGMGGMGGMGGMM

SEQ ID NO: 58213 - protein, 149 aa, Haemophilus influenzae
MQVILLDKIVHLGQVGDQVNVKSGFARNFLIPQGKAVMATKANIEHFEARRAELEATAAANLAAAQARAAEVTALGSVTIASKAGDEGRLFGAITTRDVAEAVTAAGVKIAKSEVRLPNGPIRTLGDHDVRFQLHGEVFAALDVIVVAE

SEQ ID NO: 58214 - protein, 75 aa, Haemophilus influenzae
MARYFRRRKFCRFTAENVVEIDYKDIATLKNYISESGKIVPSRITGTRAKYQRQLARAIKRARYLALLPYTDNHQ

SEQ ID NO: 58215 - protein, 94 aa, Haemophilus influenzae
MGVVSRLPKRLKSPSGIEHCKFLLEHRSDQIESGFTRQAWLKMPVQISGNQLIEKTQSITVGSKILVVGFITSHKTQSGLCQLVLHAEQIEFID

SEQ ID NO: 58216 - protein, 125 aa, Haemophilus influenzae
MRHYEIVFMVHPDQSEQVPGMIERYTGSVKEAGGQVHRLEDWGRRQLAYPINKLHKAHYVLMNVEAPQQVIDELETTFRYNDAVLRSLVIHTKHAVTEASPMKAAKEERKPLAEVENNDFEDAEE

SEQ ID NO: 58217 - protein, 84 aa, Haemophilus influenzae
MRIKNRLFLEDTMAKEDCIEMQGTILETLPNTMFRVELENGHVVTAHISGKMRKNYIRILTGDKVTVEMTPYDLSKGRIIFRSR

SEQ ID NO: 58218 - protein, 287 aa, Haemophilus influenzae
MNSKKHLGHTARKRFGQNFLHDTSVIQGIVAAIYPQPNQFLVEIGPGLGALTEPVGELVDHLTVVELDRDLAERLRHHPFLHQKLTVIETDAMQFDFGALYTKENLAEKGQKLRVFGNLPYNISTPLMFHLFKYHDVIQDMHFMLQKEVVKRLCAAPNSKAYGRLTIMAQYFCQVMPVLEVPPSAFKPAPKVDSAVVRLIPHKELPHPVKDLYWLNRVCSQAFNQRRKTLRNALSTLFSPENLTALGIDLNARAENLAIADYARLANWLADNPPADVNKDEILDSEE

SEQ ID NO: 58219 - protein, 484 aa, Haemophilus influenzae
MSVKGDIGVIGLAVMGQNLILNMNDHGFKVVAYNRTTSKVDEFLQGAAKGTNIIGAYSLEDLAAKLEKPRKVMLMVRAGDVVDQFIEALLPHLEEGDIIIDGGNSNYPDTNRRVKALAEKGIRFIGSGVSGGEEGARHGPSIMPGGNQEAWQYVKPIFQAISAKTEQGEPCCDWVGGEGAGHFVKMVHNGIEYGDMQLICEAYQFLKEGLGLSYEEMQAIFAEWKNTELDSYLIDITTDILGYKDASGEPLVEKILDTAGQKGTGKWTGINALDFGIPLTLITESVFARCVSSFKDQRVAANQLFGKTITPVEGDKKVWIEAVRKALLASKIISYAQGFMLIREASEQFGWDINYGATALLWREGCIIRSRFLGNIRDAYEANPNLVFLGSDSYFKGILENALSDWRKVVAKSIEVGIPMPCMASAITFLDGYTSARLPANLLQAQRDYFGAHTYERTDKPRGEFFHTNWTGRGGNTASTTYDV

SEQ ID NO: 58220 - protein, 494 aa, Haemophilus influenzae
MQTDNNCIVIFGASGDLTHRKLIPALYNLYKIGRLSENFSVLGVARSDLNDETFREKMREALIHNEETTPETLDAFCSHLYYQAVNTSDAQDYGKLVPRLDDLHDKYQTCGNTFYYMSTPPSLYGVIPECLAAHGLNTEEYGWKRIIVEKPFGYDEKTAQTLDVQIHRFFEEHQIYRIDHYLGKETVQNLLVLRFSNGWFEPLWNRNFIDYVEITGAESIGVEERGGYYDGSGAMRDMFQNHLLQVLAMVAMEPPAIINANSMRDEVAKVMHSLRPLTSEDMENNLVLGQYTAAEINGKMEKGYLEEKGVPANSRTETYIALRCEIENWRWAGVPFYVRTGKRLPARVTEIVIHFKTTPHPVFSQNAPENKLIIRIQPDEAISMRFGLKKPGAGFEAKEVSMDFRYADLAGAQVLTAYERLLLDAMKGDATLFARTDAVHAAWKFVQPILDYKANGGRIHEYEAGTWGPVAADKLIAKQGKVWRKPSGLMKKKV

SEQ ID NO: 58221 - protein, 131 aa, Haemophilus influenzae
MAEKEVRLDKWLWAARFYKTRSIAKAMIESGKVHYNNQRAKVSKIVEVGAMLKLRQGNEEKEIKIIALSDQRRGAPEAQLLYQETESSVKKREEIAWARKNNSLSMPHPDRRPNKKERRDLLKFKHQDKFE

SEQ ID NO: 58222 - protein, 806 aa, Haemophilus influenzae
MSETTNDNYGASSIKVLKGLDAVRKRPGMYIGDTDDGTGLHHMVFEVVDNAIDEALAGHCSDIIVTIHDDNSVSVQDDGGGIPVDIHPEEGVSAAEVIMTVLHAGGKFDDNSYKVSGGLHGVGVSVVNALSDKLQLTIRRQGHVHEQFYHLGEPQSPLTVIGETEATGTTVRFWPSSDIFAITTFDYKILAKRLRELSFLNSGVSIRLIDKRDGSEDHFHYEGGIQAFVEYLNKNKNPIHPKPFYFTAEKDGIGVEVALQWNDGVNENVYCFTNNIPQRDGGTHLAGFRGALTRSLNSYMENEGMLKKEKVATSGDDAREGLVAIISVKVPDPKFSSQTKDKLVSSEVKSAVESAMNEKMQEYLLENPADAKIIVNQIIMAARAREAARKAREMTRRKGALDIAGLPGKLADCQEKDPALSELYLVEGDSAGGSAKVGRDRKTQAILPLKGKILNVEKARFDKMLSSQEVGTLITALGCGIGRDEYNPDKLRYHHIIIMTDADVDGSHIRTLLLTFFYRQMPELIERGYVYIAQPPLYKVKKGKQERYIKDADEMEQYELTLALDGAELHISTNAPAMNALVFEKLVAEYNSVQKLIGRLNRHYPAPVLQGLIYQSPISIEMMKEESAVENWGKSFVEQLTAKETEAHQYSVRTQFNAERQVYEAVITVRKHGIDTDYFLNFDFVHGNEYAKIVSLNKQLNGLLEEGAYVIRGEKVQPVRSFEQAVEWLVKESRKGLEVQRYKGLGEMNADQLWETTMDPNSRRMLKVSIKDAVAADQLFTTLMGDEVEPRREFIELNALRANLDV

SEQ ID NO: 58223 - protein, 762 aa, Haemophilus influenzae
MLNQQISQIIAAELTVQPQQIFAAIQLLDDGNTIPFIARYRKEATGGLDDTQLRHFETRLIYLRELEDRRQTILKSIEEQGKLTDELRDKIHATQSKTELEDLYLPYKPKRRTKGQIAIEAGLEPLANLLWNEPKNDPESTALSFVDAEKGVADSKAALDGARIILMERFAEDAGLLAKVRDYLAKNAVIVSKVIEGKETEGAKFQDYFDHQELLKNVPSHRALAMFRGRNEGILQLSLNADPDAEEGSRQSYCEEIIRDYLDVRFTGQPADKWREQVIAWTWKIKVSLHLETELMASLREKAEEEAIDVFARNLTALLMAAPAGAKSTMGLDPGLRTGVKVAMVDNTGKLLDTTTIYPHTGREAEAQVAIFSLIRKHNVELIAIGNGTASRETERFAKDVIKEIKENKPQTVVVSEAGASVYSASEFAANEFPNLDVSLRGAVSIARRLQDPLAELVKIEPKAIGVGQYQHDVNQTQLARKLDAVVEDCVNAVGVDLNTASAPLLARVAGMTKTLAQNIVEYRDENGRFESRSELKKVPRLGPKAFEQCAGFMRIANGKNPLDASGVHPEAYPVVEKILQATAQSIQDLMSNAGVVRQLDAKQFIDEQFGLPTVQDIFKELEKPGRDPRGEFKTAVFAEGVEEITDLKSGMILEGTVTNVTNFGAFVDIGVHQDGLVHISSLSDKFVEDPHQVVKTGNIVKVKVLEVDVPRKRIALTMRLDESAVKNDSKSDRTLSTRPRGNMQREARNSRGNNVIGNAFA

SEQ ID NO: 58224 - protein, 241 aa, Haemophilus influenzae
MSSMEGKKVPQVTFRTRQGDKWVDVTTSELFDNKTVIVFSLPGAFTPTCSSSHLPRYNELAPVFKKYGVDDILVVSVNDTFVMNAWKEDEKSENISFIPDGNGEFTEGMGMLVGKEDLGFGKRSWRYSMLVKNGVVEKMFIEPNEPGDPFKVSDADTMLKYLAPQHQVQESISIFTKPGCPFCAKAKQLLHDKGLSFEEIILGHDATIVSVRAVSGRTTVPQVFIGGKHIGGSDDLEKYFA

SEQ ID NO: 58225 - protein, 394 aa, Haemophilus influenzae
MSKEKFERTKPHVNVGTIGHVDHGKTTLTAAITTVLAKHYGGAARAFDQIDNAPEEKARGITINTSHVEYDTPTRHYAHVDCPGHADYVKNMITGAAQMDGAILVVAATDGPMPQTREHILLGRQVGVPYIIVFLNKCDMVDDEELLELVEMEVRELLSQYDFPGDDTPIVRGSALQALNGVAEWEEKILELANHLDTYIPEPERAIDQPFLLPIEDVFSISGRGTVVTGRVERGIIRTGDEVEIVGIKDTAKTTVTGVEMFRKLLDEGRAGENIGALLRGTKREEIERGQVLAKPGSITPHTDFESEVYVLSKDEGGRHTPFFKGYRPQFYFRTTDVTGTIELPEGVEMVMPGDNIKMTVSLIHPIAMDQGLRFAIREGGRTVGAGVVAKIIK

SEQ ID NO: 58226 - protein, 700 aa, Haemophilus influenzae
MARTTPIERYRNIGISAHIDAGKTTTTERILFYTGVSHKIGEVHDGAATMDWMEQEQERGITITSAATTAFWSGMSQQFPQHRINVIDTPGHVDFTVEVERSMRVLDGAVMVYCAVGGVQPQSETVWRQANKYEVPRIAFVNKMDRTGANFLRVVEQLKTRLGANAIPLQLPVGAEENFTGVVDLIKMKAINWNEADQGMTFTYEEVPANMQADCEEWRQNLVEAAAEASEELMEKYLGGEDLTEEEIKSALRQRVLANEIILVTCGSAFKNKGVQAMLDAVVEYLPAPTDIPAIKGINPDETEGERHASDEEPFSSLAFKIATDPFVGNLTFFRVYSGVINSGDTVLNSVRQKRERFGRIVQMHANKREEIKEVRAGDIAAAIGLKDVTTGDTLCAIDAPIILERMEFPEPVISVAVEPKTKADQEKMGLALGRLAQEDPSFRVHTDEESGETIISGMGELHLDIIVDRMKREFKVEANIGKPQVSYRETIRTRVNDVEGKHAKQSGGRGQYGHVVIDLYPLDPEGPGYEFVNEIKGGVIPGEYIPAVDKGIQEQLKSGPLAGYPVVDLGVRLHFGSYHDVDSSELAFKLAASLAFKAAFSKANPVLLEPIMKVEVETPPEYVGDVIGDLSRRRAMVNGQEANEFVVKIYAEVPLSEMFGYATDLRSQTQGRASYSMEPLKYAEAPTSVAAAVIEARKK

SEQ ID NO: 58227 - protein, 156 aa, Haemophilus influenzae
MPRRRSVEARKILPDPKFGSELLAKFINVIMVDGKKSVAESIVYGALETLAQRTGKEPLEAFEVALENVRPTVEVKSRRVGGSTYQVPVEVRPVRRNALGMRWIVEAARKRGDKSMALRLANELSDASDNKGAAVKKREDVHRMAEANKAFAHYRW

SEQ ID NO: 58228 - protein, 124 aa, Haemophilus influenzae
MATINQLVRKPRVKKVVKSNVPALEACPQKRGVCTRVYTTTPKKPNSALRKVCRIRLTNGFEVTSYIGGEGHNLQEHSVVLIRGGRVKDLPGVRYHTVRGALDCAGVKDRKQGRSKYGVKRPKA

SEQ ID NO: 58229 - protein, 629 aa, Haemophilus influenzae
MFYTETYDVIVIGGGHAGTEAALAPARMGFKTLLLTHNVDTLGQMSCNPAIGGIGKGHLVKEVDAMGGLMAHAADKAGIQFRTLNSSKGPAVRATRAQSDRVLYRQAVRTALENQPNLDIFQQEATDILIEQDRVTGVSTKMGLTFRAKSVILTAGTFLAGKIHIGLENYEGGRAGDSASVNLSHRLRDLGLRVDRLKTGTPPRIDARTINFDILAKQHGDEVLPVFSFMGSVDDHPQQIPCYITHTNEQTHEVIRNNLDRSPMYTGVIEGIGPRYCPSIEDKVMRFADRNSHQIYLEPEGLTSNEVYPNGISTSLPFDVQMGIVNSMKGLENARIVKPGYAIEYDYFDPRDLKPTLETKSISGLFFAGQINGTTGYEEAAAQGLLAGINAGLYVQEKDAWYPRRDQSYTGVLVDDLCTLGTKEPYRVFTSRAEYRLLLREDNADIRLTPIAHELGLIDEARWARFNQKMENIEQERQRLRSIWLHPRSEYLEEANKVLGSPLVREASGEDLLRRPEMTYDILTSLTPYKPAMEDKEAVEQVEIAIKYQGYIEHQQEEIEKQKRHENTAIPANFDYSKVSGLSNEVRAKLEQHRPVSIGQASRISGITPAAISIILVNLKKQGMLKRGE

SEQ ID NO: 58230 - protein, 509 aa, Haemophilus influenzae
MDASKKKKTFNFPSAFTILFAILILAVGLTWVIPSGSYSKLTYNSTDNVFVVKAYGVDDKTYPATTDTLDNLNIKIKLSNFTEGVIKKPIAIPGTYQRVEQHHKGIEDITKSMVEGTIEAVDVMVFIFVLGGMIGVINRTGSFNAGLMALVKKTKGNEFFIVFCVSVLMVLGGTTCGIEEEAVAFYPILVPVFLALGYDAIVCVGAIFLAASMGTAFSTINPFSVVIASNAAGIQFTEGIGFRALGLVLGATCVIAYLYWYCKKIKADPSFSYTYDDREEFRQRYMKNFDPNTTIPFSARRKLILTLFCISFPIMIWGVMVGGWWFPQMAASFLAITIIIMFISGLSEKDIMESFTEGASELVGVSLIIGLARGVNLVLEQGMISDTILDYMSNVVSGMPGSVFILGQLVVFIFLGLIVPSSSGLAVLSMPIMAPLADSVGIPRDIVVSAYNWGQYAMLFLAPTGLVLVTLQMLQIPFDRWVKFVMPMIGCLLLIGSILLVVQVSLYSV

SEQ ID NO: 58231 - protein, 310 aa, Haemophilus influenzae
MRIVIALGGNALLRRGEPMTAENQRQNVRIACEQIAKIWPNNELVIAHGNGPQVGLLALQGAAYTDVPTYPLDVLGAETAGMIGYMIQQELGNLVPFEVPFATLLSQVEVDINDPAFKNPTKPIGPVYTKEEAERLAKEKNWSIAQDGDKYRRVVPSPLPKRIFEIRPVKWLLEKGSIVICAGGGGIPTYYDEHHNLQGVEAVIDKDLCSALLAENLDADLFIIATDVSATFVDWGKPNQKAISVASPEAISELGFASGSMGPKVQAAINFAKQTGKDAVIGSLSDIVDIVKGKAGTRITKKTEGISYYA

SEQ ID NO: 58232 - protein, 334 aa, Haemophilus influenzae
MAFNMKNRHLLSLVHHTEREIKYLLDLSRDLKRAKYAGTEQQKLKGKNIALIFEKTSTRTRCAFEVAAYDQGAQVTYIDPNSSQIGHKESMKDTARVLGRMYDGIEYRGFKQSIVQELADYAGVPVFNGLTDEFHPTQMLADVLTMIEHCDKPLSEISYVYIGDARNNMGNSLLLIGAKLGMDVRICGPKALLPEANLVEMCEKFAKESGARITVTEDIDKAVKGVDFIHTDVWVSMGEPLETWGERIKLLLPYQVTPELMKRTGNPKVKFMHCLPAFHNSETKVGRQIAEKYPELANGIEVTEEVFESPMNIAFEQAENRMHTIKAVMVASLA

SEQ ID NO: 58233 - protein, 272 aa, Haemophilus influenzae
MNLPFRAMVSDLDGTLLTPEHLVGDLTIDTLRALEQKGVDIILATGRNHTDVSSILGKIGAERAVMITSNGARVRDLQGNLLYSNSLPEELVLELYKTPFDTSKVCMNSYQDEGWFTNKDIPAMRQFHKESGFDYNVVDFSKHHGRGTEKVFFIGKTPEDLVEVETYLRDKFGDVTTIVYSALACLEVMNKNVSKGDALKHLLESREYELKDCIAFGDGMNDVEMLSWAGKGCIMKDADIRLKMACPELEVIGSNKEESVARYLRTQFGLDY

SEQ ID NO: 58234 - protein, 126 aa, Haemophilus influenzae
MQEKNFSEEEIDDALSRCQAKNWQSDRRFSENYLNSRVQKGYGVGRIRQELRQLKGVSSDIIDEVLMESEIDWYEMAENLLRKKFPNYNEQQTPKMKQKIWQYMLSHGFRSDEFADLIGQNQSEWD

SEQ ID NO: 58235 - protein, 354 aa, Haemophilus influenzae
MATQEEKQKALAAALGQIEKQFGKGSIMKLGDTKTLDVESISTGSLGLDVALGIGGLPMGRIVEIFGPESSGKTTLTLSVIAQAQKAGKTCAFIDAEHALDPIYAAKLGVDVKELFVSQPDNGEQALEICDALVRSGAIDVIIVDSVAALTPKAEIEGDMGDSHMGLQARLMSQALRKLTGQIKNANCLVVFINQIRMKIGVMFGNPETTTGGNALKFYSSVRLDIRRTGSVKDGENIIGNETRVKVVKNKLAAPFRQVDFQILYGEGISKAGELLELGVKHKLVEKSGAWYSYNGEKIGQGKANSMKWLNENIEKSDELEARLRAELVANPEQALMADIEQSENNTESESDFE

SEQ ID NO: 58236 - protein, 335 aa, Haemophilus influenzae
MITSQTPITVLGAGSYGTALAITFSRNGSPTHLWGHNPAHIAQMQTERQNYRFLPDVIFPEDLHLESNLAQAMEYSQDILIVVPSHAFGEILIKIKPHLKAHHRLIWATKGLERNTGRLLQTVVEEQLGTQYPLAVLSGPTFAKELAQGLPSAITLAANNEQFAREFQSRIHCSKGFRVYINSDMTGVQLGGAIKNVIAIGAGISDGMGFGANARTALITRGIAEITRLGISLGANTNTFMGMSGLGDLVLTCTDNQSRNRRFGLMLGKGLDAQMAMENIGQVVEGFYNTKEAYLLAQRQGVEMPITEQIYQMLFCGKSAQDVAISLLGRACKGE

SEQ ID NO: 58237 - protein, 267 aa, Haemophilus influenzae
MTLDVWQHIRQEAKELAENEPMLASFFHSTILKHQNLGGALSYLLANKLANPIMPAISLREIIEEAYQSNPSIIDCAACDIQAVRHRDPAVELWSTPLLYLKGFHAIQSYRITHYLWNQNRKSLALYLQNQISVAFDVDIHPAAKIGHGIMFDHATGIVVGETSVIENDVSILQGVTLGGTGKESGDRHPKVREGVMIGAGAKILGNIEVGKYAKIGANSVVLNPVPEYATAAGVPARIVSQDKAAKPAFDMNQYFIGIDDGMNLNI

SEQ ID NO: 58238 - protein, 428 aa, Haemophilus influenzae
MNAKVLEKKFIVPFVLITSLFALWGFANDITNPMVAVFQTVMEIPASEAALVQLAFYGGYGTMAIPAALFASRYSYKAGILLGLALYAIGAFLFWPAAQYEIFNFFLVSLYILTFGLAFLETTANPYILAMGDPQTATRRLNFAQSFNPLGSITGMFVASQLVLTNLESDKRDAAGNLIFHTLSEAEKMSIRTHDLAEIRDPYIALGFVVVAVFIIIGLKKMPAVKIEEAGQISFKTAVSRLAQKAKYREGVIAQAFYVGVQIMCWTFIVQYAERLGFTKAEGQNFNIIAMAIFISSRFISTALMKYLKAEFMLMLFAIGGFLSILGVIFIDGVWGLYCLILTSGFMPLMFPTIYGIALYGLKEESTLGAAGLVMAIVGGALMPPLQGMIIDQGEVMGLPAVNFSFILPLICFVVIAIYGFRAWKILK

SEQ ID NO: 58239 - protein, 144 aa, Haemophilus influenzae
MLKGIHPALSPELLKTLAEMGHGDEIVLADAHFPAHSLHKNVIRADGISIDILLEAITPLFEFDAYVDAPLLMMKAVEGDSLDPNVETRYLNAIESAVGFTPNLTCLERFDFYTRAKQAYAVVVSGEIAKYGNIIIKKGVTPIL

SEQ ID NO: 58240 - protein, 273 aa, Haemophilus influenzae
MKLKQLFAITAIASALVLTGCKEDKKPEAAAAPLKIKVGVMSGPEHQVAEIAAKVAKEKYGLDVQFVEFNDYALPNEAVSKGDLDANAMQHKPYLDEDAKAKNLNNLVIVGNTFVYPLAGYSKKIKNVNELQDGAKVVVPNDPTNRGRALILLEKQGLIKLKDANNLLSTVLDIVENPKKLNITEVDTSVAARALDDVDLAVVNNTYAGQVGLNAQDDGVFVEDKDSPYVNIIVSRTDNKDSKAVQDFIKSYQTEEVYQEAQKHFKDGVVKGW

SEQ ID NO: 58241 - protein, 451 aa, Haemophilus influenzae
MKKFSSKTIKAKNSVKMTALSTRAIAANLILQVLDEGKSLSALIPEVQLSVKAQDLPLLQEICFGVCRVLPRLEQIIKRLVDKPLKGKTRIVHCLLLVGLYQLLYMRVPAHAAVDEVVNATKSLKSDSFRGLVNAVLRRFLREQDEILAIIDKNWQTLHPEWFVNKLKKAYPNWREIIEANNQKPPMWLRVNSQKNALETYRTLLEEQGVSSKTSHHPNALCLDIPIAVQKLPHFEEGAVTVQDLSAQWAATLLEPKNEEWILDACAAPGGKTTHILELAPQANVIALDVESHRLKRVEENLERLNQQAIVVCGDASKPDEWLAEIGKSAAKFDRILLDAPCSATGVIRRHPDIKWLRKETDIAQLVELQKKILSALWEKLKPNGVLLYATCSVLPEENCEQIQAFLNAHADAELLSLPFSDDKSAVGFQFIPQPNSGDGFYYAKLLKRAS

SEQ ID NO: 58242 - protein, 458 aa, Haemophilus influenzae
MKIIILGAGQVGTTLAENLVSEDNDITLVDNESPQLQTLQEKHDLRVVQGSPSSPKVLRDAGAADADLMVAVTASDEINMVACQMGYTLFNTPTRIARIRNSEYLREKDKLFNNENIPIDHLISPENLVTDEITRLIAYPGALQVAHFANNRISIVVVKAYYGGALVGYALSAFREHMPHIDCRIMSILRNGKPIRPQGSTIVEAGDEITFICATEHIKAIMGELQRLEKPYKRVMIVGGGNVAFGVAKRLENSCTVKLIERDSNRAQALAEKLPKTLVFNGDASDQNLLFEEHIESVDVFLSLSSDDEANIMSALLAKRLGAKKAMVLIQRIAYINLIQGGTIDIAVSPQQVTISALLGHVRKGDVKNVATLRHGIAEAIEIVAHGNVNTSNIVGRKIGELRLPMGIIIGALLRGNDVIIARRQVIIEEGDHIVIYLSDKKNVPEIEKLFQPSAFFI

SEQ ID NO: 58243 - protein, 85 aa, Haemophilus influenzae
MKKYNKLRIEWDCRRGMLELDKIIMPFYLTHFHELTDDKKDIFIRLLASTDLQLFSWFFNLAKSQDVELQMMVEYIQKVQKIIIN

SEQ ID NO: 58244 - protein, 394 aa, Haemophilus influenzae; identical to SEQ ID NO: 58225

SEQ ID NO: 58245 - protein, 327 aa, Haemophilus influenzae
MPQNLPHFYRGRFSVAPMLDWTTRHCRYFHRQFSKHALLYTEMVTAPAIIHAKYDHLDFDLQENPVALQLGGSDPEQLKYCAKLAEERGYHEINLNVGCPSDRVQNGMFGACLMAKADLVADCVEQMQSAVKIPVTVKTRIGIDELDSYEFLCDFIEKVQGKGCQEFIIHARKAWLSGLSPKENREIPPLDYIRVYQLKRDFPHLTIAINGGIKTIEEMKQHLQYVDGVMVGREAYQNPSLLGQIDQALFDPNAPIVTAHEAVESMLPYIEQQLSQGIHLNHIVRHILGAFQNCKGARQWRRYLSENAFKQGAGIEVVETALSFVES

SEQ ID NO: 58246 - protein, 334 aa, Haemophilus influenzae
MAKPIVFSGVQPSGELTIGNYLGALRNWVKMQEDYECIFCVVDLHAITVRQDPVALRKATLDVLALYLACGIDPNKSTIFVQSHVPEHTQLSWVLNCYTYFGEMSRMTQFKDKSARYAENINVGLFDYPVLMAADILLYQAKSVPVGDDQKQHLEITRDIANRFNALYGNIFTIPEIFIGKAGARIMSLQDPEKKMSKSDDNRNNVVTLLEDPKSVAKKIKRAVTDSDEPPVVRYDVQNKAGVSNLLDILSAVTDKPIADLEKEFEGKMYGHLKTAVADEVSTLLASLQERFHQYRNDETLLDNILRQGAEKARAKAQETLAKVYEAVGFVAAK

SEQ ID NO: 58247 - protein, 456 aa, Haemophilus influenzae
MQLSTLTALSPLDGRYQDKVTPLRAIFSEFGLMKFRVAVEVRWLQKLASTADITEVPPFSTQANAFLDGIVANFNEADAARIKEIERTTNHDVKAVEYFLKEKIQNEVELVKVSEFIHFACTSEDINNLSHALMLSTARDEVILPEWQKLIDEITRLAEEYKTIPLLSRTHGQPASPSTVGKEMANVVYRLKRQFKQLQNAEILGKINGAVGNYNAHLSAYPNIDWHKFSEEFVTSLGIQWNPYTTQIEPHDYITEFFDAVVRFNTIIIDFDRDLWGYIALNHFKQRTIAGEIGSSTMPHKVNPIDFENSEGNLGLANAVMTHLGQKLPISRWQRDLTDSTVLRNLGVGLGYCLIAYASTRKGISKLEVNQPHLLEELNQNWEVLAEPIQTVMRRYGIEKPYEKLKELTRGKRVTEQAMREFIDKLDIPQEEKLRLQKLTPATYIGAAVELVEKLS

SEQ ID NO: 58248 - protein, 163 aa, Haemophilus influenzae
MALNLQDKQAIVAEVNEAAKGALSAVIADSRGVTVEKMTELRKSAREAGVTMRVVRNTLLRRAVEGTDYECLKDTFVGPTLIAFSNEHPGARARLFKEFAKANDKFEIKGAAFEGKIQDVEFLATLPTYEEAIARLMGTMKEAAAGKLARTFAALRDKLQEAA

SEQ ID NO: 58249 - protein, 123 aa, Haemophilus influenzae
MSLTNEQIIEAIASKTVTEIVELIAAMEEKFGVSAAAAVAAAPAAGGAAAAEEKTEFDVVLKSAGANKVAVIKAVRGATGLGLKEAKDLVESAPANLKEGVSKEEAEALKKELEEAGAEVEVK

SEQ ID NO: 58250 - protein, 456 aa, Haemophilus influenzae
MTKKALSAVILAAGKGTRMYSDLPKVLHTIAGKPMVKHVIDTAHQLGSENIHLIYGHGGDLMRTHLANEQVNWVLQTEQLGTAHAVQQAAPFFKDNENIVVLYGDAPLITKETLEKLIEAKPENGIALLTVNLDNPTGYGRIIRENGNVVAIVEQKDANAEQLNIKEVNTGVMVSDGASFKKWLARVGNNNAQGEYYLTDLIALANQDNCQVVAVQATDVMEVEGANNRLQLAALERYFQNKQASKLLLEGVMIYDPARFDLRGTLEHGKDVEIDVNVIIEGNVKLGDRVKIGTGCVLKNVVIGNDVEIKPYSVLEDSIVGEKAAIGPFSRLRPGAELAAETHVGNFVEIKKSTVGKGSKVNHLTYVGDSEIGSNCNIGAGVITCNYDGANKFKTIIGDDVFVGSDTQLVAPVKVANGATIGAGTTITRDVGENELVITRVAQRHIQGWQRPIKKK

SEQ ID NO: 58251 - protein, 313 aa, Haemophilus influenzae
MIREPYFHQFALAELLPFFEQFPTQYLSGKRNIKLAYRHLIQPESAVRKLMILVNGRAENMLKWSELAYDFYHQGYDVLLFDHRGQGYSQRIIPQKGHLDEFRFYVDDMAKIIEKVTALFSYSTQHLLAHSMGALIATYYLANYDHHINKAVLSSPFYGILLKHPIRDELIITLMNILGQGERYVFGKGAYQQAHLEYNELTFCKTRMKWMNRINRKNPAINLGGPTFRWVHLCLNAIKRLPKVIPKIEIPILILQAEKEKIVDNKNLEKLTALFPNARCEVILNAKHEVLFEKDNVRRNVLKSVNHFLNVQS

SEQ ID NO: 58252 - protein, 371 aa, Haemophilus influenzae
MKNVGFIGWRGMVGSVLMDRMSQENDFENLNPVFFTTSQAGQKAPVFGGKDAGDLKSAFDIEELKKLDIIVTCQGGDYTNEVYPKLKATGWDGYWVDAASALRMKDDAIIVLDPVNQHVISEGLKKGIKTFVGGNCTVSLMLMAIGGLFEKDLVEWISVATYQAASGAGAKNMRELLSQMGLLEQAVSSELKDPASSILDIERKVTAKMRADNFPTDNFGAALGGSLIPWIDKLLPETGQTKEEWKGYAETNKILGLSDNPIPVDGLCVRIGALRCHSQAFTIKLKKDLPLEEIEQIIASHNEWVKVIPNDKEITLRELTPAKVTGTLSVPVGRLRKLAMGPEYLAAFTVGDQLLWGAAEPVRRILKQLVA

SEQ ID NO: 58253 - protein, 670 aa, Haemophilus influenzae
MKLNPQQQQAVEYVTGPCLVLAGAGSGKTRVIINKIAHLIEKCGYSPKQIAAVTFTNKAAREMKERVAHSIGKEQSKGLLVSTFHTLGFDILKREYKALGFKSNMTLFDEHDQFALLKELTADVLKEDKDLLRELISVISNWKNDLISPKQAFALARDAKYQTFAKCYERYATQIRTYNALDFDDLIMLPTLLFKQNEEVRSKWQAKIRYLLVDEYQDTNTSQYELIKLLVGDRACFTVVGDDDQSIYSWRGARPENMVRLRDDFPRLNVIKLEQNYRSTQRILHCANILIDNNEHVFDKKLFSTIGKGEKLLVIEAKNEEHEAERIVAELIAHRFSRKTKYKDYAILYRGNHQSRLLEKVLMQNRIPYKISGGTSFFSRAEIKDMMAYLRLVVNQDDDAAFLRIVNTPKREIGTATLQKLGELAQEKHISLFEAIFEFELIQRITPKAYDSLQKFGRWIVELNDEIQRSEPERAVRSMLSAIHYEEYLYEYATSPKAAEMQSKNVATLFDWVADMLKGDETNEPMNLNQVVTRLTLRDMLERGEDDDDSDQVQLMTLHASKGLEFPYVYLIGMEEGILPHQTSIDEDNVEEERRLAYVGITRAQKELTFSLCRERRQYGELVRPEPSRFLAELPNDDVLWERDKPKLTTEQKQEKTQNQLDRLRAILKS

SEQ ID NO: 58254 - protein, 272 aa, Haemophilus influenzae
MDLYAVWGNPIAQSKSPLIQNKLAAQTHQTMEYIAKLGDLDAFEQQLLAFFEEGAKGCNITSPFKERAYQLADEYSQRAKLAEACNTLKKLDDGKLYADNTDGIGLVTDLQRLNWLRPNQHVLILGAGGATKGVLLPLLQAQQNIVLANRTFSKTKELAERFQPYGNIQAVSMDSIPLQTYDLVINATSAGLSGGTASVDAEILKLGSAFYDMQYAKGTDTPFIALCKSLGLTNVSDGFGMLVAQAAHSFHLWRGVMPDFVSVYEQLKKAML

SEQ ID NO: 58255 - protein, 638 aa, Haemophilus influenzae
MIIFSNLSLKRGQTELLENASATINPKQKVGLVGKNGCGKSSLFALLKKELMPEGGEVNYPANWRVSWVNQETPALDISAIDYVIQGDREYCRLQQKLERANERNDGNAIARIHGQLETLDAWTIQSRAASLLHGLGFSQEETIQPVKAFSGGWRMRLNLAQALLCPSDLLLLDEPTNHLDLDAVIWLERWLVQYQGTLVLISHDRDFLDPIVTKILHIENQKLNEYTGDYSSFEVQRATKLAQQTAMYRQQQQKISHLQKYIDRFKAKATKAKQAQSRMKALERMELIAPAYVDNPFTFEFRPPQSLPNPLVMIEQASAGYGIGESAVEILSKIKLNLVPGSRIGLLGKNGAGKSTLIKLLAGELTALSGTVQLAKGVQLGYFAQHQLDTLRADESALWHMQKLAPEQTEQQVRDYLGSFAFHGDKVNQAVKSFSGGEKARLVLALIVWQRPNLLLLDEPTNHLDLDMRQALTEALVDYEGSLVVVSHDRHLLRNTVEEFYLVHDKKVEEFKGDLEDYQKWLSEQNSTSENKVSEKVGDNENSVQNRKEQKRREAELRQQTAPLRKKITQLEEKMNKFSSELANIENQLADTELYNAENKEKLTALLAQQVDVKKALDDVETEWMTAQEELEEMLQA

SEQ ID NO: 58256 - protein, 333 aa, Haemophilus influenzae
MNRALAIEFSRVTEAAALAAYTWLGRGDKNAADDAAVKAMRYMLNLIHMDAEIVIGEGEIDEAPMLYVGEKVGSGLGELVSIAVDPIDGTHMTAMGQSNAISVLAAGGKNTFLKAPDMYMEKLVVGSNVKGIIDLNLPLEQNLRRIASKLGKSLSDLTVMVLAKPRHDAVIKQIHNLGAKVLAIPDGDVAGSVLCCLPDAEVDLLYGIGGAPEGVAAAAAIRALGGDMQARLIPRNEVKSDTEENKKIAANEIQRCAALGVKVNEVLKLEDLVRDDNLVFTATGITNGDLLKGISRKGNLASTETILIRGKSRTIRKIQSIHYLDDLYKILNI

SEQ ID NO: 58257 - protein, 158 aa, Haemophilus influenzae
MIRIGHGFDVHAFGEDRPLIIGGVEVPYHTGFIAHSDGDVALHALTDAILGAAALGDIGKLFPDTDMQYKNADSRGLLREAFRQVQEKGYKIGNVDITIIAQAPKMRPHIDAMRAKIAEDLQCDIEQVNVKATTTEKLGFTGRQEGIACEAVALLIRQ

SEQ ID NO: 58258 - protein, 225 aa, Haemophilus influenzae
MARSIIAVLPAAGVGSRMQADKPKQYLTLLGKTLLEHTLDVMLSYPAVSKIILAVSKDDPYISTLSLDPKIQLVEGGTTRAESVLNGLNAIAEKNAWVLVHDAARPCLQHADIDKLLAIEDKQGAILAIPVTDTIKRADNQQCIVKTEDRSQLWQAMTPQFFPVDILRDALSTGIQQGANITDEASAIELAGFRPHLVAGRSDNLKVTRPEDLALAEFYLTRNKL

SEQ ID NO: 58259 - protein, 295 aa, Haemophilus influenzae
MLTALNRYWDYLRIERQMSPHTITNYQHQLDATIKILAQQDIHSWTQVTPSVVRFILAESKKQGLKEKSLALRLSALRRFLSFLVQQGELKVNPATGISAPKQGRHLPKNMDGEQVQQLLANDSKEPIDIRDRAILELMYSSGLRLSELQGLDLNSINTRVREVRVIGKGNKERVVPFGRYASHAIQEWLKVRALFNPKDEALFVSQLGNRISHRAIQKRLETWGIRQGLNSHLNPHKLRHSFATHMLEASSDLRAVQELLGHSNLSTTQIYTHLNFQHLAEVYDQAHPRAKRKK

SEQ ID NO: 58260 - protein, 492 aa, Haemophilus influenzae
MANYFNTLNLRQKLDQLGRCRFMDREEFADEANFLKGKKIVIVGCGAQGLNQGLNMRDSGLDISYALRPEAIAEKRASFQRATENGFKVGTYEELIPTADLVVNLTPDKQHSKVVADVMPLMKKDSAFGYSHGFNIVEVGEEIRKDITVVMVAPKCPGTEVREEYKRGFGVPTLIAVHPENDPKGEGMAIAKAWAAATGGHKAGVLESSFVAEVKSDLMGEQTILCGMLQAGSIVCYDKLVADGKDPAYAGKLIQYGWETITEALKQGGITLMMDRLSNSAKLRAFELAEQIKESLGFLYYKHMDDIISGHFSATMMADWANGDKDLFAWREATGKTAFENAPKYDGKISEQEYFDNGVLMIAMVKAGVELAFDAMVASGIYEESAYYESLHELPLIANTIARKRLYEMNVVISDTAEYGNYLFSNVATPILAKEIIPNLQKGDLGEPTPAVEVDNITLRDVNDAIRNHPVELIGQELRGYMTDMKRIAVAG

SEQ ID NO: 58261 - protein, 426 aa, Haemophilus influenzae
MDNNIQRLIDSAKQSLNSPESYKYIDESFESCIKCTACTAVCPVSRNNPLYPGPKQSGPDGERLRLKSAELYDEALKYCTNCKRCEVACPSDVKIGDLIVRARNNHLAQSKKPLMNKLRDAILSNTDVMGKINTPLAPIVNTITGLKATKFMLEKTLNISKKRTLPKYAFGTFRSWYMKNALQDQQKFERKVAYFHGCYVNYNNPQLGKEFLKVFNAMNIGVMLLEKEKCCGLPLMVNGFPNRARNIAQFNTDYIGKMVDENGIDVISEASSCSLNLRDEYHHILGIDNAKVRPHIHMVTPFLYQLFKEGKTLPLKPLKLRVAYHTACHVDKAGWAPYTLEVLKKIPSLEIIMLPSQCCGIAGTYGFKSENYEISQSIGKNLFDNINEGGFDYVISECQTCKWQIDMSSNVTCIHPLTLLCMSMDA

SEQ ID NO: 58262 - protein, 304 aa, Haemophilus influenzae
MNNENMVRVFYVLLMGLGFPIMRFMSIHFETLNNNSVRFLSGGSLFVIICLIKFRSELKKIIGEPKIILYLFIYLFILGIFMTGNMFFFINGLKYTSALAGSIFGILAMPLAIIIAGIFFKDERDRIRQKEFYIGELLAIIGSLIFVINSSNNDGNTDFFLGAIFLFTAIFIQSVQNLIVKKVAKKINAVVISASTATISGVLFLCLAFNTKQIYLLQDVGIGMLIGLVCAGFYGMLTGMLMAFYIVQKQGITVFNILQLLIPLSTAIIGYLTLDERINIYQGISGIIVIIGCVLALKRKNKEC

SEQ ID NO: 58263 - protein, 264 aa, Haemophilus influenzae
MDKSLKANCIGEFLGTALLIFFGVGCVAALKVAGASFGLWEISIMWGMGVALAVYATAGLSGAHLNPAVTIALWKFACFDGKKVIPYIISQMLGAFFAAALVYALYRNVFIDYETVHNIVRGTQESLSLAGTFSTYPHPSLSIGGAFAVEFVITAILMALIMALTDDGNGVPRGPLAPLLIGILIAVIGGAMGPLTGFAMNPARDFGPKFFAYLAGWGELALTGGREIPYFIVPMVAPVLGALAGAWLYKKAIGGNLPCNCGCE

SEQ ID NO: 58264 - protein, 503 aa, Haemophilus influenzae
MTDKKYIIALDQGTTSSRAVLLDHNANVVEIAQREFTQIYPRAGWVEHNPMEIWATQSSTLNEVVAKAGITSDEIAAIGITNQRETTIVWEKSTGTPVYNAIVWQCRRTADITDKLKADGHEEYIRNTTGLVVDPYFSGTKVKWILDNVEGAREKAERGELLFGTVDTWLVWKLTQGRVHVTDYTNASRTMLFNIHTKQWDDKMLEILNIPRSMLPEVRNSSEIYGQTNIGGKGGVRIPVAGIAGDQQAALYGHLCVHAGQAKNTYGTGCFMLLHTGNKAITSKNGLLTTIACNAKGEPEYALEGSVFIAGASIQWLRDELKIVHDSFDSEYFAQKVTDSNGVYVVPAFTGLGAPYWDPYARGAIFGLSRGANRNHIVRATLESIAYQTRDVLEAMQSDSGERLQYLRVDGGATNNNFLMQFQADILDVNVERPVVKEVTALGAAYLAGLATGFWKDLDELRDKARVERTFSPDSDNEKRERRYKGWKKAVKRSLEWAKEDEE

SEQ ID NO: 58265 - protein, 1298 aa, Haemophilus influenzae
MTEQIQPSETSPKSPEKPNKKHWVRKAVCIGSAVILVPVLGVAGALSFDAGQKSLIQLVDKMLDSFSVEQVEGGLQNGLVLKNVRYQTAGIETHIAQARLQLDFGCLFSREVCLRDFTLNKPTIAINTALLPPSAPDNSKSGSMKRISLPISINAENLVMQDLSVNIDQTSITLGNFKSAVSLNNEKGLTIAPTEINDISVIAKKLSEVKSEPKAEQPNKPVDWAAIEQSLTPAFLGNVSEIILPFDLHIPEISGKNWQYQAVNEKGETLQSVEMSSLIAQADTVDNQLQLQKLAVESSLGNLSSQGKLQLDGDMPLDLTLKSHLEPLKSDGKEILPASDVDLTLSGSLKKSTALSLKTKGVLDAELNGNVQLAQDKMPLNLTLNVAKGQYTFVNTMTPLKINDVTLKLTGDLLNYHAELKGDVAGMNYIPASQVELNADGKLYEVTVNKLGIDSLDGKSEFVGNANWKNGANWDIQADLEKMNIAFFVPVMPATLSGKLHSRGFAGSQGWQVEVPVADLNGMLSAKPISLKGSATLNQNVLLTVPDLQIKYGENYLKASGVLDDHSDFALDINAPNLRGLWSDLKGRVKGRVAISGQITTPNLDLDLTSSNLHLQGFQLAKASIKGHINNASLSSGKLNIKAEQLHYGGNIKLHLLDLDLSGDEQNHKLILKSQGEPVAANLQINGHFDRTLEQWKGTISQVKFETPIGDVKSNQAIAVSYDNKQTQANIASHCWQNTDVELCFPQAFNAGKQGNIPFQFKRVNLDLVNKLIEQNSLKGNLQVQGNVAWFTDKPFQFTANVDGNHLAFSQKLDYRTFKLYIPKLTLNADIQNNNLVLKTDINVHNQGRIVGDIHLNDLAKNRQLGGTLAIERLNLSIANQLLTSGESVNGEVVSKLSFGGNLEKPLLNGDFNIRNIRTKLKSMPVNITDGDIALRFNDNRSTLQGKIKTVDSHLNLTGRANWANIEHWTTELNAQANNFNVDIPSMAKLRFSPNITIKANPKELNLSGTVDIPWARIKIDSLPDTAEPVSEDEVILNGPHKSKEELIKREFAAKTKSGMEIRSDLRINIGKDVSLDAYGLKTNLDGLLSVKQDKGNLGLFGQINLTKGRYASFGQDLLIRKGLISFSGQATQPTLNIEAIRNPETMEDSKITAGVRVIGIADSPEVTIFSEPSKPQDQALSYLLTGRSLESSGEVGSTGSVGAALIGLGISKSGKLVGSIGEVFGIQDLNLGTSGVGDKSKVTVSGNITNRLQIKYGVGLFDGLAEVTLRYRLMPQLYFQSVSSTNQVFDLLYKFEF

SEQ ID NO: 58266 - protein, 861 aa, Haemophilus influenzae
MISEENFQQHTPMMQQYLKLKAENPDILLFYRMGDFYELFYDDAKKAAALLDISLTKRGQSAGQPIPMAGMPYHAVEGYLAKLVQLGESVAICEQIGDPTTSKGPVERQIVRIVTPGTVSDEALLPERQDNLIAAVYQEKEKFGLATLDMTSGRFQLCEPADKETLRAELQRIAPVELLYCEEFNEMAAIEHCKGLRRRPIWEFELSTAITLLNRQFGTKDLRAFGVEKSPLGLSAAGCLLQYAKETQRTALPHIQSISLIQNQDCIQLDAATRRNLELTQNLAGGTENTLASVLDKCVTPMGSRLLKRWIHQPVRDVEKLKQRQQSIAEILNFDLVDELQPYLQLVGDMERILARVALRSARPRDLTRLRTALEQIPALRAIVQQKTPPFLTALFSQIADFSEQCDLLQRALIETPPLLIRDGGVIAEGYNAELDEWRMLSDGATQYLENLEKRERESTGIDTLKIGFNAVHGYYIQISQGQAHKAPIHYVRRQTLKNAERYIIPELKEYEDKVLKSKGAALALEKQLYDELFDLLLPHLGSLQLASLALSELDVLVNLAERADTLNYVMPTFCDEVSVKIKNGRHPVVEQVLKDPFIANPVELNHNRHLLVITGPNMGGKSTYMRQTALITLLAYIGSFVPADSARIGPIDRIFTRIGASDDLASGRSTFMVEMTEMANILHQATAQSLVLIDEIGRGTSTYDGLSLAWACAEWLSKKIRSLTLFATHYFELTALPEQLEGIANIHLDALEHNNTIAFMHAVQNGAASKSYGLAVAALAGVPQSVIKLAKQKLTQLEKNSSYSAEQQIQALREANHNQGELFFEQETDALREAIEKLDPDDLSPKQALAYLYQLKKMVG

SEQ ID NO: 58267 - protein, 411 aa, Haemophilus influenzae
MTDKDKDLHCSFCGKEKGEVDRLIAGTDGYICNECIELCHSMLEESHDKNLEESAVENEEKLPTPHEIRAHLDDYVIGQDYAKKVLSVAVYNHYKRLRTNYESNDVELGKSNILLIGPTGSGKTLLAQTLARRLNVPFAMADATTLTEAGYVGEDVENVLQKLLQNCEYDTEKAEKGIIYIDEIDKISRKSEGASITRDVSGEGVQQALLKLIEGTIASIPPQGGRKHPQQEMVKLDTSKILFICGGAFAGLDKIIDKRTQTSTSIGFNAKVEKDEKQQSLSELFRQVEPDDLMKFGLIPEFIGRLPMIAPLSELDEDALIQILTKPKNALIKQYQALFGLEKVELDFTPEALKAMAKKALERKTGARGLRSIVEAVLLDTMYDLPSLENLQKVIVDESTIVDNLAPKLEY

SEQ ID NO: 58268 - protein, 106 aa, Haemophilus influenzae
MIFFAAAAIGNIYFQQIYSLPIRVIGMAIALVIAFILAAITNQGTKARAFFNDSRTEARKVVWPTRAEARQTTLIVIGVTMIASLFFWAVDSIIVTVINFLTDLRF

SEQ ID NO: 58269 - protein, 185 aa, Haemophilus influenzae
MTEETTVSKKRWYVLQAFSGFESRVALTLREYIKQQQMEDQFGEVLVPTEEVVENVAGKRRKSERKFFPGYVLVEMEMNDETWHLVKSVPRVMGFIGGTPDKPAPISKREADTILNRLEQNTDKPRHRNEYHPGEEVRVTEGPFADFNGTVEEVDYEKGRLKVSVSMFGRATPVELEFGQVEKIH

SEQ ID NO: 58270 - protein, 250 aa, Haemophilus influenzae
MKTKTILTALLSAIALTGCANNNDTKQVSERNDSLEDFNRTMWKFNYNVIDRYVLEPAAKGWNNYVPKPISSGLAGIANNLDEPVSFINRLIEGEPKKAFVHFNRFWINTVFGLGGFIDFASASKELRIDNQRGFGETLGSYGVDAGTYIVLPIYNATTPRQLTGAVVDAAYMYPFWQWVGGPWALVKYGVQAVDARAKNLNNAELLRQAQDPYITFREAYYQNLQFKVNDGKLVESKESLPDDILKEID

SEQ ID NO: 58271 - protein, 619 aa, Haemophilus influenzae
MLDSPLLSKIIEKPTALSVLKSVFGYQSFRKGQEEVINAALNGQDALVVMATGNGKSLCYQIPALCFDGLTLVISPLISLMKDQVDQLQANGIEADFLNSSQTLEQQQQVQNKLISGQLKLLYVSPEKVMTNSFFQLISYSKVCFIAIDEAHCISQWGHDFRPEYTQLGGLKASFPDAPIMALTATADYATQQDILRHLNLKNLHKYIGSFDRPNIRYTLEEKYKPMEQLTRFVLAQKGKSGIIYCNSRNKVERIAESLRNKGVSAAAYHAGMETAIRERVQQDFQRDNVQVVVATIAFGMGINKSNVRFVAHFDLPRSIESYYQETGRAGRDDLPAEAVLFYEPADYAWLQKILLEKPETPQRQIEQHKLEAIGEFAESQTCRRLVLLNYFGEHRQTPCNNCDICLDPPKKYDGLVDAQKVMSTIYRVGQCFGAHYVIAVLRGMHNQKIIERQHHKLSVYGIGKDKSKEHWQSVIRQLIHLGFVQQVISELNPTLQLTESAKVILKGEEPLELAMPRISAISKIAHNPQRQGVANYDKDLFARLRFLRKQIADKENIPPYIVFNDATLQEMAQYMPTSNIEMLQINGVGSIKLERFGQPFMALIQEHKAILANAQNND

SEQ ID NO: 58272 - protein, 572 aa, Haemophilus influenzae
MRTSQYLFSTLKETPNDAQVVSHQLMLRAGMIRPMASGLYNWLPTGIRVLKKVEKVVREEMNKGGAIEVLMPVVQPAELWEESGRWDQYGPELLRFEDRGNRNFVLGPTHEEVITDLVRREVSSYKQLPLNLYQIQTKFRDEVRPRFGVMRSREFIMKDAYSFHTTQESLQATYDVMYQVYSNIFNRLGLDFRAVQADTGSIGGSASHEFQVLASSGEDDVVFSTESDFAANIELAEAIAIGERQAPTAEMCLVDTPNAKTIAELVEQFNLPIEKTVKTLIVKGADENQPLVALIIRGDHELNEIKAQKHPLVADPLEFADETEIKAKIGSGVGSLGAVNLNIPAIIDRTVALMSDFSCGANIDGKHYFNVNWERDVAIPKVFDLRNVVEGDPSPDGKGTLQIKRGIEVGHIFQLGKKYSEAMKATVQGEDGKPLVMTMGCYGIGVTRVVASAIEQHHDERGIIWPSDEIAPFTVAIVPMNMHKSEAVQKYAEELYRTLQSQGVDVIFDDRKERPGVMFADMELIGVPHMVVIGEKNLDNGEIEYKNRRTGEKEMISKDKLLSVLNEKLGNL

SEQ ID NO: 58273 - protein, 240 aa, Haemophilus influenzae
MLKLLRIFLVLICCILICVLGTIYSFIRFKNPSNVGIVARWFGRLYPLFGLKVEHRIPQDQKQISRAIYIGNHQNNYDMVTISYMVQPRTVSVGKKSLIWIPFFGILYWVTGNIFLDRENRTKAHNTMSQLARRINEDNLSIWMFPEGTRNRGRGLLPFKTGAFHAAISAGVPIIPVVCSSTHNKINLNRWDNGKVICEIMDPIDVSGYTKDNVRDLAAYCHDLMEKRIAELDEEIAKGN

SEQ ID NO: 58274 - protein, 612 aa, Haemophilus influenzae
MPKLRSATSTQGRNMAGARALWRATGMKENDFGKPIIAVVNSFTQFVPGHVHLKDMGQLVAAEIEKAGGVAKEFNTIAVDDGIAMGHGGMLYSLPSRDLIADSVEYMVNAHCADAMVCISNCDKITPGMLMAAMRLNIPTIFVSGGPMEAGKTKLSDQLIRLDLVDAMIEAADPNVSDERIDAIERSACPTCGSCSGMFTANSMNCLTEALGLSLPGNGSMLATHADRKELFLKAGRQIVELCKRYYEQDDASVLPRSIGTFDAFENAMSLDIAMGGSSNTVLHLLAAAQEAGVDFKMEDIDRLSRKVPCLSKIAPNTNKYHMEDVHRAGGIMGLLGELDRAGLIHKNTHTVLGMSMGEQLDQYDIIRNQDEELHKFFRAGPAGIRTTQAFSQDCRWDTVDNDRVNGCIRNKENAISQEGGLAVLFGNLAEDGCIVKTAGVDESIWKFTGTAIVFESQEDAVAGILGGKVKEGHVVVIRYEGPKGGPGMQEMLYPTSYLKSMGLGKKCALLTDGRFSGGTSGLSIGHVSPEAASGGAIGLVRNGDIINIDIPNRAINLEISNEELATRRAEQDQKGWQPANREREVSFALKVFGHFATSADKGAVRDKTLLK

SEQ ID NO: 58275 - protein, 1159 aa, Haemophilus influenzae
MSSQPRFIHLRTHTDFSMIDSIVKVKPLVKACAANEMVAMGLTDFTNFCGVVSFYSEMLSSGMKPIIGADVKVKSPLCGDEYFDLTLLAKNNEGYRNITLLLSKAYQRGYNDLPYIDQDWLIEHRDGVIILSGGTQGDVGKKLLKENVAEIESAVAFYQEFFADHFYLALSRTGRPNEERYIQAALKLAERCDLPLVATNDVMFLNTEDFEAHEIRVAIHDGYTLDDPKRPKCYTSQQYFRSEEDMCKLFADIPSALENTLLIAQRCSVTLRLGQYFLPQFPTGDLSTEDFLVQKSKEGLEERLVFLFPDEKVRLEKRPKYDERLQVELDVINQMGFPGYFLIVMEFIQWSKDNDIPVGPGRGSGAGSLVAYALKITDLDPLEFDLLFERFLNPERVSMPDFDVDFCMDGRDRVIEHVAETYGRGAVSQIITFGTMAAKAVIRDVGRVLGHPYGFVDRISKLIPPDPGMTLAKAFETEPQLQTAYDSDEEVRALINMARKLEGVTRNAGKHAGGVVISPTLITDFAPLYCDNEGLHPVTHFDKNDVEYAGLVKFDFLGLRTLTIIKWALDIINVRMVREGKPRVDIAAIPLDDPESFELLKRSETTAVFQLESRGMKDLIKRLQPDCFEDIIALVALFRPGPLQSGMVDNFIDRKHGREEVSYPDAEYQHASLKPILEPTYGIILYQEQVMQIAQVLAGYTLGGADLLRRAMGKKKPEEMAKQRLVFKEGAEKNGIDGELSMKIFDLVEKFAGYGFNKSHSAAYALVSYQTLWLKTHFPAEFMAAVMTSEMDNTDKIVGLYDECLRMGLKVTPPDINIGKHHFSVNEQGEIVYGIGAIKGVGEGPIEALVAARNEGGIFKDLFDLCARVDLKKINRRTFESLIMSGAFDKLGPHRAALSKNLEDALRASDQHAKDEAMGQTDMFGVLTETHEDVENAYANTPPYTEKQILDGERETLGLYLSSHPVSRYLKELSHYTSTRLKDLAPNRRGQISTVAGLVVASRIAMTKKGNRLGIATLDDRSGRLDLTLFGESLEQFGEKLQKDTVIVASGQVSFDDFSGGLKMTVRELMTLDEARSRYVKSLAISLSEHQITPSFIKQFKALLEPVSGGTLPINVYYQSPKGRALLRLGVQWSIIPTDEILTELVNLLGESAVELEFE

SEQ ID NO: 58276 - protein, 485 aa, Haemophilus influenzae
MGMNRVLVSQAAGGLAEYLKGYDKEPSIVIGYDGRKNSDVFARDTAEIMAGAGVKAYLLPRKLPTPVLAYAIQYFDTTAGVMVTASHNPPEDNGYKVYLGKANGGGQIVSPADKDIAALIDKVAAGNIQDLPRSDNYVVLNDEVVDAYITKTASLAKEPACDINYVYTAMHGVGYEVLSKTLAKAGLPQPHVVADQVWPDGTFPTVNFPNPEEKGALDLAIKVAKEKNAEFIIANDPDADRLAVAVPDAQGNWKSLHGNVVGCFLGWYLAKQYQGKQGTLACSLVSSPALAEIAKKYSFQSEETLTGFKYIGKVSGLLFGFEEALGYLVDPDKVRDKDGISAAIVFLDLVRNLKKQGKTLADYADEFTKEFGAYVSGQISIRVSDLSEIGKLMTALRNNPPAEIAGVKVAQFIDHIKTDRQSDILVFNLENGGRLIARPSGTEPKIKFYLDARGKDPKDADRVLAEFDEGVRHILRQDAYGKQDC

SEQ ID NO: 58277 - protein, 148 aa, Haemophilus influenzae
MQEFISMATEFAQKHTLLAVSWFAIFVMVIYTFYKGATSKFKVITHNEVIRLINSDEAIVVDLRSLEEFQRGHIINSINVLPSEIKNQNIGKLESHKENALILVDTNGTSASASAVFLTKQGFNSVFVLKEGLSAWVAANLPLVKKHK

SEQ ID NO: 58278 - protein, 1320 aa, Haemophilus influenzae
MQTFALFVIIRLFFYFSFIRNCNMTVKTFRGSPALSEFRLTQLQQKCQQYQLPITSVYAEYLHFVEQKTSLVEDEIVKLQALLHYGSMFSELKPAGYCLIVTPRVGTISSWSSKATDIAHNCGLSKVNRIERGIAYYFNIERDLTEAELATLKDLLHDRMLETVLNHETEAALLFTQQEPKALTTIDILNGGRQALEQANIALGLALADDEMDYLVESFTALKRNPQDVELYMFAQANSEHCRHKIFNADWIIDGKKQDKSLFKMIKNTFEQTPDFVLSAYKDNAAVMEGSKVGRWFPDPDGQYRVHQEDVHILMKVETHNHPTAISPFPGAATGSGGEIRDEGATGRGAKPKAGLTGFSVSNLVIPNFEQPWENPLSKPNRIASALDIMIDAPLGSAAFNNEFGRPALLGYFRTYEEKVNSFAGKEVRGYHKPIMLAGGIGNIRGEQVQKGEIPIGAKLIVLGGAAMNIGLGGGAASSMDSGKSKEDLDFASVQRENPEMERRCQEVIDRCWQLGEENPILFIHDVGAGGLSNAMPELVHDGKRGGKFDLRSILCDEKGMSPLEIWCNESQERYVLAVAPENLELFTALCERERAPFAVIGEATQAEHLILHDSHFDNNPIDLPMNVLLGKTPKMTREVLSKTVENQSLKIESIQLKEAFHRVLRLPVVAEKTFLITIGDRSVTGMVARDQMVGPWQIPVSDVAVTTASLDSYHGEAMAIGERSPVALLDFSASARLAVAEAITNIAGTLIGEMKRIKLSANWMSAAGHTGEDAGLYEAVKAVGEELCPALGLTIPVGKDSMSMKTTWIDNGEQKSVTAPLSLVISAFARVEDVRKTLTPQLRTDKGFSSLLLIDLGEGHNRLGATALAQVYKQLGDKPADVVKVQRLKDFYNAMQTLVAEDKLLAYHDRSDGGLITTLAEMAFAGHCGVEVDISALGDNDLAVLFNEELGAVIQVADSQLESVREVLKAHNLLGIIHQLGTVTADDRFEISRGSHKLFSEKRSELRSIWAELTYQMQRLRDNPECAEQEFEAKKNPDDKGLSAFLTYDVNEDITAPFINKGVKPTIAILREQGVNSHYEMAAAFDRAGFNAIDVHMSDLMIGRRNLAEFNAMVACGGFSYGDVLGAGGGWAKSILFNPKLHEQFSQFFINPNTLTLGVCNGCQMISNLAEIIPGTENWPHFVRNKSERFEARVSLVKINEVDSVWFAGMAGSHMPIAVSHGEGQVKFKSVEQFAGLKAQGIIAAQYIDNNGSPTELYPANPNGSSEGITAITNLDGRVAIMMPHPERVFRAVSNSWHPENWTEDGAWMRLFRNARMVF

SEQ ID NO: 58279 - protein, 303 aa, Haemophilus influenzae
MNDIILKSLSTLITEQRNPNSVDIDRQSTLEIVRLMNEEDKLVPLAIESCLPQISLAVEQIVQAFQQGGRLIYIGAGTSGRLGVLDASECPPTFGVSTEMVKGIIAGGECAIRHPVEGAEDNTKAVLNDLQSIHFSKNDVLVGIAASGRTPYVIAGLQYAKSLGALTISIASNPKSEMAEIADIAIETIVGPEILTGSSRLKSGTAQKMVLNMLTTASMILLGKCYENLMVDVQASNEKLKARAVRIVMQATDCNKTLAEQTLLEADQNAKLAIMMILSTLSKSEAKVLLERHQGKLRNALSK

SEQ ID NO: 58280 - protein, 231 aa, Haemophilus influenzae
MPREISVAIIPAAPYARARNQEAKSQGRDILIHMPMQPVSAVKIEDGGLHLGMSAAQVNDRVNTAKNIVRDAIGMNNHMGSAATADPQLMTYLMTALQEKHLFFLDSRTIGKSVAGKIAKEQGVRSLDRHIFLDDSNEFADVQRQFKAAIHYARKHGSAIAIGHPRPNTIAVLQAGLRNLPEDIQLVGMGNLWRNEKVIPPKPFILLFSEVPAPTSIEPFEPVGLLRGIPK

SEQ ID NO: 58281 - protein, 70 aa, Haemophilus influenzae
MKQGIHPEYKEITATCSCGNVIKTRSTLGKDINLDVCGNCHPFYTGKQRVVDTGGRVERFNSRFKIPSTK

SEQ ID NO: 58282 - protein, 160 aa, Haemophilus influenzae
MLDIVLYEPEIPQNTGNIIRLCANTGFRLHLIEPLGFTWDDKRLRRSGLDYHEFAEIKRHKTFEAFLESEKPKRLFALTTKGCPAHSQVKFKLGDYLMFGPETRGIPMSILNEMPMEQKIRIPMTANSRSMNLSNSVAVTVYEAWRQLGYKGAVNLPEVK

SEQ ID NO: 58283 - protein, 414 aa, Haemophilus influenzae
MNDIFIGLQLREHFMAEENKKGGFWASLFGRNKKQDEPKIEPIIEEEKIKDIEPSIEKFEANDLVEEEKIQEISTALEPIEEIIEAKNLEDEFQPVVEIETREKPSEGGFFSRLVKGLLKTKQNIGAGFRGFFLGKKIDDELFEELEEQLLIADIGVPTTSKIIKNLTEHASRKELQDAELLYQQLKVEMADILEPVAQPLEIDSTKKPYVILMVGVNGVGKTTTIGKLARKFQAEGKSVMLAAGDTFRAAAVEQLQVWGERNHIPVVAQSTGSDSASVIFDAMQSAAARNIDILIADTAGRLQNKNNLMDELKKIVRVMKKYDETAPHEIMLTLDAGTGQNAISQAKLFNEAVGLTGISLTKLDGTAKGGVIFAIADQFKLPIRYIGVGEKIEDLREFNAKEFIEALFVHEEE

SEQ ID NO: 58284 - protein, 393 aa, Haemophilus influenzae
MENVVIVSAVRTPIGSFNGALSSVSAVDLGAIVIQEAIKRANIESALVNEVIMGNVLQAGLGQNPARQAALKAGIEKEIPSLTINKVCGSGLKSVALGAQSIISGDADIVVVGGMENMSQAPYLLDSKVRQGVKMGNLTLRDTMIEDGLTCASNHYHMGITAENIAEQYGISRQAQDELALRSQTLASQAVQLGVFDKEIVPVMVKTRKGDIIVSRDEYPKADTTAEGLAKLKPAFKKEGTVTAGNASGINDGAAALILVSESKAHALGLKAIAKIRSYASGGVDPSVMGLGPVPATQKALKKAGINLDDIDLIEANEAFASQFLGVGKDLNLDMNKTNIHGGAIALGHPIGASGARILVTLLHNLIEKDKKLGLATLCIGGGQGISMIVERL

SEQ ID NO: 58285 - protein, 118 aa, Haemophilus influenzae
MLVFLLAKFYWSSGLMQNQRIRIRLKAFDHRLIDQSTAEIVETAKRTGAQVRGPIPLPTRKERFTVLISPHVNKDARDQYEIRTHKRLVDIVEPTEKTVDALMRLDLAAGVDVQISLG

SEQ ID NO: 58286 - protein, 208 aa, Haemophilus influenzae
MIGLVGRKVGMTRIFNEDGVSVPVTVIEIEANRVTQVKTLENDGYTAVQVTTGSKKANRVTKPEAGHFVKAGVEAGRGLWEFRTEGEEFTLGQEINVDIFADVKKVDVTGTSKGKGFQGGVKRWNFRTQDATHGNSLSHRVLGSIGQNQTPGRVFKGKKMAGHLGAERVTVQSLEVVRVDAERKLLLVKGSVPGAINGDVIVKPAVKA

SEQ ID NO: 58287 - protein, 200 aa, Haemophilus influenzae
MELQVVGANALTVSETTFGREFNEALIHQVVVAYAAGARQGTRAQKTRAEVSGSGKKPWRQKGTGRARAGDIKSPIWRSGGTTFAAKPQDHSQKVNKKMYRGAIKSILSELVRQDRLVVVEKFELDAPKTKVLVQKLKDLAVEDALIITASLDENLFLAARNLYKVDVRDVQGIDPVSLIAFDKVIVTVDAVKQIEEILA

SEQ ID NO: 58288 - protein, 99 aa, Haemophilus influenzae
MSQERLLSVLRAPHISEKATNNAEKSNTVVLKVALDANKAEIAAAVAQLFEVKVDSVRTVVVKGKTKRRGNKMGRRSDWKKAYVTLAEGQNLDFVDSAE

SEQ ID NO: 58289 - protein, 273 aa, Haemophilus influenzae
MAIVKCKPTSAGRRHVVKIVNPELHKGKPYAPLLDTKSKTGGRNNYGRITTRHIGGGHKQHYRLIDFKRNKLDIPAVVERLEYDPNRSANIALVLYKDGERRYILAPKGLSVGDQIQAGINSPIKVGNSLPMRNIPVGSTVHNVELKPGKGGQIARSAGAYVQIIAREGNYVTLRLRSGEMRKVLAECVATIGEVGNSEHMLRVLGKAGANRWRGIRPTVRGTAMNPVDHPHGGGEGRNFGKHPVTPWGVQTKGKKTRHNKRTDKYIVRRRGK

SEQ ID NO: 58290 - protein, 91 aa, Haemophilus influenzae
MPRSLKKGPFLDLHLLKKVEKAVESGDKKPIKTWSRRSMIIPSMIGLTIAVHNGRQHVPVYVSDEMIGHKLGEFAPTRTYRGHAADKKAKK

SEQ ID NO: 58291 - protein, 110 aa, Haemophilus influenzae
METIAKHRYARTSAQKARLVADLIRGKKVAQALEILTFTNKKAAALVKKVLESAIANAEHNDGADIDDLKVAKIFVDEGPSMKRVMPRAKGRADRILKRTSHITVVVSDR

SEQ ID NO: 58292 - protein, 235 aa, Haemophilus influenzae
MGQKVHPHGIRLGIVKPWSSTWFANTQDFADNLEGDFKVRKFLNKELASASVSRITIERPAKSIRVTIHTARPGIVIGKKGEDVEKLRNAVSKIAGVPAQINIAEVKKPELDAKLVADSIASQLERRVMFRRAMKRAVQSAMRLGAKGIKVEVSGRLGGAEIARSEWYREGRVPLHTLRADIDYNTAEAHTTYGVIGVKVWIFKGEILGGMAAVAQSEQQPADKPKKAPRGKGRK

SEQ ID NO: 58293 - protein, 136 aa, Haemophilus influenzae
MLQPKRTKFRKVHKGRNRGIASGTEVSFGTYGLKAVGRCRLTARQIEAARRAMSRAVKRQGKIWIRVFPDKPITEKPLEVRMGKGKGNVEYWVALIQPGKVLYEMDGVSEEVARNAFALAAAKLPVKTTFVTKTVM

SEQ ID NO: 58294 - protein, 63 aa, Haemophilus influenzae
MKAQDLRTKSVEELNAELVNLLGEQFKLRMQTATGQLQQTHQAKQVRRDIARVKTVLTEKAGE

SEQ ID NO: 58295 - protein, 85 aa, Haemophilus influenzae
MTDKIRSVQGKVVSDKMEKSFVVAIERKVKHPLYGKFIRRTTKLHVHDENNEAKVGDTVEIRECRPLSKTKSWTLVRVVEKAVIA

SEQ ID NO: 58296 - protein, 123 aa, Haemophilus influenzae
MIQEQTMLDVADNSGARSVMCIKVLGGSHRRYAAIGDIIKITVKEAIPRGKVKKGDVLKAVVVRTKKGVRRPDGSVIRFDGNACVILNNNTEQPIGTRIFGPVTRELRSEKFMKIISLAPEVL

SEQ ID NO: 58297 - protein, 103 aa, Haemophilus influenzae
MPAKIRQNDEVIVLTGKDKGKRGKVTKVLPNGKVFVEGINIITKHEKPVPALGKAGGLVKKEAAIDASNVAIFNPKTNKADRVGFRFEDGKKVRFFKSNNEII

SEQ ID NO: 58298 - protein, 179 aa, Haemophilus influenzae
MAKLHDYYRDQVVSELKNKFGYKSVMQVPRIEKITLNMGVGEALTDKKLLDNAVADLAAISGQKPLVTKARKSVAGFKIRQGYPIGCKVTLRGERMWEFFERLITIAVPRIRDFRGLSAKSFDGRGNYSMGVREQIIFPEIDYDKVDRVRGLDITITTTAKNDEEGQALLAAFNFPFRK

SEQ ID NO: 58299 - protein, 101 aa, Haemophilus influenzae
MAKQSMKARDVKRVKLAEKFYAKRVELKKIISDVNASDEDRWDAVLKLQTLPRDSSPSRQRNRCRQTGRPHGVLRKFGLSRIKVREAAMRGEIPGLKKASW

SEQ ID NO: 58300 - protein, 130 aa, Haemophilus influenzae
MSMQDPIADMLTRIRNGQAANKVAINMPSSKLKVAIANVLAAEGYIESVKVLEGAKPELEITLKYFQGKPVVESIQRVSRPGLRIYKRKDELPKVMGGLGVAVISTSKGVMTDRAARQAGLGGEIICYVA

SEQ ID NO: 58301 - protein, 177 aa, Haemophilus influenzae
MSRVAKAPVNIPAGVEVKLDGQLLTVKGKNGELSRKIHESVEVKQDNGQFTFTPREGFVEANAQSGTARALVNAMVIGVTEGFTKKLVLVGVGYRAQLKGNAIALSLGYSHPVEHTLPVGITAECPSQTEIVLKGADKQLIGQVAADIRAYRRPEPYKGKGVRYADEVVRIKEAKKK

SEQ ID NO: 58302 - protein, 117 aa, Haemophilus influenzae
MDKKSARIRRAARARHMMREQGVTRLVIHRTPRHIYAQVIAPNGSEVLAAASTVEKAIREQVKYTGNKDAAAAVGKAVAERALAKGVQAVAFDRSGFKYHGRVQTLADAAREAGLQF

SEQ ID NO: 58303 - protein, 166 aa, Haemophilus influenzae
MSNIEKQVGELQEKLIAVNRVSKTVKGGRIMSFTALTVVGDGNGRVGFGYGKAREVPAAIQKAMEKARRNMINVALNEGTLQHPVKGVHTGSRVFMQPASEGTGIIAGGAMRAVLEVAGVRNVLSKAYGSTNPINVVRATIDALANMKSPEMVAAKRGKTVDEILG

SEQ ID NO: 58304 - protein, 59 aa, Haemophilus influenzae
MAKTIKVTQVRSSIARLPKHKATLRGLGLRHIHHTVELIDTPAVRGMINQVSYMVKVEE

SEQ ID NO: 58305 - protein, 144 aa, Haemophilus influenzae
MRLNTLSPAEGAKHSAKRLGRGIGSGLGKTGGRGHKGQKSRTGGGVRRGFEGGQMPLYRRLPKFGFTSMKSAVTAEVRLNELTKVEGNVVTLETLKAANILTKDIQFAKVILAGEVKSAVTVRGLRVTKGAKAAIEAAGGSIEE

SEQ ID NO: 58306 - protein, 441 aa, Haemophilus influenzae
MAKQPGYQARSTNSGKGELKSRLLFVLGALIVYRIGSFIPVPGIDAAVLAQLVEQQKGTIIDMFNMFSGGALSRASILALGIMPYISASIVIQLLATVSPALAELKKEGAAGQRKISKYTRYATVVFATIQAVAISTGLPNMLSGLVPNVGFSFYFTSVVSLVTGTMFLMWLGEQITERGIGNGISILVFGGIVAGLPSAILQTIEQARQGQMHPLVLLLIAAIVFAVTYFVVFVERGQRRIRVEYAKRQQGRQILGGHSTHLPLKVNMANVMPAIFASSIILFPATLTQWFGQNDKFEWLNNLSMLLNPGQPLYLLVYAVAIIFFSFFYTAMQYNPRDTADNLKKSGAFIPGIRPGEQTSRYIDKVMTRLTLIGGLYVTFVCLVPYIMTSAWDVKFYFGGTSLLIVVVVIMDFIVQVQSHLMSSQYESALKKANLKGFGQ

SEQ ID NO: 58307 - protein, 37 aa, Haemophilus influenzae
MKVRASVKKMCRNCKIVKREGVVRVLCSDPKHKQRQG

SEQ ID NO: 58308 - protein, 122 aa, Haemophilus influenzae
MARIAGINIPDHKHAVIALTAIYGIGKTRSQAICAAAGIAEDVKIRELSEEQIDKLRDEVGKFTVEGDLRREVTLNIKRLLDLGCYRGLRHRRSLPVRGQRTKTNARTRKVHVSRSKNSRGK

SEQ ID NO: 58309 - protein, 129 aa, Haemophilus influenzae
MAKTPVRARKRVKKQVVDGVRHIHASFNNTIVTITDRQGNALAWATAGGSGFRGSRKSTPFAAQVAAERCAEIVKEFGLKNLEVMVKGPGPGRESTIRALNAAGFRITNITDVTPIPHNGCRPPKKRRV

SEQ ID NO: 58310 - protein, 206 aa, Haemophilus influenzae
MARYLGPKLKLSRREGTDLFLKSGVRAIDSKCKIDTAPGQHGARKPRLSDYGSQLREKQKVRRIYGILERQFRNYYKEANRLKGNTGENLLVLLEGRLDNVVYRMGFATTRAEARQLVSHKAIVVNGRVVNIPSFQVSVNDVVAIREKSKKQARIKASLELAEQREKPTWLEVDSAKMEGVFKRVPERSDLSADINEHLIVELYSK

SEQ ID NO: 58311 - protein, 328 aa, Haemophilus influenzae
  MISC_FEATURE (249)..(249): X=any amino acid
MQGSVTEFLKPRLVDIEQISSTHAKVILEPLERGFGHTLGNALRRILLSSMPGCAVTEVEIDGVLHEYSSKEGVQEDILEVLLNLKGLAVKVQNKDDVILTLNKSGIGPVVAADITYDGDVEIVNPDHVICHLTDENASISMRIRVQRGRGYVPASSRTHTQEERPIGRLLVDACYSPVERIAYNVEAARVEQRTDLDKLVIELETNGALEPEEAIRRAATILAEQLDAFVDLRDVRQPEIKEEKPEFXPILLRPVDDLELTVRSANCLKAETIHYIGDLVQRTEVELLKTPNLGKKSLTEIKDVLASRGLSLGMRLENWPPASIAED

SEQ ID NO: 58312 - protein, 128 aa, Haemophilus influenzae
MRHRKSGRQLNRNSSHRQAMFRNLASALVSHEIIKTTLPKAKELRRVVEPLITLAKVDSVANRRLAFARTRNVETVAKLFNELGPRFAQRAGGYTRILKCGFRAGDNAPMAYIELVDRPEVAEATTEE

SEQ ID NO: 58313 - protein, 185 aa, Haemophilus influenzae
MLNQIKKDAQDRMEKSLEALKGHISKIRTGRAQPSLLDAIQVEYYGAATPLRQLANVVAEDARTLAVTVFDRSLISAVEKAILTSDLGLNPSSAGTTIRVPLPPLTEERRRDLIKIVKGEGEQGKVAVRNVRRDANDKIKALLKDKEISENEQHKAEEEIQKITDIYIKKVDEVLADKEKELMDF

SEQ ID NO: 58314 - protein, 538 aa, Haemophilus influenzae
MTDLNKVVKELEALGIYDVKEVVYNPSYEQLFEEETKPGLEGFEKGTLTTTGAVAVDTGIFTGRSPKDKYIVLDEKTKDTVWWTSETAKNDNKPMNQATWQSLKDLVTNQLSRKRLFVVDGFCGASEHDRIAVRIVTEVAWQAHFVKNMFIRPTEEQLKNFEPDFVVMNGSKVTNPNWKEQGLNSENFVAFNLTERIQLIGGTWYGGEMKKGMSSMMNYFLPLKGVGAMHCSANVGKDGDVAIFFGLSGTGKTTLSTDPKRELIGDDEHGWDDVGIFNFEGGCYAKTIHLSEENEPDIYRAIRRDALLENVVVRSDGSVDFDDGSKTENTRVSYPIYHIDNIVKPVSRAGHATKVIFLTADAFGVLPPVSKLTPEQTKYYFLSGFTAKLAGTERGITEPTPTFSACFGAAFLTLHPTQYAEVLVKRMQAAGAEAYLVNTGWNGTGKRISIKDTRGIIDAILDGSIEKAEMGELPIFNLAIPKALPGVDSAILDPRDTYADKAQWQSKAEDLAGRFVKNFVKYATNEEGKALIAAGPKA

SEQ ID NO: 58315 - protein, 293 aa, Haemophilus influenzae
MTNQQDYTQDNDKLYRYLFQHRAVRGEWVRLNKTFTDTLNTHQYPKAVQDLLGEMMVATNLLTATLKFAGNITVQIQGDGPLRLALVNGNDQQQIRALARVDGNITENMSLHNMIGKGVLVITIAPKEGERYQGVISLDKPTITECLEDYFVRSEQLQTQLIIRTGEYEGKPVAAGMLLQIMPDGSGTPEDFEHLTTLAATVKDEELFGLPAEELLYRLYHEETVNLYPAQDVQFFCGCSAERSSSALLLISDEEIDEILAEHKGRIDMQCECCGTHYFFNKEAIEKLKSTRV

SEQ ID NO: 58316 - protein, 457 aa, Haemophilus influenzae
MALWGGRFTQAADKRFKDFNDSLRFDYRLAEQDIQGSIGWSKALVKVNVLTIEEQHQLEQALNELLVEVRSNPQAILQDDAEDIHSWVESKLIDKVGNLGKKLHTGRSRNDQVAVDIKLWCKQRVIELQESVRNLQRHLVQTAENTQQAVMPGYTHLQRAQPITFAHWCMAYVEMFDRDYSRLTDAYNRMNTCPLGSGALAGTAYAVDRDSLAHDLSFAFATRNSLDSVSDRDHIVELLSIASLSMAHLSRFAEDMIIFNSGEANFVELSDRVTSGSSLMPQKKNPDACELIRGKTGRVIGSLTSMLITLKGLPLAYNKDMQEDKEGIFDALDTWQNCVDMATFVLDELKVNVERTREAALKGYSNATELADYLVSKGVPFRDSHHIVGETVVYAIEKGKGLEDLTIPEFRQFSEVVGDDVYEILSLQSCLDKRCAKGGVSPLRVAEAIAEAKTRFA

SEQ ID NO: 58317 - protein, 295 aa, Haemophilus influenzae
MKAVIPVAGLGTRMLPATKAIPKEMLTLVDKPLIQYVVNECVAAGIKEIVLVTHSSKNAIENHFDTSFELETMLEKRVKRQLLEEVRSICPKNVTIMHVRQGNAKGLGHAVLCGRPLVGNESFAVMLPDVLLAEFSADQKKENLAAMIQRFNETGASQIMVTPVPQENVSSYGVADCGGIELNGGESAKINSIVEKPSIEDAPSNLAVVGRYVFSAAIWDLLEKTPIGVGDEIQLTDAIDMLIEKETVEAFHMTGETFDCGDKIGYMEAFVEYGIRHEKLGKEFKSFIKNLAKTL

SEQ ID NO: 58318 - protein, 63 aa, Haemophilus influenzae
MLILTRKVGESVLIGDDISITVLSVRGNQVKLGVEAPKEVSVHREEIYQRIKQTKDEPYLGSS

SEQ ID NO: 58319 - protein, 874 aa, Haemophilus influenzae
MKTTAEIRQSFLDFFHSKGHQVVESSSLVPENDPTLLFTNAGMNQFKDVFLGMDKRPYSRATTAQRCVRPGGKHNDLENVGYTARHHTFFEMLGNFSFGDYFKQDAINFAWEYLTSPQWLGLPKEKLWVTVYETDDEAYNIWNKDVGVPAERIIRIGDNKGSPYASDNFWAMGDTGPCGPCTEIFYDHGDHIWGGPPGSPEEDGDRYIEIWNVVFMQFNRLADGTMEKLPRPSVDTGMGLERISAVLQHVNSNYEIDIFKTLIAKTAEIVGATDLTNKSLRVIADHIRSCAYLIADGVIPSNEGRGYVLRRIIRRAVRHGHLLGAKESFFYKLVPTLIDVMAEAGKDVKAKQTNVEKLLRLEEEQFARTLERGLSLLDEALSQVKDGILSGEVAFKLYDTYGFPLDLTADVCRERNITIDEQAFDRKMEAQRTRAQAASQFGVDYNSVIRVDGETKFEGYTEVESQAKITALFYDGKSVESIEAGQSAVVILENTPFYAESGGQIGDSGYLSTQSVTFNVKDTQKYGQVFGHIGELTQGSLKVGQSVNAIVDAKRRHNTSLNHSATHLLHAALRQILGLHVVQKGSLVSDKALRFDFAQPEAITKEQLSEIETLVNQKIRANFPVQTDIMDIDSAKAKGAMALFGEKYGDKVRVLTMGDFSIELCGGIHAKRTGDIGLFKIITENAVAAGIRRIEAVTGQNAIDWLHNQQRILTQSADLLKSDVNTLAEKIQQLQDKAKKVEKELQGLKEKAAMQAGSYFVKSAVKINGVSVIAQQLDGIETKSLRVMVDDLKNQLGSGVIAFASILDEKVNLVVGVTNDLTAKIKAGELVNLMAQQVGGKGGGRPDMAMAGGSQLENVTQAIKVAQDWLNKNL

SEQ ID NO: 58320 - protein, 506 aa, Haemophilus influenzae
MTAQTQCQDSQVLLTMTNVCKSFPGVKALDNANLTVRSHSVHALMGENGAGKSTLLKCLFGIYAKDEGEILFLGEPVNFKTSKEALENGISMVHQELNLVRQTSVMDNLWLGRYPLKGPFVDHAKMYRDTKAIFDELDIDVDPKEKVAKLSVSQMQMIEIAKAFSYNAKIVIMDEPTSSLSEKEVEHLFKIIDKLKQRGCGIIYISHKMDEIFKICDEITILRDGKWINTVNVKESTMEQIVGMMVGRELTQRFPEKTNVPKEVILQVENLTAKNQPSIQDVSFELRKGEILGIAGLVGAKRTDIVEAIFGVRELIEGTIKLHGKTVKNHTALEAINNGFALVTEERRSTGIYSNLSIEFNSLISNMKSYLTPWKLLSTKKMKSDTQWVIDSMNVKTPSHRTTIGSLSGGNQQKVIIGRWLLTQPEILMLDEPTRGIDIGAKFEIYQLIQELAKKDKGIIMISSEMPELLGVTDRILVMSNGKLAGIVESAKTSQEEILQLAAKYL

SEQ ID NO: 58321 - protein, 185 aa, Haemophilus influenzae
MKQLLDFIPLILFFITYKLGGVREAAIVLVVATILQIVILKWKYGMVEKQQKIMASAVVFFGLLTAYFNEIRYLQWKVTIINGLFAIVLLVAQFQFKTPLIKKLLGKELQLPEKAWNTLNFGWAIFFIICMLVNIYISHNMSEEAWVDFKSFGIIGMTVIATIISGVYIYRYLPKDGSNSKDGEK

SEQ ID NO: 58322 - protein, 154 aa, Haemophilus influenzae
MSANFTDKNGRQSKGVLLLRTLAMPSDTNANGDIFGGWIMSQMDMGGAILAKEIAHGRVVTVAVESMNFIKPISVGDVVCCYGQCLKVGRSSIKIKVEVWVKKVASEPIGERYCVTDAVFTFVAVDNNGRSRTIPRENNQELEKALALISEQPL

SEQ ID NO: 58323 - protein, 194 aa, Haemophilus influenzae
MVQQKIANLLQGDFRYQIQYNWVSLENISPNIQLAVISSEDQRFLEHLGFDFEAIQRAIRYNEKSNKGIRGASTISQQTAKNLMLWHGQNWLRKGLEVPATMLLELTWSKKRILEVYLNIAEFGNGIFGVEAASRYYFKKSAKNLSQNEAALLAAVLPNPIIYKVNKPSLLVRKKQTWILRQMGNLGTEYLSHL

SEQ ID NO: 58324 - protein, 333 aa, Haemophilus influenzae
MCKIFKTGLKMTALNHWQPSADIKNHLKRAKIIAKIRQFFTERGLLEVETPVLSEFGVTDLHLSTFSTEFLAPFGEQSKTLWLSTSPEYHMKRLLAAGSGPIFQISKVFRNEEAGNRHNPEFTMLEWYRPHFHMHRLINEVDDLLQQILDCPPAESLSYQFVFQEYVGLDPLSAERSELIEAARKHNFMAEDNEDRDTLLQFLFSEVVEPQIGKERPIAVYHFPSTQAALAQVSPEDQRVAERFEFYYKGLELANGFHELADAQEQRHRFELDNQQRQKCELPTREIDERFLAALEAGMPDASGVALGIDRLMMIALDCEKINDVISFAVDNA

SEQ ID NO: 58325 - protein, 227 aa, Haemophilus influenzae
MSKLLLVDDDIELTELLSTLLELEGFDVETANNGLEALQKLNESYKLVLLDVMMPKLNGIETLKEIRKVSNVPVMMLTARGEDIDRVLGLELGADDCLPKPFNDRELIARIKAILRRSASPSNNISNVEILSFDGITLHFSHGIATYNEENLNLTDYEFKILCLLLKSKGNVVSREELSLEVMEKPLTPFDRSLDMHISNLRRKLPKRKNKPSWFKTLRGKGYALVT

SEQ ID NO: 58326 - protein, 549 aa, Haemophilus influenzae
MLMKLKATLTLAAATLVLAACDQSSSANKSTAQTEAKSSSNNTFVYCTAKAPLGFSPALIIEGTSYNASSQQVYNRLVEFKKGSTDIEPALAESWEISDDGLSYTFHLRKGVKFHTTKEFTPTRDFNADDVVFSFQRQLDPNHPYHNVSKGTYPYFKAMKFPELLKSVEKVDDNTIRITLNKTDATFLASLGMDFISIYSAEYADSMLKAGKPETLDSRPVGTGPFVFVDYKTDQAIQYVAHENYWKGRTPLDRLVISIVPDATTRYAKLQAGTCDLILFPNVADLAKMKTDPKVQLLEQKGLNVAYIAFNTEKAPFDNVKVRQALNYAVDKKAIIEAVYQGAGTSAKNPLPPTIWSYNDEIQDYPYDPEKAKQLLAEAGYPNGFETDFWIQPVIRASNPNPKRMAELIMADWAKIGVKTNPVTYEWADYRKRAKEGELTAGIFGWSGDNGDPDNFLSPLLGSSNIGNSNMARFNNSEFDALLNEAIGLTNKEERAKLYKQAQVIVHNQAPWIPVAHSVGFAPLSPRVKGYVQSPFGYDAFYGVSVDGK

SEQ ID NO: 58327 - protein, 930 aa, Haemophilus influenzae
MAQIATNPLVLVDGSSYLYRAFHAFPSLTNAAGEPTSAMYGVLNMLKSLISQVQPTHIAVVFDAKGKTFRDEMFEQYKSHRPPMPDDLRKQIQPLHDMIRALGIPLLVVEGIEADDVIGTLALQASSLGKKVLISTGDKDMAQLVDDNIMLINTMNNSLLDRKGVIEKYGIPPELIIDYLALMGDSADNIPGVAGVGEKTALGLLQGIGSMAEIYANLEKVAELPIRGAKKLGEKLLAEKNNADLSYTLATIKTDVELNVTTDQLLLGESQKDQLIEYFARYEFKRWLNEVMNGADSITQTTEQPVKMNQYKATSQDQSAVENTPKIQIDRTKYETLLTQADLTRWIEKLNAAKLIAVDTETDSLDYMSANLVGISFALENGEAAYLPLQLDYLDAPKTLEKSTALAAIKPILENPNIHKIGQNIKFDESIFARHGIELQGVEFDTMLLSYTLNSTGRHNMDDLAKRYLGHETIAFESLAGKGKSQLTFNQIPLEQATEYAAEDADVTMKLQQALWLKLQEEPTLVELYKTMELPLLHVLSRMERTGVLIDSDALFMQSNEIASRLTALEKQAYALAGQPFNLASTKQLQEILFDKLELPVLQKTPKGAPSTNEEVLEELSYSHELPKILVKHRGLSKLKSTYTDKLPQMVNSQTGRVHTSYHQAVTATGRLSSSDPNLQNIPIRNEEGRHIRQAFIAREGYSIVAADYSQIELRIMAHLSGDQGLINAFSQGKDIHRSTAAEIFGVSLDEVTSEQRRNAKAINFGLIYGMSAFGLSRQLGISRADAQKYMDLYFQRYPSVQQFMTDIREKAKAQGYVETLFGRRLYLPDINSSNAMRRKGAERVAINAPMQGTAADIIKRAMIKLDEVIRHDPDIEMIMQVHDELVFEVRSEKVAFFREQIKQHMEAAAELVVPLIVEVGVGQNWDEAH

SEQ ID NO: 58328 - protein, 187 aa, Haemophilus influenzae
MNTQKRQQIRTEIRKIRANLTALQQHQAEQSVTQHALNLIEQRQAKNIALYFSFDGEISTKALIQSLWMQNKNVYLPVLHPFTKHYLLFLRYLPDTPMKQNQFGIWEPKLNVQNVLPLNELDILFTPLVAFDKKGNRLGMGGGFYDRTLQNWQNKSFIPVGLAYQCQQVENLPTEHWDVPLFDILVG

SEQ ID NO: 58329 - protein, 856 aa, Haemophilus influenzae
MNIEKFTTKFQEALSERQSLAIGKDNQFIEPVHLLTALLNQQGGSIAPILTASGVNVALLRNELKTELNKLPQVIGNGGDVQLSRQLINLLNLCDKFAQQNQDKFISSELFLFAALEERGTISDILKKCGAKKEQISQAIQHIRGGQNVNDQNAEESRQALEKYTIDLTARAESGKLDPVIGRDEEIRRAIQVLQRRTKNNPVLIGEPGVGKTAIVEGLAQRIVNGEVPEGLKNKRVLSLDMGALIAGAKYRGEFEERLKAVLNELSKEEGRVILFIDEIHTMVGAGKTDGAMDAGNLLKPSLARGELHCVGATTLDEYRQYIEKDAALERRFQKVFVDEPSVEDTIAILRGLKERYEIHHHVDITDPAIVAAATLSHRYISDRQLPDKAIDLIDEAASSIRMEIDSKPEPLDRLERRIIQLKLEQQALQKEEDEASRKRLEMLEKELAEKEREYAELEEVWKSEKATLSGSQHIKQELDTAKTELEQARRAGDLAKMSELQYGRIPDLEKQLEQAETSEGKEMTLLRYRVTDEEIAEVLSKATGIPVSKMMEGEKEKLLRMEDELHKRVIGQEEAVDAVANAIRRSRAGLSDPNRPIGSFLFLGPTGVGKTELCKTLAKFLFDSEDAMVRIDMSEFMEKHSVSRLVGAPPGYVGYEEGGYLTEAVRRRPYSVILLDEVEKAHADVFNILLQVLDDGRLTDGQGRTVDFRNTVVIMTSNLGSDLIQGNKDESYSEMKALVMSVVSQHFRPEFINRIDETVVFHPLGKENIRAIASIQLERLAKRMETRGYELVFTDALLDFIGEVGYDPIYGARPLKRAIQQEIENSLAQQILSGALLPGKVVTIDYANAEVQARQ

SEQ ID NO: 58330 - protein, 235 aa, Haemophilus influenzae
MKLTSPIFNDQQKRRAIIWLSFFHIFIIAASNYFVQIPFEITLKLTALGAANDFSFHSTWGTLTFPFIFLATDLTVRIFGAEDARKIIFVVMFPALIVSYVISVLFSESKFQGFESLTHFDLFVFRIAIASFAAYVVGQLLDVIVFNRLRQLKTWWVAPTSSMTFGSMADTFVFFSIAFYQSADPFMAEHWAQLGFVDYLFKLFIGIILFVPAYGVVLNVILRKLQMLVTERVPA

SEQ ID NO: 58331 - protein, 616 aa, Haemophilus influenzae
MKNEIDIKKLRNIAIIAHVDHGKTTLVDKLLQQSGTFESARGDVDERVMDSNDLEKERGITILAKNTAINWNDYRINIVDTPGHADFGGEVERVLSMVDSVLLVVDAFDGPMPQTRFVTQKAFAHGLKPIVVINKVDRPGARPDWVVDQVFDLFVNLGASDEQLDFPIIYASALNGVAGLEHEDLAEDMTPLFEAIVKHVEPPKVELDAPFQMQISQLDYNNYVGVIGIGRIKRGSIKPNQPVTIINSEGKTRQGRIGQVLGHLGLQRYEEDVAYAGDIVAITGLGELNISDTICDINTVEALPSLTVDEPTVTMFFCVNTSPFAGQEGKYVTSRQILERLNKELVHNVALRVEETPNPDEFRVSGRGELHLSVLIENMRREGYELAVSRPKVIYRDIDGKKQEPYEQVTIDVEEQHQGSVMEALGIRKGEVRDMLPDGKGRVRLEYIIPSRGLIGFRGDFMTMTSGTGLLYSSFSHYDEIKGGEIGQRKNGVLISNATGKALGYALFGLQERGKLMIDANIEVYEGQIIGIHSRSNDLTVNCLQGKKLTNMRASGKDDAIVLTTPVKFSLEQAIEFIDDDELVEVTPESIRIRKKLLTENDRKRANRTTTSTSTH

SEQ ID NO: 58332 - protein, 472 aa, Haemophilus influenzae
MPNANAIANVFKLIEENNVKFVLLRFTDIKGKEHGVSIPVSLVDEDMFEDGKMFDGSSVEGWKTINKADMLLMPMAETAIVDPFAQIPTLSIRCSVYEPTTMQSYDRDPRSIAIRAENYMRSTGIADQAFFGPEPEFFLFDDVRFNVSMNKASFSIDDIEAAWNTNKKYEEGNNAYRPLKKGGYCAVAPIDSAHDIRSEMCLILEEMGLVIEAHHHEVATAGQNEIATKFNTLTLKADETQIYKHVVQNVALEHGKTACFMPKPITGDNGSGMHCNMSLSKDGKNIFQGDKYAGLSETALYYIGGIIKHAKALNAFTNPSTNSYKRLVPGYEAPVLLAYSASNRSASIRIPAVTNPKAIRVEARFPDPLANPYLAFAALLMAGLDGVVNKIHPGDAMDKNLYDLPPEELKDIPAVASSLEEALNSLEKDYEFLTQGGVFAKDFIDAFISIKRKEVERLNMAPHPVEFEMYYA

SEQ ID NO: 58333 - protein, 207 aa, Haemophilus influenzae
MDKIALKITFSAETPKYAQSVLTEYVNFVSQYSLNQTNQEFKQGFNLRLDELRFSKEQIEENLTEEKKVQVENLTNALDIAKKAGIKDFSRGNNISDSKLADGTYLFILAEKYLQAQLDIAKNTPVVYPANYYITDRQLFKLNKLASQLELVEDVKTYYYLSSPDYPVVKDNPKRSLILAIGFIIGILLPTFFILLGSVIQTNKKQS

SEQ ID NO: 58334 - protein, 250 aa, Haemophilus influenzae
MNMPLISIIMPVYNAECYLNQGILSCLNQSYQNIELILIDDGSTDKSIEIINNIIDKDKRVKLFFTPTNQGPAAARNIGLEKAQGDYITFLDSDDFIANDKLEKQLNFMLQNHLVMTHGNYAFCDLEGNQIKLVTTSKKIDYLTLLQGNQFKIMTVLVERESIKLLRFPNIKHEDYAFFLDCLKEVKQSILYSHQASSFVRIGKVSVSSNKFKSAIWTFNIYFKREKLGVVKSIYYFILYAYNGFIKYKK

SEQ ID NO: 58335 - protein, 471 aa, Haemophilus influenzae
MNRLFFSKIALWLLDFLTFNISFLLSLFVISYYHNGYEKYLPIYEIDDRTYIHAVLAGICVGWFAIRLRHYTYRKPFWFELKEIFRTLIIFAIFELAIVAFPKLYFSRYLWALTWGITFLLFPLARVLVKKFLIKSGWFLRDTIMIGSGDNAFDVYNALRDEPYLGFQVTHFISVSNISNNVKELNIPILNSMSSWTSVTKKTDQFIIALEDDEEVDRNNWLRYFSTNGYRSVSVIPTLRGLPLYNTDMSFMFSHEIMLLQMNNNLAKLSSRILKRTMDIVVGSLAIIIFSPVLLYLYFAVKKDGGNAIYGHPRIGRNGKTFNCLKFRTMAVNSKEVLDELLRTDPEARAEWEKDFKLKNDPRITKIGAFIRKTSLDELPQLFNVLKGEMSLVGPRPIVIDELERYEENVDYYLMARPGMTGLWQVSGRNNIDYNTRVYFDSWYVKNWSLWNDIAILFKTMNVVLNRDGAY

SEQ ID NO: 58336 - protein, 399 aa, Haemophilus influenzae
MIQEKHLTFTINLLVSLFFLTILIIPKGYNYAPIILSAIGLIYFIPLKKKLSFSSEDKKLIFSFLFYFFTFLLSIIINKDGIREIDNPSRLLLFIPLLLLFKNFPIKRKTILYAIPSSALITGCVALFQKFALGYEKPFPETMHIQMGNIAISLATFSIVITLHFFIKKQYKSTLFGFVAIILAIMTSALSGARGGWIGLPVVVGIILFLYKEFINKKLIITLIAIITIGLTALITSPKFGIEKRYNAAKSDIVSYLEKNNRNTSLGARFDMWENALIAIKEAPIFGHGSDGYDEFRHKQVKSKQMAKTTLNFGSLHNQYLESWVKRGLVGFIALILIILTPIFYFIKNLNTHNLETKCICILGIIHIVSHIFYFTSQSFLAHNSGNIFYFSAMLCFIV

SEQ ID NO: 58337 - protein, 390 aa, Haemophilus influenzae
MKFIDESLIRIEAGDGGNGCVSFRREKFIPKGGPDGGDGGDGGDVYLQADENLNTLIDYRFNKRFAAERGENGRSSDCTGRRGKDIILPVPVGTRAIDNDTKETLGDLTQHGQKMLVAKGGYHGLGNTRFKSSVNRAPRQKTMGTPGEKRDLLLELMLLADVGMLGLPNAGKSTFIRAVSAAKPKVADYPFTTLVPSLGVVKVDDSHSFVVADIPGLIEGAADGAGLGIRFLKHLERCRVLIHLVDIAPIDGSNPADNMAIIESELFQYSEKLSEKPRWLVFNKIDTMSDEEAEERAREIAEQLGWEEDYYFISAATGKNVSPLCRDIMDFIIANPREAETQQVAPEEVKFKWEDYHQERLAEHQFDDDEDWDDDWSEEDDEGIEFIYKP

SEQ ID NO: 58338 - protein, 85 aa, Haemophilus influenzae
MATKKAGGSTRNGRDSEAKRLGVKRFGGESVLAGSIIVRQRGTKFHAGNNVGMGRDHTLFATADGKVKFEVKGEKSRKYVVIVTE

SEQ ID NO: 58339 - protein, 103 aa, Haemophilus influenzae
  MISC_FEATURE (38)..(38): X=any amino acid
MYAVFQSGGKQHRVSEGQVVRLEKLELATGATVEFDSXLMVVNGEDVKIGAPVVAGAKVVAEVVAQGRGEKVKIVKFRRRKHSRKQQGHRQWFTEVKITGIQA

SEQ ID NO: 58340 - protein, 329 aa, Haemophilus influenzae
MKKQDLMSIDEIQKLADPDMQKVNQNILAQLNSDVPLIGQLGFYIVQGGGKRIRPLIAVLAARSLGFEGSNSITCATFVEFIHTASLLHDDVVDESDMRRGRATANAEFGNAASVLVGDFIYTRAFQLVAQLESLKILSIMADATNVLAEGEVQQLMNVNDPETSEANYMRVIYSKTARLFEVAGQAAAIVAGGTEAQEKALQDYGRYLGTAFQLVDDVLDYSANTQALGKNVGDDLAEGKPTLPLLHAMRHGNAQQAALIREAIEQGGKREAIDEVLAIMTEHKSLDYAMNRAKEEAQKAVDAIEILPESEYKQALISLAYLSVDRNY

SEQ ID NO: 58341 - protein, 236 aa, Haemophilus influenzae
MTTPKILVVEDEIVTRNTLKGIFEAEGYDVFEAENGVEMHHILANHNINLVVMDINLPGKNGLLLARELREELSLPLIFLTGRDNEVDKILGLEIGADDYLTKPFNPRELTIRARNLLHRAMPHQEKENTFGREFYRFNGWKLDLNSHSLITPEGQEFKLPRSEFRAMLHFCENPGKLQTREELLKKMTGRELKPQDRTVDVTIRRIRKHFEDHPNTPNIIMTIHGEGYRFCGDIE

SEQ ID NO: 58342 - protein, 421 aa, Haemophilus influenzae
MFTRNMTIADYDPVLWQAIQDENRRQEEHIELIASENYASPRVMEAQGSQFTNKYAEGYPGKRYYGGCEYADIVEQLAIDRAKELFGADYVNVQPHSGSQANAAVYGALINAGDTILGMDLAHGGHLTHGAKVSFSGKIYNSVLYGITADGLIDYEDVRQKALECKPKLIVAGFSAYSQVVDWAKMREIADEVGAYLFVDMAHVAGLIAAGLYPNPLPHAHVVTTTTHKTLGGPRGGLILSSCGDEEIYKKLQSSVFPANQGGPLVHIIAAKAVCFKGALEPQYKEYQANVIKNAKAMVEVFKQRGYDVVSNGTENHLFLVSFIKQGLTGKAADAALGKANITVNKNAVPNDPQKPFVTSGIRVGTPSVTRRGFNENDVRELAGWMCDVLDALGKENEEQVIAETKEKVLAICKRLPVYPK

SEQ ID NO: 58343 - protein, 382 aa, Haemophilus influenzae
MKIILVVFVLIFVGVIGFNMIKGVMISRAIAGMPESSSPVTALEVQPREWTPVINTTGLVRPNQGAMLSTQNAGAVSQVLVQNGQNVKKGEVLVELDSSVERANLQAAQAQLSALRQTYQRYVGLLNSNAVSRQEMDNAKAAYDAQVASIESLKAAIERRKIVAPFDGKAGIVKINVGQYVNVGTEIVRVEDTSSMKVDFALSQNDLDKLHIGQRVTATTDARLGETFSARITAIEPAINSSTGLVDVQATFDPEDGHKLLSGMFSRLRIALPTETNQVVVPQVAISYNMYGEIAYLLEPLSEEEKGKMSGNEKLDRLYRAKQITVFTKDRQGVYAQLQGNEVKVGDKIITGGQQGIGNGSLVEWIKKDIVGAIEPAHKTPL

SEQ ID NO: 58344 - protein, 1032 aa, Haemophilus influenzae
MYEEIRMKFTDIFIRRPVLAVSISLLMIILGLQAISKLAVREYPKMTTTVITVSTAYPGADANLIQAFVTSKLEESIAQADNIDYMSSTSAPSSSTITIKMKLNTDPAGALADVLAKVNAVKSALPNGIEDPSVSSSSGGSGIMYISFRSKKLDSSQVTDYINRVVKPQFFTIEGVAEVQVFGAAEYALRIWLDPQKMAAQNLSVPTVMSALSANNVQTAAGNDNGYYVSYRNKVETTTKSVEQLSNLIISSNGDDLVRLRDIATVELNKENDNSRATANGAESVVLAINPTSTANPLTVAEKIRPLYESIKTQLPDSMESDILYDRTIAINSSIHEVIKTIGEATLIVLVVILMFIGSFRAILIPILAIPISLIGVLMLLQSFNFSINLMTLLALILAIGLVVDDAIVVLENIDRHIKAGETPFRAAIIGTREIAVPVISMTIALIAVYSPMALMGGITGTLFKEFALTLAGAVFISGVVALTLSPMMSSKLLKSNAKPTWMEERVEHTLGKVNRVYEYMLDLVMLNRKSMLAFAVVIFSTLPFLFNSLSSELTPNEDKGAFIAIGNAPSSVNVDYIQNAMQPYMKNVMETPEVSFGMSIAGAPTSNSSLNIITLKDWKERSRKQSAIMNEINEKAKSIPEVSVSAFNIPEIDTGEQGPPVSIVLKTAQDYKSLANTAEKFLSAMKASGKFIYTNLDLTYDTAQMTISVDKEKAGTYGITMQQISNTLGSFLSGATVTRVDVDGRAYKVISQVKRDDRLSPESFQNYYLTASNGQSVPLSSVISMKLETQPTSLPRFSQLNSAEISAVPMPGISSGDAIAWLQQQATDNLPQGYTFDFKSEARQLVQEGNALAVTFALAVIIIFLVLAIQFESIRDPMVIMISVPLAVSGALVSLNILSFFSIAGTTLNIYSQVGLITLVGLITKHGILMCEVAKEEQLNHGKTRIEAITHAAKVRLRPILMTTAAMVAGLIPLLYATGAGAVSRFSIGIVIVAGLSIGTIFTLFVLPVVYSYVATEHKPLPVFDENKTTH

SEQ ID NO: 58345 - protein, 160 aa, Haemophilus influenzae
MTFSLIVATTLNNVIGKDNQMPWHLPADLAWFRQNTTGKPVIMGRKTFESIGRPLPKRTNIVLSRQLFEHEGVIWKDSFESAVNFVRDFDEIMLIGGGELFKQYLPKADKLYLTQIQTELDGDTFFPQLNWEEWEIEFDEYRKADEQNRYDCRFLILTRK

SEQ ID NO: 58346 - protein, 283 aa, Haemophilus influenzae
MKQYLELCRRIVSEGEWVANERTGKHCLTVINADLEYDVANNQFPLITTRKSYWKAAIAEFLGYIRGYDNAADFRALGTKTWDANANENAAWLANPHRRGVDDMGRVYGVQGRAWRKPNGETIDQLRKIVNNLTKGIDDRGEILTFFNPGEFDLGCLRPCMHTHTFSLVGDTLHLTSYQRSCDVPLGLNFNQIQVFTFLALMAQITGKKAGKAYHKIVNAHIYEDQLELMRDVQLKREPFPLPKLEINPDIKTLEDLETWVTMDDFKVVGYQSHEPIKYPFSV

SEQ ID NO: 58347 - protein, 901 aa, Haemophilus influenzae
MSILTRIFGSRNERVLRKLKKQVVKINKMEPAFEALSDDELKAKTQEFRDRLSGGETLQQILPEAFATVREASKRVLGMRHFDVQLIGGMVLTNRCIAEMRTGEGKTLTATLPCYLIALEGKGVHVVTVNDYLARRDAETNRPLFEFLGMSVGVNIPGLSPEEKRAAYAADITYATNSELGFDYLRDNLAHSKEERFQRTLGYALVDEVDSILIDEARTPLIISGQAENSSELYIAVNKLIPSLIKQEKEDTEEYQGEGDFTLDLKSKQAHLTERGQEKVEDWLIAQGLMPEGDSLYSPSRIVLLHHVMAALRAHTLFEKDVDYIVKDGEIVIVDEHTGRTMAGRRWSDGLHQAIEAKEGVDVKSENQTVASISYQNYFRLYERLAGMTGTADTEAFEFQQIYGLETVVIPTNRPMIRDDRTDVMFENEQYKFNAIIEDIKDCVERQQPVLVGTISVEKSEELSKALDKAGIKHNVLNAKFHQQEAEIVAEAGFPSAVTIATNMAGRGTDIILGGNWKAQAAKLENPTQEQIEALKAEWEKNHEIVMKAGGLHIIGTERHESRRIDNQLRGRSGRQGDPGSSRFYLSLEDGLMRIYLNEGKLNLMRKAFTVAGEAMESKMLAKVIASAQAKVEAFHFDGRKNLLEYDDVANDQRHAIYEQRNHLLDNDDISETINAIRHDVFNGVIDQYIPPQSLEEQWDIKGLEERLSQEFGMELPISNWLEEDNNLHEESLRERIVEIAEKEYKEKEALVGEDAMRHFEKGVMLQTLDELWKEHLASMDYLRQGIHLRGYAQKDPKQEYKKESFRMFTEMLDSLKHQVITALTRVRVRTQEEMEEAERARQEMAARINQNNLPVDENSQTTQNSETEDYSDRRIGRNEPCPCGSGKKYKHCHGSRVARQ

SEQ ID NO: 58348 - protein, 251 aa, Haemophilus influenzae
MEAQPQQKENIMAQVSMRDMINAGVHFGHQTRYWNPQMKPFIFGARNGVHIINLEKTLPLFNEALAELTRIASNNGKVLFVGTKRAASEAVQAAALDCQQYYVNHRWLGGMLTNWKTVRQSIKRLKDLETQSQDGTFDKLTKKEALMRSREMEKLELSLGGIKDMGGLPDALFVIGADHEHIAVKEANNLGIPVFAIVDTNSTPAGVDFVIPGNDDATRAIQLYVSAAAAAVKEGRGNEAQVAEELAADAE

SEQ ID NO: 58349 - protein, 283 aa, Haemophilus influenzae
MAEITASLVKELRDRTGAGMMECKKALVEANGDIELAIDNMRKSGQAKAAKKAGRVAAEGVILARVENGFGVLVEMNCETDFVAKDAGFLGLANEVTDFAAANKGTTIEALQAQFEEKRAALVAKIGENMNIRRVAYLDGQVIAQYLHGAKIGVLVAGEGSADELKKVAMHVAASKPEFVNPEDVSAEVVEHERQIQIDIAINSGKPKEIAEKMVEGRMKKFTGEVSLTGQAFVMDPSVSVGDFLKSVNTSVSNFIRLEVGEGIEKKEEDFAAEVAKITGGNA

SEQ ID NO: 58350 - protein, 341 aa, Haemophilus influenzae
MQKSYSLQELATQIGATVRGNTDVVVENIAPLDKAQSNQLTFISNVKFRVLLKDSKAGILIVSEEDVEHCSPESNLLIVKDPYVAYAILAQYMDSTPKAAQGIAKSAVIFDGVLLGENVSIGANAVIEEGVVLGDNVIIGANCFVGKNTKIGSGTQLWANVTVYHNVEIGANCLIQSGTVIGSDGFGYANDRGRWIKIPQVGQVIIGNNVEIGANTCIDRGALDATIIEDNVIIDNLCQIAHNVHIGTGTAVAGGVIMAGSLTVGRYCLIGGASVINGHMEICDKVTITGMGMVMRPITEPGVYSSGIPLQTNKEWRKTAALTLGIDGINKRLKALEKKIS

SEQ ID NO: 58351 - protein, 288 aa, Haemophilus influenzae
MLKQRVLSAIVLIAAVLCALFLFTPFYFALALGAVAILGIWEWTQFARLKQPLIRFFVTTFLGVFIFLWLYTEGNYLDAGRVFEQHLQLLLINAVSWWGLALLLVISYPKSAKFWSKNPLLQLLFAFSTLIPFVAGVLRLRLEHYTHDPYHGLFLLLYVFILVWAADSGAYFSGRAFGKRKLAPKVSPGKSWEGVIGGLITALVLAFIFIHFSNNTLVGDRNITGFIILSVATVAISVLGDLTESMFKRESGVKDSSQLIPGHGGVLDRIDSLTAAVPFFSYFYFFVL

SEQ ID NO: 58352 - protein, 239 aa, Haemophilus influenzae
MIELDQTNIPKHVAIIMDGNGRWAKQKNKMRIFGHTNGVTAVRKAVAYARQIGVEVLTLYAFSSENWSRPEQEISALMSLFMQALDREVKKLHKNNICLKIIGDVSRFSETLQEKIKKAENLTEKNTALTLNIAANYGGCWDIIQAAKQIAEKVKKEEMSVSDINNSTFQHHLATQNAPPVDLLIRTSGEQRISNFLLWQIAYAELYFSDVLWPDFNQLEFNRAIASYQQRHRRFGGTE

SEQ ID NO: 58353 - protein, 861 aa, Haemophilus influenzae
MQEQYRPDMIEPKVQQYWAENKVFKAIKDESKEKYYCLSMFPYPSGRLHMGHVRNYTIGDVISRYQRMLGKNVLQPFGWDAFGLPAEGAAIKNKTAPAKWTYENIAYMKKQLQLLGFGFDWDREIATCKPEYYKWEQWFFTELYKKGLVYKKTSTVNWCPNDETVLANEQVHEGCCWRCDTPVEQKEIPQWFIKITDYAEQLLGGLDTLPQWPDMVKTMQRNWIGRSEGVEITFDVANTNEKVAVYTTRPDTFYGVSYLGIAAAHPLASLAAQNNSELAAFIQEAKNAKVAEADLATMEKKGMATGLFAIHPLTGDKLPIWVANFVLMHYGTGAVMAVPAHDQRDFEFAQKYSLPIKQVIAPLADEEIDLTKQAFVEHGKLVNSDEFDGKNFDGAFNGIADKLEKLGVGKRQVNYRLRDWGVSRQRYWGAPIPMLTLENGDVVPAPMEDLPIILPEDVVMDGVKSPINADPNWAKTTFNDAPALKETDTFDTFMESSWYYARYTCPQYQNGMLDAEEANYWLPVDQYIGGIEHATMHLLYFRFFHKLLRDAGFVTSEEPADKLLCQGMVLADAFYYTSPTNERIWVSPTQVTLERDEKGRIIKATDPEGRELVHSGMTKMSKSKNNGIDPQEMVEKYGADTVRLFMMFASPAEMTLEWQESGVEGAKRFLGRVWNLVYQYQQNPAKTSLDLTALSAEQKVLRREVHKTIAKVSDDIGRRQTFNTAIAAVMELMNKLTKASLDSEQDRAVMAEALSAVVRMLYPITPHICFELWQALGNESAIDTAEWVKADEAAMVEDEKLIVVQVNGKVRGKVTVATDADEDTVKTIAFADENVKKFIDNQHIVKVIYVVGKLLNVVVKP

SEQ ID NO: 58354 - protein, 688 aa, Haemophilus influenzae
MTTQNFLVEIGTEELPPKALKTLATSFADNVEAELNQAGLSFDKIEWFAAPRRLAVKVLNLATQQPSKEIEKRGPAVSAAFDAEGKPTKAAEGWARGCGITVEQAERIATDKGEWLIHRAKIEGQPTKNLLNDIVANALAKLPIPKPMRWADKTVQFIRPVHTVTMLLGDELIEGEILGVASARTIRGHRFLGEKEFYIQHADQYPQLLREKGSVVADFNERKAEILAKSQAKATALGGVADIEESLLEEVTSLVEYPNVLAAKFEEHFLAVPAEALVYTMKGDQKYFPIYDKDGKLLPHFIFVSNINPEDPTAIIEGNEKVVRPRLTDAEFFFKTDLKQKLVDRLPRLETVLFQQQLGTLKDKTDRIEQLAGEIAKQIGADEAKAKRAGLLSKCDLMTNMVFEFTDTQGVMGMHYARHDGEDEEVAVALNEQYMPRFAGDELPKSLVASAVALADKFDTLTGIFGIGQAPKGSADPFALRRAALGALRIIVEKNLPLDLEDLVKKSAALFGDKLTNQNVVADVVDFMLGRFRAWYQDEGIAVDVIQAVLARRPTRPADFDARVRAVSHFRTLDSAEALAAANKRVSNILAKAGAAIGEINLTACVEPAEKALAEAVLALRTEVQPLIAQGDYTTVLDKLANLRAPVDSFFDNVMVNAEDPALRQNRLAILNTLQGLFLQVADISVLQ

SEQ ID NO: 58355 - protein, 302 aa, Haemophilus influenzae
MSTKFNVKTFQGMILALQEYWANQGCTIVQPFDMEVGAGTSHPMTALRALGPEPMAFAYVQPSRRPTDGRYGENPNRLQHYYQFQVVIKPSPDNIQELYLGSLEMLGFDPTKNDIRFVEDNWENPTLGAWGLGWEVWLNGMEVTQFTYFQQVGGLECKPVTGEVTYGLERLAMYIQGVDSVYDLVWSDGPLGKTTYGDVFHQNEVEQSTYNFEHANTDFLFYCFDQYEKEAQELLALEKPLPLPAYERILKAAHSFNLLDARKAISVTERQRYILRIRALTKGVAEAYYASREALGFPGCKK

SEQ ID NO: 58356 - protein, 508 aa, Haemophilus influenzae
MSSQCPFSHLAATNLTMGNGAPVADNQNSLTAGPRGPLLAQDLWLNEKLADFVREVIPERRMHAKGSGAFGTFTVTHDITKYTRAKIFSEVGKKTEMFARFTTVAGERGAADAERDIRGFALKFYTEEGNWDLVGNNTPVFFLRDPRKFPDLNKAVKRDPRTNMRSATNNWDFWTLLPEALHQVTVVMSDRGIPASYRHMHGFGSHTYSFWNEAGERFWVKFHFRTQQGIKNLTDAEAAEIIANDRESHQRDLYEAIERGDFPKWTLFVQIMPEADAEKVPYHPFDLTKVWSKKDYPLIEVGEFELNRNPENFFADVEQSAFAPSNLVPGIGASPDRMLQARLFNYADAQRYRLGVNYRQIPVNRPRCPVHSNQRDGQGRVDGNYGSLPHYEPNSFSQWQQQPDFAEPPLRINGDAAHWDYRNDDNDYFSQPRALFNLMNAEQKQSLFNNTAAAMGDAPDFIKYRHIRNCHWCDAAYGEGVAKALGLTVEDALKARDTDPALGQGGLL

SEQ ID NO: 58357 - protein, 436 aa, Haemophilus influenzae
  MISC_FEATURE (28)..(28): X=any amino acid
MAKIVKVIGREIIDSRGNPTVEAEVHLXGGFVGLAAAPSGASTGSREALELRDGDKSRFLGKGVLKAVAAVNNEIAQAIVGKDATNQAEIDQIMIDLDGTENKSNFGANAILAVSLANAKAAAASKGLPLYAYIAELNGTAGVYSMPLPMMNIINGGEHADNNVDIQEFMIQPVGAKTLREALRIGAEVFHNLAKVLKAKGMSTAVGDEGGFAPNLASNADALACIKEAVEKAGYVLGKDVTLAMDCASSEFYNKENGMYEMKGEGKSFTSQEFTHYLEELCKEYPIVSIEDGQDESDWEGFAYQTKVLGDRVQLVGDDLFVTNTKILKEGIEKGIANSILIKFNQIGSLTETLAAIKMAKDAGYTAVISHRSGETEDATIADLAVGTAAGQIKTGSMSRSDRIAKYNQLIRIEEALERAGTPAAFPGLKAVKGQA

SEQ ID NO: 58358 - protein, 401 aa, Haemophilus influenzae
MSQYSENIIIGAGAAGLFCAAQLAKLGKSVTVFDNGKKIGRKILMSGGGFCNFTNLEVTPAHYLSQNPHFVKSALARYTNWDFISLVAEQGITYHEKELGQLFCDEGAEQIVEMLKSECDKYGAKILLRSEVSQVERIQNDEKVRFVLQVNSTQWQCKNLIVATGGLSMPGLGATPFGYQIAEQFGIPVIPPRASLVPFTYRETDKFLTALSGISLPVTITALCGKSFYNQLLFTHRGISGPAVLQISNYWQPTESVEIDLLPNHNVEEEINQAKQSSPKQMLKTILVRLLPKKLVELWIEQGIVQDEVIANISKVRVKNLVDFIHHWEFTPNGTEGYRTAEVTMGGVDTKVISSKTMESNQVSGLYFIGEVLDVTGWLGGYNFQWAWSSAYACALSISRQ

SEQ ID NO: 58359 - protein, 372 aa, Haemophilus influenzae
MLEFSSQDCVFMQRALDLAAKGQYTTTPNPSVGCVLVKNGEIVGEGFHFKAGQPHAERVALAQAGENAKGATAYVTLEPCAHYGRTPPCALGLIEAGVVKVIAAMQDPNPQVAGKGLKMLSDAGIESTVNLLNDQAEKINKGFLKRMRQGMPFVQLKLAMSLDGRTAMASGESKWITGPDARSDVQKMRAKSSALLSTSTTVIADDPSLNVRWDEFPENLKTEYKKEWLRQPVRVILDSQHRIQPTHKLFLTHSPVWLVSSEPRDLTGFPDFCEQIIFPKENLLKELMRELGKRQINTLWVEAGANLSGSLIDAKLVDELIIYIAPKLLGDNARGLCQLPNLTKLADAPLWQLNELEQIGDDIKLTYTPKGV

SEQ ID NO: 58360 - protein, 271 aa, Haemophilus influenzae
MPELPEVETALRGISPYLKNFTIEKVVVRQPKLRWAVSEELITLKNVKIVDLTRRAKYLIIHTEKGYIIGHLGMSGSVRIVPQDSAIDKHDHIDIVVNNGKLLRYNDPRRFGAWLWTENLDDFHLFLKLGPEPLSDEFNAEYLFKKSRQKSTALKTFLMDNAVVVGVGNIYTNESLFICGIHPLKLAKNLTRNQCFSLVNTIKDVLRKAIIQGGTTLKDFLQPDGRPGYFAQELLVYGNKDKPCPKCGGKIESLIIGQRNSFFCPKCQKRG

SEQ ID NO: 58361 - protein, 56 aa, Haemophilus influenzae
MAAKGAREKIRLVSTAETGHFYTTDKNKRNMPEKMEIKKFDPVVRKHVIYKEAKIK

SEQ ID NO: 58362 - protein, 78 aa, Haemophilus influenzae
MSRVCQVTGKRPAVGNNRSHAMNATRRRFLPNLHTHRFWVESENRFVTLRLTAKGMRIIDKKGIDAVLAEIRARGEKI

SEQ ID NO: 58363 - protein, 234 aa, Haemophilus influenzae
MRSKSFLFFFYKYMENNDELMPREKLLAFGAKALSDYELLAIFLRTGIKGCPVMSLSKNVLTHFGPLHALLSADKKAFCSVKGLGITQFIQLQAITEMTKRYLKQDMLSTPIINDPETVKLFLLTELQHEEREVFMVLFLDNQHRLIKKERLFLGTIYVSAVYPREIIKEALYCNAAALILAHNHPSGITEPSYSDQLITKKIQDAAELMEIRVLDHLIVGKSDCYSFAENCLL

SEQ ID NO: 58364 - protein, 351 aa, Haemophilus influenzae
MSSLLIDLKGKELEQEEVELLSHPLVAGLILFTRNFENREQIQELIRSVRQRVKKPLLITVDQEGGRVQRFRDGFTMLPSMQAFQETLSATEQVSFAKEAGWQMAAEMIALDIDLSFAPVLDLGHECRAIGDRSFSSDVKSAVNLATAFIDGMHQAGMASTGKHFPGHGHVLADSHLETPYDDRTKEEIFSGDLQPFQQLISQNKLDAIMPAHVIYSQCDSQPASGSKYWLKEILRKKLNFQGTIFSDDLGMKGAGVMGNFVERSKKALNAGCDLLLLCNEREGVIQVLDNLKLTENQPHFMARQARLQSLFKRRVINWNDLISDQRWRLNYQKLADIQSRWLDIQAAKND

SEQ ID NO: 58365 - protein, 312 aa, Haemophilus influenzae
MDKDMQLIRGLHNANRVLQGCALTIGNFDGVHLGHQTVLRHLRQKADELNLPMAVLLFESQPREYFMGKNAPARLMRLRDKIYYLEKAKVDVVIVAKFDRTFAEQLADVFIEQTLVNHLHVKFLSIGDDFKFGSKRQGNFAMLQAASKRFGFIVEDNRSFCLDAQRISSTAIREALANDDLQLAENLLGKPYRIFGRVIHGNKLGRTIGFPTANIRLHRQVNPIKGVYAVKVRLKSGEIFNGVANMGKRPTINGLMQLLEVHLFDFSQNIYGQMVEVEFCHKIRNEIKFPSFDDLKVQIEKDVETAKAFFNS

SEQ ID NO: 58366 - protein, 510 aa, Haemophilus influenzae
MTLLSRVLGLVRDVVIAHLIGAGAAADVFLFANRIPNFLRRLFAEGAFSQAFVPVLAEYQQSGDMNKTREFIGKVSGTLGGLVSIVTILAMVGSPHVAALFGMGWFTDWMNDGPDAHKFEQASLLLKITFPYLWFVTFVAFSGAVLNTIGKFGVMSFSPVLLNIAMIATALFLAPQMDNPDLALAIGIFLGGLLQFLFQIPFMKQAGLLVKPKWAWRDEGVTKIRKLMIPALFGVSVSQINLLLDTVIASFLMTGSISWLYYSDRLLEFPLGLFGIAISTVILPTLARHHVNREGDSAKSAVDFRNTMDWGVRMIFLLGVPAAIGIAVLAQPMLLTLFMRGNFMLNDVYAASYSLRAFNAGLLSFMLIKILANGYYARQDTKTPVKIGIIAMVSNMGFNLLAIPFSYVGLAIASAMSATLNAYLLYRGLAKADVYHFSRKSAVFFVKVLLAAIAMGAAVWYYVPEINQWAKMDFFMRVYWLVWLIVLAAIVYGATLILLGVRKHHLLTKN

SEQ ID NO: 58367 - protein, 89 aa, Haemophilus influenzae
MTLANIKSAKKRAVQSEKRRQHNASQRSMMRTYIKKVYAQVAAGEKSAAEAAFVEMQKVVDRMASKGLIHANKAANHKSKLAAQIKKLA

SEQ ID NO: 58368 - protein, 155 aa, Haemophilus influenzae
MDIRKIKKLIELVEESGITELEVQEEEGTVRISRAAPVIAPAAVQYAAAPVVAPTPAAAPAQVPAAATTAPAASDELSGHLVRSPMVGTFYRSPSPEAKAFVEVGQSVKVGDALCIVEAMKMMNRIEADKAGVVKAILINDGNAVEFDEPLIVIE

SEQ ID NO: 58369 - protein, 448 aa, Haemophilus influenzae
MLEKVVIANRGEIALRILRACKELGIKTVAVHSTADRDLKHVLLADETICIGPAPSAKSYLNIPAIIAAAEVTGADAIHPGYGFLSENADFAEQVERSGFTFIGPTADVIRLMGDKVSAIKAMKKAGVPCVPGSDGPVSNDIAKNKEIAKRIGYPIIIKASGGGGGRGMRVVRSEDALEESIAMTKAEAKAAFNNDMVYMEKYLENPRHVEIQVLADTHGNAVYLAERDCSMQRRHQKVVEEAPAPGITEEVRRDIGSRCANACVEIGYRGAGTFEFLYENGEFYFIEMNTRIQVEHPVTEMITGVDLVKEQLRIAAGLPISFKQEDIKVKGHAMECRINAEDPKTFLPSPGKVNHLHSPGGLGVRWDSHVYGGYTVPPHYDSMIAKLITYGDTREVAIRRMQNALSETIIDGIKTNIPLHELILEDENFQKGGTNIHYLEKKLGMNE

SEQ ID NO: 58370 - protein, 484 aa, Haemophilus influenzae
MNLGIILPLIIYLTFVFGAAIFAYVKRTKGDFLTEYYVGNRSMTGFVLAMTTASTYASASSFVGGPGAAYKYGLGWVLLAMIQVPVVWLALGALGKKFALLSRETNALTINDLFFYRYKNKYLVWLSSLALLLAFFAAMTVQFIGGARLLETTIGISYTQALLLFALTVGIYTFIGGFRAVVLTDTIQGTVMIFGTIILLIGTIYALGGVESAVNKLTEIDPDLVTPYGPNGMLDFQFMASFWILVCFGVVGLPHTAVRCMAFKDSKALHRGMLIGTIVLSIIMLGMHLAGALGRAVIPNLTVSDQVIPTLMIKVLPPIVAGIFLAAPMSAIMSTIDAQLIQSSSIFVKDLYLSAKPEAAKNEKKVSYFSSIITLILTALLIFAALNPPDMIIWLNLFAFGGLEAAFLWVIVLGIYWDKANAYGALSSMIIGLGSYILLTQLGIKLFNFHQIVPSLVFGLIAFLVGNKLGERRIEKTQLKVTAL

SEQ ID NO: 58371 - protein, 170 aa, Haemophilus influenzae
MAFIGVAILINGGKNNEGIDNISLFGCLLVLSAGIIFAAVLRWTQRVVAKVSTQAYTSVSIVLGTITTLPFTLLLTENWQISLNSTGIAGLLYLAIGCSWLAYWLWNKGLNSVDANISGVLVALEPLFGILFAVSLLGETLSFSAALGITIIMLATLGSTLLPKLLKKSV

SEQ ID NO: 58372 - protein, 191 aa, Haemophilus influenzae
MPPKFWIIIIVKKIDQQSLENAYRLFESGDIHQIEIGSTKGLQQIHHYLFNGLYEFAGKIREQNISKGHFRFANALYLKEALGKIEQMPEDTFENIINKYVEMNIAHPFLEGNGRSTRIWLDLVLKKHLGKVVNWQNVDKTQYLQAMERSPINDLEIRFLLQANLTDDVNNREIIFKGIEQSYYYEGYEKE

SEQ ID NO: 58373 - protein, 330 aa, Haemophilus influenzae
MRIGSYQLRNRVLLAPMAGITDQPFRRLCAYYGAGLTFSEMMSTNPQVWHTEKSKLRLAHSEDLGLNAVQIAGSDPLEMAQAAAINVEYGAQIIDINMGCPAKKVNRKLAGSALLQFPDLVEKILREVVSAVNVPVTLKIRTGWDKSNRNCVQIGKIAEQCGIQALTVHGRTRACLFEGEAEYDNIKAVKQAIAIPVIANGDIDSARKAKFVLNYTGADAIMIGRAALGNPWLFQAVENLIEHNSISQMPSLKEKCGQILRHIQELHQFYGEQKGYRIARKHVAWYLQGIQPDSVFKQTFNAISDPKEQLIVLEDFFNLILDKKNVRTTT

SEQ ID NO: 58374 - protein, 161 aa, Haemophilus influenzae
MTKKKVKPNSNTIALNKRARHDYFIEDEIEAGLELQGWEVKSMRAGKANISDSYVIFKNGEAFLFGASIQPLNVASTHIVCDPTRTRKLLLNKRELASLFGKANRDGFTIVALSLYWKSAWAKVKIGLAKGKKQQDKRDDIKEREWKVTKDRIMKNAHRRS

SEQ ID NO: 58375 - protein, 321 aa, Haemophilus influenzae
MIKKIAVLTSGGDAPGMNAAIRGVVRSALAEGLEVFGIYDGYQGLYNNKIKQLNRYSVSDVINRGGTFLGSARFPEFKDPNIRAKCAEILRSHGIDALVVIGGDGSYMGAKLLTEEHSFPCVGLPGTIDNDVAGTDYTIGYQTALQTAVDAIDRLRDTSSSHQRISIVEIMGRHCSDLTISAGIAGGCEYIVASEIEFNREELIQQIERSIIRGKRHAIIAITELLTDVHSLAKEIEARVGHETRATVLGHIQRGGSPCAFDRILASRMGAYAVDLLLQGKGGYCVGIQNEQLVHHDIIDAINNMQRVFKADWLKVAKRLE

SEQ ID NO: 58376 - protein, 469 aa, Haemophilus influenzae
MAKTLYEKLFDSHIVYEAEGETPILYINRHLIHEVTSPQAFDGLRVANRQVRQVNKTFGTMDHSISTQVRDVNKLEGQAKIQVLELDKNTKATGIKLFDITTKEQGIVHVMGPEQGLTLPGMTIVCGDSHTATHGAFGALAFGIGTSEVEHVLATQTLKQARAKSMKIEVRGKVASGITAKDIILAIIGKTTMAGGTGHVVEFCGEAIQDLSMEGRMTVCNMAIEMGAKAGLIAPDETTFAYLKDRPHAPKGKDWEDAVAYWKTLKSDDDAQFDTVVTLEAKDIAPQVTWGTNPGQVISVNETIPNPQEMADPVQRASAEKALHYIGLEAGTNLKDIKVDQVFIGSCTNSRIEDLRAAAAVMKGRKKADNVKRILVVPGSGLVKEQAEKEGLDKIFIAAGAEWRNPGCSMCLGMNDDRLGEWERCASTSNRNFEGRQGRNGRTHLVSPAMAAAAGVFGKFVDIRDVTLN

SEQ ID NO: 58377 - protein, 1694 aa, Haemophilus influenzae
MLNKKFKLNFIALTVAYALTPYTEAALVRDDVDYQIFRDFAENKGRFSVGATNVEVRDKNNHSLGNVLPNGIPMIDFSVVDVDKRIATLINPQYVVGVKHVSNGVSELHFGNLNGNMNNGNAKSHRDVSSEENRYFSVEKNEYPTKLNGKAVTTEDQTQKRREDYYMPRLDKFVTEVAPIEASTASSDAGTYNDQNKYPAFVRLGSGSQFIYKKGDNYSLILNNHEVGGNNLKLVGDAYTYGIAGTPYKVNHENNGLIGFGNSKEEHSDPKGILSQDPLTNYAVLGDSGSPLFVYDREKGKWLFLGSYDFWAGYNKKSWQEWNIYKPEFAKTVLDKDTAGSLTGSNTQYNWNPTGKTSVISNGSESLNVDLFDSSQDTDSKKNNHGKSVTLRGSGTLTLNNNIDQGAGGLFFEGDYEVKGTSDSTTWKGAGVSVADGKTVTWKVHNPKSDRLAKIGKGTLIVEGKGENKGSLKVGDGTVILKQQADANNKVKAFSQVGIVSGRSTVVLNDDKQVDPNSIYFGFRGGRLDANGNNLTFEHIRNIDDGARLVNHNTSKTSTVTITGESLITDPNTITPYNIDAPDEDNPYAFRRIKDGGQLYLNLENYTYYALRKGASTRSELPKNSGESNENWLYMGKTSDEAKRNVMNHINNERMNGFNGYFGEEEGKNNGNLNVTFKGKSEQNRFLLTGGTNLNGDLKVEKGTLFLSGRPTPHARDIAGISSTKKDQHFAENNEVVVEDDWINRNFKATNINVTNNATLYSGRNVANITSNITASDNAKVHIGYKAGDTVCVRSDYTGYVTCTTDKLSDKALNSFNATNVSGNVNLSGNANFVLGKANLFGTISGTGNSQVRLTENSHWHLTGDSNVNQLNLDKGHIHLNAQNDANKVTTYNTLTVNSLSGNGSFYYLTDLSNKQGDKVVVTKSATGNFTLQVADKTGEPTKNELTLFDASNATRNNLNVSLVGNTVDLGAWKYKLRNVNGRYDLYNPEVEKRNQTVDTTNITTPNNIQADVPSVPSNNEEIARVETPVPPPAPATPSETTETVAENSKQESKTVEKNEQDATETTAQNGEVAEEAKPSVKANTQTNEVAQSGSETEETQTTEIKETAKVEKEEKAKVEKDEIQEAPQMASETSPKQAKPAPKEVSTDTKVEETQVQAQPQTQSTTVAAAEATSPNSKPAEETQPSEKTNAEPVTPVVSKNQTENTTDQPTEREKTAKVETEKTQEPPQVASQASPKQEQSETVQPQAVLESENVPTVNNAEEVQAQLQTQTSATVSTKQPAPENSINTGSATAITETAEKSDKPQTETAASTEDASQHKANTVADNSVANNSESSDPKSRRRRSISQPQETSAEETTAASTDETTIADNSKRSKPNRRSRRSVRSEPTVTNGSDRSTVALRDLTSTNTNAVISDAMAKAQFVALNVGKAVSQHISQLEMNNEGQYNVWVSNTSMNENYSSSQYRRFSSKSTQTQLGWDQTISNNVQLGGVFTYVRNSNNFDKASSKNTLAQVNFYSKYYADNHWYLGIDLGYGKFQSNLKTNHNAKFARHTAQFGLTAGKAFNLGNFGITPIVGVRYSYLSNANFALAKDRIKVNPISVKTAFAQVDLSYTYHLGEFSVTPILSARYDTNQGSGKINVNQYDFAYNVENQQQYNAGLKLKYHNVKLSLIGGLTKAKQAEKQKTAELKLSFSF

SEQ ID NO: 58378 - protein, 366 aa, Haemophilus influenzae
MQFSISRENLLKPLQQVCGVLSNRPNIPVLNNVLLQIEDYRLTITGTDLEVELSSQTQLSSSSENGTFTIPAKKFLDICRTLSDDSEITVTFEQDRALVQSGRSRFTLATQPAEEYPNLTDWQSEVDFELPQNTLRRLIEATQFSMANQDARYFLNGMKFETEGNLLRTVATDGHRLAVCTISLEQELQNHSVILPRKGVLELVRLLETNDEPARLQIGTNNLRVHLKNTVFTSKLIDGRFPDYRRVLPRNATKIVEGNWEMLKQAFARASILSNERARSVRLSLKENQLKITASNTEHEEAEEIVDVNYNGEELEVGFNVTYILDVLNALKCNQVRMCLTDAFSSCLIENCEDSSCEYVIMPMRL

SEQ ID NO: 58379 - protein, 454 aa, Haemophilus influenzae
MNLSNLWQSCLLQLQDQVSASDLSTWLRPLQADVVADNHIVLYASNMFVKGWVETHYLAQIQQICQTLAQNPELRISLKEGVKPAPKIVESTPNTSLRSESAVDFQAESSASVKFESHLNTKHLFDNFVEGKSNQLARAVGQKLAQAPGEPSANPFFLYGGTGLGKTHLLHAIGNGILADKPNARVLYIHANNFMQHMVKAVRDNKMDQFKKFYRSLDALLVDDIQFFAEKEKTQEEFFHIFNSLFETGRQIILTSDRYPKEIEKIEERLKSRFGWGLTTAIEPPDLETRVAILLKKAEEHNMNLPEEVAFFIAQRLRTNVRELEGALNRVKAMQDFKGGDIDIDFVRDTLKDILALQERLVTIENIQKVVAEYYRIKVSDLKSKSRARSVTRPRQIAMALAKELTNRSLPEIGRAFDRDHTTVLNACREVPKFREQDNSIQEDWANLIRTLSA

SEQ ID NO: 58380 - protein, 44 aa, Haemophilus influenzae
MKRTFQPSVLKRSRTHGFRARMATKNGRQVLARRRAKGRKSLSA

SEQ ID NO: 58381 - protein, 119 aa, Haemophilus influenzae
MVKLNFSRELRLLTPIQFKNVFEQPFRASTPEITILARKNNLEHPRLGLTVAKKHLKRAHERNRIKRLVRESFRLSQHRLPAYDFVFVAKNGIGKLDNNTFAQILEKLWQRHIRLAQKS

SEQ ID NO: 58382 - protein, 541 aa, Haemophilus influenzae
MDSRRSLLVLALIFISFLVYQQWQLDKNPPVQTEQTTSITATSDVPASSPSNSQAIADSQTRGRIITLENDVFRLKIDTLGGDVISSELLKYDAELDSKTPFELLKDTKEHIYIAQSGLIGKNGIDTRSGRAQYQIEGDNFKLAEGQESLSVPLLFEKDGVTYQKIFVLKRGSYDLGVDYKIDNQSGQAIEVEPYGQLKHSIVESSGNVAMPTYTGGAYSSSETNYKKYSFSDMQDNNLSIDTKAGWVAVLQHYFVSAWIPNQDVNNQLYTITDSKNNVASIGYRGSVVTIPAGSQETITSSLWTGPKLQNQMATVANNLDLTVDYGWAWFIAKPLFWLLTFIQGIVSNWGLAIICVTIVVKAILYPLTKAQYTSMAKMRILQPKMQEMRERFGDDRQRMSQEMMKLYKEEKVNPLGGCLPILLQMPIFIALYWTFLEAVELRHAPFFGWIQDLSAQDPYYILPILMGISMFLLQKMSPTPVTDPTQQKVMNFMPLVFMFFFLWFPSGLVLYWLVSNLITIAQQQLIYRGLEKKGLHSRKK

SEQ ID NO: 58383 - protein, 461 aa, Haemophilus influenzae
MRLDFKEFFMKETIVAQATAPGRGGIGILRVSGPLATKVAQAILGKCPKPRMADYLPFKDADGTILDQGIALYFKSPNSFTGEDVLELQGHGGQVVLDLLLKRILQIDGIRLARPGEFSEQAFLNDKLDLAQAEAIADLIDATSEQAVRSALKSLQGEFSKKVNELVDSVIYLRTYVEASIDFPDEEIDFLADGKIEANLRGIINQLEDVRSEAKQGSILREGMKVVIAGRPNAGKSSLLNALAGREAAIVTDIAGTTRDVLREHIHIDGMPLHIIDTAGLRDAIDEVERIGISRAWTEIEQADRIILMLDSSDPESADLSKVRSEFLAKLPSTLPVTIVRNKIDLNGEQASESEQGGYQMISLSAQTHDGVQLLREHLKQAMGFQTGMEGGFLARRRHLDALDKAAEHLQIGLVQLTEFHAGELLAEELRLVQSYLSEITGQFTSDDLLGNIFSSFCIGK

SEQ ID NO: 58384 - protein, 519 aa, Haemophilus influenzae
MMFGKKIIHSKTIWFYFLLFLFSIFTNMGLGNVLSENIPVSDYAILFVITAISFYFTPWLGRILITVLFLSALFYCSAGFFYGIPSLGIIASVYETNINETLEYYTTIPFWIFLFQASYFILFVALMKLSFHVKQQAFKWLNTAVISLLLVFSYNQFSDWNYGYKFRFYPVLFYSEFDRMNDLYLEQRDFLNQSANAPSQWDIQSFMPKYKNYILIIGESMRKDYMSLYGFPLKTTPFLERVKGTVFENYYSAAPNTQPSLQLTLYRAEKGETVYTDNIISLAKKAGVKTYWISNQGKIGEFDTIASRIGQSADETIFMKPLGYNSKKVYDDEMLPVLDKALKENISNSKLIVIHLIGSHPAFCERLPYEVKNYFINQSMSCYLESIKYTDQFLEKLNSQLVAQNEPYSVIYFSDHGLAHYEDSNGLSLHPNNLYKQDYEIPFIMFSSDSQKVEKIKTPQSAFNFVYGFADWMGIKEKHLQGVDFFHPEKQEIKVFDWNNVVNVKELADDPAKLPETVQ

SEQ ID NO: 58385 - protein, 210 aa, Haemophilus influenzae
MTDLAQKELMVQLGRSFYERGYTVGGAGNLSVRLDDNRVLVTPTGSSLGRLSVERLSVLDMEGNLLGGDKPSKEAVFHLAMYKKNPECKAIVHLHSTYLTALSCLDNLDPNNAIEPFTPYYVMRVGKMQVIPYYRPGSPKIAEELSNRALTGKAFLLANHGVVVTGSDLLDAADNTEELEETAKLFFTLQGQKIRYLTDTEVKDLENRGK

SEQ ID NO: 58386 - protein, 332 aa, Haemophilus influenzae
MKLLKLTLISTALFSTAALAQAQQSVNVYSYDSFTSEWGAGPKVKQDFEKAHPQCAINFTPFESVGVLLNRVRLEGKKTKADIVLGLDNFFLEQAEKTGIFAPNNVDLTQLDLPTKWANKTFLPFDFGNYAFVYDKTKLQNPPKSLKELVERQDLSVIYQDPRTSSVGRGLLVWMNAVYPADKIQSAWKELDKHTVTVGKGWSDTYGAFLKGEADLVLSYSTSPLYHQLFEKKDNYAATDFAEGHITQVELAARVANHPNQCADDFMAFLISPTAQKHIVTANIMLPVIQGEIEPHFDALKVQQKTQTSINPMVNTEQLKNWISTWQTTLTK

SEQ ID NO: 58387 - protein, 333 aa, Haemophilus influenzae
MLAEKLQINSITPHPSVEYWSVCKVEALFETPFLELVYRATQVHRKHFNPRAIQLSTLMSIKTGGCPEDCSYCPQSARYHTGVQNQQLLDVDEIVAKAKIAKARGAGRFCMGAAWRGPKPKDIEKVTEIIKAVKSLGLETCGTFGLLQDGMAEDLKEAGLDYYNHNLDTAPEHYAEVIGTRRFDDRLSTLGKVRKAGLKVCCGGIVGMNETRKERAGLIASLANLDPQPESVPINQLVKVEGTPLADAEELDWTEFVRTIAVARITMPKSYVRLSAGRSGMTEEMQAMCFMAGANSIFYGDKLLVTDNPEEDGDQLLMAKLDLEPETAENKKL

SEQ ID NO: 58388 - protein, 665 aa, Haemophilus influenzae
MATRRQLANAIRVLAMDSVQKAKSGHPGAPMGMADIAEVLWRDFLKHNPTNPKWADRDRFVLSNGHGSMLIYSLLHLTGYDLSIEDLKQFRQLHSKTPGHPEYGYAPGVETTTGPLGQGITNAVGMAIAEKTLAGQFNREGHEIVDHHTYVFLGDGCLMEGISHEACSLAGTLGLGKLIAFYDDNNISIDGHVDGWFSDDTAERFEAYGWQVIRNVDGHDAEQIRAATILAQAEKGKPTLIICKTIIGFGSPNKSGSHDSHGAPLGDEEIDLTRKALGWEYAPFEIPAEYYAEWSAKEKGAAAEKSWEEKFAAYAKAYPELAAEFKRRVSGELPTNWAAESKAFIEKLQANPASIASRKASQNAIEAYAHVLPEFLGGSADLASSNLTLWSGSKPIRAHENVGGNYINYGVREFGMSAIMNGIALHGGFIPYGATFLMFYEYAHNAVRMAALMKQRTLFVYTHDSIGLGEDGPTHQPVEQTASLRLIPNLETWRPCDQVESAIAWQQAVERQDGPSALIFTRQNLAQMDRTSAQLDAVKRGAYVLKDCDGTPELIFIATGSEVELAVQAAEALSAEGKKVRVVSMPSTNRFDKQDAAYRESVLPAAVTKRVAIEAGIADFWYKYVGFNGRVIGMNSFGESAPADQLFKLFGFTVENVVAKAKEIL

SEQ ID NO: 58389 - protein, 328 aa, Haemophilus influenzae
MKLFNFKKLSMLIAGFTLVTSPALAEISLRFGYEAPRSDSQHSAAKKFNDLLMKKTKGEIKLKLFPDSTLGNAQTMISSVRGGTIDLEMSGSPNFTGLEPKLNVIDIPFIFKDREHVYKVLDGEVGQNLLKDLEKQGLKGLAFWDVGFRAFSNSKQTVTKPEHIKGLKVRTNQNPMYIEAFKLLGSNPVPMPLAELYTALETRAVDAQEHPIGIFWSSKLYEVQKYLSLTNHGYTPLIVVMNKAKFDSLLPALQTAIIEAAKEAGQFQRDLNVKNEQNIISKLRKQGVEVIEKINTEPFKTLIEEKVRKSFIEKHGDDLLKKVDALSE

SEQ ID NO: 58390 - protein, 806 aa, Haemophilus influenzae
MSNFNQISRRDFVKASSAGAALAVSNLTLPFNVMAKETQRLNENNQERIVWSACTVNCGSRCPLRMHVKDNRITYVETDNTGTETYNLDHQVRACLRGRSMRRRVYNPDRLKYPMKRIGKRGEGKFKRISWDEALTEIADALKRNIKKYGNESIYLNYGTGTLGGTMAKSWPPASTMIARFMNCIGGYLNHYGDYSTAQIAVGLDYTYGGGWALGNGMADIENTKLIVLFGNNPAETRMSGGGLTYCIEQAKARSNAKMIIIDPRYNDTGAGREDEWIPIRPGTDAALVAALAYVMIQENLVDQPFLDKYCVGYDEKTLPTDAPKNGHYKAYILGYGNDGIAKTPEWAAKITGIPAERIIKLAREIGSTKPAFISQGWGPQRRSNGELISRAIAMLPILTGNVGIHGGNTGARESAYSIPFVRMPTLKNPVKASIPMFLWTDAIIRGTEMTALTDGIRGVDKLSSPIKVIWNYASNCLINQHAQINRTHDILQDDTQCEMIITIDNHMTSTAKYSDILLPDCTTSEQMDFALDAFVSNMAYVIFADQVIKPSFECRPIYDMLSDLAEKMGVKEKFTEGRTQEEWLRHIYEQSREKLPELPTFEEFRQQGIFKKVDPNGFKVAYKDFRDNPEAHPLKTPSGKIEIYSSRLAEIAKTWKLAEDDVIHPLPIHAQSFEHYGDPLMEKYPLQLSGFHYKARTHSTYGNVDVLKAANPQEVWMNPIDAEPRNIKNGDMIRIFNDRGEVHINVKITPRIIPGVVALSEGAWYAPDKDRIDHSGCINVLTTQRPSPLAKGNPQHSNLVQVERL

SEQ ID NO: 58391 - protein, 298 aa, Haemophilus influenzae
MDYLDKLTHLAQVRGEINIRCEFQGEWQISHQEKDAGKGIFHLIEQGECWLTLNEKQFHLKEGDVFFLPQNQPHSMHYSANKRADIPTKKSHQGLFELHQIGRGTPDLKMFCGNFYYQQDALLTASMPEYLHINLCDTPIHPLVQLFLQEAQKNDAGTKSVVDALSNVLLIYILRHAIQQNLIEQGILFALQDKRLNTALIAILQQPQNDWHIEQLAELATMSRANFIRIFQQHIGMSPGRFLTKVRLQSAAFLLKQSQQSVLAIALEVGYQSEAHFCKVFKNYYQLSPSQYRKSVSL

SEQ ID NO: 58392 - protein, 197 aa, Haemophilus influenzae
MFEYPQGYKLIAGVDEVGRGPLVGAVVTAAVILDPHNPIEGLADSKKLSEKKRLALAEEIKEKARAWALGRAEADEIDEINILQASLLAMTRAVKSLKIQPHFVLIDGNKIPKDLAIPAQAVVKGDSLVAEISAASILAKVARDQEMEELDKQYPEYAFAQHKGYPTKLHLEKLAELGALPQHRRSFAPVKKALEQF

SEQ ID NO: 58393 - protein, 390 aa, Haemophilus influenzae
MNKTNPTIALVAGEVSGDILGAGLIRQLKAHYPNARFIGIAGPRMLAEGCETLVDMEELSVMGLAEILKHLPRLLKIRKNVIQTMLQEKPDVYIGIDAPDFNLDVELKLKANGIKTIHYVSPSVWAWRQNRIHKIAKATHQVLAFLPFEKAFYDKFNVPCRFIGHTMADAIPLKPNRAEACQTLQIDPAQRYLAILVGSRGSEVEFLAEPFLKTALLLKEQFPDLQFLVPLVNEKRRIQFETIKAKITPNLDLHLIDGNARQAMIAADATLLASGTAALEAMLCKSPMVVGYRMKPLTYFLAKRLVKTDYISLPNLLANEMLVPEMIQEECTPELLAEKLSVYLSDDESAVKNRHVLIQHFTDLHQKIQCNADKQAAQAVIDLLEGKENV

SEQ ID NO: 58394 - protein, 148 aa, Haemophilus influenzae
MSEQQPKVIESKEIMTLLPHRYPFLLVDRVLDFKEGEWLKAIKNISVNEPCFTGHFPGEPILPGVLILEALAQAMGILAFKTHELKGGELFYFAGIDEARFKRPVLPGDQMELNVQVIKKRRGITAFTGVATVNGEIACEAKLMCARR

SEQ ID NO: 58395 - protein, 485 aa, Haemophilus influenzae
MKKLNMEILSERWIIATFSFQGRQYNTKKTSQILPALFAVICAAFAGYFILIGSGMFTEPSVALILLATITILLLSSSKKSFYFILLPLTLLHAFYTPTGLNFGPPSYQYIASLFATDILETKEFLLQIPVSSYLIAFAIPILIFLQYKSAVKFGIKFYRNKTFIALATLLFAYNMPLAEPLKETVSSTLKIVDEVQKLKQISQSDNWGKSTLENSRYDDYVIVLGESARKDYHHAYGYPIENTPFMSNAKGTLIDGFRSAGTNTVASLRLMLTFPDKEKWEPNYSLSLVDLIKSAGIKTYWLSNHGMIGKFDTPVSSLASKSDETFFLKKGGSFNSTNFSDFDLLPKFAQVLENSVQGKRFIVLHIYGSHPMACDRIEDYPKIFDDKDLNPRYGYLNCYVSSIKKTDEFLKRVYDQLEENVKKNHRTFSMIYFSDHGLCHQQDEKTIYFCSIKTVSAESTIIFRYSKFHQMIWNAKNIRCLNQV

SEQ ID NO: 58396 - protein, 237 aa, Haemophilus influenzae
MSQPIYKRILLKLSGEALQGEDGLGIDPAILDRMAVEIKELVEMGVEVSVVLGGGNLFRGAKLAKAGMNRVVGDHMGMLATVMNGLAMRDSLFRADVNAKLMSAFQLNGICDTYNWSEAIKMLREKRVVIFSAGTGNPFFTTDSTACLRGIEIEADVVLKATKVDGVYDCDPAKNPDAKLYKNLSYAEVIDKELKVMDLSAFTLARDHGMPIRVFNMGKPGALRQVVTGTEEGTTIC

SEQ ID NO: 58397 - protein, 521 aa, Haemophilus influenzae
MLDVVDLSRLQFALTALYHFIFVPLTLGLSFILVIMETIYVATGKEVYKDMTKFWGKLFGINFALGVTTGIIMEFQFGTNWSYYSHYVGDIFGAPLAIEALLAFFLESTFVGLFFFGWDRLSKGKHLLATYCVAFGSNLSAMWILVANGWMQAPTGSEFNFETVRMEMTNFLDLWLNPVAQSKFLHTLSAGYVTGAFFVLAISSYFLLKGRDFEFAKRSFSVAATFGFIASISVLILGDESGYDIGKAQPVKLAAMEAEFETHPAPAPFLPVAIPNTAEMKNDFAIEIPYLGGVIATRSIDKEIIGLKDLQALNETRVRSGIRAYELFTQLRAEKKANGQVNEETKAQFNEVKKDLGFGLLLKRYTNNVVDATEEQIKQAARDTIPNVGPNFWAFRAMIAAGGLIALLTFGAFVQNLRNKVTQIPLLLKVLLWGLPLPWIAIECGWFLAEYGRQPWATYEILPVGVSASNLSTGDLWFSIGLICALYLAFIIVEMYLMFKYARLGPSALKTGKYYFEQSAK

SEQ ID NO: 58398 - protein, 545 aa, Haemophilus influenzae
MATNYIFVTGGVVSSLGKGIAAASLAAILEARGLNVTIMKLDPYINVDPGTMSPTQHGEVFVTQDGAETDLDLGHYERFIRTKMTKRNNFTTGKIYSEVLRKERRGDYLGATIQVIPHITNEIKDRVIAGAQGHDVVIVEVGGTVGDIESLPFLEALRQLAVQVGREHTLFMHLTLVPYIPTAGEVKTKPTQHSVKELLSIGIQPDVLICRSDRMIPPNERAKIALFCNVAERAVISLKDVNSIYQIPALLKSQGLDDFVCERFRLTCPEADLTEWEQVLYKQANPVGEVTIGMVGKYTELPDAYKSVNEALKHAGLTNRLSVNIKYIDSQDVETKGVEVLKGIDGILVPGGFGYRGVEGKIRTAQYARENKIPYLGICLGMQIALIEYARNVAGLTKANSSEFDKDCEQPVVALITEWQDAEGNTEVRTDESDLGGTMRLGAQQCHLVSGSRARELYGKETIEERHRHRYEVNNTLLPQIEKAGLKVTGLSADKKLVEIIEVPNHPWFVACQFHPEFTSTPRDGHPLFAGFVKAAYENHKKSVK

SEQ ID NO: 58399 - protein, 257 aa, Haemophilus influenzae
MSMLKVSNIQKNFNGNHVLKGIDFEINKGEVVAILGPSGSGKTTFLRCLNLLERPEQGILEFTDGSLKIDFSQKISKADELKLRRRSSMVFQQYNLFPHRSALENVMEGMVVVQKQDKAQAREKALSLLEKVGLKNKADLFPSQLSGGQQQRVGIARALAVKPDIILLDEPTSALDPELVGEVLQTLKMLAQEGWTMIIVTHEMQFAKDVADRVILMADGHIVEQNTADKFFTCPQHERTKQFLLQAKIPLELDYYI

SEQ ID NO: 58400 - protein, 424 aa, Haemophilus influenzae
MDKFRVYGQSRLSGSVNISGAKNAALPILFAAILATEPVKLTNVPELKDIETTLKILRQLGVVVDRDATGAVLLDASNINHFTAPYELVKTMRASIWALAPLVARFHQGQVSLPGGCSIGARPVDLHISGLEKLGADIVLEEGYVKAQVSDRLVGTRIVIEKVSVGATLSIMMAATLAKGTTVIENAAREPEIVDTADFLNKMGAKITGAGSAHITIEGVERLTGCEHSVVPDRIETGTFLIAAAISGGCVVCQNTKADTLDAVIDKLREAGAQVDVTENSITLDMLGNRPKAVNIRTAPHPGFPTDMQAQFTLLNMVAEGTSIITETIFENRFMHIPELIRMGGKAEIEGNTAVCHGVEQLSGTEVIATDLRASISLVLAGCIATGETIVDRIYHIDRGYEHIEDKLRGLGAKIERFSGSDEA

SEQ ID NO: 58401 - protein, 221 aa, Haemophilus influenzae
MIFLEIIKRELQIAMRKNAEILNPLWFFLLVITLFPLVIGPDPKLLSRIAPGIAWVAALLSALLSFERLFRDDFIDGSLEQLMLTAQPLPMTALAKVVAHWLLTGLPLILLSPIAALLLSLEVNIWWALVLTLLLGTPVLSCIGAIGVALTVGLRKGGVLLSLLVVPLFIPVLIFASSVLEAAGLNVPYGGQLAILGAMMVGAVTLSPFAIAAALRISLDN

SEQ ID NO: 58402 - protein, 648 aa, Haemophilus influenzae
MIAELGNYALALSLAVSLMLAIFPLWGAEKGNAQLMALARPMTYGLFASLSIAFAALFYLFAVNDFSVQYIVNNSNTTLPIYYRLSAVWGSHEGSLLLWIWLLAVWSFAVALLSKHLPQEAVARVLGIMGIISVGFVLFVLFTSNPFTRTFPDFPVDGKELNPMLQDVGLIFHPPLLYMGYVGFSVAFAFAIASLMTGKLDSAWARWSRPWTLAAWVFLTLGIVLGSWWAYYELGWGGWWFWDPVENSSFMPWLAGTALIHSLSVTEKRGSFKAWTVLLAILAFSLCLLGTFLVRSGILVSVHAFASDPTRGLYILAYLVVVIGGSLALYAYKGSQIRSRDNAERYSRESMLLLNNILLMTALCVVFLGTLLPLVHKQLGLGSISIGAPFFDQMFLIIMTPFALLLGIGPLVKWRRDQFSAIRTPVVICVFVMLIAGFALPYFLQDKITVSSVLGSMMTVIIALLALYELQQRATHRESFFVGVRKLSRSHWGMMLAHLGVAMTVWGIAFSQNFSVERDVRMKVGESAQIGRYDFKFTGVTDENGPNYIGGKAQIDISKDGQPEASLFAEKRFYTVSRMSMTEAAIAGGLTRDLYVALGEKLEDNSWALRLYYKPFIRWIWIGGLFMALGGLLCMFDRRYRFNVLLKK

SEQ ID NO: 58403 - protein, 679 aa, Haemophilus influenzae
MRSFFSENFMTNIQTQLDNLRKTLRQYEYEYHVLDNPSVPDSEYDRLFHQLKALELEHPEFLTSDSPTQRVGAKPLSGFSQIRHEIPMLSLDNAFSDAEFNAFVKRIEDRLILLPKPLTFCCEPKLDGLAVSILYVNGELTQAATRGDGTTGEDITANIRTIRNVPLQLLTDNPPARLEVRGEVFMPHAGFERLNKYALEHNEKTFANPRNAAAGSLRQLDPNITSKRPLVLNAYGIGIAEGVDLPTTHYARLQWLKSIGIPVNPEIRLCNGADEVLGFYRDIQNKRSSLGYDIDGTVLKINDIALQNELGFISKAPRWAIAYKFPAQEELTLLNDVEFQVGRTGAITPVAKLEPVFVAGVTVSNATLHNGDEIERLNIAIGDTVVIRRAGDVIPQIIGVLHERRPDNAKPIIFPTNCPVCDSQIIRIEGEAVARCTGGLFCAAQRKEALKHFVSRKAMDIDGVGGKLIEQLVDRELIHTPADLFKLDLTTLTRLERMGAKSAENALNSLENAKSTTLARFIFALGIREVGEATALNLANHFKTLDALKDANLEELQQVPDVGEVVANRIFIFWREAHNVAVVEDLIAQGVHWETVEVKEASENLFKDKTVVLTGTLTQMGRNEAKALLQQLGAKVSGSVSSKTDFVIAGDAAGSKLAKAQELNITVLTEEEFLAQITR

SEQ ID NO: 58404 - protein, 328 aa, Haemophilus influenzae
MDLNTILIIVGIVALVALIVHGLWSNRREKSKYFDKANKFDRTSLTSRSHTQEEMVQPNNISPNTYVENGHTPIPQPTTEKLPSEAELIDYRQSDKSVDDIKISIPNTQPIYDMGNHRSEPIQPTQPQYDMPTANNVASMTLEQLEAQSQNVGFNGINSSSPELRVQLAELSHEEHQVDYNLSFNEPKAETTAHPKQTTGYIQLYLIPKSSEEFNGAKLVQALENLGFILGKDEMYHRHLDLSVASPVLFSVANLEQPGTFNAYNLAEFNTIGIVLFMQLPSPGNNLANLRMMMRAAHTLAEDLQGVILTEEQEIFDANAEQAYLARV

SEQ ID NO: 58405 - protein, 316 aa, Haemophilus influenzae
MAIYADNSYSIGNTPLVRLKHFGHNGNVVVKIEGRNPSYSVKCRIGANMVWQAEKDGTLTKGKEIVDATSGNTGIALAYVAAARGYKITLTMPETMSLERKRLLCGLGVNLVLTEGAKGMKGAIAKAEEIVASDPSRYVMLKQFENPANPQIHRETTGPEIWKDTDGKVDVVVAGVGTGGSITGISRAIKLDFGKQITSVAVEPVESPVISQTLAGEEVKPGPHKIQGIGAGFIPKNLDLSIIDRVETVDSDTALATARRLMAEEGILAGISSGAAVAAADRLAKLPEFADKLIVVILPSASERYLSTALFEGIEG

SEQ ID NO: 58406 - protein, 407 aa, Haemophilus influenzae
MTNKVNSYGWKALIGSAVGYGMDGFDLLILGFMLSAISADLNLTPAQGGSLVTWTLIGAVFGGILFGALSDKYGRVRVLTWTILLFAVFTGLCAIAQGYWDLLIYRTIAGIGLGGEFGIGMALAAEAWPARHRAKAASYVALGWQVGVLGAALLTPLLLPHIGWRGMFLVGIFPAFVAWFLRSHLHEPEIFTQKQTALSTQSSFTDKLRSFQLLIKDKATSKISLGIVVLTSVQNFGYYGIMIWLPNFLSKQLGFSLTKSGLWTAVTVCGMMAGIWIFGQLADRIGRKPSFLLFQLGAVISIVVYSQLTDPDIMLLAGAFLGMFVNGMLGGYGALMAEAYPTEARATAQNVLFNIGRAVGGFGPVVVGSVVLAYSFQTAIALLAIIYVIDMLATIFLIPELKGKALD

SEQ ID NO: 58407 - protein, 332 aa, Haemophilus influenzae
MKIKSALLTLVGALTVFSSSAHSKDLKIGLSIDDLRLERWQKDRDIFVNKAESMGAKVFVQSANGDDSAQISQIENMINKNIDVLVIIPHNGEVLSNVISEAKKEGIKVLAYDRLINNADLDFYVSFDNEKVGELQAKSIVAVKPEGNYFLMGGSPVDNNAKLFRKGQMKVLDPLIASGKIKVVGDQWVDSWLAEKALQIMENALTANKNNVDAVVASNDATAGGAIQALSAQGLSGKVAISGQDADLAAIKRIVNGSQTMTVYKPITKLADKAAEIAVELGKNEKIEANAELNNGLKNVPAYLLDPIAVDKRNINETVIKDGFHTKESIYH

SEQ ID NO: 58408 - protein, 439 aa, Haemophilus influenzae
MTTYFDKIEKISFEGEKSTNPFAFKHYDANQVILGKTMAEHLRLAVCYWHTFCWNGNDMFGLGSLERSWQKNSNLLAGAEQKADIAFEFLNKLGVPYYCFHDVDIAPEGNSVREYVQNFHHIVDILERKQVETGVKLLWGTANCFTNPRYMSGAATNPNPEVFAWAATQVFNAMNATQRLGGENYVLWGGREGYETLLNTDLKREREQIGRFMQMVVEHKHKIGFKGTLLIEPKPQEPTKHQYDYDVATVYGFLKQFGLEKEIKVNIEANHATLAGHTFQHEIATACALDIFGSIDANRGDPQLGWDTDQFPNSVEENTLVMYEILKHGGFTTGGFNFDAKIRRQSIDPYDLFYAHIGAIDVLALSLKRAAKMLQEETLQKIVNERYAGWNSELGQHILQGKTSLETLAQLVQQKDLAPKPVSGQQEYLENLVNQVIYS

SEQ ID NO: 58409 - protein, 511 aa, Haemophilus influenzae
MKQKCGCIPPHFFILGDIMYIGIDCGTQGTKAIVLDSVQKKVIGVGYAKHELITQSNGRREQQPNWWIEALQQALQIALKQAKNSPHFSPNLVKGIGISGQQHGLVMLDKNDRPLYKAKLWCDTETATENDILIEKLGGQTAVFEKLGIICQTGYTASKLSWFRQNYPDKFANIRKIMLPHDYLNYWLTGKFCTEFGDASGSGYFDVVKREWKREVFKYLAPELNMDEVLPKLLSAEQKIGVIKPEIATLFGFNENVIVSTGGGDNMMGAIGTGNIREGIATMSLGTSGTLYAYTQKPLLNLPPMIANFCSSNNGWLPLVCVMNITSSNKQLMNLLNIDIEELNQLAQQAPIGANGITILPFFNGERVPPLPNTKASILGLDSSNFTRENLCRAMMESATFTLRYGLDLFRQAGLKTSQIRLIGGGAKSSFWRQMIADVMNSEVVCLQEEEAAALGGAIQAMWANGEGELEFLCETFIHLDENSKAYPNLSQVKNYQNAYERYLTHLSQLY

SEQ ID NO: 58410 - protein, 223 aa, Haemophilus influenzae [sequence omitted]

SEQ ID NO: 58411 - protein, 323 aa, Haemophilus influenzae
MNPLLDVKNLYVRFKTPDGVVTAVNDLNFTLNAGSTLGIVGESGSGKSQTAFALMGLLAANGEVEGSAIFEGKELVNLPNAELNKIRAEQISMIFQDPMTSLNPYMKIGEQLMEVLQLHKGYDKQTAFAESVKMLDAVKMPEAKKRMGMYPHEFSGGMRQRVMIAMALLCRPKLLIADEPTTALDVTVQAQIMTLLNELKREFNTAIIMITHDLGVVAGICDQVMVMYAGRTMEYGTAEQIFYHPTHPYSIGLMDAIPRLDGNEEHLVTIPGNPPNLLHLPKGCPFSPRCQFATEQCQIAPKLTTFNHGQLRNCWLSAEKFNL

SEQ ID NO: 58412 - protein, 317 aa, Haemophilus influenzae
MTTQLDSLRNMTVVVADTGDIDAIKKYQPQDATTNPSLILSASALPQYAPLIDEAVAYAKAQSADKAQQLIDAEDKLAVNIGLEILKIVPGRISTEVDARLSYDTQATVEKARKLIALYNAAGISNDRILIKIASTWQGIRAAEILEKEGINCNLTLLFSEAQARACAEAGVYLISPFVGRILDWYKANSDKKEYAPAEDPGVISVTKIYNYYKEYGYNTVVMGASFRNVGEITELAGCDRLTIAPALLKELQENSTALVRKLEYKGEVKAKPQPLTEAEFYWQHNSDAMAVEKLAEGIRKFAIDQEKLETMLSAKL

SEQ ID NO: 58413 - protein, 371 aa, Haemophilus influenzae
MRSLPMLWFFFCVTVLIIGYFIYGKIIEKIFVINPKRQTPAYQVNDGVDYMPMSKTKIWLIQLLNIAGTGPIFGPILGALYGPVAMLWIVIGCIFAGAVHDYFCGMLSIRHGGATMPYLAGKFLGRPVKVFINTLALVLLLLVGVVFVASPAQLMGTITMDVFGVSQGALVLGDAEAVHHSVEAGGIKVWGMDKATVVAVWTAIIFAYYILATLLPVDKIIGRIYPLFGALLLFMSVGMVYGLVVSHFSATDPIEFFRTINADGEGLTWAKFTQNFQVKGDVPIWPLLFLTISCGALSGFHATQTPLMARCTENESEGRFIFYGAMITEGVIALVWCMVGLAFYENPQALQDAISAGCSMLKLCMIVRYIS

SEQ ID NO: 58414 - protein, 151 aa, Haemophilus influenzae
MFRGATAVNLDSKGRVAIPTRYRAEILEKNQGQMVCTVDIRQSCLLLYPLDEWEKIEQKLLALSNFDPTQRRLQRVMLGHATECEMDAQGRILLSGPLRQHAKLEKGLMLVGQLNKFEIWSDVEWHTQIAEDIEIGSSTDFAADALNDFSL

SEQ ID NO: 58415 - protein, 321 aa, Haemophilus influenzae
MNSENSFSSSEHITVLLHEAVNGLALKENGIYIDGTFGRGGHSRFILSQLSSNGRLIAVDRDPRAIAEAHKIQDLRFQIEHNSFSHIPEICDKLNLVGKIDGILLDLGVSSPQLDEAERGFSFMKDGPLDMRMDTTQGLSAEEWLKQVSIEDLTWVLKTFGEERFAKRIATAIVDFNKSAVKNGTEFLSRTSQLAELISQAVPFKDKHKHPATRSFQAIRIFINSELDELESLLNSALDMLAPEGRLSIISFHSLEDRMVKHFMKKQSKGEDIPKGLPLREDQIQRNQKLRIIGKAIQPSDAEIQANPRSRSAILRVAERI

SEQ ID NO: 58416 - protein, 610 aa, Haemophilus influenzae
MVKFNSSRKSGKSKKTIRKLTAPETVKQNKPQKVFEKCFMRGRYMLSTVLILLGLCALVARAAYVQSINADTLSNEADKRSLRKDEVLSVRGSILDRNGQLLSVSVPMSAIVADPKTMLKENSLADKERIAALAEELGMTENDLVKKIEKNSKSGYLYLARQVELSKANYIRRLKIKGIILETEHRRFYPRVEEAAHVVGYTDIDGNGIEGIEKSFNSLLVGKDGSRTVRKDKRGNIVAHISDEKKYDAQDVTLSIDEKLQSMVYREIKKAVSENNAESGTAVLVDVRTGEVLAMATAPSYNPNNRVGVKSELMRNRAITDTFEPGSTVKPFVVLTALQRGVVKRDEIIDTTSFKLSGKEIVDVAPRAQQTLDEILMNSSNRGVSRLALRMPPSALMETYQNAGLSKPTDLGLIGEQVGILNANRKRWADIERATVAYGYGITATPLQIARAYATLGSFGVYRPLSITKVDPPVIGKRVFSEKITKDIVGILEKVAIKNKRAMVEGYRVGVKTGTARKIENGHYVNKYVAFTAGIAPISDPRYALVVLINDPKAGEYYGGAVSAPVFSNIMGYALRANAIPQDAEAAENTTTKSAKRIVYIGEHKNQKVN

SEQ ID NO: 58417 - protein, 488 aa, Haemophilus influenzae
MKKLTALFNLPELKNDIELHNMVLDSRKVKAGDLFVAIKGHQVDGNQFIDSALHSGASAVVSETELSSEHLTVAFIGNVPVVKYYQLAHHLSSLADVFYDSPSNNLTLVGVTGTNGKTTISQLLAQWAELLGHRAAVMGTIGNGLFGQIVEAKNTTGSAVEIQSSLSAFKHAGADFTSIEVSSHGLAQHRVEALHFKAAIFTNLTRDHLDYHQSMENYAAAKKRLFTELDTQIKVINADDEIGYQWLTELPDAIAVSMNADFKVGSHQWMKAINIHYHFKGADITFESSWGNGVLHSPLIGAFNVSNLLLVMTTLLSFGYPLENLLATAKSLKGVCGRMEMIQYPNKPTVIVDYAHTPDALEKALIAAREHCQGELWCIFGCGGDRDRGKRPLMAQVAEQFAEKIIVTKDNPRTESQSQIETDIVAGFKNMEKVGIIPDRAQAIQFAIESAVENDVILIAGKGHEHYQIIGSEVVHFSDQEIALDFLK

SEQ ID NO: 58418 - protein, 457 aa, Haemophilus influenzae
MIKLSTVQLAQILQAKLIGDENVQVEKINTDTRKSVSNSLFFALKGEKFDAHQYLDQAVSQGALALVVQQENSSISVPQLVVKDTRIALGELAKWLREKINPRTVAMTGSSGKTTVKEMTASILQHTAADSEAVLFTNGNFNNDIGVPLTLLRLTEKHRFAVIELGANHQNEINYTTKLVQPNAALINNIAPAHLEGFGSLAGVVQAKGEIYRGLTKNGVAIINAEHNHLDIWQKEISNHAIQYFNGKDYSAKNIHHTSQGSTFTLISPQGEIEITLPYLGEHNVKNALAATALAMNVGATLTDVKAGLEQRSQVKGRLFPIQVTPNLLLLDDTYNANKDSLCAAIDVLKGYDAFRILCVGDMKELGENSLAIHREVGQYINLVNLDLVCSYGNESAVISEAVSGKHFTDKTEMVDFLVPLIENQLQQNKKVVVLGKGSRSMKMEDVIYSLKDKIKC

SEQ ID NO: 58419 - protein, 360 aa, Haemophilus influenzae
MLVWLAEYLVRYETAFNAISYITVRANLALLTALFISLWIGPKVIKRLQILKFGQEVRNDGPESHFAKKGTPTMGGVMILFSIGVSTLLWANLANPYIWVCLFVLFGYGAIGFVDDFRKITRKNTDGLIARWKYFWMSVVALVAILWLYWLGHDTDATRLVIPFFKDIMPQLGLFYIVLSYFVIVGTGNAVNLTDGLDGLAIMPTALVAGAFALIAWATGNVNFAEYLHIPYIKYSSEVVVFCTAIVGASLGFLWFNTYPAQVFMGDVGSLALGGALGVVAILVRQEFLLVIMGGVFVVEALSVILQVGSYKLRKQRIFRMAPIHHHFELKGWPEPRVIIRFWIISLMLVLMGLVTLKLR

SEQ ID NO: 58420 - protein, 437 aa, Haemophilus influenzae
MNAYQNKNITIIGLGKTGLSCVDYLLSQQANIRVIDTRKNPTGIDKLPQNIPLHTGSLNQEWLLESDMIVISPGLAVKTPEIQTALKAGVEVIGDIELFCRAATKPIVGITGSNGKSTVTTLVYEMAKAAGVKVGMGGNIGIPALSLLNEDCELYVLELSSFQLETTYSLKAAAATVLNVTEDHMDRYMDLEDYRQAKLRIYHNAKVGVLNNEDRLTFGENENQAKHTVSFAENSADYWLKTENGKQYLMVKDEVILPCEEATLVGRHNYMNILAATALAQAIGINLDSIRTALRHFKGLDHRFQLVHQANGIRWINDSKATNVGSTVAALAGLYIEGKLHLLLGGDGKGADFSELAELINQPHIICYCFGRDGALLAKFSSQSYLFDTMEQAIEFLRPTLQSGDMVLLSPACASLDQFASFEKRGEEFTHLAQCLT

SEQ ID NO: 58421 - protein, 394 aa, Haemophilus influenzae
MEFLQNIKKNYDEWTRITPQGLLYDRALFWLFVILLLIGLVAVTSASIPYSSRLFNDPFYFAKRDAIYVLLSLLTCYISLQISSSQWEKWHAKIFLFSVILLLLVPFIGTSVNGAKRWISLGILNFQPAEFAKLALTCFLASYFTRRYDEVRSRHVSIFKPFIVMLVLGCFLLLQPDLGSTVVLFIIMSGMLFIVGAKILQFVGLIALGGILFVWLVLTASYRLKRFIGFLEPFKEPYGTGFQLTNSLIAFGRGEITGEGLGNSIQKLDYLPEAHTDFIMAIIGEEFGFIGILIVILLLGLLIFRAMKIGRESLMLEQRFRGFFALGIGFWIFFQGFVNLGMALGMLPTKGLTFPLVSYGGSSIIIMSATIGILLRIDHENRLFRIGQARLRDD

SEQ ID NO: 58422 - protein, 351 aa, Haemophilus influenzae
MKNKKLLVMAGGTGGHVFPAIAVAQTLQKQEWDICWLGTKDRMEAQLVPKYGIPIRFIQISGLRGKGIKALLNAPFAIFRAVLQAKKIIQEEKPDAVLGMGGYVSGPAGVAAKLCGVPIILHEQNAIAGLTNKLLGKIATCVLQAFPTAFPHAEVVGNPVREDLFEMPNPDIRFSDREEKLRVLVVGGSQGARVLNHTLPKVVAQLADKLEFRHQVGKGAVEEVSQLYGENLEQVKITEFIDNMAEAYAWADVVICRSGALTVCEIAAVGAAAIFVPFQHKDRQQYLNAKYLSDVGAAKIIEQADLTPEILVNYLKNLTRENLLQMALKAKTMSMPNAAQRVAEVIKQYSN

SEQ ID NO: 58423 - protein, 475 aa, Haemophilus influenzae
MKHSHEEIRKIIPEMRRVQQIHFIGIGGAGMSGIAEILLNEGYQISGSDIADGVVTQRLAQAGAKIYIGHAEEHIEGASVVVVSSAIKDDNPELVTSKQKRIPVIQRAQMLAEIMRFRHGIAVAGTHGKTTTTAMISMIYTQAKLDPTFVNGGLVKSAGKNAHLGASRYLIAEADESDASFLHLQPMVSVVTNMEPDHMDTYEGDFEKMKATYVKFLHNLPFYGLAVMCADDPVLMELVPKVGRQVITYGFSEQADYRIEDYEQTGFQGHYTVICPNNERINVLLNVPGKHNALNATAALAVAKEEGIANEAILEALADFQGAGRRFDQLGEFIRPNGKVRLVDDYGHHPTEVGVTIKAAREGWGDKRIVMIFQPHRYSRTRDLFDDFVQVLSQVDALIMLDVYAAGEAPIVGADSKSLCRSIRNLGKVDPILVSDTSQLGDVLDQIIQDGDLILAQGAGSVSKISRGLAESWKN

SEQ ID NO: 58424 - protein, 306 aa, Haemophilus influenzae
MNLKQEKIAVLLGGTSAEREVSLNSGKAVLEALLKQGYNAHPIDPKEYNVANLKKDGFNRAFNILHGRGGEDGTMQGLLEQIGLPYTGCGVMASALTMDKMRTKMLWKAFGLPVADMKVVTRETFSELDPQAVVAKLGLPLMVKPSLEGSSVGLTKVKAVEELKSAVEYALKFDNTILIEEWLAGDELTVPVLDNQVLPAIRIVPEGEFYDYEAKYISDNTQYFCPAGLTPEREQALSTLVKRAYDAVGCRGWSRIDVMCDAKGNFRLVEVNTNPGMTSHSLFPKSAATVGISFEQLVVKILELSL

SEQ ID NO: 58425 - protein, 254 aa, Haemophilus influenzae
MNILKRKTPQNIRFGEQKPKYYFHIRAFAVLLGVFFLLGVYFNWQSILEKMDDKPISAFALVGQNTFTTADDIKESLLKMGELKGFWGQDVAPIQEQIEALPWVKGAIVRKMWPNRLSIWVSEYQPVAFWNQNQFVTLDGIVFQLPSVRLTAKNLPYLGGPDYQSLKVIETWNQIYINLKSNNIMAKGINIDDRGAWQVQLDNDIVLKLGRGDWKSKLERFVTIYPQIDVPENKKIDYIDLRYTAGAAVGMVDR

SEQ ID NO: 58426 - protein, 425 aa, Haemophilus influenzae
MVKGVETKTIVGLEVGTSKVVVVVGEVFPDGVVNVLGVGSCPSKGIDRGSITDLDAVVGSIQRAIEAAESMADCQIMSVTLAITGEHIQSLNESGFVPIAESEVTQEEIDSALHTASSIKLPEGLSLLHVIPQEYAVDRQMNIKNPLGLQGVRLKAQVHLIACHQDWQNNLKKAVERCGLQVDKVVFSGFAATHSVLTEDEKDLGVCLIDFGAGTMNVMVYTNGALRFSKVIPYAGNIVTNDIAHACTISRAEAERIKVNYASAFYPARLHGDKKIEVASIGGRAPRSLTKSDLSLITSARYTELLGVVKDELDKLKAELEAKHIKFELIAGVVITGGGAQIEDLKECASNVFHCQVRIASPLNITGLTDYVNRPQYSTVVGLLQYNYSNSDDDLISGSDDSEGTFFESIWQGVKKIVNKVRSEF

SEQ ID NO: 58427 - protein, 421 aa, Haemophilus influenzae
MLYPEYPEYDNFNESGALIKVVGVGGGGGNAVNHMVMNMVKQEMGGTFVGESSLTSEEHGRIVFYAVNTDAQALRKSQVQQTVQIGGETTKGLGAGANPNIGRKAAEDDQDEIRKMLEGADMVFIAAGMGGGTGTGAAPVVAKIAKELGILTVAVVTKPFTFEGKKRMQFAELGIKDLSQYVDSMIIIPNQQIQKVLPKNAKLIDAFAAANDVLRNSVMGISDMITSPGLINVDFADVRTVMSVQGQAMIGFGSAVGEPGAGRAEEAARLAVRNDLLEKIDLSNAQGILVNITAGMDLVFEEFNIIGETIGSFASEEATVVVGTSLVPEMSDEIRVTIVATGLGEIAGNEPIQVVRQGLSTQNIEGEGRVNIVPELHRRESVEVSRTASEEYQRPLDKPITDRLEAFKKNNFFNPAQREEN

SEQ ID NO: 58428 - protein, 305 aa, Haemophilus influenzae
MIKQRTLKQSIKVTGVGLHSGEKVTLTLRPAMPNTGVVYYRTDLNPAVAFPADPNSVRDTMLCTALINEQGVRISTVEHLNAALAGLGIDNIIIEVDAPEIPIMDGSASPFIYLLLDAGIEEQNAAKKFIRIKQYVRVEDGDKWAEFKPYNGFRLDFTIDFDHPAIGKDVRNYEMNFSAQAFVHQISRARTFGFMKDIEYLQSQGLVLGGSLDNAIVLDDYRILNEDGLRFKDELVRHKMLDAIGDLYMAGYNIIGDFKAYKSGHGLNNKLLRAVLANQEAWEFVTFEDKAQVPQGYVAPVQVLI

SEQ ID NO: 58429 - protein, 289 aa, Haemophilus influenzae
MGKLMEIIIISGRSGAGKSVALRALEDAGYYCVDNIPLDLLPQLTDILSQSQSSVAISLDIRNIPNSAHSLKQTLSTLQKHHQIKIIFLEADRATLIRRYSDSRRLHPLSLKDLSLEAAIDEEYRYLEPLIQHANLILDTTHLSTHSLAERLREFLRGNSEKELKIIVESFGFKYGIPLDADYVFDVRFLPNPHWDPTLRPMTGLEAPVAEFLNSHTEVNEFIYLTRHYIDTWLPMLEKNNRSYLTIAIGCTGGKHRSVYIAQQLGEYFQAKGKTVKIQHKSLERNKKI

SEQ ID NO: 58430 - protein, 178 aa, Haemophilus influenzae
MAKRKKKEVFDWEDEDQEEIIWVSKSEIKRDAEDLKQLGEKIVNLTKANLAKIPLDESLLDAIELAQRLQKEARRRQLQYIGKLFRGIDVEPIREALDKIENKHNQQQAMLHKIEKVRDELVEKGDVALTDLLNDYPNGDRQQLRNLIRSAQKELEQNKPSKAYREIYQMLKVLMLED

SEQ ID NO: 58431 - protein, 155 aa, Haemophilus influenzae
MNYLQYYPTDVINGEGTRCTLFVSGCTHACKGCYNQKSWSFSAGVLFDDVMEQQIINDLKDTRIKRQGLTLSGGDPLHPLNVETLLPFVQRVKRECPDKDIWVWTGYKLDELDKQQRAMLPYIDVLIDGKFIQEQADPSLVWRGSANQIIHRFKL

SEQ ID NO: 58432 - protein, 188 aa, Haemophilus influenzae
MYPLFETLCIENGKIQNINLHQVRYERSLREYYGKSAVKIFNLFSLIQLPTPLQNQLIRCRIDYNAETTQIQYFEYQRKIYRTFQPVICDDIEYSLKYSDRSLINTLFAQRGACDEIMIIKNGKVTDCSIGNLIFRQGKKWYTPDTPLLLGTQREKLLQEGKIQERTIFQEDIVNFDEIKIINAMNGL

SEQ ID NO: 58433 - protein, 384 aa, Haemophilus influenzae
MSSYLFTSESVSEGHPDKIADQISDAVLDEILKQDPKARVACETYVKTGMALVGGEITTSAWVDIENLTRKVICDIGYEHSEMGFDGHSCAVLNAIGKQSADINQGVDRENPLDQGAGDQGIMFGYATNETDVLMPAAITYAHRLMEKQSEVRKSGKLAWLRPDAKSQVTLKYEDNKIVGVDAVVLSTQHSEEVSQKDLHEGVMEEIIKPVLPSEWLSKETKFFINPTGRFVIGGPMGDCGLTGRKIIVDTYGGAARHGGGAFSGKEPSKVDRSAAYAARYVAKNIVAAGLADRCEIQLSYAIGVAEPTSIMVETFGTGKVANELLVSLVREFFDLRPYGLIKMLDLIQPIYRETAAYGHFGREQFPWEKVDRAEDLRIAAGLK

SEQ ID NO: 58434 - protein, 221 aa, Haemophilus influenzae
MFSDFLSLMFTAALMTLGLAVCSLLLGLFLSLIFAVLEANRFVGKPMTVFVALLRGLPEIIVVLLVYFGSTELVEMLTGEYIEFGAFGCGVLALSLIFAAYASQTLRGAIQAIPKGQWESGAALGLSKSYTFIHIVMPQVWRHALPGLSTQWLVLLKDTALVSLIGVDDLMHQADLINTNTHQPFTWYGIAALIYLAVTLISQVGIRKLELRFTRFERGVK

SEQ ID NO: 58435 - protein, 239 aa, Haemophilus influenzae
MKKTLLTAILLGASVAASAQELTFAMQPSYPPFETTNAKGEIIGFDVDVTNAICQEIQATCKFKSETFDALIPNLKAKRFDAAISAIDITDARAKQVLFSDAYYDSSASYVALKGKATLESAKNIGVQNGTTFQQYTVAETKQYSPKSYASLQNAILDLKSGRIDIIFGDTAVLADMISKEPEIQFIGEKVTNKKYFGNGLGIAMHKSNKDLAAQLNKGLAAIKANGEYQKIYDKWITK

SEQ ID NO: 58436 - protein, 327 aa, Haemophilus influenzae
MTNEVKENTPLLNAIGLKKYYPVKKGLFAKPQQVKALDGVSFQLERGKTLAVVGESGCGKSTLGRLLTMIEEPTKGELYYKGHNFLENDSETKALRRKKIQIVFQNPYASLNPRKKIGSILEEPLIINTKLSAKERREKVLSMMEKVGLRAEFYDRYPHMFSGGQRQRIAIARGLMLDPDVVVADEPVSALDVSVRAQVLNLMMDLQDELGLSYVFISHDLSVVEHIADEVMVMYLGRCIEKGTTEQIFSNPQHPYTKALLSATPRLSPNLRRERIKLTGELPSPINPPKGCAFNPRCWKATEKCRENQPHLEQHTDGKLIACFHID

SEQ ID NO: 58437 - protein, 333 aa, Haemophilus influenzae
MFKFVFKRILMVIPTFIAITLITFALVHFIPGDPVEIMMGERGLTAEVHQQMMHQLGLDLPLYQQYFHYIGNVIQGDFGASFRTQQPVLTEFFTLFPATAELAFFALFWSLLGGIILGTIAAVKKDSWISHTVTAASLTGYSMPIFWWGLILILYVSPQLGLPQGGRLDNEFWIDTPTGFMLIDSWLSGVSGAFENAVKSLILPAIVLGTVPLAIITRMTRSAMLEVLGEDYIRTAKAKGLSYTRIVIVHALRNALIPVVTVVGLIVAQLLSGAVLTETIFSWPGIGKWIIDAIQARDYPVLQGSVLIIATIIIVVNLTVDLLYGVVNPRIRH

SEQ ID NO: 58438 - protein, 727 aa, Haemophilus influenzae
MMDISELLDGLNDKQRERVAAPLGNHLVLAGAGSGKTRVLTHRIAWLIAVENISEGSIMAVTFTNKAAAEMRHRIQSTLAKHAQHQLFGMWIGTFHSIAHRLLRAHHLDVGLPQDFQILDSEDQLRLIKRLLKLHNFDEKAFPPKQACWYINNKKDEGLRPNDIEDFNDRQEREWIKIYQIYQDTCDRAGLVDFAELLIRVYELFEKKPLILQRYQQRFQHILVDEFQDTNKIQYKWIKILAGKTGQVMIVGDDDQSIYGWRGAQIENIQKFLKDFKAETIRLEQNYRSTANILNSANELIANNSDRLGKNLWTEGEKGDPVGIYSAFNELDEAKFVASQIQDWVEHGGKLDDCAVLYRSNSQSRVIEEALIRCQIPYRIYGGMRFFERQEIKDALAYLRLINNRQDDAAFERVINTPTRGIGDRTLDILRNLTRERQITLWQAVQVATQENMLAGRASTALLRFQELINSLQLDTAEMPLFAQTDFVIKHSGLYEMYQQEKGEKGEVRIENLEELVTATREFIKPDNAEEMTELTAFLTHASLEAGEEQASPHQSCVEMMTLHSAKGLEFPRVFMVGVEEGLFPSFRSFEEPGRLEEERRLAYVGITRAKKKLTISYAESRRLYAKEERHLPSRFIAELPRECIQEIRLRGTVTRAMNLAKVGSLSNTSAVENEWKMGQKVKHEKFGFGTVINVEGSENNTRLQIAFQAQGIKWLIAHLAKLEKVR

SEQ ID NO: 58439 - protein, 141 aa, Haemophilus influenzae
MFKISKEFSFDMAHLLDGHDGKCQNLHGHTYKLQVEISGDLYKSGAKKAMVIDFSDLKSIVKKVILDPMDHAFIYDQTNERESQIATLLQKLNSKTFGVPFRTTAEEIARFIFNRLKHDEQLSISSIRLWETPTSFCEYQE

SEQ ID NO: 58440 - protein, 343 aa, Haemophilus influenzae
MKDLDWNNLGFSYIKTDYRFIAHWKDGKWDEGKLTTDSTLHIHEGSTALHYGQQCFEGLKAYRCKDGSINLFRPQANAERMQRTADRLLMPRVPTELFVRACKEVVKANQDWLGPYGSGATLYLRPFLIGVGENIGVKTAPEFIFSVFCCPVGAYFKGGLAPSNFITTDYDRAAPMGTGGVKVGGNYAASLLPHELAAEQGTPERKFADAIYLDPKTHTKIEEVGAANFFGITKDNKFITPKSESILPSITKYSLLHIAKERLGMEAIEGDVYIDQLDQFVEAGACGTAAVITPVGGIQHNGKFHVFDSETEVGPVTRRLYDELTGIQFGDIEAPEGWIVKVE

SEQ ID NO: 58441 - protein, 293 aa, Haemophilus influenzae
MAILIDKNTKVICQGFTGGQGTFHSEQALAYGTQLVGGVSPNKGGTTHLGLPVFNTVREAVENTGVTATVIYVPASFCKDAIIEAIDAGIQLIVCITEGIPTLDMLKVKQKLNETGVVMIGPNCPGVITPDECKIGIMPAHIHKKGKVGIVSRSGTLTYEAVKQTTDEGFGQSTCVGIGGDPIPGSSFIDILERFQQDPETEAIVMIGEIGGSAEEEAAIFIKDNVTKPVVAYIAGITAPKGKRMGHAGAIISGGKGTAVEKIAALEAAGVTCVKSLAEIGEALRKLLKSSKN

SEQ ID NO: 58442 - protein, 357 aa, Haemophilus influenzae
MKPSQKQTQRQPHFSKDSAKKRDFSAKNDRRSVSRTARIETANTKKSAVNSDNKFLSKPKAKPVVRASNQPKAEGEKLQKVLARAGQGSRREIETMIAAGRVSVEGKIATLGDRIDVHSGVKVRIDGQIINLSHTQKEICRVLMYYKPEGELCTRSDPEGRATVFDRLPRLTGSRWIAVGRLDINTSGLLLFTTDGELANRLMHPSREVEREYSVRVFGQVDDAMLARLRKGVQLEDGLANFKEIKFTGGVGINQWYDVTLMEGRNREVRRLWESQGIQVSRLIRIRYGNIKLMKGLPRGGWEEMDLENVNYLRELVGLPAETETKLDVKQASRRPKSGQIRKAVKRYSEMNKRYKK

SEQ ID NO: 58443 - protein, 711 aa, Haemophilus influenzae
MSRTIILIPVSTGVGLTSISLGLIHSLEQKGTKVAFMKPVSQPSTGEDKLDRTTSIIRTSTSLETAEPFMLSVAESLIGQNQSDVLLEKIVANHQQLTKNNDIVVVEGLIPTRKHGYANSINYEIAQALDAEIVLVAAPATETPTELKDRVEAAASLFGGKNNPNLLGVVVNKFNAPVDESGRTRPDLAEIFDSFQHNHISETEVNKLFAGSAIKLLACVPWNANLIATRAIDLVKHLGASIINEGEINRRIRGITFCARSLPNMVEHFRAGSLLVASADRPDVLVAAALAASNGIEIGGILLTGGYKIDAQINKLCRPTFEKAKLPIFRIEGNTWQTALSLQSFNLEVPVDDKERIENIKQYISQHFNADFINNLVADSSRLPRLSPPAFRFQLTELARAAKKRIVLPEGDEPRTIKAAVLCAERGIAECVLLADPASVQRVAEAQGVKLGKGITIINPADVRENYVDRLVELRKAKGMTETAAREQLEDTVVLGTMMLEANEVDGLVSGAVHTTANTIRPPMQIIKTAPGSSIVSSIFFMLLPDQVLVYGDCAVNPDPTAEQLAEIAIQSADSAKAFGIDPKVAMISYSTGTSGSGADVEKVKEATRIAKEKRPDLLIDGPLQYDAAVMEDVARSKAPNSPVAGKATVFVFPDLNTGNTTYKAVQRSADLVSIGPMLQGMRKPVNDLSRGALVDDIVYTIALTAIQATQ

SEQ ID NO: 58444 - protein, 147 aa, Haemophilus influenzae
MAFFSIFKQGQIYLNTWPLEAKLGIIFPENRIMKATSFAQKFMPFVAVFAILWQQFYAKNDLMAFSIAILTALFALLIPFQGLYWLGKRANTPLENQSAVWFYDICERLKQLHEPLPFVQEKPTYQHLAEVLKKAQSKLERAFWQEI

SEQ ID NO: 58445 - protein, 296 aa, Haemophilus influenzae
MNILLTGGTGLIGKALVERLCLRNEQVTILTRSSSPHTLSKHKNIKFITALSQLNSQEQFDAIINLAGEPIFHKVWSKNQKSILRESRLSLTTQLVEFINQYQQHPIFISGSATGIYGDQDEQKITETSKTAKTFTAQLCQDWENIAQQANGRVCLIRTGMVFSTKGGALAKILPFYKWGLGGKLGKGEQYFPWIALEDMVNGILFLLDHSECRGAFNFAAPKSIKQHKFNRTLAQLLKRPAFATIPKWLLHFILGERANLLLESQNVVPEKLLNAGFQFQYADCENYLEDILKNK

SEQ ID NO: 58446 - protein, 502 aa, Haemophilus influenzae
MSEQEVKELDLNGEMLVRREKLAALRAKGNAFPNKFRRDALAQDLHNQYDAEDGEILKEKGIEVQVAGRIMTRRAMGKATFITIQDMSGKIQLYVARDNLPEGVYKDDVGTWDLGDIVGIKGTLFKTKTDELTVKTTEVQLLTKALRPLPDKFHGLTDQEVRYRQRYLDLISNEESRRTFIIRSKVVAGIREYFISKGFMEVETPMLQVIPGGASARPFVTHHNALDVDMYLRIAPELYLKRLVVGGFERVFELNRNFRNEGVSVRHNPEFTMLEYYQAYADYHDLMDNTEELLRKLAIDILGTTIVKYGDLEFDFGKPFERITLHDATIKYGADKGIVKEDLYDFDRAKATAERLGIEVQKSWGLGSIVNAIFEEVAEHHLIQPTFLNGSPAEISPLARRNDENPEVTDRFELFIGGREIGNGFSELNDAEDQNERFDAQVAAKEAGDDEAMFKDEDFVVALEHGLPPTAGEGLGIDRLAMLYANAPSIRDVILFPAMRQK

SEQ ID NO: 58447 - protein, 229 aa, Haemophilus influenzae
MKKIFTALLCVAAANAMADDAAIKRKLQSFNISNIVIKSSPISGIKTAVTDQGILYVSEDGKYLFEGKLYELTNNGPVDVAGKILVDKLNSYKDEMIVYPAKNEKHVVTVFMDITCHYCHLLHQQLKEYNDLGITVRYLAFPRAGMNNQTAKQMEAIWTAKDPVFALNEAEKGNLPKEVKTPNIVKKHYELGIQFGVRGTPSIVTSTGELIGGYLKPADLLRALEETAQ

SEQ ID NO: 58448 - protein, 575 aa, Haemophilus influenzae
MKKLIKRREIPIGNSVSNHPLLDRLYRARHIQNTKELDRTLKSMLNPNQLYGIEQAVNLLVEAYQPQQKIVIVGDFDADGATSTALSVLALRQLGFSDVDYLVPNRFEQGYGLSIPVAEMAIEKGVQLLMTVDNGVSSFDGVAFLKEKGIRVLVTDHHLPPETLPPADAIVNPNLSQCGFPSKSLAGVGVAFYLMLAVRAKFRELGIFTAETQPNFTDLLDLVALGTIADVVPLDQNNRILAYQGLMRIRARHCRLGIIALAEVANRNVEQFTSSDLGFCIGPRLNAAGRLDNMSIGVELLLANEMSKARELALDLDQLNQTRKEIEAGMKLEAIKICQNLTALFKELPYGITLYQPDWHQGVLGIVSSRIKDQYHRPVIAFAQDSEGILKGSARSIEGLHMRDVLERIHSQHPNMILKFGGHAMAAGLSIREEHFADFQHIFNQTVADWLDEEHLQGVIWTDGELNSNEFNLETAELIKSVGTWGQGFPEPCFDGEFKILDQRAIGQNKNHLKMLLEPKQGGVLLDAIAFNINTRLYPDLSIKQARLAYKLEINEFRGNRSLQLLVDYIEPIDE

SEQ ID NO: 58449 - protein, 229 aa, Haemophilus influenzae
MKIGIVGAMAQEVEILKNLMADRTETRVASAVIFEGKINGKDVALLQSGIGKVAAAIGTTALLQLAKPDCVINTGSAGGVAKGLKVGDIVISDETRYHDADVTAFGYEKGQLPANPAAFLSDKKLADLAQEIAEKQGQSVKRGLICSGDSFINSEDKIAQIKADFPNVTGVEMEATAIAQVCYAFNVPFVVVRAISDGGDGKASMSFEEFLPLAAKQSSALVLGMIDRL

SEQ ID NO: 58450 - protein, 231 aa, Haemophilus influenzae
  MISC_FEATURE (218)..(218): X=any amino acid
MIITVDGPSGAGKGTLCYALAEKLGYALLDSGAIYRVTALAALQRKTDLTNETDLAELARHLDIQFIPQNGEVSILLAGMDVSRLIRTQEVADAASKVAVFQKVRSALLQLQQDFAKNDGLIADGRDMGTVVFPNAQVKLFLDASAEERAKRRYKQLQNKGINGNFAQILAEIKERDFRDRNREVAPLKPADDALLLDSTTLSIDEVIDQALAYIQRXGISFRFNCLFKEE

SEQ ID NO: 58451 - protein, 549 aa, Haemophilus influenzae
  MISC_FEATURE (113)..(113): X=any amino acid
MSESFAQLFEESLKVLETRQGSIVSGTVVAIQKGFVLVDAGLKSESAIPVAEFLNAQGELEIQVGDTVNVALDAVEDGFGETKLSREKAVRHESWIELEKAYEEKATVIGLIXGKVKGGFTVELNGVRAFLPGSLVDTRPAREADHLLGKELEFKVIKLDQKRNNVVVSRRAVIESENSQEREQVLENLVEGSEVKGVVKNLTEYGAFVDLGGVDGLLHITDMAWKRVKHPSEIVNVGDEVTVKVLKFDKDRTRVSLGLKQLGQDPWAAIAENHPVNSKLTGKVTNLTDYGCFVEILDGVEGLVHVSEMDWTNKNIHPSKVVSLGDTVEVMVLEIDEERRRISLGLKQCKANPWTQFADTHNKGDKVTGKIKSITDFGIFIGLEGGIDGLVHLSDISWSISGEEAVRQYKKGDEVSAVVLAVDAVKERISLGIKQLEEDPFNNFVAINKKGAVVSATVVEADAKGAKVELAGGVEGYIRSADLTSEVAVGDVVEAKYTGVDRKSRIVHLSVKAKDQAEEAAAVASVNNKQEDIVIPNAMAEAFKAAKGE

SEQ ID NO: 58452 - protein, 208 aa, Haemophilus influenzae
MKLVEVKHPLVKHKLGVMREAEIDTKKFRELATEIGSLLTYEATSDLETEKVTINGWNGPVEIDRIKGKKVTVVPILRAGLGMMDGVLEHVPSARISVVGIYRNEETLEPVPYFQKLASDLEERLSIVVDPMLATGGSMIATLDLLKAKGCKHIKVLVLVAAPEGIKALEAAHPDIELYCASIDSHLNEQGYIIPGLGDAGDKIFGTK

SEQ ID NO: 58453 - protein, 688 aa, Haemophilus influenzae
MSYQVLARKWRPKTFADVVGQEHIITALANGLKDNRLHHAYLFSGTRGVGKTSIARLFAKGLNCVHGVTATPCGECENCKAIEQGNFIDLIEIDAASRTKVEDTRELLDNVQYKPVVGRFKVYLIDEVHMLSRHSFNALLKTLEEPPEYVKFLLATTDPQKLPVTILSRCLQFHLKALDETQISQHLAHILTQENIPFEDPALVKLAKAAQGSIRDSLSLTDQAIAMGDRQVTNNVVSNMLGLLDDNYSVDILYALHQGNGELLMRTLQRVADAAGDWDKLLGECAEKLHQIALMQLLPQKSSDNNEHFSFLAKHISPENVQFFYQVIVSGRKDLSNAPNRRIGAEMTLLRALAFHPKFLTAVPKANTTITPPPSTPSAVENTGNYVDVPVLSQSIKSAYSQAKPNKTSIPNLASLSALDALEHLTQLENQERQEHKAESLAVVSETLHHIQELDEEKSHKKMTALPVREMTEPKPKHIEKPTLPSNAAQAPQKNSTEENSSDDNVEIAQDEQEILSADTYRWEWSNPELAKADTGVCPSDIKQAILKDITPELRLKIITQTQQQDQWADIVERSGLTGFSKELALNCFLQSKTDDEINLGLHSEKSHLRQDRSIKNLAEALSKLQGKDIRLTINLDDSNVTTPIEYRRNIYQALREKAQNELQKDSKLQILLNEFDAKLDVESIRPV

SEQ ID NO: 58454 - protein, 478 aa, Haemophilus influenzae
MSKEIKTQVVVLGAGPAGYSAAFRCADLGLETVIVERYSTLGGVCLNVGCIPSKALLHVAKVIEEAKHANKNGIYFSEPRIELDEVRAGKEAVVAKLTGGLAGMAKARKVTVVEGLATFTDSHTLVARDRDGNPTTVKFDNAIIAAGSRPVQLPFIPHEDPRIWDSTDALKLKEVPKKLLIMGGGIIGLEMGTVYNALGSEVEVVEMFDQVIPAADKDVVGIYTKQVEKKFKLMLETKVTAVEAKDDGIYVSMEGKACNDTKRYDAVLVAIGRVPNGKLIDAGKAGVEVDDRGFIHVDKQMRTNVPHIYAIGDIVGQPMLAHKGVHEGHVAAEVIAGQKHYFDPKVIPSIAYTEPEVAWVGKTEKECKQEGLNYEVAKFPWAASGRAIASECSEGMTKLIFDKDTHRVLGGAIVGSNGGELLGEIGLAIEMGCDAEDIALTIHAHPTLHESVGLAAEVFEGSITDLPNAKAKEKIISI

SEQ ID NO: 58455 - protein, 567 aa, Haemophilus influenzae
MSKQIQIPDIGSDEVTVTEVMVNVGDTISVDQSIINVEGDKASMEVPAPEAGVVKEILVKVGDKVSTGTPMLVLEAAGAAPAADEPTAPVADAPTAPVVATAPTASAIVEVNVPDIGGDEVNVTEIMVAVGDTITEEQSLITVEGDKASMEVPAPFGGVVKEILVKSGDKVSTGSLIMRFEVLGAAPAESASAPASTSAPQTAAPATTAQAPQAAAPDTTAQAPQAAAPDTTAQAAQSNNNVSGLSQEQVEASTGYAHATPVIRRLAREFGVNLDKVKGTGRKGRIVKEDIEAYVKTAVKAYESGATAQATGNGVANGAGLGLLPWPKVDFSKFGEIEEVELSRINKISGANLHRNWVIIPHVTHFDKADITDLEAFRKEQNALREKQKLGVKITPVVFIMKAVAKALEAYPRFNSSITEDAQRLILKKYINIGVAVDTPNGLVVPVFKNVNKKGIIELSRELMEVSKKAREGKLTASDMQGGCFTISSLGGIGTTHFAPIVNAPEVAILGVSKSSMEPVWNGKEFAPRLILPMSLSFDHRVIDGADGARFISYLGSVLADLRRLVM

SEQ ID NO: 58456 - protein, 635 aa, Haemophilus influenzae
MGKIIGIDLGTTNSCVAVMDGDKARVIENAEGARTTPSIIAYTDNETLVGQPAKRQAITNPKNTLFAIKRLIGRRFESEEVQRDIKIMPFEITRADNGDAWVNVKGDKLAPPQISAEVLKKMKKTAEDFLGESVTEAVITVPAYFNDAQRQATIDAGKIAGLDVKRIINEPTAAALAFGLGSSKENQVIAVYDLGGGTFDISIIEIDNFDGEQTFEVLATGGNTHLGGEDFDNRVIDYIIDEFKKEQNIDLRNDAMALQRVKEAAEKAKIELSSAQSTEVNLPYITADATGPKHLALNITRAKLEALVEDLVASSIESLKAVLKDADKGVSEIHDIILVGGQTRMPLVQQKVAEFFGKEARKDVNPDEAVAIGAAVQGGVLKGDVKDVLLLDVTPLSLGIETMGGVMTTLIEKNTTIPTKKSQVFSTAEDNQSAVTIHVLQGERKRAADNKSLGQFNLEGINPAPRGMPQIEVTFDIDANGVINVSAKDKNTGKEQQIRIQASSGLSDEEIQQMVRDAEANADADRKFEEVVQARNQADGIAHATRKQIAEAGDALSVADKEKIEAAVAELETAAKGEDKAEIEAKIEAVIKASEPLMQAVQAKAQQAGGEQPQQSSAKDDGVVDAEFEEVKDNK

SEQ ID NO: 58457 - protein, 417 aa, Haemophilus influenzae [sequence omitted]

SEQ ID NO: 58458 - protein, 398 aa, Haemophilus influenzae
MNQQKSTFIFILTLGILSMLPPFGVDMYLPSFLEIAKDLDVSPEQVQHTLTSFAYGMAFGQLFWGPFGDSFGRKPIILLGVIVGALTALVLTEINSVGNFTALRFVQGFFGAAPVVLSGALLRDLFSKDQLSKVMSTITLVFMLAPLVAPIIGGYIVKFFHWHAIFYVISLVGLLAAALVFFIIPETHKKENRIPLRLNIIARNFLLLWKQKEVLGYMFAASFSFGGLFAFVTAGSIVYIGIYGVPVDQFGYFFMMNIVTMIFASFLNSRFVTKVGAETMLRIALAIQFLSGMWLILTALLDLGFWPMAIGVAFFVGPNPVISSNAMASALERCPQMAGTANSLIGSVRFAVGAIMGSLVASMKMDTAAPMLFTMGACVVISVLAYYFLTSRNLKSRG

SEQ ID NO: 58459 - protein, 232 aa, Haemophilus influenzae
MRLDKFIAENVGLTRSQATKAIRQSAVKINGEIVKSGSVQISQEDEIYFEDELLTWIEEGQYFMLNKPQGCVCSNDDGDYPTIYQFFDYPLAGKLHSAGRLDVDTTGLVLLTDDGQWSHRITSPKHHCEKTYLVTLADPVEENYSAACAEGILLRGEKEPTKPAKLEILDDYNVNLTISEGRYHQVKRMFAALGNKVVGLHRWKIGDVVLDESLEEGEYRPLTQSEIEKLVK

SEQ ID NO: 58460 - protein, 647 aa, Haemophilus influenzae
MLVVFTMKKAHSPLFPIFTFVLINLIILSLSRLGLAVWQSERVSAVDGWLQLFLQGVRMDVVALCYLFGVPALLTTLFHSSKVWVKILRLWLTFGSVFIIFMEIATPAFIETYDYRPNRLFIEYLIYPKEVFSMLAEGHLSAVIFSLVFTILAAVIYWKISGWAVKNLRSMSWKLRPVIALLVIVVSFLGARSSFQHRGINPAMVAFSSDALVNSLVLNSGYSVIYAAQQFKDEEKSSEMYGKMDADEMFRIVKASRGRPESDYISDKYPTLTKNVATYQGKPKNIVILLQESLGAQFIGTLGGKPLSPNVDQLAKEGWLFENLYATGTRSVRGIEATTAGFTPTPARAVVKLNNAQSGFFTIADLLHKQGYNTSFIYGGEKHFDNMASFFYGNGFKDIWDQQDYQNPKFTGTWGVSDEDLFDKANETFTKLQNEGKPFFSLVFSSSNHDPFEYPDGKIELYEQPKATRNNAAKYADYALGHFFKMAKQSNYWKDTIFLIIADHDSRVGGASLVPIKHFHIPALILGDGITPRRDSRLVSQIDMPTTLLSLAGVSGNYPMIGFDLTQDVNPDRAFMQYDQTQAMMKGNNDVVIQMPNKAAQGYHYDKSTETLTPKDVPDAMKKEALAHALLGSYLYKNRLYSSGENK

SEQ ID NO: 58461 - protein, 556 aa, Haemophilus influenzae
MSSQFVYTMHRVGKVVPPKRHILKDISLSFFPGAKIGVLGLNGAGKSTLLRIMAGVDKEFEGEARPQPGIKIGYLPQEPKLEPQQTVREAVEEAVSEVKNALTRLDEVYALYADPDADFDKLAAEQANLEAIIQAHDGHNLDNQLERAADALRLPDWDAKIEHLSGGERRRVALCRLLLEKPDMLLLDEPTNHLDAESVAWLERFLHDYEGTVVAITHDRYFLDNVAGWILELDRGEGIPWEGNYSSWLEQKEKRLEQEQATENARQKSIAKELEWVRQNPKGRQAKSKARMARFDELNSGEYQKRNETNELFIPPGPRLGDKVIEVQNLTKSYGDRTLIDDLSFSIPKGAIVGIIGANGAGKSTLFRMLSGQEQPDSGSVTMGETVVLASVDQFRDSMDDKKTVWEEVSNGQDILTIGNFEIPSRAYVGRFNFKGVDQQKRVGELSGGERGRLHLAKLLQRGGNVLLLDEPTNDLDVETLRALENAILEFPGCAMVISHDRWFLDRIATHILDYGDEGKVTFYEGNFSDYEEWKKKTLGDAATQPHRIKYKRIAK

SEQ ID NO: 58462 - protein, 127 aa, Haemophilus influenzae
MNFDRTFLTFLGVIMLVHLHIFFAFLSLALLVIRGAMQLNGKNWRSIKLLKILPHLSDTLLIVSGVVILYLFAFGIEWWLVAKFALLILYIVFAAKFFSKKVSQPKSIFFWLACVSFIGAMLIAYLK

SEQ ID NO: 58463 - protein, 353 aa, Haemophilus influenzae
MPSRQLQILIRKTLPLVPDHVLIIGESGIAFSKATNLLGQEFEHILFDGRNGIHLEALAIAAGTLKMGGTLCLVLSDWENLSQQPDQDSLRWNGNQSAIATPNFIYHFKQCIERYHFPILREESAVEFPTVFYSNEHHKNATLAQQQIIENILQAEQDIYFLTAKRGRGKSALLGMLANQIQAPVYLTAPNKSAVHSVIEFSEGDIEFIAPDELALTLQTEPEFSQSAWLLVDEAAMIPLPLLQEYSRYFQHIVFSTTIHSYEGTGRGFELKFKRKIHRTFQHFELKQPLRWQENDPLEHFIDDLLLLNAEDDFQHFDYSNITYNIEENAKNLSFPCLRGKVPEGPKGGFRYS

SEQ ID NO: 58464 - protein, 1146 aa, Haemophilus influenzae
MKTAFFQPDIPTQPNDHKILGNVLPGADALAISEISEQNQNLTVVVTPDTRSAVRLSRVLSELSSQDVCLFPDWETLPYDTFSPHQEIISSRLSALFHLQNAKKGIFLLPISTLMQRLCPPQYLQHNVLLIKKGDRLVIDKMRLQLEAAGYRAVEQVLEHGEYAVRGALLDLFPMGSAVPFRLDFFDDEIDSIRTFDVDTQRTLDEISSINLLPAHEFPTDDKGIEFFRAQFRETFGEIRRDPEHIYQQISKGTLISGIEYWQPLFFAEMATLFDYLPEQTLFVDMENNQTQGERFYQDAKQRYEQRKVDPMRPLLSPEKLWLNVDEVNRRLKSYPRITFKAEKVRSSVRQKNLPVAALPEVTIQSQQKEPLGQLRQFIEHFKGNVLFSVETEGRRETLLDLLSPLKLKPKQIQSLEQIENEKFSLLVSSLEQGFIIEQSLPVAIIGEANLLGKRIQQRSRDKRKTINPDTLVRNLAELKIGQPVVHLDHGVGRYGGLVTLDTGGIKAEYLLLNYANESKLYVPVTSLHLISRYVGGSDESAPLHKLGNEAWAKSRQKAAEKIRDVAAELLDVYAQREAKKGFAFKYDREEFQQFSATFPFEETYDQEMAINAVISDMCQPKAMDRLVCGDVGFGKTEVAMRAAFLAVMNHKQVAVLVPTTLLAQQHYENFKDRFANLPVNVEVLSRFKTAKEQKQILENLAEGKVDILIGTHKLIQSDVKFNDLGLLIIDEEHRFGVGQKEKIKQLRANIDILTLTATPIPRTLNMAMNGIRDLSIISTPPARRLSIKTFVRQNDDLVVREAILREILRGGQVYYLHNDVASIENTAEKLTALVPEARVIVGHGQMRERELERVMSDFYHQRYNVLVCSTIIETGIDVPTANTIIIERADHFGLAQLHQLRGRVGRSHHQAYAYLLTPPPKMMTKDAERRLDALENLDNLGAGFILATHDLEIRGAGELLGNEQSGQIESIGFSLYMELLDAAVKALKEGREPSLEELTQQQADIELRVPALLPDDYLGDVNMRLSFYKRIAAAESKAELDELKVELIDRFGLLPDATKNLLQITELRLLVEPLNVVRIDAGTQGGFIEFSAKAQVNPDKFIQLIQKEPIVYRFDGPFKFKFMKDLSDNKVRLEFVVDLLRTIAA

SEQ ID NO: 58465 - protein, 466 aa, Haemophilus influenzae
MKKTRFVLNSIALGLSVLSTSFVAHVAQATLPSFVSEQNSLAPMLEKVQPAVVTLSVEGKAKVDSRSPFLDDIPEEFKFFFGDRFAEQFGGRGESKRNFRGLGSGVIINASKGYVLTNNHVIDGADKITVQLQDGREFKAKLVGKDEQSDIALVQLEKPSNLTEIKFADSDKLRVGDFTVAIGNPFGLGQTVTSGIVSALGRSTGSDSGTYENYIQTDAAVNRGNSGGALVNLNGELIGINTAIISPSGGNAGIAFAIPSNQASNLVQQILEFGQVRRGLLGIKGGELNADLAKAFNVSAQQGAFVSEVLPKSAAEKAGLKAGDIITAMNGQKISSFAEIRAKIATTGAGKEISLTYLRDGKSHDVKMKLQADDSSQLSSKTELPALDGATLKDYDAKGVKGIEITKIQPNSLAAQRGLKSGDIIIGINRQMIENIRELNKVLETEPSAVALNILRGDSNFYLLVQ

SEQ ID NO: 58466 - protein, 296 aa, Haemophilus influenzae
MSWINRIFSKSPSSSTRKANVPEGVWTKCTACEQVLYSEELKRNLYVCPKCGHHMRIDARERLLNLLDEDSSQEIAADLEPKDILKFKDLKKYKDRINAAQKETGEKDALITMTGTLYNMPIVVAASNFAFMGGSMGSVVGAKFVKAAEKAMEMNCPFVCFSASGGARMQEALFSLMQMAKTSAVLAQMREKGVPFISVLTDPTLGGVSASFAMLGDLNIAEPKALIGFAGPRVIEQTVREKLPEGFQRSEFLLEKGAIDMIVKRSEMRQTLASVLSKLTNQPSPFVEPELISEDE

SEQ ID NO: 58467 - protein, 880 aa, Haemophilus influenzae
MTDSIQSSITPVNIEEELKSSYLDYAMSVIVGRALPDVRDGLKPVHRRVLFSMDREGNTANKKYVKSARVVGDVIGKYHPHGDSAVYDTIVRMAQPFSLRYMLVDGQGNFGSIDGDAPAAMRYTEVRMQKITQALLTDLDKETVNFSPNYDGELMIPDVLPTRIPALLANGSSGIAVGMATNIPPHNLNEVLNGCLAYIDKNEITIDELMQHIPGPDFPTAALINGRKGIEEAYRTGRGKVYVRARATVETNEKGREQIIVSELPYQVNKAKLVEKIAELIREKKIEGISNITDLSNKEGIRIEIDIKRDAVGEVVLNHLYSLTQMQVTFGINMVALDHGQPRLFNLKEIIEAFVLHRREVVTRRSIFELRKARERTHILEGLAVARSNIDEMIAIIRNSKNREEAATSISSRSWTLHSDIINLLDASARPDELEENLGIQGEQYYLSPAQVNAILELRLHRLTGIAFEEVIKEYEELLVKIADLLHILSSAERLMEVIREELEEVKAQFGDDRLTEITAASGDIDLEDLIAQEDVVVTLSHEGYVKYQPLTDYEAQRRGGKGKSATKMKEEDFIEKLLVANTHDTILCFSSRGRLYWLKVYQLPQASRGARGRPIVNILPLQENERITAILPVSAYEEDKFVVMATAGGIVKKIALTEFSRPRSNGIIALNLRDEDELIGVDITDGSNEIMLFSSQGRVVRFAENAVRAMGRLATGVRGIKLALTNDISDDESAVEIEDISDDNAEASLDLNIDKVVSLVVPKGEGAILTATQNGYGKRTQLSEYPTKSRNTKGVISIKVSERNGKVVAATQVEETDQIMLITDAGTLVRTRVSEVSIVGRNTQGVRLIRTADDEHVVSLERVCDADEDDSLEESSSEE

SEQ ID NO: 58468 - protein, 682 aa, Haemophilus influenzae
MTTQPRKILVTCALPYANGAIHLGHMLEHIQADIWVRFQRMRGNKIHFVCADDAHGTPIMLNADKLGITPEELIAKAKADHIRDFAGFNISFDNYHSTHSEENKQLTAEIYNKLKANGFIKSKVISQLFDPEKNMFLPDRFVKGTCPKCKAEDQYGDNCEVCASTYSPMDLINPRSAVSGTTPIVKESEHFFFDLPAFEGMLKEWTRSGSLQSEIANKMQEWFESDLQQWDISRDAPYFGFEIPGAKDKFFYVWLDAPIGYMASFKNLCNREGIDFNEFWAEGSDAELYHFIGKDIVYFHSLFWPAMLEGSGYRKPTNVFAHGYVTVDGAKMSKSRGTFIQASTYLNHIDPECLRYYYAAKLNDRIEDLDFNLEDFVQRVNTDIVNKLVNLASRNAGFIAKRFEGKLADKLEDKSLFAEFTAQAEQIAAYYESREYNKTIREIMALTDKANKYIDEKAPWVIAKEEGKEAELQAVCSMGIELFRVLMSYLKPVLPKLAERAETFLQAELRWDNIHQPLLGHTLAPFKALFSRLEKKQIDAVVEETKALFAAANKAAEKTEAKPTALSAVEPIAETITIDDFAKLDMRVAKVLKCEAVPESNKLLRFELDLGDHTRQVFSGIKAAYNKPEELEGRFVIMVANLAPRKMKFGVSEGMILSAGTGGSDLFLLSADSGVTAGMQVK

SEQ ID NO: 58469 - protein, 91 aa, Haemophilus influenzae
MLTFWHWKWLGIKNTEFKCVKGKLYLSPIKDLFNNEIIAYDLVRSPNSEQITQMMKQAVARLAGAKPILHSDQGWQYQMIGYQNILRENGI

SEQ ID NO: 58470 - protein, 495 aa, Haemophilus influenzae
MSKEILLAAEAVSNEKLLPREKIFEALESAIAISTKKKFEYETDIRVSINPKTGEFDTFRRWLVVDEVKVPTKEITLEAAQFDDPNLQLGEYVEDQIESIAFDRIAMQTARQVISTKIREAERAKVVEQFREEEGKIVTGTVKKVSRDSIILDLGNKAEAMIAREDMLPRENFRPGDRVRGVLYKVNPEGKTAQLFVTRSKPEMLIELFRIEVPEIGEEMIEIRGAARDAGSRAKIAVKSNDKRIDPVGACVGMRGARVQVITNELGGERVDIVLWDDNPAQFVINAMAPADVSSIIVDEDNHSMDIAVEADNLAQAIGRNGQNVRLATQLTGWTLNVMTTDELNAKHQAEDNKVLNLFINALELDEEFAQILVEEGFTSLEEIAYVPMNELTAIDGLEDEDLVEELQTRAKNAITAAAVAEEEALKKANVEDRLLNLEGMNRHVAIKLAEKQITTLEELAEQGVDDLTDIEELTAEQAADLIMAARNICWFGEE

SEQ ID NO: 58471 - protein, 829 aa, Haemophilus influenzae
MTEDVKADAPKKLSIQRRTKTTVSSTTTGGKSKEVQVEVRKKRTVKTDIAQQEEAKLKAQQEAEAKKIAEQKAAEEKARLEAEKAKAETAKPVKSAVDSKAKSVESEKEKRKAGEAELRRKAEELARQKAEEQARRAVEEAKRYAEADDSDNESSSEDYSDYNLSSRYALEAEDEEDRRNENRGRGKNKVAKAKKGGRDDENSKNSKNERESNRKNQKDAKFGKGKNGKKGAALQQAFTKPAQVVKSDVVIGETITVAELANKMAVKATEIIKMMMKMGEMVTINQVIDQETAQLVAEELGHKVILRNENELEEAVLGDRDVNAEKVTRAPVVTIMGHVDHGKTSLLDYIRKAKVAAGEAGGITQHIGAYHVEMDDGKMITFLDTPGHAAFTSMRARGAKATDIVVLVVAADDGVMPQTIEAIQHAKAAGAPLVVAVNKIDKPEANLDRVEQELLQHDVISEKFGGDVQFVPVSAKKGTGVDDLLDAILLQSEVLELTAVKDGMASGVVIESYLDKGRGPVATILVQSGTLRKGDIVLCGFEYGRVRAMRDENGKEVDEAGPSIPVELLGLSGVPAAGDEATVVRDEKKAREVALYRQGKFREVKLARQQKAKLENMFSNMSEGDVAELNVIVKADVQGSVEAIVQALNELSTNEVKVKVVGSGVGGITETDATLATASNAIIVGFNVRADATARRVIEAENIDLRYYSIIYELLNEIKAAMSGMLEPEFKQEIIGLAEVRDVFRHPKFGAIAGCMVTEGVVKRNNPIRVLRDNVVIFEGELESLRRFKDDVSEVRNGMECGIGVKNYNDVKVGDQIEVFEVVEVKRSI

SEQ ID NO: 58472 - protein, 1055 aa, Haemophilus influenzae
MLNENDIEQLTLQRLQSLGWEYRYGKDLPVHEGKFARGDLSGVVFVEQLREAVRKLNPQLPESAVDSVVKSATKSDIGDLVVRNQTFYKLLRDGVRVEYTQNGEQKIEMVRLVDFEHWGNNRFVAVNQLEIRSRKGGKRIPDIIGFVNGLPLVVFELKNPLRESADLLQAFNQFETYKDEIAELFVYNQALIISDGIVARLGSLSADFQRFTPWKVVDEKNKSARLYFDDELQSLLNGLMQPEDLLDYIRYFVLFERDSVGKTIKKIAAYHQYYGVNEAVDSTIWATSEKGDRRIGVMWHTQGSGKSISMLFYAGKLLAQPELKNPTIVVVTDRNDLDGQLFQTFSSGKDLIKQTPQQVEDRDQLRQLLAQNEVGGVFFTTIQKFALNEEESRFPILNERNNIIVISDEAHRSQYGFTQKLHNGKFQTGYARHLRDALPNASFIGFTGTPISLEDKDTQDVFGRYVSIYDLQDAVEDGATVPIVYDDARQIRLNKKDHDALFAEIDALLEEEPSTSLRLREKLLGSQERLIELAADFVQHFAKRNEVVDSKAMMVVSSRQICVDLYNQIIALHPEWHSDNINEGAIKIVMTGSASDTPEMQKHIYSKQEKQTLERRFKDPNDPLKVVIVRDMWLTGFDAPCCNTMYLDKPMKGHNLMQAIARVNRVFANKSRENGGLIVDYVGLAKELRAATQQYTNSTGKGQLAEDVQSVFFKMKEQLEFIRTLFATPIEGKTFDVQAALEKDNPNDLLMAIRFAANHILSLDQLSFDGKAHEQHWFNKKETEPRKKAFLKTAGLVKKGYMLCGTLAEVEPYNQEIAFYDAVRAILTKREQKGTGTNERQILLKKLVNQTVYSEGVIDLFDLLEKPQPQISLLSEEFLQTVKNSPTKNLWVSAMERYLASEIKVKSGTNLTLQKDFERRLKEALNQYHNHNLTVVEILDELFKMSQDFQERLALGKKLGLTKEELAFYEALSQNQSAKDLMGDEVLSKLAKEITETLRKSVTIDWQYKEAVRARIRLLVRRALQKYKYPPDKQEEAVTYVIKQAEEIAEDLTGL

SEQ ID NO: 58473 - protein, 459 aa, Haemophilus influenzae
MSDWKEYSLGDISRNISRRFDFNAYPNVVFINTGDVLNNKFLHCEISNVKDLPGQAKKAIKKGDILYSEIRPGNGRYLFVDNDLDNYVVSTKFMVIEPNANIVLPEFLFLLLISNETTEYFKMIAESRSGTFPQITFDSVSSLSLNIPDKETQQKILDIITPLDDKIELNTQINQTLEQIAQALFKSWFVDFDPVRAKAQALSDGMSLEQAELAAMQAISGKTPEELTALSQTQPDRYAELAETAKAFPCEMVEVDGVEVDGVEVPRGWEMKALSDLGQIICGKTPSKSNKEFYGDDVPFIKIPDMHNQVFITQTTDNLSVVGANYQSKKYIPAKSICVSCIATVGLVSMTSKPSHTNQQINSIIPDDEQSCEFLYLSLKQPSMTKYLKDLASGGTATLNLNTSTFSKIEIITPSKEIIYIFQKKVVSIFEKTLSNSIENKRLTEIRDLLLPRLLNGEI

SEQ ID NO: 58474 - protein, 443 aa, Haemophilus influenzae
MPASARWQALQEVSILNTGAELPWGGKFSGVAKLIDDAFDAIEKDNEKLKGVLQRISGYAVNEDTLRGLIILFSDTHFTRPTYNGEPVHLGAKDILGHVYEYFLSRFAQAEGKRSGQYFTPKSIVSLIVEMLEPYSGRVYDPAMGSGGFFVQTERFITAHQGNINNVSIYGQEFNPTTWKLAAMNMAIRGIDYDFGKYNADSFTQPQHIDKKMDFIMANPHFNDKEWWNESLADDPRWAYGTPPKGNANFAWLQHMIYHLSPNGKIALLLANGSMSSQTNNEGEIRKAIINADLVECMVALPGQLFTNTKIPACIWFLNRNKKRKGEVLFIDARQIGYMKDRVLRDFTADDIAKIADTLHAWQTSDGYEDQAAFCKSATLEEIKNNDFVLTPGRYVGTAEQEDDGVPFAEKMQNLTALLKEQFAKSAELEAEIKKNLGGLGYE

SEQ ID NO: 58475 - protein, 312 aa, Haemophilus influenzae
MSRPRKRWRDVDGVFLLDKPQGMSSNDIMQKVKRLFQANKAGHTGALDPLATGMLPICLGEATKFSQFLLDADKRYLVTAKLGERTDTSDAEGQVVETREVNLETQQILTALEQFRGDILQVPTMFSALKHNGKPLYEYARQGITVEREARPITIFELNFIEYNAPFLTLEVHCSKGTYIRTLVDDLGEVLGCGAHVTMLRRTAVADYPVAEMMPINELQLLAESFPLSELDRLLLPTDTAVSKLPALHLDAEQSKAIGFGQRVKFANEQQLSGQVRLFSAENLFLGVLNRREYYSPTTINYTIRITSLPFL

SEQ ID NO: 58476 - protein, 647 aa, Haemophilus influenzae
MALISLTNGYLSFSDAPLLDHAELHIEPNECVCLVGRNGAGKSTLLKIIAGDVLMDDGKIQYEKDLVVSRLEQDPPRNAQGNIFDYVAEGVGHLTDLLKEYHQISVQLEENYSDQILSQLEQVQAKLEHADGWRFENKINEVLLKLGLNPNTKLSALSGGWLRKAALARALVCDPDVLLLDEPTNHLDVEAIEWLENFLLDFQGSIVFISHDRSFIRKMATRIVDLDRGQLVSYPGNYDLYLTTKEENLRVEALQNELFDKRLAQEEVWIRQGIKARRTRNEGRVRALKVMREERRQRRDVMGTAKLQLDTSSRSGKIVFEMEDVSYEIAGKTLLKDFSTTILRGDKIALVGPNGCGKTTFIKLLLGEIQPTSGKIRCGTKLEIAYFDQYRADLDPEKTVMDNVADGKQDIEINGVKRHVLGYLQDFLFPPKRAMTPVKALSGGERNRLLLAKLLLKPNNLLILDEPTNDLDVETLELLEEILTDYQGTLLIVSHDRQFIDNTATECYLFEGKGHLNKYVGGFFDAKQQQANFWASKAVEEQAKAKKSEPLKEESAVKNDRTSKPKSVKLSYKEQRELEQLPQLLEELETKITVLQAEIADPAFFQQAHDITDAKLKALADTEAELETAFLRWEELEEKKNLVEGKA

SEQ ID NO: 58477 - protein, 477 aa, Haemophilus influenzae
MNYIQLQRFNMSKVASIVDVLQGKVAIGETVTVRGWVRTRRDSKAGLSFLAVYDGSCFDPIQAIINNDIENYESEILRLTTGCSVIVTGKVVESPAEGQAVELQAEKVEVTGFVEDPDTYPMAAKRHSIEYLREVAHLRPRTNIIGAVARVRHCLSQAIHRFFHEQGFYWVATPLITASDTEGAGEMFRVSTLDLENLPRSENGKVDFSQDFFGKESFLTVSGQLNGETYACALSKIYTFGPTFRAENSNTTRHLAEFWMVEPEVAFATLADNAKLAEDMLKYVFRAVLAERKDDLQFFEKHVDKDVITRLENFVNSDFAQIDYTDAIDVLLKSGKKFEFPVSWGIDLSSEHERFLAEEYFKSPVVVKNYPKDIKAFYMRLNDDEKTVAAMDVLAPGIGEIIGGSQREERLEVLDKRMEEMGLNPDDYWWYRDLRKYGSVPHSGFGLGFERLIVYVTGVQNIRDVIPFPRAPRNANF

SEQ ID NO: 58478 - protein, 173 aa, Haemophilus influenzae
MLKSRVKSLWLIIGKNMKVLEGSVAAPNAKVAVVIARFNSFINESLLEGAIDALKRIGQVKDENITIVRTPGAYELPLVARRLAESKKFDAIVALGTVIRGGTAHFEYVAGEASSGLGKVAMDAEIPVAFGVLTTENIEQAIERAGTKAGNKGAEAALTALEMVNLIQQIDAA

SEQ ID NO: 58479 - protein, 144 aa, Haemophilus influenzae
MTEQKQVKKPSARRRARECTVQALYSWAVSGNTAEQVELAFVLDQDMDGVDKPYFRKLFRQTIENIETVDFSISPYIDRAFDELDPIETAILRLAVYELRFELDVPYKVVINEAIEVAKVFGADESHKYINGVLDKIAPALGRK

SEQ ID NO: 58480 - protein, 345 aa, Haemophilus influenzae
MARVFNACLFFYKIGGKMAMGEFDLIKRYFQQQILVDDSVQLSIGDDCALVSVPENYQLAITTDTMVENTHFLPTISPEDLAYKAVATNLSDLAAMGAQPKWVSLALTLPNVDENWISTFSQSLLHTLKQYNVTLIGGDTTKGNLSITITAQGFVEKNKGICRHKAQIGDLIYVSSTLGDSAAGLTQILLGKSAVDSDDVFLQQRHLRPTPRIELGQALIGIAHVAIDLSDGLISDLGHILERSQCSAEVELTALPLSSSILNKYDRTQAEQFALSGGEDYELCFTIPPEYKDELELRLKKLNVPCTCIGKINEKCGDFSPRFLRDGKPVNITFSSGFDHFKESK

SEQ ID NO: 58481 - protein, 270 aa, Haemophilus influenzae
MTLKIAIAGAGGRMGCQLIQAVHSAEGVELGAAFERKGSSLVGTDAGELAGIGHLGVAVSDDLESQKDKFDLLIDFTRPEGTLEHIAFCVANNKKMVIGTTGFDENGKVAIKAASDKIAIVFASNFSVGVNLVFKLLEKAAKVMGDYCDIEVIEAHHRHKVDAPSGTALSMGEHIAKTLGRDLKTHGVFCREGITGERKRDEIGFSTIRASDVVGEHSVWFADIGERVEISHKASSRMTFANGAVRAGKWLENKANGLFDMTDVLDLNNL

SEQ ID NO: 58482 - protein, 329 aa, Haemophilus influenzae
MQHLNELVEKAKLAIESIQDKSLTALDEIRVEYFGKKGHFTQLMQELRNVSAEERPAMGAKINEAKQAALEFLNAKKTEWEQAELNSKLEKERVDVSLPGRKVETGGLHPVTMTINRVTKFFSELGFSVENGPEIESDYYNFDALNIPKHHPARADHDTFWFNPELLLRTQTSGVQIRTMEKMQPPIRIMAPGRVYRNDYDQTHTPMFHQIELLYVDKKANFTELKGLLHDFLRAFFEEDLQVRFRPSYFPFTEPSAEVDVMGKNGKWLEVLGCGMVHPNVLRNVGIDPNEYSGFAVGMGVERLTMLRYNVTDLRSFFENDLRFLKQFK

SEQ ID NO: 58483 - protein, 795 aa, Haemophilus influenzae
MKFSEQWVREWVNPAVSTEQLCEQITMLGLEVDGVEAVAGTFNGVVVGEVVECAQHPDADKLRVTKVNVGGDRLLDIVCGAPNCRQGLKVACATEGAVLPGDFKIKKTKLRGQPSEGMLCSFSELGIDVEADGIIELPLDAPIGTDLREYLALDDNAIEISLTPNRADCLSIAGIAREIGVVNKQLVNQLHFEAAPATISDKVQIDLQAPEACPRYLLRVIKNVNVKAPSPMWMQEKLRRCGIRSIDPIVDITNYILLEFGQPMHAFDAAKVTQPVQVRFAKEGEELVLLDGSTAKLQSNTLLIADQNGPLAMAGIFGGAASGVNSETKDVILESAFFAPLAIAGRARQYGLHTDASHRFERGVDFELARKAMERATALLLEICGGEAGEICEASSETHLPKVNTVQLRRSKLDALLGHHIETGSVTEIFHRLGFDVTYANDIWTVTSASWRFDIEIEEDLIEEVARIYGYNSIPNNAPLAHLCMREHKESDLDLARIKTALVDADYQEAITYSFVDPKIQSLLHPHQEALVLPNPISVEMSAMRVSLISGLLGAVLYNQNRQQSRVRLFETGLRFVPDANAEFGVRQEFVLSAVITGTAKSEHWAGKAESVDFFDLKGDLESVLSLTEGGHRVRFVAKQFDALHPGQSAAIELDGQEIGFIGAIHPSISQKLGLNGKTFVFEILWNAIAARNVVQAKEISKFPANRRDLALVVADSVPAGELIAACKQAGGEKLVQVNLFDVYQGVGVAEGYKSLAISLTVQDNEKTLEDEEINAVISAVLAEVKQRFNAELRD

SEQ ID NO: 58484 - protein, 135 aa, Haemophilus influenzae
MAEQAELDLVEISPNAEPPVCRIMNYGKFLYEKSKTAKEQKKKQKVVQVKEIKFRPGTDEGDYQVKLRSLIRFLEDGDKAKITVRFRGREMAHQDIGLDVLERVKNDLAEISVVESAPGKLEGRQAVMVLAPKKK

SEQ ID NO: 58485 - protein, 89 aa, Haemophilus influenzae
MLPSNFISSPDYVVLNEKCGVILTMPKIKTVRGAAKRFKKTASGGFKRKQSHLRHILTKKTTKRKRHLRHKSMVAKADQVLVVACLPYA

SEQ ID NO: 58486 - protein, 117 aa, Haemophilus influenzae
MARVKRGVIARARHKKVLKAAKGYYGARSRVYRVAFQAVIKAGQYAYRDRRQRKRQFRQLWIARINAAARQNGLSYSKFINGLKKASVEIDRKILADIAVFDKVAFAALVEKAKSAL

SEQ ID NO: 58487 - protein, 640 aa, Haemophilus influenzae
MLSVLHKLKELRILSQGDYYFAKLIADKQCHTDYAEPVKNLAILLAALCSWRYTQGNTCSQLDRYLEHNLFGLAYRTTEEDYLAEIHEKIGYLPVEDWQNALCGHMAFTQDPVNQIAPMAFQFGALYFYRAWQDEYRIVQYIKNTLKKYRTLAFSYDEIHQKLEKYFPEKQEKTDWQKVAVATAIKSPFSIITGGPGTGKTTTVTRLLLVLQELFDCKLHIKLVAPTGKAASRLEESIKNALGFMQEKMNVSHSLFNAIPQKASTLHSLLGVNAFNDYTRYNSHNPLQLDVLVVDETSMIDLPMMAKLINALKPETRLILLGDQAQLASVEAGAVLGELAQFVTQPYSHEQAAYLLATTGYKVEGSDCSNPIRDCLCHLTESRRFDKDSGIGKLSEFIQKGKADDSLELFDHYPQELHFNSLNDEGDAVNQVVKSAVENYRTFLKMLDDLRKQKIDPNAKNEQGISYAEAIQVQFNSVRFLTALRNNNLGVENLNKEIALALREQKLLWFRNEQDWYIGKPIMITENDHNVRLYNGDIGLCLANGKVWFGNREVLTNRIPAHEPAFMMTIHKSQGSEFKHTVMVLPTEVNPVLSRELVFTGVTRAKKELTVFADEKIWKTAIRQTVKRQSGLGKLLEDLN

SEQ ID NO: 58488 - protein, 601 aa, Haemophilus influenzae
MVNFSRKRPAVSSLFSQQQAIEQSLNWQALQPDLVIQDFPLEPVNFWALQPNATQGIDLFLRHPTRSLLMMKVGEPVEYAELLQNFISQNHHKVRSIFGVNYVIEQGDSFSFPHVYTEPAKSLDDNFASQGEALSALYCDQFQLFGSFRIHPRSQDIQLVPGLVHKANGGVLILSAATLLSQFDLWGRLKQILQTQTFDWYSAHPFKNLPCDIPSYALNLKVIVLGNRTELATLAELEENLYSFADYAEIESYISVAEVEEQKTWAGYVQQMAQEQNIELDFLALNKLYQLLVRESENRFLINASPLKLKEILQDASTFTEKTALSAVDFEGIFQQKLAQYGFLKEQTYADILNEQVYVETQGEIVGQINGLSVIEYPGTPVCFGEPSRISCIVQFGDGEVIDVERKNELAGNIHGKGMMIAQACLSNILDLPSQLPFSASLVFEQSYGEIDGDSASLAIFCVLVSALADLPLPQHIAITGSIDQFGLVHSVGGVNDKIEGFFTICQRRGLTGKQGVIIPMTTIQQLSLSDDVKSAVKNGEFFIYPVEDIYQACELLFGRDLLDENKDYTEKTESLSRLIQRRIEGRADSERKSFWHFFRS

SEQ ID NO: 58489 - protein, 89 aa, Haemophilus influenzae
MSLSTEKKAAIVAEFGRDAKDTGSSEVQIALLTAQINHLQTHFAEHKKDHHGRRGLLRMVSRRRKLLDYLKRTDLALYQSTIARLGLRR

SEQ ID NO: 58490 - protein, 479 aa, Haemophilus influenzae
MKKLSSISTALGSFLLSVSFSLPTFANINVSDLTQKLPEGSNVGFIAKNINQNQIIADYNGSTFMLSASTQKVFTAVAAKLALDDQFQFETALLSNGKIQNGNLDGNLIVRFTGDPDLTRGQLYSLLAELKKQGIKKINGDLVLDTSVFSSHDRGLGWIWNDLTMCFNSPPAAANIDNNCFYAELDANKNPGEIVKINVPAQFPIQVFGQVYVADSNEAPYCQLDVVVHDNNRYQVKGCLARQYKPFGLSFAVQNTDAYAAEIIQRQLRQLGIEFNGKVLLPQKPQQGQLLAKHLSKPLPDLLKKMMKKSDNQIADSLFRAVAFNYYKRPASFQLGTLAVKSILQKQGIRFGNSILADGSGLSRHNLVAPKTMLSVLEYIAKNEDKLHLMETFPIAGVDGTISGRGGLISPPLVKNVIAKTGSLKGVYNLAGFMTNARGEKVAFVQFINGYSTGDLESKTKRAPLVQFERNLYNELYKY

SEQ ID NO: 58491 - protein, 635 aa, Haemophilus influenzae
MVKNLVLWVVVAVIMMTAYQSFNSSSVENSTDYTTFVYDVSNGQVTAARFDANEITVTKTDGSKYSTVMPPLEDKKLLDDLLSKKVKVEGTPFERRGFLSQILISWFPMLFLVGVWVFFMRQMQGGGGKAMSFGKSRAKMLNQDQIKVTFADVAGCDEAKEEVGEIVDFLRDPNKFQNLGGKIPKGILMVGPPGTGKTLLARAIAGEAKVPFFTISGSDFVEMFVGVGASRVRDMFEQAKKNAPCLIFIDEIDAVGRQRGAGLGGGHDEREQTLNQMLVEMDGFSGNDGVIVIAATNRPDVLDPALTRPGRFDRQVVVGLPDVKGREQILKVHMRKVSVAQDVDAMTLARGTPGYSGADLANLVNEAALFAARVNKRTVTMLEFEKAKDKINMGPERRTMIMTDKQKESTAYHEAGHAIVGYLVPEHDPVHKVTIIPRGRALGVTFFLPEGDQISISQKQLESKLSTLYAGRLAEDLIYGEENISTGASNDIKVATNIARNMVTQWGFSEKLGPILYTEDEGEVFLGRSMAKAKHMSDETAHSIDEEVRAIVNRNYARAREILIDNMDILHAMKDALVKYETIEEEQIKQLMNREPVTPPSGWGEPKTQQAAYANSTTNDTKPESAVENTDDFNV

SEQ ID NO: 58492 - protein, 275 aa, Haemophilus influenzae
MKLYANNKCLDLSVPQIMGILNFTPDSFSDSGQFFSLDKALFQVEKMLEEGATIIDIGGESTRPNADEVSEQEELHRVVPVVEAVRNRFDCWISVDSSKAVVMREAANVGMDLINDIRALQEPNALETAVKLALPVCIMHMQGQPRTMQANPYYENVVQDVLAFLQKRTNECLSAGIKKENLIWDMGFGFGKSVQHNYQLLQNLNEFCQIGYPVLAGLSRKSMIGAVLDKPVDQRIIGSAAGALIAVQKGAKILRVHDVAATSDMLKVWQATANA

SEQ ID NO: 58493 - protein, 445 aa, Haemophilus influenzae
MANRKYFGTDGVRGKVGAYPITPDFALKLGWAAGKVLASQGSKMVLIGKDTRISGYMLESALEAGLAAAGLSAAFTGPMPTPAIAYLTRTFRAEAGIVISASHNPYYDNGIKFFSAKGTKLPDEIEEAIEAMLEQPMDCVESAELGKASRINDAAGRYIEFCKGTFPAHLGLEGYKIVVDCANGATYHIAPNVLRELGAEVIEIGTDPNGLNINEKCGATDVTALQAKVVETKADVGLAYDGDGDRIMMVDHLGNKVDGDQILFIIAREALRSGQLKGGVVGTLMSNMSLEIALKMLGVPFLRANVGDRYVLEKMVENDWTLGGENSGHIIIADKNTTGDGIVASLAVLAAMAQHKLSLNELASAVKLFPQVLINVRFAGGENPLESDAVKSVAAEVEKRLEGKGRILLRKSGTEPLIRVMVECQDAELAQQCAEEIAEAVKKIN

SEQ ID NO: 58494 - protein, 459 aa, Haemophilus influenzae
MEAIEWLENFLLDFQGSIVFISHDRSVIRKMATRIVDLDRGQLQSYLGNYDLYLTTKEENLRVEALQNELFDKRLAQEDVWIRQGIKARRTRNEGRVRALKAMREERRQRREVMGTAKLQLDTSSRSGKIVFEMEDVSYEIAGKTLLKDFSTTILRGDKIALVGPNGCGKTTFIKLLLGEIQPTSGKIRCGTKLEIAYFDQYRADLDPEKIVMDNVADGKQDIEINGVKRHVLGYLQEFLFPPKRAMTPVKALSGGERNRLLLAKLLLKPNNLLILDEPTNDLDVETLELLEEILTDYQGTLLIVSHDRQFIDNTATECYLFEGEGRLNKYVGGFFDAKQQQANFWASKAVEEQAKAKKSEPLKEESAVKNDRTSKPKSVKLSYKEQRELEQLPQLLEELETKITTLQAEIADPAFFQQAHDITDAKLKALADTEAELETAFLRWEELEEKKNLADGKA

SEQ ID NO: 58495 - protein, 379 aa, Haemophilus influenzae
MPVIRQVVFYDSLTGEQTKMKKFAGLITASFVAATLTACNDKDAKQETAKATAAANDTVYLYTWTEYVPDGLLDEFTKETGIKVIVSSLESNETMYAKLKTQGESGGYDVIAPSNYFVSKMAREGMLKELDHSKLPVLKELDPDWLNKPYDKGNKYSLPQLLGAPGIAFNTNTYKGEQFTSWADLWKPEFANKVQLLDDAREVFNIALLKIGQDPNTQDPAIIKQAYEELLKLRPNVLSFNSDNPANSFISGEVEVGQLWNGSVRIAKKEKAPLNMVFPKEGPVLWVDTLAIPATAKNSEGAHKLINYMLGKKTAEKLTLAIGYPTSNIEAKKALPKEITEDPAIYPSADILKNSHWQDDVGDAIQFYEQYYQELKAAK

SEQ ID NO: 58496 - protein, 412 aa, Haemophilus influenzae
MISQIDKTELLERFLHYVSFHTQSKPNAKHSPSSVGQMKLAMQLQKELIQLGLENVEVSKYAVVTAFLPANDPNLTKTIGLVAHLDTSPQCSGKNVRPEVIEEYRGGDIALGIGEEFISPVYYSFMQKLVGQTLIVTDGTTLLGADNKAGIAEIMTALSILQKENIPHCNIRVAFTPDEEIGLGIHYFPMEKFSCDWAYTIDGGEVGELEYENFNAATAKVRFFGRNIHTGYAKGKMLNALTLACEFQQVFPVDEVPEKTDGKVGFYHLEDFSGDIEQVELTYLIRDFDEQNFAQRKAFIKNQVEKFNAKKGLKKPIELEIQDSYQNMYDVVKNVPQSIELADRAMKAVGIKPNHKPIRGGTDGAFLASKGLACPNIFTGGYNFHSKHELVSLQGMENTVQVIIEMLKCKDL

SEQ ID NO: 58497 - protein, 160 aa, Haemophilus influenzae
MSKTSIGLDKVQSAELADKLNELLATYQVFYTNVRGYHWNIKGVNFFALHAKFEEIYTNLVARVDEVAERILTLGYTPNNAYSQYLKISRIKEDIAVSEAQECLSGTLQGLKTLLDQQREILAFANNANDEGTASQMSDYIKEQEKLVWMFQAACQTCHN

SEQ ID NO: 58498 - protein, 557 aa, Haemophilus influenzae
MMSHTETSLGAENTRTHNFITQIIDEDLASGKHKSVHTRFPPEPNGYLHIGHAKSICLNFGLAKEYQGLCNLRFDDTNPVKEDVEYVDSIKADVEWLGFKWEGEPRYASDYFDALYGYAVELIKKGLAYVDELSPDEMREYRGTLTEPGKNSPYRDRTIEENLALFEKMKNGEFAEGKASLRAKIDMASPFMVMREPVIYRIKFSSHHQTGDKWCIYPMYDFTHCISDAIERITHSICTLEFQDNRRLYDWVLENISIERPLPHQYEFSRLNLEGTLTSKRKLLKLVNDEIVDGWNDPRMPTISGLRRRGYTPASLREFCRRIGVTKQDNVVEYSALEACIREDLNENAPRAMAVIDPVRVVIENFESEAVLTAPNHPNRPELGERQLPFTKELYIDRADFREEANKQYKRLVLGKEVRLRNAYVIKAERVEKDANGEITTIFCTYDPETLGKNPADGRKVKGVIHWVSAVNNHPAEFRLYDRLFTVPNPGAEDDIESVLNPNSLVIKQGFVEQSLANAEAEKGYQFEREGYFCADSKDSRPEHLVFNLTVSLKEGF

SEQ ID NO: 58499 - protein, 730 aa, Haemophilus influenzae
MTTAVTQAIIDGFFDASNGDPFATLGMHETEQGIEIRTLLPDANRMVVIERESGKEITELDCVDERGFFVGVIPNCRQFFAYQLQVFWGNEAQIIEDPYRFHPMIDDLEQWLLSEGSMLRPYEVLGAHFMECDGVSGVNFRLWAPNARRVSIVGDFNYWDGRRHPMRFHSKSGVWELFLPKASLGQLYKFELIDCHGNLRLKADPFAFSSQLRPDTASQVSALPNVVEMTEARKKANQGNQPISIYEVHLGSWRRNLENNFWLDYDQIADELIPYVKEMGFTHIEFLPLSEFPFDGSWGYQPLGLYSPTSRFGSPEAFRRLVKRAHEAGINVILDWVPGHFPSDTHGLVAFDGTALYEHEDPREGYHQDWNTLIYNYGRNEVKNFLSSNALYWLERFGVDGIRVDAVASMIYRDYSRAEGEWIPNQYGGRENLEAIEFLKHTNWKIHSEMAGAISIAEESTSFAGVTHPSENGGLGFNFKWNMGWMNDTLAYMKLDPIYRQYHHNKMTFGMVYQYSENFVLPLSHDEVVHGKYSLLGKMPGDTWQKFANLRAYYGYMWGYPGKKLLFMGNEFAQGREWNYEESLDWFLLDENIGGGWHKGVLKLVKDLNQIYQKNRPLFELDNSPEGFDWLVVDDAANSVLAFERRSSNGERIIVVSNFTPVPRHNYRIGVNVAGKYEEILNTDSMYYEGSNVGNFGCVASEQIESHGRENSISVSIPPLATVYLRLKTK

SEQ ID NO: 58500 - protein, 659 aa, Haemophilus influenzae
MFKIYNNGNPIPMGYSQAVENNVQITNFALFSAAAIGVELCLFDEQNQETRLPMVRTENVWHLAVTGVKTGTEYAFRIHGEFANPQKLILDPYAKAVNGKPDLSSEESRSWFLLSDNRDNAHLAPRAVVISEEFDWENDTSPNTPWAETIVYELHVKGFSQLNEKIPAALRGTYTGLAHPVNLAYLKELGVTAVELLPVNFHINEPHLQARGLQNYWGYNPLAMFAVEPKYAATNNPLAEFKTMVKAFHKAGIEVILDVVFNHSAESEQTYPTFSQRGIDDQTYYWRNDQGRYINWTGCGNMLNLSSDVGRKWVVDCLRYWVEQCHIDGFRFDLATVLGRDTPDFNSSAQLFTDIKNEPSLQNIKLIAEPWDIGHYGYQVGNFPSYFAEWNDRFRDDLCRFWLWKSGEIGAFAERFAGSSDLFKKNDRLPHTTLNFITAHDGFTLKDLVSYNQKHNETNGEENRDGRNENYSYNHGVEGSTESLSEPQKSAVENNRTFAQSGLLMSLLLANGTPMLLAGDEFGNTQYGNNNAYCQDNEITWLKWANFNEELFELTKQTIALRKQIGSLNKDQWWSDENVQWLNIVGEPMTVEDWQNQQTKALQVVLDNRWLLLINAKAEGQMFHLPNRKWKPQIGTHNVTLEAQQAELSSMGFCMLNDE

SEQ ID NO: 58501 - protein, 512 aa, Haemophilus influenzae
MLIGVPRELLENESRVAATPKTVQQILKLGFDVIVEHDAGFKASFEDQAFLEAGAKIGTSAEIWQSDIIFKVNAPTDEEIAQMKEGAALVSFIWRMQNPELMKKLTAKKINVLAMDAVPRISRAQALDALSSMANISGYRAVIEAAHEFGSFFTGQITAAGKVPPAKVLVIGAGVAGLAAIGAANSLGAIVRAFDSRPEVKEQVQSMGASFLEIDFKEEGGSGDGYAKVMSEEFNRRAMELYAEQAKEVDIIITTAAIPGKPAPRLITKEMVDSMKPGSVIVDLAAATGGNCEYTQAGKVVTTENQVKVIGYTDFPSRLPTQSSQLYGTNLVNLLKLLCKEKDGNINIDFEDVVLRGVTVVRDGEEIPPAQIQVSAQPKQETKAAPVAEKKESKPTDPRVKYGVMAGVGVLFLWLASVAPAAFLSHFTVFVLACVVGYYVVWNVSHALHTPLMAVTNAISGIIIVGALLQIRQPTGNLFIDALAFVAILVASINIFGGFRVTQRMLAMFRKG

SEQ ID NO: 58502 - protein, 868 aa, Haemophilus influenzae
MSKSLVIVESPAKAKTINKYLGSQYVVKSSVGHIRDLPTVGSSTGEKAKPISTKGMDAEEKAKIKAEKERNALVKRMGIDPYHDWKANYQILPGKEKVVSELKSLAKKADHIYLATDLDREGEAIAWHLREVIGGNDDRFSRVVFNEITKNAIKQAFEKPEQLNMDRVNAQQTRRFLDRVVGFMVSPLLWKKVARGLSAGRVQSVAVKLLVEREREIKAFQPEEYWEVAVLTNNQNKQAIRLDVTDYKGKKFDPKNQKEAQSAVDFLNVSDYVVTDLETKPTSSRPRAPFITSTLQQTASTRLGFGVKKTMMLAQRLYEAGYITYMRTDSTNLSQDALNMARSYIENHFGAQYLPEKPNFYSSKENAQEAHEAIRPSDIRALPESLEGMEKDAVRLYDLIWCQFLACQMPPAQYDSSTLTVTAGDYTLKAKGRILRFDGWTKVLPQIGKNPEDQELPSVTVSEKLALKEVQPTQHFTKPPARFTEAALVKELEKRGIGRPSTYAAIISTIQERGYVRTENRRFYAEKMGEIVTDRLNESFGELMNYDFTANMEDTLDKIASGSVNWKTELNQFFKDFSSQLSKAELDELEGGMRPNSLVETDIKCPTCGRNMAIRTASTGVFLGCTGYALPPKERCKTTINLIPEAELLNVLDESSETKALMDRKRCTKCGTAMDSYVIDAHRKIHICGNNPNCDGYLIEEGSFKIKGYDGPVVECDKCGADMHLKLGRFGKYMGCTNCDNTRKILKNGEVAPPKEEPVHFPELKCEKSDAYFVLRDGASGVFMSAHNFPKSRETRPVKIAELVQYRERLPEKLAYLADAPQKDPEENEAIVRFSRKEKKQYVTSEKEGKATKWIVDFTNGKWVERKK

SEQ ID NO: 58503 - protein, 643 aa, Haemophilus influenzae
MPIITLPDGSQRQFDRPVSVLEVAQDIGAGLAKATIAGRVNGERRDACYVIEQDATLEIITAKDEDGLEIIRHSCAHLLGHAIKQLFPDVKMAIGPTIENGFYYDVDLDRSLTQEDIDAIEKRMLELAKTNYDVVKKRVTWQEARDTFEKRGEPYKMAILDENIERTATPALYHHLEYIDMCRGPHVPNMRFCQHFKLQKVAGAYWRGDSKNKMLQRIYGTAWADKKQLAEYLTRLEEAAKRDHRKIGKALDLYHMQEEAPGMVFWHNDGWTIFRELETFVRTKLKQYDYQEVKGPFMMDRVLWEKTGHWQNYADLMFTTQSENREYAIKPMNCPGHVQIFNQGLKSYRDLPIRMAEFGSCHRNEPSGSLHGLMRVRGFTQDDAHIFCTEDQIESEVTSCIKMVYDIYSTFGFTNIAVKLSTRPENRIGSDEMWDRAEAGLAAALAHNGLEYEIQEGEGAFYGPKIEFALRDCLGREWQCGTVQLDFALPGRLDATYVAEDNSRKTPVMIHRAILGSIERFIGIITEEYAGFFPAWLAPTQAVVMNITDSQADYVQKVAKQLSDVGLRVKTDLRNEKVGFKIREHTLRRVPYMLVCGDKEIAEGKVAVRTRKGADLGTFTVEEFAEILKNQVRSRELKLLNEE

SEQ ID NO: 58504 - protein, 926 aa, Haemophilus influenzae
MKKTTALFLLIFSLIACQSLELSPNNNLPFDPNIQHGKLSNGLQYFVLKNTEPKERVYIRLVINAGSMHEDDDQKGIAHLVEHMAFNGSKKYPENQIINALEKLGMKFARDINAFTDFENTVYTLNLDSNNQQKLELAFDVINEWMNNITFLPKDVDGERGVVQEEWRRRLSPMLRIGNKKSAIEMAGSRYVLRDPIGDMDIIKTISAKRVADFYHKWYRPDNMSVIIVGDIDTKQVVKLLKQNLSQENPITKTTLEKIDFNIPLINKWRLDSISEQGTTIPSIELSFFENTIETNTLASYKQELIQQITTRLLNLRLQQWEKETENGVDSANFYRTHLGKETLQSIFSLQLIDTQYSKTIDKLFAFIASIKQQGFTQNELSGEIKRLTQLNEKQLNIRSGSLKIADDLITSVANKQVVLSVNDRYELNKRFLSQITLADLQRTLNQTLALKAKLLLITQPLPQKALPFDVAEIETRWNNVMEMQQHQWDEKKQIEKLPHLTFNTGSLSQEKYWDRGDIYEFRLSNGSKLIYHYSDKTPNQVHFRAVTQGGLRSIPNKDYHLLRAAVSVVDETGVGELSLSAVNQIFSRDPLVIATVIDDDKQGFTGVSKPKDLENLLTLFRLKLRSSPISDLALEKYRRETRDYFKQIDLETQFMQAVSKLRFPNIETVYTQKQAQQLSFDKNQLNNAYQHYILDKTDFTYFIIGDIELNQVKKLAERYLASIESKTQIRHFVPTIIHTPTQSFIMNGLKEPRADVEIYLTADNTWRTEQKYLFNILADIVQEKLRLILREKVSGIYSVNSWFMQDVYAPQIEGKIEFSCDPKRVEELTYLTNQVLDDIIKNGIDENLLRKKLAEQHTQIRREFDSLVSIASIIEESYWQQDNPDAIYTYQHLDQLATKATIDALAQKALKKSGRFVSILKAASY

SEQ ID NO: 58505 - protein, 1510 aa, Haemophilus influenzae
MSDVFELENEIELESDEVILENENVEEIVDAPIPFSMTTNNGIERGKFRSLTLINWNGFFARTFDLDELVTTLSGGNGAGKSTTMAGFVTALIPDLTLLHFRNTTEAGSTGGSRDKGLHGKLRPGVCYAVLDTINSRHQRILVGVRLQQIAGRDKKVDLKTFSIQGVELSQNPTALFTETVGEHQARVLNLNELKDKIENIGAQFKQYHSITDYHGMMFDLGIIPKRLRSASDRSKFYKLIEASLYGGISSAITRSLRDYLLPENLGVRKAFQDMESALRENRMTLEAIKVTQSDRDLFKHLITETTNYVASDYMRNANERRGNIEAALESRREWYKAKAEQNLSQHRLVDLSREVAELAESERTLEVDHQSAVDHLNLVLNALRHQEKITRYQEDIAELTERLEEQKMVVEDANDALEESQAQFEQTEIEIDAVRSQLADYQQALDAQQTRALQYQQAIAALEKAKTLCGLADLSVKNVEDYHAEFDAHAESLTETVLELEHKMSISEAAKSQFDKAYQLVCKIAGEMPRSTAWESAKELLREYPSQKLQAQQTPQLRTKLHELEQRYAQQQSAVKLLNDFNQRANLSLQTAEELEDYHAEQEALIEDISARLSEQVENRSTLRQKRENLTALYDENARKAPAWLTAQAALERLEQQSGERFEHSQDVMNFMQSQLVKERELTMQRDQLEQKRLHLDEQISRLSQPDGSEDPRLNMLAERFGGVLLSELYDDVTIEDAPYFSALYGPSRHAIVVRDLNAVREQLAQLEDCPDDLYLIEGDPTAFDDSVLSAQELELGVVVQVSDRELRYSRFPEIPLFGCAAREKRLEELQIERDEVAEQHAQIAFDVQKCQRLHEHFSQFVGLHLALAFQPNPEALMSEINRERNEIDRELNQFNSGEQQLRIQLDNAKERLQLLNKLIPQLNVLADEDLIDRIEECREQLDIAEQDEYFIRQHGVTLSQLEPIANSLQSDPENYEGLKNELTQAIERQKQVQQRVFALADVVQRKPHFGYEDAGQAETSELNEKLRQRLEQMQAQRDTQREQVRQKQSQFAEYNRVLIQLQSSYDSKYQLLNELIGEISDLGVRADDGAEERARIRRDELHQQLSTSRQRRSYVEKQLTLIESEADNLNRLIRKTERDYKTQRELVVAAKVSWCVVLRLSRNSDMEKRLNRRELAYLSADELRSMSDKALGALRTAVADNEYLRDSLRVSEDSRKPENKVRFFIAVYQHLRERIRQDIIKTDDPIDAIEQMEIELSRLTAELTGREKKLAISSESVANIMRKTIQREQNRIRMLNQGLQNIAFGQVKSVRLVVNIRDTHAMLLDALSGQQDEYQDLFNDNRITFSEAMAKLYQRINPHIDMGQRTAQTIGEELLDYRNYLELEVEVFRGADGWLRAESGALSTGEAIGTGMSILLMVVQSWEEESRRIRGKDIVPCRLLFLDEAARLDGKSISTLFELCERLDMQLLIAAPENISPEKGTTYKLVRKIAGNQEYVHVVGLRGFGATE

SEQ ID NO: 58506 - protein, 473 aa, Haemophilus influenzae
  MISC_FEATURE (450)..(450): X=any amino acid
MVKDFSFFIYDYESFGVNPATDRPAQFAGIRTDADFNIIGEPIMFYCKQTNDYLPAPEAVMVTGITPQECNEKGLSEPEFAANILAEFSQPNTCVMGYNNIRYDDEMTRYTFYRNFIEPYEYSWKNGNSRWDLLDLVRACYALRPEGINWAYDDDGMPSFRLEKLTKANSIEHENAHDAMADVYATIAMAKLIKEKQPKLFQYFFENRGKKEIEKLVDTGAMTPLVHVSGMLGNYRGNCTWVAPLAWHPTNQNALIVCDLTGDIDNLLAKSADELRADLYTKKLELEERGVSSVPLKLVHINKCPILAPAKTLLPETANRLGIDRQLCLDNLAKLRASFDIREKVADIFNEERQFASNDNVETELYNGFFSNADKNNMAILRSLPAEKLSEHGLAFEDKRILELLFHYRARHFYKTLTRAEQIKWKKYRQNKLEKSAVEFEASLQRLVEXHSDNSEKLSLLQQVYEYGIKLLG

SEQ ID NO: 58507 - protein, 315 aa, Haemophilus influenzae
MLTKSRKYFNQTWIESLFKQTTALFALLVFILLAAILISLVIGSWESIKRFGGSFLLETYWDPVQEQYGAIIPILGTLITAGIALFIAVPISFGIAIFLTELAPNWLKRPISIAIEMLAAIPSIIYGMWGLFVFVPLFQEHIQPVLIDNLGNLPGLELFFSGVPFGVGLFTAGLVLAIMIIPFIASVMRDVFSIVPPMLKEGAYGLGATTWEVVRQVIVPHTRIGLVGSVMLGLGRALGETMAITFIIGNSFQLPNSLFSPSTSIASAIANEFNEAGGLQKSALMELGLLLFVITTMVLILSRLMITKMQQTKGK

SEQ ID NO: 58508 - protein, 333 aa, Haemophilus influenzae
MQHNQLLEQLYSGHSLSTSESTALFNAVIQGELSNEQIAAMLIALKVRGANTEEISGAVAASLQNAKAFPYPNYPFADIVGTGGNGQNTINISTTSAIVAASMGAKIAKHGNRSVSSKSGASDVLTALSVNVNVTPEQARQALDEIGVCFLFAQQYHSGFRHVAPVRAALKTRTIFNILGPLINPARPTYHLLGVYAPELVKTYAETAVALEHQHSFVVHGSGLDEVALHGETQVAEIKNGKIEYFTLTPEDFGLKTQSLESLRGGEPQENAQYLTALLQGKGKAEHANAVAANTALLLKLFGYDDLKQNVQNVLAHLVSGKAFETLQKLTTY

SEQ ID NO: 58509 - protein, 477 aa, Haemophilus influenzae
MMITQDFTKPIDSATVLQKIVLDKAQWVKAKEKEFPLSQFKQNIQNSDRSFYDALAKGTHQKPAYILECKKASPSKGLIRAEFNLEEIANVYKHYASAVSVLTDEKYFQGNFEFLPLVRDIVSQPVLCKDFMISEYQVYLARYYQVDAILLMLSVVNDETYRVLADLAHSLGMGVLTETSNEEEFERALALGAKIIGVNNRNLHDLTVDLNRVVELTKKYADCIPADVRIISESGIYNHKQIHQLQKVAHGFLIGSSLMGNQDLNNAVRSVIFGENKVCGLTRAQDVKIVYENGALYGGLIFAEHSKRSVSLRQAQELVTAAPLRFVGVFQNQEIDFIVKIASQLQLYAVQLHGAETEAFITALRQQLPKNTQIWKAISVNTEAQSAVDFTDDLNVDRYIFDSQTANQQGGTGKTFDWSLIPENLKHKIILAGGISPNNVEQAIAQGCLGLDLNSGVESSAGVKDQEKVRLVFNNIY

SEQ ID NO: 58510 - protein, 954 aa, Haemophilus influenzae
MTQKFEMADRFNPSAVEQALYQRWEESGYFKPSENENAPSYCIAIPPPNVTGSLHMGHAFQQTLMDTLIRFNRMEGHNTLWQTGTDHAGIATQMVVERKIAAEEGKTRHDYGREAFINKIWDWKAYSGGTISQQMRRLGNSIDWERERFTMDDGLSNAVKEVFVRLHEEGLIYRGKRLVNWDPKLHTAISDLEVENKESKGSLWHFRYPLANDAKTADGKDYLVVATTRPETMLGDTAVAVHPEDERYQSLIGKTVVLPLANREIPIIADEYVDREFGTGVVKITPAHDFNDYEVGKRHNLPMVNVLTLNANIRDEAEIIGTDGKPLAGYEATIPADYRGLERFAARKKIVADFEALGLLDEIKPHDLKVPYGDRGGVPIEPMLTDQWYVSVKPLADVAIKAVEDGEIQFVPKQYENLYFSWMRDIQDWCISRQLWWGHRIPAWYDAEGNVYVARNEEEVRSKYNLDSAVELKQDEDVLDTWFSSGLWTFSTLGWPEQTKELKMFHPTDVLITGFDIIFFWVARMIMFTMHFVKDENGKPQVPFKTVYVTGLIRDEQGQKMSKSKGNVLDPIDMIDGISLEDLLEKRTGNMMQPQLAEKIAKATRKEFAEGIAAHGTDALRFTLAALASNGRDINWDMKRLEGYRNFCNKLWNASRFVLTNEKLDLSQGEIEFSLADRWIQSEFNRTVETFRSSLSQYRFDLCANAIYEFTWNQFCDWYLELTKPVFANGNAAQIRAASQTLVHVLEKLLRLAHPLIPFITEEIWQKVKGFVGITADSIMLQPFPQVEESGFDPEAEAEIEWLKEVIVAVRNIRAESNIAPSKGLDLLFRNLSAENAKILEKQTALLKAMAKLDNVQVLATNETAPLAVAKLVGNAELLVPMAGFINKEAELARLTKEIEKYQNEVKRIENKLSNEAFVAKAPEAVIAKEREKQAEYQSGLEKIQEQYKAIEAL

SEQ ID NO: 58511 - protein, 144 aa, Haemophilus influenzae
MAKTAQFYILTENCTLTVEEIACNLAASIWRSGKKVLISCESEAQALEIDERLWQRDPNEFVPHNLSGEATQYPTPIEISWLGKRNLQRRDLLINLQQEIPDFSHSFTQIIDFVPKDDALKTQARERYKQLRLQGWNLSTENVG

SEQ ID NO: 58512 - protein, 274 aa, Haemophilus influenzae
MTKKYDLHCHSTASDGVLSPTELVHRAYAQGVNVLALCDHDTIAGIDEAEIAAKEVGIELITGVEISTNWEGRGIHIVGLNFDKTHPKMTALLQSQKALREKRAVEIGDKLEKAGIPNAYDGAKALADGEVTRAHYARYLVQIGKVSNDGQAFKRYLGQGKSAFVKAEWADIPTAIETIHAAGGIAIIAHPLRYNMTGKWVRKLIVDFKAWGGDGMEMADCGQTKDQRQMLARWAKEFDLQGSVGSDFHFPCGWIELGKNLDLVDSVIPVWEKF

SEQ ID NO: 58513 - protein, 397 aa, Haemophilus influenzae
MSDTLLNPYFGEFGGMYVPEILVPVLKQLEQAFVEAQNDPTFQAEFADLLKNYAGRPTALTLCRNLTKGTKTKLYLKREDLLHGGAHKTNQVLGQILLAKRMGKTRIIAETGAGQHGVATALACAMLDMPCRVYMGAKDVERQSPNVFRMRLMGAEVIPVQKGSCSLKDACCEAMRDWSANYETTHYLLGTAAGPHPFPTIVREFQKMIGEETKRQILEREGRLPDTVIAAVGGGSNAIGMFADFIDESNVRLIGVEPAGKGIETGEHGAPLKHGTTGIYFGMKSPIMQDKDGQIEESYSISAGLDFPSVGPQHAYLNEIGRADYVSITDEEALNAFQELAKHEGIIPALESSHALAYALKLIKQNPEKEQLLVVNLSGRGDKDIFTVDKILNGGAN

SEQ ID NO: 58514 - protein, 317 aa, Haemophilus influenzae
MDATLNIAIAAEFELSEKIVERLEQSALEISKVSIVEIIPFEEEQNIRFRNKGVEQLSPNEVEWADFNYVFFAGKLEQVSHIAQAAEQGCIVIDMLGVCSALSDVPVVVPTVNESQLLELRQRNIVSLPDPQVSQLALTLAPILQETNLNQVFVTSLLPASYTDAETVTKLAGQTARLLNGIPLDEEETRLAFDVYPYQTPNLSNQLQRIFPQLDRATFHAIQVPVFYGLAQKVTALSDYDFDYQPQNSELIALEETLITPVLNGEQENGEESVKLHLSQISAVENGVEFWSVADEQRFNLALLSVKLLEGIYQQGY

SEQ ID NO: 58515 - protein, 295 aa, Haemophilus influenzae
MGHFSEELQQVQTRINRFLEAQFEGIESHNAPLLEAMKYALLLGGKRVRPFLVYATGQMLGAEKQTLDYAAAAIEAIHAYSLIHDDLPAMDDDNLRRGHPTCHIQFDEATAILAGDALQSFAFEILTKTPNISTEQKLALIQILAQGAGVQGMCLGQSLDLISEHKQISLSELELIHRNKTGALLIAALKLGFICSPHFTDKRLEQSLTQYAEAIGLAFQVQDDILDIEGDSAEIGKQVGADLDLDKSTYPKLLGLSGAKQKAQDLYQSALSELEKIPFDTTVRALAEFIITRKS

SEQ ID NO: 58516 - protein, 625 aa, Haemophilus influenzae
MTNNMNNYPLLSLINSPEDLRLLNKDQLPQLCQELRAYLLESVSQTSGHLASGLGTVELTVALHYVYKTPFDQLIWDVGHQAYPHKILTGRREQMSTIRQKDGIHPFPWREESEFDVLSVGHSSTSISAGLGIAVAAERENAGRKTVCVIGDGAITAGMAFEALNHAGALHTDMLVILNDNEMSISENVGALNNHLARIFSGSLYSTLRDGSKKILDKVPPIKNFMKKTEEHMKGVMFSPESTLFEELGFNYIGPVDGHNIDELVATLTNMRNLKGPQFLHIKTKKGKGYAPAEKDPIGFHGVPKFDPISGELPKNNSKPTYSKIFGDWLCEMAEKDAKIIGITPAMREGSGMVEFSQRFPKQYFDVAIAEQHAVTFATGLAIGGYKPVVAIYSTFLQRAYDQLIHDVAIQNLPVLFAIDRAGIVGADGATHQGAFDISFMRCIPNMIIMTPSDENECRQMLYTGYQCGKPAAVRYPRGNAVGVKLTPLEMLPIGKSRLIRKGQKIAILNFGTLLPSALELSEKLNATVVDMRFVKPIDIEMINVLAQTHDYLVTLEENAIQGGAGSAVAEVLNSSGKSTALLQLGLPDYFIPQATQQEALADLGLDTKGIEEKILNFIAKQGNL

SEQ ID NO: 58517 - protein, 212 aa, Haemophilus influenzae
MSSASSKRSVMTLFSNKDDIYCHQVKIVLAEKGVLYENAEVDLQALPEDLMELNPYGTVPTLVDRDLVLFNSRIIMEYLDERFPHPPLMQVYPVSRAKDRLLMLRIEQDWYPTLAKAENGTEKEKTSALKQLKEELLGIAPIFQQMPYFMNEEFGLVDCYVAPLLWKLKHLGVEFTGTGSKAIKAYMERVFTRDSFLQSVGEAAPKNLMDDK

SEQ ID NO: 58518 - protein, 130 aa, Haemophilus influenzae
  MISC_FEATURE (56)..(56): X=any amino acid
MAENQNYGTGRRKSSSARVFIKPGSGKITINQRELDVYFGRETARMVVRQPLELVXLTDKLDLYITVKGGGISGQAGAIRHGITRALMEYDETLRPALRAAGFVTRDARRVERKKVGLHKARRRPQYSKR

SEQ ID NO: 58519 - protein, 142 aa, Haemophilus influenzae
MKTFVAKPETVKRDWYVVDATGKTLGRLATELARRLRGKHKAEYTPHVDTGDYIIVINADKVAVTGRKETDKLYYWHTGYVGGIKQATFKEMIARRPEAVIEIAVKGMLPKGPLGRAMFRKLKVYAGGEHQHAAQQPQVLDI

SEQ ID NO: 58520 - protein, 292 aa, Haemophilus influenzae
MSYAKEIDTLNQHIADFNKKINVSFEFFPPKNEKMETLLWDSIHRLKVLKPKFVSVTYGANSGERDRTHGIVKAIKQETGLEAAPHLTGIDATPEELKQIARDYWDSGIRRIVALRGDEPKGYAKKPFYASDLVELLRSVADFDISVAAYPEVHPEAKSAQADLINLKRKIDAGANHVITQFFFDIENYLRFRDRCASIGIDTEIVPGILPVTNFKQLQKMASFTNVKIPAWLVKAYDGLDNDPTTRNLVAASVAMDMVKILSREGVNDFHFYTLNRSELTYAICHMLGVRP

SEQ ID NO: 58521 - protein, 107 aa, Haemophilus influenzae
MINCNPHVKCADFYFGKLNMLCAIYKSKKKLGSYLYVANREDFSSVPSVLLEHFGKPELVMMFNLLGRKALHNVDCNEVLETIKRQGFYLQIAKQDDGLFNSLSEIK

SEQ ID NO: 58522 - protein, 404 aa, Haemophilus influenzae
MLTLDQARSKMLEQLPFPTQTEYLNLQEAANRICAEDIISPINVPSFDNSAMDGYAVRLSDLQQSLTLSVAGKSFAGNPFQEEWPSKSAVRIMTGAMIPEGTDAVIMQEQVTLNEDGTITFSELPKPNQNIRRIGEDVKKGDVVLEQGAQLTPVSLPLLASLGIAEVKCYRQLKVGVLSTGDELVEVGKPLQSGQIYDTNRFTVKLLLEKLHCEVIDLGLLPDNEAEFEKAFIAAQSQADLVITSGGVSVGEADFTKAVLEKVGQVNFWKIAIKPGKPFAFGKLENAWFCGLPGNPVSALVTFYQLVQPLIAKLQGQKQWKKPPHFSAIATMNLKKAVGRLDFQRGFYYINEQGQIEVQSVGFQGSHLFSAFVKSNCFIVLEQERGNVSAGETVTIEPFNHLLG

SEQ ID NO: 58523 - protein, 243 aa, Haemophilus influenzae
MIELSHEEELRYNRQIILKSVDFDGQEKLKASKMLIVGLGGLGCAASQYLAAAGVGNLTLLDFDTVSLSNLQRQVLHCDARLNMPKVESAKIALEQINPHINIETINAKLDEEKLAEIIPHFDIVLDCTDNVEIRNQLDRQCNHMKVPLISGAAIRMEGQVSVFTYEPNTPTYRDLSKLFRQNVLSCVEAGVLAPIVGIVGCIQALEAIKVRLKIGKNLCGRLLMIDGFSMNIREIKLPTNME

SEQ ID NO: 58524 - protein, 195 aa, Haemophilus influenzae
MEELLSAVIIGIVLGWLCKDWLHFPNGSNLYVLITLIFFVGIQLRNNGISLKEVLLNKQGLMMGAIFTLSSLIGGVISAFFLSMPITQGLAFSSGFGWYSLSSVVLTNAWGPMQGSIAFFNDLSREILSLFLIPLFMQHYRSTAIEITGATALDCTLPIIQKSGGIEVTPIAISFGMVTNLLPPLLLVFFSSFPI

SEQ ID NO: 58525 - protein, 445 aa, Haemophilus influenzae; identical to SEQ ID NO: 58493

SEQ ID NO: 58526 - protein, 275 aa, Haemophilus influenzae; identical to SEQ ID NO: 58492

SEQ ID NO: 58527 - protein, 381 aa, Haemophilus influenzae
MGRQRGAGLGGGHDEREQTLNQMLVEMDGFSGNDGVIVIAATNRPDVLDPALTRPGRFDRQVVVGLPDVKGREQILKVHMRKVSVAQDVDAMTLARGTPGYSGADLANLVNEAALFAARVNKRTVTMLEFEKAKDKINMGPERRTMIMTDKQKESTAYHEAGHAIVGYLVPEHDPVHKVTIIPRGRALGVTFFLPEGDQISISQKQLESKLSTLYAGRLAEDLIYGEENISTGASNDIKVATNIARNMVTQWGFSEKLGPILYTEDEGEVFLGRSMAKAKHMSDETAHSIDEEVRAIVNRNYARAREILIDNMDILHAMKDALVKYETIEEEQIKQLMNREPVTPPSGWGEPKTQQAAYANSTTNDTKPESAVENTDDFNV

SEQ ID NO: 58528 - protein, 345 aa, Haemophilus influenzae
MDLGPIYNTRDINDGKVINIDNPNYTNPVAIKKNENNNAYQFNHLKTLGLYIQNTTYFTDNFIITGGLRYEYFDQVVGRSTLKNIRSGYLAQKDGKLLYQLGSVYKFTPNIATFFNHAESFRPQNNRTLIINGELPAEQGKSFETGLKYENAYLNATVALFNINKRNVAETVNVNGTNELQIVGKQRSRGIEFDLNGQLTDNLSIAANYTYTKVKNLENHNNKLAVGKQLSGVPKHQASLFLAYNIGEFDFGNIRVGGGARYLGSWYAYNNTYTKAYKLPQAIVYDTFIAYDTKISGKKVSFQLNGKNLSNKVYSPSTSGNASRTLIPVALGYAREVILNTKIEF

SEQ ID NO: 58529 - protein, 589 aa, Haemophilus influenzae
MNWQTELNNSLNWILTALFWVVLCFSVTMLALKQTTFGKKFWCIVSPSMDKKTSIKLILMLLVLFIMILLEVRFSVLNSFFYNGLYSSMQELNIEKFWFFAKLNALLVVAQVIHAIADYFFQQVFEIRWLESFNATLVKRWLNKKKYYRLKYERDLPDNIDQRIEQDAREFITSTVQIVRGVINSVLTTIEFTIILWSLSGVLTLFGFNIEKGVVFFIYAFIIFATLMSVWIGRPLIKLNFTKEKLNGDYRYSLIRVRDNAESIAFYNGEPKEQTFLQHQFRQIIHNRWSIVLKMLGLNSFNSGVTRVAKLLPLMLQAPRFFSGQIKLGDMHQTVQAFNRLMTALSFFRLFYEQFTLYQARLNRLYGFITKMDELDKQNVHHPFHCSHRVALKNFGIKDEQGHVLLNNLNINLENGDALLIQGASGTGKTSLLKAIAGIYPFETIGIAEHPCMGSLFLPQRPYMPQGTLREAICYPNINPSHAELEQTMKDCALGKYIHALNVKNDWQAILSPGELQRVAFIRILLTKPDVVFLDETTSALDETTENLLYQTIKERLPEMIILSVGHRSTLQQFHNKQLKLDVCLLCEN

SEQ ID NO: 58530 - protein, 89 aa, Haemophilus influenzae; identical to SEQ ID NO: 58489

SEQ ID NO: 58531 - protein, 337 aa, Haemophilus influenzae
MQPDSYPKILFGLTLLLVITAVISLGIGRYSLSVPQIGQILWAKATALEIDPVQQQVIFQVRLPRILTALCVGAGLALSGVVLQGIFRNPLVNPHIIGVTSGSAFGGTLAIFFGFSLYGLFTSTILFGFGTLALVFLFSFKFNQRSLLMLILIGMILSGLFSALVSLLQYISDTEEKLPSIVFWLMGSFATSNWEKLLFFFVPFLLCSSILLSLSWRLNLLSLDEKEAKALGVKMAPLRWLVIFLSGSLVACQVAISGSIGWVGLIIPHLSRMLVGANHQSLLPCTMLVGATYMLLVDNVARSLSDAEIPISILTALIGAPLFGVLVYKLKRGGMNE

SEQ ID NO: 58532 - protein, 351 aa, Haemophilus influenzae
MKLKSLLIACLLSSLSFSALADRIITDQLDRKVTIPDHINRAVVLQHQTLNIAVQLDATKQIVGVLSNWKKQLGKNYVRLAPELENMAMPGDLNSVNIESLLALKPDVVFVTNYAPSEMIKQISDVNIPVVAISLRTGEVGEKGKLNPTLTDEDKAYNDGLKQGIELIAEVFEKKQQGDELVKAAFANRKLLADRLGDVSADKRVRTYMANPDLGTYGSGKYTGLMMEHAGAYNVAAATIKGFKQVSLENVLEWNPAVILVQDRYPDVVPQILNDQGWANIQALKDKKVFLMPEYAKAWGYPMPEALALGEVWLAKALYPQRFQDVDLDKMVNDYYQKFYRTSYKPDNAAR

SEQ ID NO: 58533 - protein, 476 aa, Haemophilus influenzae
MAQYSAEFKQAKVLVLGDVMLDRYWFGATNRISPEAPVPVVRVQENEERAGGAANVAMNIASLNVPVQLMGLIGQDETGSALSLLLEKQKIDCNFVALETHPTITKLRILSRHQQLLRLDFEEDFNNVDCKDLLAKLESAVKNYGALILSDYGKGTLKDVQKMIQIARKANVPVLIDPKGTDFERYRGATLLTPNMSEFEAVVGKCNTEEEIIEKGLKLISDIELTALLVTRSEKGMTLLRPNQEPYHLPTVAKEVFDVTGAGDTVISVLATALADGRSFEESCYLANVAAGIVVGKLGTSTVSTVELENAIHARPETGFGIMSEAELKDAVAQAKARGEKIVMTNGCFDILHPGHISYLENARKLGDRLIVAVNSDDSVKRLKGESRPINNLENRMAVLAGLASVDWLVPFTEDTPQRLIGEILPDLLVKGGDYKPEEIAGSKEVWANGGDVKVLNFENGCSTTNVIEKIKLLKD

SEQ ID NO: 58534 - protein, 406 aa, Haemophilus influenzae
MRRTVITGFGIISSIGNNKEEVLASLKAGKSGIEVVPEFVEMNMRSHVAGTIKLNPSEHIDRKVFRFMGDAAAYAYLSMREAIEDAGLTEDQVSNDRTGLVIGAGTGSAHNQLVACDAVRGPRGVKAIGPYAVTKTMASSVSACLATPYKIRGVNYSMSSACATSAHCIGHAVELIQLGKQDVVFAGGAEELSWECATEFDAMGAVSTKYNETPEKASRAYDANRDGFVIAGGGAVVVVEELEHALARGAKIYAEIVGYGATSDGYDMVAPSGEGAERCMKQAMATVDTPIDYINVHGTSTPVGDVKELGAIKNVFGDKIPAISSTKSMTGHSLGAAGAHEAIYTLLMLDNDFIAPSINIETLDEAAEGCNIVTETKENAGLQTVMSNSFGFGGTNATLIFKRYNG

SEQ ID NO: 58535 - protein, 267 aa, Haemophilus influenzae
MTNQNVLLNISGVKFVLRIPNAVNLSLINREYEAFNNAQAYRAGLNVETPVLDAKSGVKLTRYLENSNTLSQIQLNEQSCLSQVVNNLYRLHNSEFVFRNVFSVFDEFRQYFSLLENKSAFYQADSRMDKLSAVFWQFEEINKEVILRPCHNDLVPENMLLQDDRLFFIDWEYSGLNDPLFDIATIIEEAHLSKEAADFLLETYCNQTNKYHKTEFQIAHKRLKIHRFCQNVLWFLWTKVKEEHGENFGDYALKRLDAAFKLLEELP

SEQ ID NO: 58536 - protein, 202 aa, Haemophilus influenzae
MNHLIIFAHPNSVRSFGRAIANRIEQISQENGVNVFFRDLYEMNFNPILSHEELQNANNGIIPEDIQQEHDFILQADLITLVYPLWWMGFPAILKGYLDRVLSHGFAYKTENGESVGLLKNKQMQQFITIGSNVDKYKEFGVDKSLNHCLINGLFNYCGIENVEFELFGDIHLIDDKARKAMIELAAQKTQAKLTALLKEKE

SEQ ID NO: 58537 - protein, 380 aa, Haemophilus influenzae
MDAFKQQLEQLSAKNQYRSIPDLVHQGRYITRENRKMLNMSSNDYLGLASNENLRQSFLQQYGGNFPSFTSSSSRLLTGNFPIYTDLEELVAQRFQRESALLFNSGYHANIGILPALTTTKSLILADKLVHASMIDGIRLSQCEFFRYRHNDYEHLKNLLEKNVGKFDRTFIVTESVFSMDGDVADLKQLVQLKKQFPNTYLYVDEAHAVGVYGQNGLGIAERANVIADIDLLVGTFGKALASMGAYVVCDQILKECLINQMRPLIFSTALPPFNVAWTHFIFERLPQLSKERTHLEQLSAFLRQEVEHRTQIMPSQTCIVPYILGENEATLAKAKDLQEQGYYCLPIRPPTVPKNTSRIRLSLTADMTADEVRQFAVHL

SEQ ID NO: 58538 - protein, 430 aa, Haemophilus influenzae
MVDEQSLLAFDTQHIWHPYSSVSSDMPLYAVERADGVMITLKDGRRLIDGMSSWWAALHGYNHPRLNAAAQNQLAKMSHIMFGGFTHDPAVELAQLLVQILPNGLDKIFFADSGSVAVEVAMKMAIQYQHAKGEVQRQKFATIRSGYHGDTWNAMSVCDPTTGMHHLFHHSLPVQYFLPQPNIPFNESWNDCAIEPLADLLKKKGNEIAALILEPVVQGAGGMYFYSPTYLVKAQALCKQYGILLIFDEIATGFGRTGKLFAAEHAGISPDIMCIGKALTGGYLTLSASITTTEIAQTICSGEAKCFMHGPTFMANPLACAIAAESIRLLLESPWQQNIQRIESSLKQQLSPLSEKDYVKEVRALGAIGVVEMKSAVNMKTLVPRFVEQGVWIRPFGKLVYVMPPFVIKDDELQKLTEGMILALTQEYEH

SEQ ID NO: 58539 - protein, 393 aa, Haemophilus influenzae
MNFPISLYIALRYWRAKSADRFGRLVTNLASLGIVLGVMALIIVLSVMNGLEGYQKQQVLSSIPHAIVSEEQPISTEKTLENLPHFVQKAVPINTTNVIYQTAKGVSAGQIIGIQSFSDDPLVESFDQTKFNEILPRGEFKLVIGDQLAQKLGVNIGDKIRLMITENSQYTPFGRVPMQRLFTVSDIYYGYGEASGYEAFANITDIGRLMRIQPQQAQGYRLFLNDPFQITELPQHFPTQKITDWRVQKGEFFQAVRMEKNMMGLLISLIIVVAISNIVTSLSLMVVDKQGEIAILQTQGLTKSQVRSVFIYQGLLVGFVGTLLGAILGVLATLNLTDIVSAVNPQGVFLPTELSFVQMIFVIGFSLLLSLLSTLYPAYRAAKVEPAAALRYE

SEQ ID NO: 58540 - protein, 284 aa, Haemophilus influenzae
MQNKIVKIGNIDVANDKPFVLFGGMNVLESRDMAMQVCEAYVKVTEKLGVPYVFKASFDKANRSSIHSYRGPGMEEGLKIFQELKDTFGVKIITDVHEIYQCQPVADVVDIIQLPAFLARQTDLVEAMAKTGAVINVKKPQFLSPSQMGNIVEKIEECGNDKIILCDRGTNFGYDNLIVDMLGFSVMKKASKGSPVIFDVTHSLQCRDPFGAASSGRRAQVTELARSGLAVGIAGLFLEAHPNPNQAKCDGPSALPLSALEGFVSQMKAIDDLVKSFPELDTSI

SEQ ID NO: 58541 - protein, 292 aa, Haemophilus influenzae
MNYKEWLAQAIADLAKKNPTENSKIDALVLLQHATGKSRTQILAFDDTEIDEKVRLKLTALLDRRLKGEPIAYILGEKEFWSLPLNVSKGTLIPRPDTEILVEKALQIALEKLEENPPHFRILDLGTGTGAIALALASELAPICQKRHIPLEIIGVDLMSDVVALAQSNAERNQLNVEFLQSRWFDNITGKFDLIVSNPPYIDAQDEHLHQGDVRFEPLSALVANDEGYADLRHIIELASSYLNSNGVLLLEHGWQQGEKVRSIFQENHWEMVETVRDYSDNERVTLGFWKK

SEQ ID NO: 58542 - protein, 361 aa, Haemophilus influenzae
MMKDSIIAKLESLKERYEELEALLGDVSVISDQDKFRAYSKEYSQLEEVVKCFNRWTQLNQNIEEAEILLDDPEMKEMAQMEIEESKAEIEEVEQQLQILLLPKDPNDEYNCYLEIRAGTGGDEAGIFAGDLFRMYSRYAESKRWRVEMLSANESEQGGYKEVIVKVTGEGVYGQLKFESGGHRVQRVPKTESQGRIHTSACTVAVMPELPESEMPEINPADLRIDTYRSSGAGGQHVNTTDSAVRITHIPTGIVVECQDERSQHKNKAKAMSVLASRIVQAEQERQAAEQTDMRRNLLGSGDRSDKIRTYNYPQGRVTDHRINLTIYRLDEVMNGKIDELIQPIITEYQADQLAALSEQN

SEQ ID NO: 58543 - protein, 478 aa, Haemophilus influenzae
MSRRLRRTKIVCTMGPSTDRDNNLEKIIAAGANVVRMNFSHGTPDDHIGRAERVRSIAKKLGKTVAILGDLQGPKIRVSTFKDGKIFLNVGDKFILDAELPKGEGTQESVGLDYKTLPQDVVPGDILLLDDGRVQLKVLSTDGAKVFTEVTVGGPLSNNKGINKLGGGLSADALTEKDKADIITAARIGVDFLAVSFPRSSADLNYARELAQQAGLNAKIVAKVERAETVANDEAMDDIILASDVIMVARGDLGVEIGDPELVGVQKKLIRRSRQLNRAVITATQMMESMISNPMPTRAEVMDVANAVLDGTDAVMLSAETAAGQYPSETVAAMASVCLGAEKMPSINVSRHRMDKEFETIEESVAMSAMYAANHMKGVAAIVTLSSTGRTPLLMSRISSGLPIFALSRNQETLNLCALYRGVTPIYHGEESRTEAGAKAAPQSLKEKGYLSTGDLVLVTQGGQGATQTNVCRTLIVE

SEQ ID NO: 58544 - protein, 504 aa, Haemophilus influenzae
MDFSTVFYFLFSPHFSLKSNRYLRYHRRHSSIEISPMASQPQIKSSDKKTAQVSIPPHSTEAEQAVLGGIMLSNQHWDGIAERVIADDFYTFQHRLIFTEMEHLMRNQSPIDLITLDQALRSRGVSDEVGGFAYLAELSNNTPNAINILAYADIVREKAILRELISVGNRIAENSYSPKGQDIKLILDEAEREVFAIAEKRTTSSEGPQNVINVLESTIEKIDILSKLENHSGVTGVTTGFTDLDKKTAGLQPSDLIIVAARPSMGKTTFAMNLCENAAMASEKPVLVFSLEMPAEQIMMRMIASLARVDQTKIRTGQNLDEIEWNKIASVVGMFKQKNNLFIDDSSGLTPTDVRSRARRVYRENGGLSMIMVDYLQLMRAPAFSDNRTLEIAEISRSLKALAKELQVPVVALSQLNRTLEQRGDKRPVNSDLRESGSIEQDADLIMFIYRDEVYNDNSEDKGVAEIIIGKQRNGPIGRVRLKFNGQFSRFDNLAEQREYRDDY

SEQ ID NO: 58545 - protein, 360 aa, Haemophilus influenzae
MNVKPATAKISSHALKQNLEIIKQKAPNSKIIAVVKANAYGHGVVFVASTLEQNVDCFGVARLEEALALRSNGITKPILLLEGFFNEQDLPILAVNNIETVVHNHEQLDALKRANLPSPIKVWLKIDTGMHRLGVALDEVDYFYQELKKLPQIQPHLGFVSHFSRADELESDYTQLQINRFLSVTKDKQGERTIAASGGILFWPKSHLECIRPGIIMYGISPTDTIGKEFGLTPVMNLTSSLIAVRHHKQGDPVGYGGIWTSPRDTKIGVVAMGYGDGYPRDVPEGTPVYLNGRLVPIVGRVSMDMLTVDLGADSQDLVGDEVILWGKELPIETVAKFTGILSYELITKLTPRVITEYVD

SEQ ID NO: 58546 - protein, 563 aa, Haemophilus influenzae
MRLKFQLFLMKGNTMKNINPTHTHAWKSLEAHKAELSNITIQDLFKQEKNRFDDYSLTFNNQILIDFSKNNINQTTLSHLRQLAQECALDSAKEAMFTGEKINRTENRAVLHTALRNRTNTPVLVDGKDVMPEVNAVLAKMKDFCQRIISGEWKGYTGKAITDVVNIGIGGSDLGPYMVTEALRPYKNHLNMHFVSNVDGTHIAETLKKVNPETTLFLVASKTFTTQETMTNAQSARDWLLKAAKDESAVAKHFAALSTNAKDVEKFGIDTNNMFEFWDWVGGRYSLWSAIGLSIALSIGFENFEALLNGAHEMDKHFLSTPIEQNIPTTLALVGLWNTNFLGAQTEAILPYDQYLHRFAAYFQQGNMESNGKYVDRDGNVIKNYQTGPIIWGEPGTNGQHAFYQLIHQGTTLIPCDFIAPAQRHNPLADHHNKLLSNFFAQTEALAFGKTKEEVEAEFVKAGKSLDDVKNIVPFKVFTGNKPTNSILVQKITPFTLGALIAMYEHKIFVQGVIFNIFSFDQWGVELGKQLANRILPELTDSEKVASHDSSTNGLINQFKAWR

SEQ ID NO: 58547 - protein, 577 aa, Haemophilus influenzae
MNIQSILSDKIKQAMILAGADQSCDALIRQSGKPQFGDYQANGIMAAAKKLGLNPREFAQKVLDNLQLSDIAEKLEIAGPGFINIFLNPTWLTTEISAALSHKNLGIQATNKQTVVIDYSSPNVAKEMHVGHLRSTIIGDAVARTLEFLGHNVIRANHVGDWGTQFGMLIAYLEKMQNEHASEMELQDLEAFYREAKKHYDEDEVFAEKARNYVVKLQSGDEYCRTMWKRLVDITMQQNQHNYARLNVTLTEKDVMGESLYNPMLPSIVKDLKKQGLAVENDGALVVYLDEFKNKDGDPMGVIVQKKDGGFLYTTTDIAAAKYRYETLKANRALVFSDTRQSQHMQQAWLITRKAGYVPDSFSLEHKNFGMMLGKDGKPFKTRTGGTVKLADLLDEAIERATVLINEKNTNLSNDEKEAVIEAVGIGAVKYADLSKNRTTDYVFDWDNMLSFEGNTAPYMQYAYTRIRSIFNKTDINSTALLAAPLTIKDDKERTLAIKLLQFEEAVQTVGKEGTPHVLCAYLYELAGIFSSFYEHCPILNAEDESIKLSRLKLALLTEKTLKQGLTLLGIKTVEKM

SEQ ID NO: 58548 - protein, 163 aa, Haemophilus influenzae
MRRILSVLLENESGALSRVVGLFSQRAFNIESLTVAPTDDPTLSRMTIEAVGDAQALEQIEKQLHKLVDVFKVVNLSEQEHIEREIVLAKVRAVGSSRDEIKRLADIFRGQIVDVTPKSYTIQLSGTNDKVDAFISALKEETTLLEIVRSGLISVSRGEKNIL

SEQ ID NO: 58549 - protein, 573 aa, Haemophilus influenzae
MKKLSGAEMVVQSLRDEGVEYVFGYPGGAVLDIYDAIHTLGGIEHILVRHEQAAVHMADGYARSTGKVGCVLVTSGPGATNAITGILTAYTDSVPMVIISGQVMSNLIGSDAFQECDMLGISRPVVKHSFIVKKAEDIPSTLKKAFYIASTGRPGPVVVDIPKDTVNPNFKYPYEYPEYVELRSYNPTVNGHKGQIKKALKALLVAKKPILFVGGGAITAECSEQLIQFAQRLNLPVTSSLMGLGAYPSTDKQFLGMLGMHGTLEANTAMHESDLILGIGVRFDDRTTNNLEKYCPNAKVIHIDIDPTSISKNVPVAIPIVGNAKNVLEEFLGLLNEEGLKSQTDLESWWQEINQWKAKKCLEFDRTSGVIKPQQVVEAVYRLTKGQAYVASDVGQHQMFAALHYPFDEPRHWINSGGAGTMGFGFPAALGVKLAHPEGTVVCVTGDGSIQMNIQELSTATQYGIPVVIICLNNHFLGMVKQWQDLIYSGRHSQTYMNSLPDFAKLAESYGHVGIKIATPDELESKLQEAFSIKNKLVFVDINVDESEHVYPMQIRGGAMNEMILSKPQEETN

SEQ ID NO: 58550 - protein, 278 aa, Haemophilus influenzae
MIEKKILLTDCPDDKGLIAKITNICYKHQLNILHNNEFVDFETKHFFMRTELEGIFNEATLLEDLKYSLPEETNCRLIGTQRKRIVILVTKEAHCLGDILMKNYYGALDVEIAAVIGNHDNLRELVERFNIPFHLVSHENLTRVEHDKLLAEKIDEYTPDYIVLAKYMRVLNPEFVARYPNRVINIHHSFLPAFIGAKPYQQAYKRGVKIIGATAHFINNELDQGPIIMQNVINVDHTYNAEAMMRAGRDVEKTVLSRALDLALHDRIFVYKNKTVVL

SEQ ID NO: 58551 - protein, 446 aa, Haemophilus influenzae
MSNFNFDFAENDFGPLAAKMRPTSLEQYFGQSHLIGEGKPLRKAIQAGHIYSMIFWGPPGTGKTTLAEIIAQRINAEVERISAVTSGIKEIREAIDRAKQNRLADRKTILFVDEVHRFNKSQQDAFLPHIEDGTVIFIGATTENPSFELNNALLSRARVYVLKSLTTAEIEQVLQQAVEDPKRGLGKERLILEENLLQVLAEYVNGDARLALNCLELMVDMADETENGKKIDRTLLKEVLGERQARFDKQGDRFYDLISALHKSVRGSAPDAALYWYARILTAGGDPLYVARRLLAIASEDVGNADPRAMQVALAAWDCFSRVGAYEGERAIAQAIIYLSVAPKSNAVYTAFNTAKQQAKDLPDYDVPPHLRNAPTNLMKELGYGTEYRYAHDEPNAYAAGENYFPPELKDTQYYFPTNRGMEIQIKEKLERLREQDKSAVKKRYK

SEQ ID NO: 58552 - protein, 529 aa, Haemophilus influenzae
MEAVQLDKNQEPNYKGYSGSLIHPAFQQQTTKREKPSTPLPSLDLLLKYPPNEQRITPDEIMETSQRIEQQLRNFNVKASVKDVLVGPVVTRYELELQPGVKASKVTSIDTDLARALMFRSIRVAEVIPGKPYIGIETPNLHRQMVPLRDVLDSNEFRDSKATLPIALGKDISGKPVIVDLAKMPHLLVAGSTGSGKSVGVNTMILSLLYRVQPEDVKFIMIDPKVVELSVYNDIPHLLTPVVTDMKKAANALRWCVDEMERRYQLLSALRVRNIEGFNEKIDEYEAMGMPVPNPIWRLGDTMDAMPPALKKLSYIVVIVDEFADLMMVAGKQIEELIARLAQKARAIGIHLILATQRPSVDVITGLIKANIPSRIAFTVASKIDSRTILDQGGAEALLGRGDMLYSGQGSSDLIRVHGAYMSDDEVINIADDWRARGKPDYIDGILESADDEESSEKGISSGGELDPLFDEVMDFVINTGTTSVSSIQRKFSVGFNRAARIMDQMEEQGIVSPMQNGKREILSHRPEY

SEQ ID NO: 58553 - protein, 475 aa, Haemophilus influenzae
MGILTHGKLSTANTENKMAKAPKTAYVCNDCGAEFSRWQGQCSACKAWNTITEVRLISTAKSKNDRFSGYAGETQAKIQTLSEISLQETPRFSSGFSELDRVLGGGIVPGSAILIGGHPGAGKSTLLLQVMCGLAKNMTALYVTGEESLQQVAMRASRLGLPSDQLKMLSETSVEQICNLADQLKPQIIVVDSIQVMHLADIQSSPGSVAQVRECASFLTRYAKTRQVAIIMVGHVTKDGTLAGPKVLEHAIDCSLLLEGEADSRYRTLRSHKNRFGAVNELGVFGMTEQGLREVKNPSAIFLSRGDEITSGSSVMVLWEGTRPLLVEIQALVDHSMLANPRRVAVGLEQNRLALLLAVLHRHGGLQMADQDVFVNVVGGVKVSETSADLALLLALISSFRNRPLPQDLVIFGEVGLAGEIRPVPSGQERISEAAKHGFKRAIVPFGNKPKSAVENMQVFTVKKLTDALAVLDNL

SEQ ID NO: 58554 - protein, 352 aa, Haemophilus influenzae
MENIMLQEIELKLAISPQIGIELPQYLAKFTILEHQNLFLGNTYYDYPDHFLAKQKMGLRIRQEDQELTLTLKTNGKVVSGLHSRPEYNLPLIEKETPTNAQLRGLYPFEQLPSSTLQPIFSTDFNRTFWLVEFQQSKIEVAFDQGKIIAGEYEQPISEIEFELKSGNVQDLFDFVETLPFERDIYFSSASKAKRGYLLGSKQFLTDWLNKWRDFLKEEREESAVDFCAKFNAVLKMEQKLLEETLSFSPTLFSQDFMKTVERVGAFFNLYHYYDENGKILEAMATEKQKETRLPALLESNQKIFVEIRDLIRFHSETKDNEKTIEKLTALLKSRVYFERMIKLMELSYDLG

SEQ ID NO: 58555 - protein, 317 aa, Haemophilus influenzae
MPAFIKKELIMKLQGAGLGYRRNLAEDFLQLPSNNAIQFIEVAPENWSKMGGMARYQFDQAAERFPLAVHGLSLSLGGQAPLDRELLRNTKALINQYNSSFFSEHLSYCECEGHLYDLLPMPFTEEAVKHVAQRIRDVQDFLGLQISLENTSYYLHSPTSTMNEVEFLNAIAQEADCGIHLDVNNIYVNGVNHGLLDPYIFLDQVDVKRVNYIHIAGHDEEHSAAQVVENSANESFNKVKGAYRHLPELLIDTHGEAVKGTVWDLLEYAYQRLPTIPPTLLERDFNFPPFAELYAEVEHIAQLQQKYAHTEVMSYAA

SEQ ID NO: 58556 - protein, 420 aa, Haemophilus influenzae
MEIISQYGSWLVWITAVFGFFMAFGIGANDVSNSMGTSVGSGTITAKQAIIIALIFESAGAYLAGGEVTQTIKSGVIEPIQFVDTPDILALGMLSTLFASGAWLFIATKMGWPVSGTHTIIGAIIGFACITIGPSSVDWSKIGSIVGSWFVTPVIAGILAYAIFASTQKLIFDTEQPLKNAQKYGPYYMGITVFVLCIVTMKKGLKHVGLNLSNSETLIISLAISLIGMFFFHFYFKSKIFTQSANKGTFGAVEKVFSILMLLTACAMAFAHGSNDVANAIGPLSAVVSIVNEGGKIVSGGALTWWILPLGALGIAVGLITMGQKVMATVGSGITDLTPSRGFAAQFATAMTVVVASGTGLPISTTQTLVGAILGIGFARGIAALNLTVIRNIISSWIVTLPAGAFFAIIIFYVLRTIFN

SEQ ID NO: 58557 - protein, 416 aa, Haemophilus influenzae
MKVYLVGGAVRDQLLGLPVKDRDWIVVGADPATLLSLGYQQVGKDFPVFLNPKTKEEYALARTERKSSAGYTGFICDFSPTITLEQDLIRRDLTINAMAQSEDGEIIDPYGGKQDLENRILRHISPAFSEDPLRVLRVARFAARYHSLGFKIASETLALMAELAQSGELQHLTAERIWLETEKALNEKNPEIYFETLHKTGALSVLFSEIDALYGVPNPVKHHPEVDSFIHTMLVLKQAVNLTENNPILNKSAVRFAAICHDLGKALTPQNILPHHYGHEQAGIKPTRSLCKRLKVPSYFQELAELTCEFHTHIHKAFELRAETVITLFNRFDVWRKPQRFQEFLQVCLADTRGRTGFETKDYPQIDYINQLLHAANEVDVQQVIADGFEKQAIKNELTKRRILAVKQTKTNYPTN

SEQ ID NO: 58558 - protein, 315 aa, Haemophilus influenzae
MPDIKLFAGNATPELAKRISERLYISLGDATVARFSDGEIQVQINENVRGADVFIIQSTCAPTNDNLMELVVMVDALRRASAGRITAVIPYFGYARQDRRVRSARVPITAKVVADLLSIVGIDRVLTCDLHAEQIQGFFDVPVDNVFGSPVLIHDILKKSDLKNPIVVSPDIGGVVRARAVAKLLNDTDMAIIDKRRPRANVAQVMHIIGDVADRDCILVDDMIDTGGTLCKAAEALKERGAKRVFAYATHAVFSGAAAKNLASDAIDEVVVTDTIPLSEEMKAIGKVRVLTLSSMLAEAIRRISNEESISAMFN

SEQ ID NO: 58559 - protein, 401 aa, Haemophilus influenzae
  MISC_FEATURE (132)..(132): X=any amino acid
MTDINTVLAELKRGTDEILSEADLIEKLKENRPLKVKLGADPTAPDIHLGHTVVLNKLRQFQQLGHEVYFLIGDFTGMVGDPSGKNATRPPLSREDVLRNAETYKEQIYKILDPQKTKIVFNSEWLSKLGTXGMIRLASNYTVARMLERDDFKKRFGNNQPIAIHEFIYPLLQGYDSVALDADVELGGTDQKFNLLVGRELQKSAGKKPQVAITLPLLVGLDGEKKMSKSLGNYIGVTEAPSDMFGKVMSISDELMWDWYNLLSFRPLNEIAQLKSEVENGKNPRDVKILLAKELIARFHNEEAANAAEQEFINRFQKGAMPDEMPEFTFSGEMGLATLLKEAGLVPSTSEAIRSAQQGGVKINGEKVDNVKDNAPKGTNVYQVGKRKFARVRLNKVDTVK

SEQ ID NO: 58560 - protein, 204 aa, Haemophilus influenzae
MFTGIVQGTAPIHSIKEKANFRTQVVKLLPEMRKDLEIGASIANNGVCLTVTEINGDLVSFDLMQETLKITNLGTVKVGDYVNIERAMQMGTEIGGHLLSGHIYCTAKISDIIASENNRQIWFELPSADVMKYILTKGFVAVDGISLTIGEVRDTQFCVNLIPETLQRTLMGRRKVGDIVNIEIDPQTQAIVDTVENYLQSKNF

SEQ ID NO: 58561 - protein, 869 aa, Haemophilus influenzae
MLAKAKYRKDYKQPDFTVTDIYLDFQLDPKHTVVTAITKFQRLNNEATSLCLDGHSFQFSSIKFNGEPFSDYQQDGESLTLDLKDKSADEFEIEIVTFLVPAENTSLQGLYQSGEGICTQCEAEGFRQITYMLDRPDVLARYITKITADKTKYPFLLSNGNRIASGELEDGRHWVEWNDPFPKPSYLFALVAGDFDLLQDKFITKSGREVALELYVDRGNLNRATWAMESLKKAMKWDEDRFNLEYDLDIYMIVAVDFFNMGAMENKGLNIFNSKFVLANPQTATDDDYLAIESVIAHEYFHNWTGNRVTCRDWFQLSLKEGLTVFRDQEFSSDTGSRAVNRINNVKFLRTVQFAEDASPMSHPIRPEKVIEMNNFYTVTVYEKGAEVIRMLHTLLGEQGFQKGMQLYIAENDGKAATCEDFVSAMERANNLDLNQFRRWYSQSGTPELLISDAYDEKTHTYRLTVSQSTPPTADQMEKVNLHIPLKVALYDANGTKQMLQHNGELLSDVLNVTEKDQVFEFHGIYGRPIPALLCDFSAPVKLDYDYKTEQLLGLLKFADNQFIRWDAAQMLFAQELRRNVVRFQQGEALEISPEILTALSYVLNHYEKDIELATLILTLPKEMEFAESFKTIDPDGISAARAFMQAQIAESLKDDFLRVYTHIRLNDYQVTQQDIALRVMRNLCLTYLAYTNLGNNLVQKHYNNANNMTDTLAALSVATKAALLCRDVLLADFEQKWQHDGLVMDKWFALQATRPDDNVLEIIQLLMDHPSFNFNNPNRLRSLVGSFANHNLKAFHNVSGSGYRFLTDVLIRLNESNPQVAARLIEPLIRFSRFDAQRQTLMKRALERLSVVENLSKDLFEKIEKALQ

SEQ ID NO: 58562 - protein, 238 aa, Haemophilus influenzae
MKLLISNQYGAIVMALVPFIYGMLLANPVWAHIFLLLGWFSLYLMTYPFLNLFKGKNLELYKKWSVIYFAAAVIFAIPALIYNWQVLYFMFAMLPFVAVNIYFTKKKDERNLWNDLAGILIFALAGMGSYYFSDRTFDEKILWVAIYPTLFFIGTTLYVKSMMRERKNPRYFWASVIFHLLCALIFVVSQQFILALAFVPGLVRAVYLPTKKLSVMQVGLIEFAITAVFFILLLVATL

SEQ ID NO: 58563 - protein, 134 aa, Haemophilus influenzae
MENWTNEIWVAIGIAFIVGLFIGYIIVRLTKGSVKHQAKTEAELKTVKTQLDTQKAQIEKHFAESAELFKTLINDYQKLYRHYATSSNNLLGEKDQKGLFTQQLITATDKSQNEQPRDYSEGASGLFKENKEEN

SEQ ID NO: 58564 - protein, 95 aa, Haemophilus influenzae
MAFKFNAEVRTAQGKGASRRLRHNGQIPAIVYGGSEEPVSIILNHDELNNAQAHESFYSEVITLVVEGKEVAVKVQAMQRHPFKPKLVHIDFKRA

SEQ ID NO: 58565 - protein, 432 aa, Haemophilus influenzae
MGKSVVILGAQWGDEGKGKIVDLLTDRVKYVVRYQGGHNAGHTLIINGEKTVLRLIPSGMLHPNVTCLIGNGVVVSPEALMKEMGELESRGIKVRERLLISEACPLILPYHVAMDHAREAALGKKAIGTTGRGIGPAYEDKVARRGLRVGDLFNKEAFAEKLKNILEYYNFQLVNYYKVEPVDYQKTLDDVMAIADVITGMVADITTILDTARKNGEHILFEGAQGTMLDIDHGTYPYVTSSNTTAGGVATGSGFGPRNLDYVLGIIKAYCTRVGGGPFTTELFDDVGAEIARKGNEFGAVTGRPRRCGWFDAVAIRRAIQLNSISGFCMTKLDVLDGFDEVKICVAYKMPNGEIVEYAPLAAKDWEGVEPIYETLPGWKENTFRITDVNKLPQNCINYIKRIEEVTGVPIDILSTGPDRVETMILREPFAA

SEQ ID NO: 58566 - protein, 303 aa, Haemophilus influenzae
MIFFGVLLARLKYGKTNAVLFTTYIGSSMSNLQAIIEAAFEKRAEITPKTVDAETRAAIEEVIEGLDSGKYRVAEKIAGEWVTHQWLKKAVLLSFRINDNQIIDGAETKYYDKVALKFADYTEERFTEEGFRVVPSATVRKGAYISKNCVLMPSYVNIGAYVGEGTMVDTWATVGSCAQIGKNVHLSGGVGIGGVLEPLQANPTIIGDNCFIGARSEVVEGVIVEDGCVISMGVFIGQSTKIYDRETGEIHYGRVPAGSVVVSGSLPSKCGKYSLYCAVIVKKVDAKTLGKVGINELLRSIEE

SEQ ID NO: 58567 - protein, 336 aa, Haemophilus influenzae
MATIKDVAKMAGVSTTTVSHVINKTRFVAKDTEEAVLSAIKQLNYSPSAVARSLKVNTTKSIGMIVTTSEAPYFAEIIHSVEEHCYRQGYSLFCVTHKMDPEKVKNHLEMLAKKRVDGLLVMCSEYTQDSLDLLSSFSTIPMVVMDWGPNANTDVIDDHSFDGGYLATKHLIECGHKKIGIICGELNKTTARTRYEGFEKAMEEAKLTINPSWVLEGAFEPEDGYECMNRLLTQEKLPTALFCCNDVMALGAISALTEKGLRVPEDMSIIGYDDIHASRFYAPPLTTIHQSKLRLGRQAINILLERITHKDEGVQQYSRIDITPELIIRKSVKSIL

SEQ ID NO: 58568 - protein, 269 aa, Haemophilus influenzae
MPLLQVEDLTKTFKGHASLFGRNQFNAVDKVSFTLERKQTLAIIGNNGSGKSTLVKMIAGIIPPTSGRILFNDRELQYQDAQSRAKHIRMVFQDANSAFNPRLNIGQILDEPLSLATDWTETQRNEKIFETLSLVGLYPDYTNLNIKHLSISQKQRVALARALILEPEIIIIDDAIGNLDASVRIQLLNLTLDLQQRLGISYIYVGQDLGVIKHIADTIIVMDEGKMIEYGSPQNLFTDPQTDVTRRLVESYFGKILDETAWVKDKNAH

SEQ ID NO: 58569 - protein, 269 aa, Haemophilus influenzae
MKIALGIEYNGQNYYGWQRQEKVRSVQEELEKALSHIANEKIEIFCAGRTDSGVSGTGQVVHFETNAVRPEKAWAFGTNAHLPDDIAVSWAKQVDDEFHARFSATARRYRYILYCNKLRSAILAGGITHCHLDLDAEKMHQAGQCLLGEQDFSSFRAAQCQSHTPWRNVHHLNVSRIGKYIIVDIQANAFVHHMVRNIVGSLIEVGTGNQPIEWMQWLLEQKNRQLAAPTAKPDGLYLVDVIYPQKFDIPKRPIGPLFLEDGLLNRPLK

SEQ ID NO: 58570 - protein, 265 aa, Haemophilus influenzae
MKLTLLDKPYKTWKLVIISRMVMRGNCLYNAQNFENERIICMGMIITVDGPSGAGKGTLCYALAEKLGYALLDSGAIYRVTALAALQRKTDLTNETDLAELARHLDIQFIPQNGEVNIFLAGMDVSRLIRTQEVADAASKVAVFQKVRSALLQLQQDFAKNDGLIADGRDMGTVVFPNAQVKLFLDASAEERAKRRYKQLQNKGINGNFAQILAEIKERDFRDRNREVAPLKPADDAFYYSLNSSIISCAFFTISSEPTNSGTRS

SEQ ID NO: 58571 - protein, 291 aa, Haemophilus influenzae
MAENRYELNKNLAQMLKGGVIMDVQNPEQARIAEAAGAAAVMALERIPADIRAVGGVSRMSDPKMIKEIQGAVSIPVMAKVRIGHFVEAQILEAIEIDYIDESEVLSPADNRFHVDKKEFQVPFVCGAKDLGEALRRIAEGASMIRTKGEPGTGDIVQAVRHMRMMSQEIRRIQNLREDELYVAAKDLQVPVELVQYVHKHGKLPVVNFAAGGIATPADAALMMQLGAEGVFVGSGIFKSGDPIKRASAIVKAVTNYRNPQILAQISEDLGEAMVGINENEIQILMAERGK

SEQ ID NO: 58572 - protein, 175 aa, Haemophilus influenzae
MLEKLGIESVELRNLKNFQQHYSDLSGLILPGGESTAIGKLLRELYMLEPIKQAISSGFPVFGTCAGLILLAKEITSQKESHFGTMDIVVERNAYGRQLGSFYTEADCKGVGKIPMTFIRGPIISSVGKKVNILATVNNKIVAAQEKNMLVTSFHPELTNNLSLHKYFIDICKVA

SEQ ID NO: 58573 - protein, 283 aa, Haemophilus influenzae
MTDLTGILYIVATPIGNLQDITQRALETFAQVDLIAAEDTRHSGLLLSHYGIKKPFFALHDHNEQEKAHILVEKLKQGSNIALISDAGTPLISDPGFHLVRQCREAGIRVVPLPGACAAITALCASGIASDRFCFEGFLPAKSKARKDKLENIAEEDRTLIFYESTHRILDTLEDMQAVLGEERYIVLAREMTKTWETITGNTIKNLREWLLEDPNRTKGEMVLIVEGKPKSDNNDEISPQAVKALELIAEELPLKKAAAIVAELYGYKKNALYQFGLAHLEK

SEQ ID NO: 58574 - protein, 781 aa, Haemophilus influenzae
MDRFHKNTISCVLNPVLNNNKKAHTMNKSLMVTKRDGTQEQINLDKIHRVITWAAEGLDNVSVSQVELRSHIQFYEGIRTSDIHETIIKAAADLISKDSPDYQYLAARLAIFHLRKKAYGHFDPPRLYDHVKKLVRMEKYDQALLDDYTREEWDTMDGFIDHWRDMTFSYAAVKQLEGKYLVQNRVTGEIYESAQFLYLLVSASLFSKYPKETRLDYVKRFYDATSTFKISLPTPIMAGVRTPTRQFSSCVLIECDDSLDSINATASAIVKYVSQRAGIGINAGAIRALGSEIRGGEAFHTGCIPFYKYFQTAVKSCSQGGVRGGAATLYYPIWHLEAENLLVLKNNRGVEDNRVRHMDYGVQLNKLMYQRLIKGSEITLFSPSDVPGLYEAFFADQDKFEELYVKYEQDPTIRKRTVKAVEIFSLLMQERASTGRIYIQNVDHCNTHSPFDPQVAPVRQSNLCLEIALPTKPLQHINDENGEIALCTLSAFNLGKIENLDELEELADLAVRSLDALLDYQDYPVVAAKRSSLARRSLGIGVINYAYYLAKNGVRYSDGSANDLTHRTFEAIQYYLLKASMNLAKEQGACEYFNETTYAKGILPIDTYKKDLDSLTQEPLHYDWESLRKDIQEFGLRNSTLTALMPSETSSQISNATNGIEPPRGHVSIKASKDGILKQVVPEYENLMDNYELLWDIPSNDGYLHLVGIMQKFVDQAISANTNYDPKRFEDGKVPMKVLLKDLLTAYKYGLKTLYYQNTRDGAEDVQEDLDDGCAGGACKI

SEQ ID NO: 58575 - protein, 376 aa, Haemophilus influenzae
MAYTTFSQNKNDQLKEPMFFGQNVNVARYDQQKYETFEKLIEKQLSFFWRPEEVDVSQDRIDYAALPEHEKHIFISNLKYQTLLDSIQGRSPNVALLPLVSIPELETWIETWTFSETIHSRSYTHIIRNIVNDPSIVFDDIVTNEEIIKRAQDISSYYDDLIRDSQLYGLYGEGTYTVDGKECVVTLRSLKKQLYLCLMSVNALEAIRFYVSFACSFAFAERRLMEGNAKIIKFIARDEALHLTGTQHILNIMAAGQDDPEMAEIAEECKQEAYDLFVAAAEQEKAWADYLFKDGSMIGLNRDILVQYVEYITNIRMQAVGLPLPFQTRSNPIPWINAWLVSDNVQVAPQEVEVSSYLVGQIDSKVDTNDFDDFSL

SEQ ID NO: 58576 - protein, 950 aa, Haemophilus influenzae
MERKYCFKYHNKEVIMQQNKAFDDWLASTALGGANQSYIEELYESYLSDPQSVEESWRKTFDSLPKTTALEQPHTPVRDYFRRLARENHNEAVTVIDPAAGAKLVKVLQFINAYRFRGHLEANLDPLNYYRWKVSFVPELDYRHHGFTEQDLNETFNINHYVYKRDTIKLGELAQMLKETYCGSIGLEFMHVQDMEQKMWLQSKMESLLDKPLFTSEERVNFLRELTAADGLERYLGAKFPGAKRFSLEGSDAFIPLMKEIIRHSSRQGVNDVVMGMAHRGRLNMLVNVLGKKPENLFDEFAGKHSSERTGDVKYHQGFSSDFAVDDKRVHLTLAFNPSHLEIVSPVVIGSVRSRQTRMNDTEHSKVLAITVHGDSAVAGQGVVQETLNMSNTRGYSVGGTIRIVINNQIGFTTSNPNDTRSTEYCTDIAKMIQAPIIHVNGDDPEAVAFAARMAVEYRNLFKRDIFIDLISYRRHGHNEADEPLATQPMMYSIIKKHPTPRKVYADRLVSEGVMTEEQVTEMANDYRDALDNGDRVVSEWREMDTAKMDWLQYLNYDWTAPYESKFSQERFLTLAKRVCEYPESLRAHPRVEKIYNDRKAMYQGEKLLDWGMAETMAYATLLDEGVNVRLSGEDAGRGTFFHRHAVVHNQNDGTGYVPLTHLHANQGRFEVWDSVLSEESVLAFEYGYATTDPKTLTIWEAQFGDFANGAQIVIDQFISSGEQKWGRMCGLVMLLPHGYEGQGPEHSSARLERYLQLCAEQNMQVCVPSTPAQVYHMLRRQSLRKMRRPLIAISPKSLLRHPLAVSSLDELINGTFQTVIGEIDELDPKDVKRVVMCSGKVYYDLLEQRRANNQKDVAIIRIEQLYPFPHEDVKKALEPYAHVTDYVWCQEEPLNQGAWYCSKHNFESAIPESVKLKYAGRPASASPAVGYMSLHTKQQKQLVEDALSF

SEQ ID NO: 58577 - protein, 337 aa, Haemophilus influenzae
MQSIPIKNVGESRLVDPFQRQYYYLRLSITDQCNFRCTYCLPDGYQPEANKPSFLTLKEITHLAQAFAEMGTEKIRLTGGEPTLRKDFISIAESITNIDGIRQLAVTTNGYRMAKDVADWKKAGITSINVSVDSLDPKMFHQITGINKFDDVMRGIDRAFEVGYNKVKVNSVLMKNLNDKEFEQFLAWVKDRPIQMRFIELMQTGEMDSFFDKFHLSGQVLADKLLKNGWTLQHKSHTDGPAKVFTHPDYAGEIGLIMPYEKNFCASCNRLRVSAKGKLHLCLFGEEGIELRDLLQSHEQQGILQARIFAALQGKREHHYLHIGDTGVRNHLASIGG

SEQ ID NO: 58578 - protein, 223 aa, Haemophilus influenzae
MSFAQQKLSELAVSIPGATKIFREYDLDFCCGGSVLLEVAAQQKNLNLAEIEKRLTDLQQSKAENNDKDWTSASYAEMIDHIITRFHNRHREQLPELITLAEKVENIHGDRDDCPIGVVAQLEKIYAELSQHLMKEEQILFPMIKMGNYAMASMPIRVMEMEHDEAGQDVEVIKSLTNNCTPPADACFSWKALYSGINEFIDDLMHHIHLENNILFPRVLNEK

SEQ ID NO: 58579 - protein, 718 aa, Haemophilus influenzae
MNIRLNAKVISTIPVFIAVNIAAVGIWFFDISSQSMPLILGIIAGGLVDLDNRLTGRLKNVFFTLIAFSISSFIVQLHIGKPIQYIVLMTVLTFIFTMIGAVGQRYSTIAFGSLVVALYTTLTYIPEVNVWFINPVMILCGTLLYSVVTLIVYLFFPNRPVQESVAKAFCALGEYLDTKSCFFDPDEVAEIEKKHLNFAMKNANVVTAFNIVRTALFYRIRGQHRHPLTQRMLRYYFAAQDIHERANSTHFDYQQITEKLKNTDLIFRIQRLLELQAQSCKEITASLRENKPYHFNKRVERALLGTLHSFDLYRAQHLNDQDELIDIQTLLDNLQSINWQLRQLAQDTTVTEQLAQIHTEQITGLKNISAVIFSHFTFESPLFRHAVRLSIVVFLCCAIVEFFQFNLGYWILLTTVFVCQPNYSATKVRLRQRIIGTILGVVVGSLLPYLNPTLELKLGLVVLTSTLFFFFRSNNYSFSTFFITLQVLLSFDVMGFDTAAALMPRLLDTLLGAAISWFAVSYLWPDWKYLQLDKVSHQALRSDAVYLLHIISQLQFGKSDDLKYRIARRNAHQYAAALSTTLSNMNNEPVKYKAYLQKGFDLLKLNYSLLSYISALGAYRDRMKNLQQTAQFLSGFYPVAKKIIYTLEHIEEIPEAIFNQQQESIETHLKELEKQEMTAEERAVFSLPYQQLNLITQLLPQFYGYFKKEINCQSAGAL

SEQ ID NO: 58580 - protein, 351 aa, Haemophilus influenzae
MLQINVKKQLGQLALQANIQVPDQGVTAIFGLSGSGKTSLINLVSGLIQPDEGFICLNDRTLVDMESQESLPTHLRKIGYVFQDARLFPHYTVKGNLRYGMKNVSQDDFNYIVDLLGITHLLKRYPLTLSGGEKQRVAIGRALLTDPDILLMDEPLSALDVPRKRELMQYLERLSKEINIPILYVTHSLDELLRLADRVVLMENGIVKAYDRVEKIWNSPIFAPWKGESEQSSVLALPVHLHNPPYKMTALSLGEQVLWIHQVPANVGERVRVCIYSSDVSITLQKPEQTSIRNILRGKITQIEIQDSRVDLAVLVEGHKIWASISKWAQNELRFAIGQDVYVQIKAVSVM

SEQ ID NO: 58581 - protein, 254 aa, Haemophilus influenzae
MKKLTKISTALLIAGLGFSFAASAKVTVFAAASMTDALQQVAKDYAKQNPKNEVVFSFASSSTLAKQVEEGAPADIFVSASNKWMKYLSEKDLTVKETEKVLVGNDLVLIAPAKSAVNSVDIAKGEWINALKDSYLSVGDPAHVPAGQYAEEALTKLNLWDKVKDRLARGKDVRGALALVERAEAPYGIVYSTDAKVSQQVKTVAVFPADSHKPVVYPVSIVKGHDNADSRDFLKYLESDAAKKVLVGYGFSAK

SEQ ID NO: 58582 - protein, 294 aa, Haemophilus influenzae
MLSIIVPSYNRKAEVPALLESLTQQTSSNFEVIIVDDCSKERVVVEQSYSFPVTVIRNETNQGAAESRNVGARTSKGDWLLFLDDDDCFMPEKCEKVLQVIEQNPNINFIYHPAKCEMVNEGFTYVTQPIEPQEISTERILLANKIGGMPMIAIKKEMFLKIGGLSTALRSLEDYDFLLKLLQEPSFTPYKINEPLTYCTFHTKRSSVSTDTTNTQKAIDYIREHYVKTVEQARNFDINASYILAYPHIMNLSRKAAKYYFDIFKKTKSIKQFIITLVILISPKLAINLKRLGK

SEQ ID NO: 58583 - protein, 353 aa, Haemophilus influenzae
MKKIGFFIMNIGSAGGTERVSINVANALAKQGYDVSFISIGGNKPFFQVDEKINIYAMNKLPYSLKKDYFSITKKLRELVKELQLDTLIVVDGAIMLFSALALVNLNIKHILWEHYSFNFTGNRLVRTLGKYLAVTTCDKIVTLTEAEKTLWQEKFKTNNIISIANPNTLLPKNKLAKLENKTILSVGHLFSYKGFDYLLKVWQVLAKKYPDWNLKIVGSGEEEENLKNLAKALDIEDSVNFIPRTNDVSFYYESSSIYCLPSQTEGLPLVVIEAMAFGLPIVAFNCSPGVKQLVEHKENGFLCEQNNIEEMVKGLDLLINNPELYLQMSDKSRLMSEDYGIEKIIEEWKGIL

SEQ ID NO: 58584 - protein, 491 aa, Haemophilus influenzae
MKYQAKNTALSQATDCIVLGVYENNKFSKSFNEIDQLTQGYLNDLVKSGELTGKLAQTVLLRDLQGLSAKRLLIVGCGKKGELTERQYKQIIQAVLKTLKETNTREVISYLTEIELKDRDLYWNIRFAIETIEHTNYQFDHFKSQKAETSVLESFIFNTDCAQAQQAISHANAISSGIKAARDIANMPPNICNPAYLAEQAKNLAENSTALSLKVVDEEEMAKLGMNAYLAVSKGSENRAYMSVLTFNNAPDKNAKPIVLVGKGLTFDAGGISLKPAADMDEMKYDMCGAASVFGTMKTIAQLNLPLNVIGVLAGCENLPDGNAYRPGDILTTMNGLTVEVLNTDAEGRLVLCDTLTYVERFEPELVIDVATLTGACVVALGQHNSGLVSTDNNLANALLQAATETTDKAWRLPLSEEYQEQLKSPFADLANIGGRWGGAITAGAFLSNFTKKYRWAHLDIAGTAWLQGANKGATGRPVSLLTQFLINQVK

SEQ ID NO: 58585 - protein, 575 aa, Haemophilus influenzae
MISGILASPGIAFGKALVLKEEKIVLDTQKITDDQIDAEVARFYEGRNAAVEQLNSIRERALISLGEEKAAIFEGHLMILEDEELEEEILDYLRSNKVNAGVAASKILDQQVTMLSEIDDEYLKERAGDIRDIANRLVKNILGMYIVDLGDIQEESILVAYDLTPSETAQLNLEKVLGVVTDIGGRTSHTSIMARSLELPAIVGTNKVTKLVNTGDYLILDAINNQVYINPTASQIDELKALEAKISEEKAELAKLKDLPAITLDGHKVDVVANIGTIRDCDGAERNGAEGIGLYRTEFLFMDREQLPTEEEQFIAYKQVVEAMNGRLTVIRTMDIGGDKELSYLDLPKEMNPFLGWRAIRIALDRREILNAQLRAVLRASAFGKLAVMFPMIISVEEIRELKAVIETLKAELREEGRLFDNNIQVGVMVETPSAAVNAKFLAKEVDFFSIGTNDLTQYTLAVDRGNEFISHLYNPMHPSVLGLIKQVIDASHAEGKWTGMCGELAGDERATLLLLGMGLDEFSMSAISVPRIKKLIRNVNFQDAKVLADTALQKPTAAEIDQLIEEFLLENSLN

SEQ ID NO: 58586 - protein, 85 aa, Haemophilus influenzae
MYSKDVEIIASNGLHTRPAAQFVKEAKAFSSEITVTSGGKSASAKSLFKLQTLALTQGTILTISADGEDEQQAVEHLVALIPTLE

SEQ ID NO: 58587 - protein, 355 aa, Haemophilus influenzae
MLSIFVTFLGAFLTLIVMRPLANWIGLVDKPNYRKRHQGTIPLIGGASLFVGNLCYYLMEWDQLRLPYLYLFSIFVLLAIGILDDRFDISPFLRAGIQAILAILMIDLGNIYLDHLGQILGPFQLTLGSIGLIITVFATIAIINAFNMIDGIDGLLGGLSCVSFAAIGILMYRDGQMDMAHWSFALIVSILPYLMLNLGIPFGPKYKVFMGDAGSTLIGFTIIWILLLSTQGKGHPMNPVTALWIIAIPLIDMVAIIYRRVRKGKSPFRPDRLHVHHLMVRAGLTSRQAFLLITFVSAVCATIGILGEVYYVNEWAMFVGFFILFFLYVYSITHAWRITRWVRRMKRRAKRLKKA

SEQ ID NO: 58588 - protein, 261 aa, Haemophilus influenzae
MEINREESDLTKYVKITNDTDLTASGTAQNNDAKIENSRLSIAIGHNALVKDSDTKYTHPKDKTPDNPAASIAVGANANVTESPYSIALGKNAKVLNSEYSLAAGTNAKVEKSEKAIVQGVEANATNSNISIVTDFAAKAENSKDVIVLGSKTESIRSNSTVALGNRTSVTDSDSAFVGGDHASATTSAGALVLGNGAKAKTVSLTADNGVLKAGDKTIFTEDNFKMLLKQLYTFEDGLKTKEKNGKTVVSLDKETIKQMA

SEQ ID NO: 58589 - protein, 863 aa, Haemophilus influenzae
MLFSPTLSSLLTPSAVKIERENLKQFELENFSCYSIFELIENRCDFYDALLIQLWQEIGLSEQQGISLIAVGGYGRREMFPLSDLDFLILVEQTPSHEIEEKITQFIQFLWDCGFEVGNSVRTLEQCELEGKQDITIATNLLEARFLTGNRPHFDVLNELVKRADFWSKEDFFNAKVQEQIERYQRYHNTAYNLEPDIKFSPGGLRDLHLLYWVALRHSGALTLEAILQSGFIYPQEYQQLQESRAFLFKVRFALHLILKRYDNRLLFDRQIKVSELLGFRGEGNPAVEKMMKCFFQALHRISLISNLLIQHYRENVLSSNQDTVIDQLDDDFQLINQSLCLRNSFVFQEKPARILDLFFYLTQYEHVNIHSDTLRQLQISLEQLSQKLCEIPAAREKFLRLFNQSNAIKRAFMPMHQYGVLTAYLPQWQAIEGLMQFDLFHIYTVDEHTLRVMLKLESFLPKGSAQEHPIAHRIFSQLSDRTLLYIAALFHDIAKGRGGDHAELGAEDVADFAQLHGLDRREIDTLAWLVQSHLLMSITAQRRDIHDPEVVMNFAEAMQNQVRLDYLTCLTVADICATNGNLWNSWKRSLFASLYEFTEQQFSQGMKELLDYSEKSAENRKLAQQILTQDYSDITSISIEKLWTRCPEDYFVRNTPKQIAWHTSLLVDFVEALLVKISNRFSLGGTEVFIYCQDQPHLFNKVVSTIGAKKFSIHDAQIITTQDGYVFDSFIITELNGELVEFDRRRELEQALTVALQSEKLPALSIVPNRQLQHFTVQTDVRFLQENKKEHTEMELVALDKAGLLAQVSQIFTELNLNLLNAKITTVGEKAEDFFILTNQFGQALAREERERLNSVIIQQIR

SEQ ID NO: 58590 - protein, 188 aa, Haemophilus influenzae
MICTPKVGLNNQLTKVQFFMTKYNFLFKQQVIEFYLQNDKNSSLTRRHFQLAETTLERWINQFNHSGINGLALLGKKRNYSPEFKLNVIQAVKNGKFSAEAACLHFGIANSGVVSQWLQAFEKQGINGLIPKPKGRPTMKLQYPKMPPKPKTREEELELENLRLRAENAILKKLQELNQQKMQKKPLS

SEQ ID NO: 58591 - protein, 216 aa, Haemophilus influenzae
MTFKLRETIKINHKKVQRIMQWLGLKGKCKTQKYRSYQGEVGHIADNLLQRDFTATQPNEKWTTDITEFKCAEGKLYLSPIKDLFNNEIIAYDLARSPNFEQITRMMKQAVARLEGAKPILHSDQGWQYQMIGYQNILRENGIQQSMSRKGNCLYNSAMESFFGRLKTECYYGKRFETFEQLEKTIHEYIHYYNHERIQGKLKGLSPVNYRTQSLN

SEQ ID NO: 58592 - protein, 781 aa, Haemophilus influenzae
MTSQHSAKKSSKNTPKNNRTFKGFLLKFSFTALVLTIFYGGYLDWQIRSKMDGQIWHLPAEVYSRLESVKIADNLAFDEVIQILLDNEYRQTTMVAAPGDFKLEDDSIVVLRRAFPFPDKAEPQRVLRLRFSHNKLSRIEDLVTVKTVDEFRLAPKLIAMLQSDNEDRLAIPLQNYPRLLIDTLILTEDRRFYEHNGINPVGILRALIANIRAGQTVQGGSTLTQQLVKNLFLSRERTITRKANEALMSLVLDWRYDKNRILETYLNEIYLGQNGDTQIHGFELASQFYFGRSIREISLDQIALLVGMVKGPSLYNPWRNPQNALERRNIVLRLMLEHKMIGDELYQLLSQRPLGVQKKGQISRKYPAFIQTLQADLRRKLGEHKISSLLGARIFSTMDLKQQAQAENAVGNTVSQLQLKMKNPHLEGAMIITDYRTGEIRAVVGGLQTQYAGFNRALMAKRQIGSLVKPSIYLTALSNPEQFRLNTPINNQPITINVKGSPPWQPRNYDKKYSDSVMLMDALARSLNIPTVNIGMKVGLSKVIDTQKAMGWDNVEIPKVPAMLLGSYTISPYDVTKLYQTLANQGGRIALTTVDSIADRQGNLIFQHDKSAKQVVPQEAAFQTLFAMQQTVERGTARSLQKDYADLHLAGKTGTTNESRDTWFVGIDGKNISTVWLGRDDNGETKLTGASGALQIYKDYLNRTNIEKLAITPPTTVKWVGINQYGDWDCESYRTIPIWLNNGQNFCGETSSPSLTPTTETETPPQESLWDVLDNPNPPAQ

SEQ ID NO: 58593 - protein, 257 aa, Haemophilus influenzae
MKYTLIKLGELLMKKIDLNADIAEGFPFDESLLQLLSSANVACGLHAGGAKEMQSAVKFAKENKVRIGAHPSFPDRENFGRTAMALSSQELIAHLRYQLGALKAICDGEGAVISYVKPHGALYNQAAKDEKIARLIAQTVYQFDPNLKLMGLAGSLMLRIAEEEKLQTISEVFADRHYMPDGSLVPRSQPNAMVESDKEAIQQVLQMVTKGQVNAIDGSLVPVKAESICLHGDNQHSLQFAKRIVEELEKNHIKITA

SEQ ID NO: 58594 - protein, 659 aa, Haemophilus influenzae
MFQDNPLLAQLKQQIHDSKEQVEGVVKSTDKAYGFLECDKKTYFIAPPSMKKVMHGDKIKATIEKQGDKEQAEPEALIEPMLTRFIAKVRFNKDKKLQVLVDHPSINQPIGAQQAKSVKEELQEGDWVVANLKTHPLRDDRFFYATINQLICRADDELAPWWVTLARHEQSRYPVRGAEPYEMLDQKTRENLTALHFVTIDSESTMDMDDALYIEPIAQNSTQTGWKLVVAIADPTAYIALDSQIEQEAKQRCFTNYLPGFNIPMLPRELSDELCSLIANETRPALVCYIETDLTGNITAKPHFVSAYVQSKAKLAYNKVSDYLEQADNAWQPEMPETAQQIHWLHQFTKARIQWRKTHSLFFKEKPDYAFVLAENGKVQEIKAEYRRIANQIVEEAMIIANICAAQFLHEQAKTGIFNTHSGFDKKFLENAHNFLMANLANEQNQTELAERYSVENLATLNGYCQMRHDIEPIESDYLELRLRRYLTFAEFKSELAPHFGLGLEGYATWTSPIRKYSDMVNHRLIKAVLAKQPYEKPQNDVLARLQEARRQNRLVERDIADWLYCRYLADKVASNAEFEAEVQDVMRAGLRVQLLENGASLFIPAATLHNNKEEIQLNPDELALYIKGERTYKIGDMVKVKLTEVKEATRSIVGEILQ

SEQ ID NO: 58595 - protein, 295 aa, Haemophilus influenzae
MRLVFLEILVGFVQRQIFAYTTQVFYANNIGKIMGFLTGKRILVTGLASNRSIAYGIAKSMKEQGAELAFTYLNDKLQPRVEEFAKEFGSDIVLPLDVATDESIQNCFAELSKRWDKFDGFIHAIAFAPGDQLDGDYVNAATREGYRIAHDISAYSFVAMAQAARPYLNPNAALLTLSYLGAERAIPNYNVMCLAKASLEAATRVMAADLGKEGIRVNAISAGPIRTLAASGIKNFKKMLSTFEKTAALRRTVTIEDVGNSAAFLCSDLASGITGEIVHVDAGFSITAMGELGEE

SEQ ID NO: 58596 - protein, 527 aa, Haemophilus influenzae
MSYPLEEVNKRRTFAIISHPDAGKTTITEKVLLYGNAIQTAGSVKGKGSAAHAKSDWMEMEKQRGISITTSVMQFPYNDCLVNLLDTPGHEDFSEDTYRTLTAVDSCLMVIDSAKGVEERTIKLMEVTRLRDTPIITFMNKLDRDIRDPIELLDEVENVLKIRCAPITWPIGCGKLFKGVYHLAKDETYLYQSGQGSTIQAVRVVKGLNNPELDVAVGDDLAQQLREELELVQGASNEFEQDAFIKGELTPVFFGTALGNFGVDHFLDGLTQWAPKPQSRQADTRTVESAEEKFSGFVFKIQANMDPKHRDRVAFMRVVSGKYEKGMKLKHVRIGKDVVISDALTFMAGDRAHAEEAYAGDIIGLHNHGTIQIGDTFTQGETLKFTGIPNFAPELFRRIRLKDPLKQKQLLKGLVQLSEEGAVQVFRPLLNNDLIVGAVGVLQFDVVVSRLKTEYNVEAIYENVNVATARWVECADEKKFEEFKRKNEQNLALDGGDNLTYIAPTMVNLNLAQERYPDVVFYKTREH

SEQ ID NO: 58597 - protein, 381 aa, Haemophilus influenzae
MIISSASDYREAARRRVPPFMFHYADGGSYAEQTLARNVSDLENIALRQRVLKDMSELDTSIELFGEKLSMPTILAPVGACGMYARRGEVQAAQAADNKGVPFTLSTVSICPIEEVAPAIKRPMWFQLYVLKDRGFMKNALERAKAAGCSTLVFTVDMPTPGARYRDMHSGMSGPYKEIRRVLQGFTHPFWAYDVGIKGKPHTLGNVSTYMGRQIGLDDYIGWLTENFDPSISWKDLEWIREFWEGPMVIKGILDPEDAKDAVRFGADGIVVSNHGGRQLDGVLSSARALPPIADAVKGDIKIIADSGIRNGLDIVRMLALGADATMLGRAFVYALGAEGRQGVENMLDIFKKEMHVAMTLTSNRTIADIKPEALVDLSKL

SEQ ID NO: 58598 - protein, 269 aa, Haemophilus influenzae
MDKKEKRPTVLFFDSGVGGFSVYREAKKLLPNWHYLYCFDNAGFPYSERKEESIIHRTLAACQLINQRYPLDAMVIACNTASTVVLPPLRAAFDIPIIGTVPAIKPASEITKTKHIGLLATKGTVKRHYIDELIDKFAQDCIVERLGTTKLVEIAEQKIRGHSVDLISLKDELSSWAGMADLDTLVLGCTHFPLIKDEIQLCLPQVKYFMEPSAAIAKRIKYLLDDKNLQAQNEKYNQMFCTAHFPEESQFKKALHLWGFESLEVIKID

SEQ ID NO: 58599 - protein, 677 aa, Haemophilus influenzae
MIARDAHEGQFRSSGEPYITHPVAVASIIAQLHLDHEAVMAALLHDVIEDTPYTEEQLKEEFGASVAEIVDGVSKLDKLKFRTRQEAQVENFRKMILAMTRDIRVVLIKLADRTHNMRTLGSLRPDKRRRIAKETLEIYCPLAHRLGIEHIKNELEDLSFQAMHPHRYEVLKKLVDVARSNRQDLIERISQEIKVRLENSGIFARVWGREKHLYKIYQKMRIKDQEFHSIMDIYAFRVIVKNVDDCYRVLGQMHNLYKPRPGRVKDYIAVPKANGYQSLQTSMIGPKGVPVEVHIHTEDMEQVAEMGITAHWVYKENGKNDSTTAQIRVQRWLQSLVEIQQSVGNSFEFIENVKSEFFPKEIYVFTPKGRIVELPMGATAVDFAYAVHSDVGNTCVGVTVEHKPYPLSKALESGQTVNIITDPNAHPEVAWLNFVVTARAKTRIRHYLKQRCEEDAVKLGEVELNVALQPHNLGDFSIQQIRTVLDALALSSLDELLREIGLGNQSASMIAHQFVGVPLESANTKNLEFESKILTIAPMQVGKTQFAQCCHPILGDPIVGCCTEKNTVVVHHQHCASLKNACRQSLAKWDNVQSAVNFEAELQIEILNEQNALLSLMTAISASESSLQNIWTEELENNLLLVILQVCVKDIKHLANIVHRIKGITGVVNVKRNINEL

SEQ ID NO: 58600 - protein, 138 aa, Helicobacter pylori
MATRTQARGAVVELLYAFESGNEEIKKIASSMLEEKKIKNNQLAFALSLFNGVLEKINEIDALIEPHLKDWDFKRLGSMEKAILRLGAYEIGFTPTQNPIIINECIELGKLYAEPNTPKFLNAILDSLSKKLTQKPLN

SEQ ID NO: 58601 - protein, 156 aa, Helicobacter pylori
MQIIEGKLQLQGNERVAILTSRFNHIITDRLQEGAMDCFKRHGGDEDLLDIVLVPGAYELPFILDKLLESEKYDGVCVLGAIIRGGTPHFDYVSAEATKGIAHAMLKYSMPVSFGVLTTDNIEQAIERAGSKAGNKGFEAMSTLIELLSLCQTLKG

SEQ ID NO: 58602 - protein, 276 aa, Helicobacter pylori
MKTSKTKTPKSVLIAGPCVIESLENLRSIATKLQPLANNERLDFYFKASFDKANRTSLESYRGPGLEKGLEMLQTIKEEFGYKILTDVHESYQASVAAKVADILQIPAFLCRQTDLIVEVSQTNAIVNIKKGQFMNPKDMQYSVLKALKTRDKSIQSPTYETALKNGVWLCERGSSFGYGNLVVDMRSLKIMREFAPVIFDATHSVQMPGGANGKSSGDSSFAPILARAAAAVGIDGLFAETHVDPKNALSDGANMLKPDELEQLVTDMLKIQNLF

SEQ ID NO: 58603 - protein, 546 aa, Helicobacter pylori
MAKEIKFSDSARNLLFEGVRQLHDAVKVTMGPRGRNVLIQKSYGAPSITKDGVSVAKEIELSCPVANMGAQLVKEVASKTADAAGDGTTTATVLAYSIFKEGLRNITAGANPIEVKRGMDKAAEAIINELKKASKKVGGKEEITQVATISANSDHNIGKLIADAMEKVGKDGVITVEEAKGIEDELDVVEGMQFDRGYLSPYFVTNAEKMTAQLDNAYILLTDKKISSMKDILPLLEKTMKEGKPLLIIAEDIEGEALTTLVVNKLRGVLNIAAVKAPGFGDRRKEMLKDIAILTGGQVISEELGLSLENAEVEFLGKAGRIVIDKDNTTIVDGKGHSHDVKDRVAQIKTQIASTTSDYDKEKLQERLAKLSGGVAVIKVGAASEVEMKEKKDRVDDALSATKAAVEEGIVIGGGAALIRAAQKVHLNLHDDEKVGYEIIMRAIKAPLAQIAINAGYDGGVVVNEVEKHEGHFGFNASNGKYVDMFKEGIIDPLKVERIALQNAVSVSSLLLTTEATVHEIKEEKAAPAMPDMGGMGGMGGMGGMM

SEQ ID NO: 58604 - protein, 559 aa, Helicobacter pylori
MILKSSIDRLLQTIDIVEVISSYVNLRKSGSSYMACCPFHEERSASFSVNQIKGFYHCFGCGASGDSIKFVMAFEKLSFVEALEKLAHRFNIVLEYDKGVYYDHKEDYHLLEMVSSLYQEELFNAPFFLNYLQKRGLSLESIKAFKLGLCTNRIDYGIENKGLNKDKLIELGVLGKSDNDQKTYLRFLDRIMFPIYSPSAQVVGFGGRTLKEKAAKYINSPQSKLFDKSSLLYGYHLAKEHIYKQKQVIVTEGYLDVILLHQAGFKNAIATLGTALTPSHLPLLKKGDPEILLSYDGDKAGRNAAYKASLMLAKEQRRGGVILFENNLDPADMIANGQIETLKNWLSHPMAFIEFVLRRMADSYLLDDPLEKDKALKEMLGFLKNFSLLLQSEYKPLIATLLQAPLHVLGIRERVSFQPFYPKTEKPNRPQRFAHVSSAPSLEFLEKLVIRYLLEDRSLLDLAVGYIHSGVFLHKKQEFDALCQEKLDDPKLVALLLDANLPLKKGGFEKELRLLILRYFERQLKEIPKSSLPFSEKMICLKKARQAIMKLKQGELVAI

SEQ ID NO: 58605 - protein, 426 aa, Helicobacter pylori
MSVTLVNNENNERYEFETIESTRGPKAVDFSKLFETTGFFSYDPGYSSTAGCQSKISYVNGKKGELYYRGHRIEDLVAKYKYVDVCKLLLTGELPKNQDESLEFELELRHRSFVHESLLNMFSAFPSNAHPMAKLSSGVSILSTLYSTHQNMHTEEDYQTMARRIVAKIPTLAAICYRNEVGAPIIYPDIARSYVENILFMLRGYPYSRLKHTTQGEVEITPLEVEAFDKILTLHADHSQNASSTTVRNVASTGVHPYAAISAGISALWGHLHGGANEKVLLQLEEIGDVKNVDKYIARVKDKNDNFKLMGFGHRVYKSYDPRAKILKGLKDELHQKGVKMDERLSEIAAKVEEIALKDEYFIERNLYPNVDFYSGTILRALKIPVRFFTPVFVIGRTVGWCAQLLEHVKSPQARITRPRQVYVGD

SEQ ID NO: 58606 - protein, 425 aa, Helicobacter pylori
MAYNPKILQKPKEGEEITIKDNKLHVPNHPIIPFIEGDGIGSDITPAMIKVVDSAVQKAYKGEKKIAWYEVFVGEKCYQKFKDYKELSPEEQWLLPDTIEAINHYKVSIKGPLTTPIGEGFRSLNVALRQKMDLYVCLRPVRWYGSPSPVKEPQKVDMVIFRENSEDIYAGIEWQEGSAEAKKLIHFLQNELKVKKIRFPESSGIGVKPISKEGTERLVRKAIEYAIDNDKPSVTFVHKGNIMKYTEGAFMKWGYALAQKEFNAQVIDKGPWCSLKNPKNGKEIIIKDMIADAFLQQILLRPSEYSVIATMNLNGDYISDALAAMVGGIGIAPGANLNDTVGMFEATHGTAPKYAGLDKVNPGSIILSAEMMLRHMGWVEAADLIVSAMEKAIKSKKVTYDFARLMDGAKEVKCSEFASVMIENM

SEQ ID NO: 58607 - protein, 97 aa, Helicobacter pylori
MDFSQLGGLLDGMKKEFSQLEEKNKDTIHTSKSGGGMVSVSFNGLGELVDLQIDDSLLEDKEAMQIYLMSALNDGYKAVEENRKNLAFNMLGNFAKL

SEQ ID NO: 58608 - protein, 1185 aa, Helicobacter pylori
MQKIIDDSLELAKKLQDSISNHLSDQEKAFHSKMQKLLNNPENKVMLIELMDRSFRCLDNKARFEMIEHVLDKYKSREIFSPFEKVLLMGFLSFGKMLPDMSVPFFVNKIRSDTKAMVLDQEESQLKERILKRKNEKIILNVNFIGEEVLGEEEANARFEKYSQALKSNYIQYISIKITTIFSQINILDFEYSKKEIVKRLDALYALALEEEKKQGMPKFINLDMEEFRDLELTVESFMESIAKFDLNAGIVLQAYIPDSYEYLKKLHAFSKERVLKGLKPIKIRFVKGANMESEETIASVKDWALPTFSNKQDTDSNYNKMLDFVLEGDNYKYIHIGAASHNIFEIAYVYTRIHAINDPVVLEHFSFEMLEGMSLQASQELKEMHKLILYAPVCDEAHFNNAIAYLVRRLDENTSSDNFMKAFFNLKVGTSEWKDQEQRFLNSLKGIATLDNATHRTQDRNAKQSGHTTYPNHSFKNESDTDFILKANREWAKKVREKMRNAPILELYPEMDGRFEDPNLTPLEVFDRIHHKKIASVHLADKEAILKALEVAKSDKSRFSQKSFTEIHALMSQTAQLFRERRGDLIGISALEVGKTFAETDAEVSEAIDFLEFYPYSLRVLQEQNTKTQFTPKGVGVVIAPWNFPVGISVGTIAAPLATGNRVIYKPSSLSSVTGYKLCECFWDAGVPRDALIYLPSKGSDISEHLLRDESIQFAILTGGEDTAYKMLKANPTLALSAETGGKNATIVSKMADRDQAIKNVIHSAFSNSGQKCSATSLLVLEKEVYEDENFKKTLIDATLSLSVGDPFDFKNKIGALADKPNEKVIKAIDELKSYENYEIPVSFVNDNPYLMKPSIKYGTKKGDFTHQTELFTPILSVMEAKDLDEAIEIANSTGYGLTSALESLDEREWEYYLERIEAGNIYINKPTTGAIVLRQPFGGVKKSAVGFGRKVGIFNYITQFVNICQEEEDENALKNPLSEALENLTQKGYDEHTHELKRAIFMAKSYAYHYKHEFSQTKDYVKIRGEDNLFSYTKVKSVGYRITEKDTLSDMLGVALACLISQIPLTLSIENERTNKDLTFFLECLKALQASAPIVYESLQKFSEKLNTFNRVRYLKSDLDLLHEQASALGMVLATAKPCLNGRFELLYYHLERSVSISYHRYGNLGSRVLRQPTCHKSCCAEK

SEQ ID NO: 58609 - protein, 199 aa, Helicobacter pylori
MVKIGVCGPVGSGKTALIEALTRHMSKDYDMAVITNDIYTKEDAEFMCKNSVMPRERIIGVETGGCPHTAIREDASMNLEAVEEMHGRFPNLELLLIESGGDNLSATFNPELADFTIFVIDVAEGDKIPRKGGPGITRSDLLVINKIDLAPYVGADLKVMERDSKKMRGEKPFIFTNIRAKEGLDDVIAWIKRNALLED

SEQ ID NO: 58610 - protein, 254 aa, Helicobacter pylori
MDKGKSVKSTEKSVGMPPKTPKTDNNAHVDNEFLILQVNDAVFPIGSYTHSFGLETYIQQKKVTNKESALEYLKANLSSQFLYTEMLSLKLTYESALQQDLKKILGVEEVIMLSTSPMELRLANQKLGNRFIKTLQAMNELDMGEFFNAYAQKTKDPTHATSYGVFAASLGIELKKALRHYLYAQTSNMVINCVKSVPLSQNDGQKILLSLQSPFNQLIEKTLELDESHLCTASVQNDIKAMQHESLYSRLYMS

SEQ ID NO: 58611 - protein, 569 aa, Helicobacter pylori
MKKISRKEYVSMYGPTTGDKVRLGDTDLIAEVEHDYTIYGEELKFGGGKTLREGMSQSNNPSKEELDLIITNALIVDYTGIYKADIGIKDGKIAGIGKGGNKDMQDGVKNNLSVGPATEALAGEGLIVTAGGIDTHIHFISPQQIPTAFASGVTTMIGGGTGPADGTNATTITPGRRNLKWMLRAAEEYSMNLGFLAKGNASNDASLADQIEAGAIGFKIHEDWGTTPSAINHALDVADKYDVQVAIHTDTLNEAGCVEDTMAAIAGRTMHTFHTEGAGGGHAPDIIKVAGEHNILPASTNPTIPFTVNTEAEHMDMLMVCHHLDKSIKEDVQFADSRIRPQTIAAEDTLHDMGIFSITSSDSQAMGRVGEVITRTWQTADKNKKEFGRLKEEKGDNDNFRIKRYLSKYTINPAIAHGISEYVGSVEVGKVADLVLWSPAFFGVKPNMIIKGGFIALSQMGDANASIPTPQPVYYREMFAHHGKAKYDANITFVSQAAYDKGIKEELGLERQVLPVKNCRNITKKDMQFNDTTAHIEVNPETYHVFVDGKEVTSKPANKVSLAQLFSIF

SEQ ID NO: 58612 - protein, 445 aa, Helicobacter pylori
MKIFGTDGVRGKAGVKLTPMFVMRLGIAAGLYFKKHSQTNKILIGKDTRKSGYMVENALVSALTSIGYNVIQIGPMPTPAIAFLTEDMRCDAGIMISASHNPFEDNGIKFFNSYGYKLKEEEEKAIEEIFHDEELLHSSYKVGESVGSAKRIDDVIGRYIAHLKHSFPKHLNLQSLRIVLDTANGAAYKVAPVVFSELGADVLVINDEPNGCNINDQCGALHPNQLSQEVKKYRADLGFAFDGDADRLVVVDNLGNIVHGDKLLGVLGVYQKSKNALSSQAVVATNMSNLALKEYLKSQDLELKHCAIGDKFVSECMQLNKANFGGEQSGHIIFSDYAKTGDGLVCALQVSALVLESKQVSSVALNPFELYPQSLVNLNVQKKPPLESLKGYSALLKELDKLEIRHLIRYSGTENKLRILLEAKDEKLLESKMQELKEFFEGHLC

SEQ ID NO: 58613 - protein, 89 aa, Helicobacter pylori
MANHKSAEKRIRQTIKRTERNRFYKTKIKNIIKAVREAVAVNDVAKAQERLKIANKELHKFVSKGILKKNTASRKVSRLNASVKKIALA

SEQ ID NO: 58614 - protein, 352 aa, Helicobacter pylori
MSILAEKLSSILKRYDELTALLSSAEVVSDIKKLTELSKEQSSIEEISIASKEYLSVLENIKENKELLEDKELSELAKEELKILEIQKSDLETAIKQLLIPKDPNDDKNIYLELRAGTGGDEAGIFVGDLFKAYCRYADLKKWKVEIVSSSENSVGGYKEIIALIKGKGVYSRLKFEAGTHRVQRVPETESQGRIHTSAITVAIMPEVDDVEVSINPSDLKIEVFRAGGHGGQCVNTTDSAVRITHLPTNISVSMQDEKSQHKNKDKALKILKARLYEKQIEEQQLANAKDRKEQVGSGDRSERIRTYNYPQNRLSEHRINLTLYSLEEIMLSGNLDEVINPLIAHAQSQFE

SEQ ID NO: 58615 - protein, 595 aa, Helicobacter pylori
MKKSFKKLGFVSLAASGVLLGSMNATDLETYAALQKSSHVFGNYAEKDKDSKLTSDSPTQQQDQKVAQNTASNDSQEATTLENTASTDNTTATTDETYTKSTDTTVAGAAQKVETDNTAVQSAEQTLKTDVAKVQADASAKDFDETTFQADQAAEQTAEKALQQAESKLNTDQQTLNTALQDQTKTPTPSTPPTKEEPKHTASSGTPPAPESPPAKKDETSGTPSASGSSVASQLTKDTTMVNNLKSVSVSAMNTTLSGVETMSQQTATIGNLLNSSTDLSSVIPNAQGLNSAFSTLESAQNTLKGYLNSSSATIGQLTNGSNAVVGALDKAINQVDMALADLSAADTQKTQAVTLATASDSPTTTTDAINFLNALKSNLMAQKDAFLNVHKNIQTAVAQAQETYTPSVINTNNYGQMYGVDAMAGYKWFFGKTKRFGFRSYGYYSYNHANLSFVGSQLGIMEGASQVNNFTYGVGFDVLYNFYESKEGYNTAGLFLGFGLGGDSFIVQGESYLKSQMHICNNTAGCSASMNTSYFQMPVEFGFRSNFSKHSGIEVGFKLPLFTNQFYKERGVDGSVDVFYKRNFSIYFNYMINF

SEQ ID NO: 58616 - protein, 129 aa, Helicobacter pylori
MRKIYATGKRKTAIAKVWLTPGKGELSINEQSLNQWLGGHEAIKMKVMQPLLLTKQEQSVDIKAVVFGGGYSAQAEALRHGISKALNAYDIAFRAILKPKGLLTRDSRVVERKKYGKRKARRSPQFSKR

SEQ ID NO: 58617 - protein, 141 aa, Helicobacter pylori
MTKTAKVNDIVRDWVVLDAKDKVFGRLITEIAVLLRGKHRPFYTPNVDCGDFVVVINANKVKFSGMKLEDKEYFTHSGYFGSTKSKTLQEMLEKAPEKLYHLAVRGMLPKTKLGKAMIKKLKVYRDDKHPHTAQTSKKDAK

SEQ ID NO: 58618 - protein, 450 aa, Helicobacter pylori
MSMEFDAVIIGGGVSGCATFYTLSEYSSLKRVAIVEKCSKLAQISSSAKANSQTIHDGSIETNYTPEKAKKVRLSAYKTRQYALNKGLQNEVIFETQKMAIGVGDEECEFMKKRYESFKEIFVGLEEFDKQKIKELEPNVILGANGIDRHENIIGHGYRKDWSTMNFAKLSENFVEEALKLKPNNQVFLNFKVKKIEKRNDTYAVISEDAEEVYAKFVLVNAGSYALPLAQSMGYGLDLGCLPVAGSFYFVPDLLRGKVYTVQNPKLPFAAVHGDPDAVIKGKTRIGPTALTMPKLERNKCWLKGISLELLKMDLNKDVFKIAFDLMSDKEIRNYVFKNMVFELPIIGKRKFLKDAQKIIPSLSLEDLEYAHGFGEVRPQVLDRTKRKLELGEKKICTHKGITFNMTPSPGATSCLQNALVDSQEIAAYLGESFELERFYKDLSPEELEN

SEQ ID NO: 58619 - protein, 671 aa, Helicobacter pylori
MKKKANEEKAQKRAKTEAKAEATQENKTKENNKAKESKIKESKIKEAKAKEPIPVKKLSFNEALEELFANSLSDCVSYESIIQISAKVPTLAQIKKIKELCQKYQKKLVSSSEYAKKLNAIDKIKKTEEKQKVLDEELEDGYDFLKEKDFLEWSRSDSPVRMYLREMGDIKLLSKDEEIELSKQIRLGEDIILDAICSVPYLIDFIYAYKDALINRERRVKELFRSFDDDDENSVSDSKKDEDNEEDEENEERKKVVSEKDKKRVEKVQESFKALDKAKKEWLKALEAPIDEREDELVRSLTLAYKRQTLKDRLYDLEPTSKLINELVKTMETTLKSGDGFEKELKRLEYKLPLFNDTLIANHKKILANITNMTKEDIIAQVPEATMVSVYMDLKKLFLTKEASEEGFDLAPNKLKEILEQIKRGKLISDRAKNKMAKSNLRLVVSIAKRFTSRGLPFLDLIQEGNIGLMKAVDKFEHEKGFKFSTYATWWIKQAISRAIADQARTIRIPIHMIDTINRINKVMRKHIQENGKEPDLEVVAEEVGLSLDKVKNVIKVTKEPISLETPVGNDDDGKFGDFVEDKNIVSSIDHIMREDLKAQIESVLDQLNEREKAVIRMRFGLLDDESDRTLEEIGKELNVTRERVRQIESSAIKKLRSPQYGRILRNYLRI

SEQ ID NO: 58620 - protein, 231 aa, Helicobacter pylori
MVQKIGILGAMREEITPILELFGVDFEEIPLGGNVFHKGVYHNKEIIVAYSKIGKVHSTLTTTSMILAFGVQKVLFSGVAGSLVKDLKINDLLVAIQLVQHDVDLSAFDHPLGFIPESAIFIETSESLNALAKEVANEQHIVLKEGVIASGDQFVHSKERKEFLVSEFKASAVEMEGASVAFVCQKFGVPCCVLRSISDNADEEANMSFDAFLEKSAQTSAKFLKSMVDEL

SEQ ID NO: 58621 - protein, 309 aa, Helicobacter pylori
MQYALLFPGQGSQCVGMGKSFYESHTLAKELFERASNALKVDMKKTLFEENELLKESAYTQPAIYLVSYIAYQLLNKQVNGGLKPVFALGHSLGEVSAVSLSGALDFEKALKLTHQRGKMMQEACANKDASMMVVLGVSEESLLSLCQRTKNVWCANFNGGMQVVLAGIKDDLKALEPTLKEMGAKRVVFLEMSVASHCPFLEPMTFKFQELLEKSLKDKFHFEIISNATNEAYHNKAKAVELLSLQLTQPVRYQDCVKSNNDRVDVFFELGCGSVLKGLNKRLSNKPTISVGDNKGLDEAIEFLEEYV

SEQ ID NO: 58622 - protein, 486 aa, Helicobacter pylori [sequence omitted]

SEQ ID NO: 58623 - protein, 620 aa, Helicobacter pylori
MGKVIGIDLGTTNSAMAVYEGNEAKIIANKEGKNTTPSIVAFTDKGEILVGESAKRQAVTNPEKTIYSIKRIMGLMFNEDKAKEAEKRLPYKIVDRNGACAIEISGKVYTPQEISAKILMKLKEDAESYLGESVTEAVITVPAYFNDSQRKATKEAGTIAGLNVLRIINEPTSAALAYGLDKKESEKIMVYDLGGGTFDVTVLETGDNVVEVLATGGDAFLGGDDFDNRVIDFLASEFKSETGIEIKNDVMALQRLKEAAENAKKELSSAMETEINLPFITADATGPKHLVKKLTRAKFESLTEDLMKETISKIESVIKDAGLTKNEISEVVMVGGSTRIPKVQERVKAFINKDLNKSVNPDEVVAVGASIQGGVLKGDVKDVLLLDVTPLSLGIETLGGVMTKVIDRGTTIPAKKSQVFSTAEDNQPAVSIMVLQGERELARDNKSLGKFDLQGIAPAPRGVPQIEVTFDIDANGILTVSAQDKNTGKSQEIKISGSSGLSDSEIEKMVKDAELHKEEDAKKKEVIEARNHADSLAHQTQKSLDEHKTNLNENDANEIQNAINALKDCVKNDNATKAELEDKTKLLAQAAQKLGEAMANKNNAEQPKKKDDDVIDAEVE

SEQ ID NO: 58624 - protein, 736 aa, Helicobacter pylori
MKHLIIVESPAKAKTIKNFLDKNYEVIASKGHVRDLSKFALGIKIDETGFTPNYVVDKDHKELVKQIIELSKKASITYIATDEDREGEAIGYHVACLIGGKLESYPRIVFHEITQNAILNALKTPRKIDMSKVNAQQARRFLDRIVGFKLSSLIASKITKGLSAGRVQSAALKLVIDKEREIKAFKPLTYFTLDAYFESHLEAQLISYKGNKLKAQELIDEKKAQEIKNELEKESYAISSIVKKSKKSPTPPPFMTSTLQQSASSLLGFSPTKTMSIAQKLYEGVATPQGVMGVITYMRTDSLNIAKEALEEARNKILKDYGKDYLPPKAKVYSSKNKNAQEAHEAIRPTSIILEPNALKDYLKPEELRLYTLIYKRFLASQMQDALFESQSVVVACEKGEFKASGRKLLFDGYYKILGNDDKDKLLPNLKENDPIKLEKLESNAHVTEPPARYSEASLIKVLESLGIGRPSTYAPTISLLQNRDYIKVEKKQISALESAFKVIEILEKHFEEIVDSKFSASLEEELDNIAQNKADYQQVLKDFYYPFMDKIEAGKKNIISQKVHEKTGQSCPKCGGELVKKNSRYGEFIACNNYPKCKYVKQTESANDEADQELCEKCGGEMVQKFSRNGAFLACNNYPECKNTKSLKNTPNAKETIEGVKCPECGGDIALKRSKKGSFYGCNNYPKCNFLSNHKPINKRCEKCHYLMSERIYRKKKAHECIKCKERVFLEEDNG

SEQ ID NO: 58625 - protein, 812 aa, Helicobacter pylori
MRYIKFFKELNNKNVNLVGGKNASIGEMFQELVPIGIKVPDGFAITSEAYWYLLEQGGAKQKIIELLENVDATEIDVLKIRSKQIRELIFGTPFPSDLRDEIFQAYEILSQQYHMKEADVAVRSSATAEDLPDASFAGQQDTYLNIKGKTELIHYIKSCLASLFTDRAISYRASRGFDHLKVALSVGVQKMVRADKGSAGVMFSIDTETGFKDAVFITSAWGLGENVVGGTINPDEFYVFKPTLEQNKRPIIKRQLGNKTQKMVYAPRGSEHPTRNIKTTKKEWQSFSLSDEDVLILAKYAIEIEKHYSKEAKQYRPMDIEWAKDGESGEIFIVQARPETVQSQKSKEESQVFEKFKFKNPNEKKEIILQGRAIGSKIGSGKVRIINDLEHMNSFKEGEILVTDNTDPDWEPCMKKASAVITNRGGRTCHAAIVAREIGVPAIVGVSGATDSLYTGMEITVSCAEGEEGYVYAGIYEHEIERVELSNMQETQTKIYINIGNPEKAFGFSQLPNHGVGLARMEMIILNQIKAHPLALVDLHHKKSVKEKNEIENLMAGYANPKDFFVKKIAEGIGMISAAFYPKPVIVRTSDFKSNEYMRMLGGSSYEPNEENPMLGYRGASRYYSESYNEAFSWECEALALVREEMGLTNMKVMIPFLRTIEEGKKVLEILRKNNLESGKNGLEIYIMCELPVNVILADDFLSLFDGFSIGSNDLTQLTLGVDRDSELVSHVFDERNEAMLKMFKKAIEACKRHNKYCGICGQAPSDYPEVTEFLVKEGITSISLNPDSVIPTWNAVAKLEKELKEHGLTEH

SEQ ID NO: 58626 - protein, 612 aa, Helicobacter pylori
MSAELIAVYKDEQIIDLESAKVLGLSDGIKALNGTEPIYFDDSPLALEVIRHSCAHLLAQSLKALYPDAKFFVGPVVEEGFYYDFKTSSKISEEDLPKIEAKMKEFAKLKLAITKETLTREQALERFKGDELKHAVMSKIGGDAFGVYQQGEFEDLCKGPHLPNTRFLNHFKLTKLAGAYLGGDENNEMLIRIYGIAFATKEGLKDYLFQIEEAKKRDHRKLGVELGLFSFDDEIGAGLPLWLPKGARLRKRIEDLLSQALLLRGYEPVKGPEILKSDVWKISGHYDNYKENMYFTTIDEQEYGIKPMNCVGHIKVYQSALHSYRDLPLRFYEYGVVHRHEKSGVLHGLLRVREFTQDDAHIFCSFEQIQSEVSAILDFTHKIMQAFDFSYEMELSTRPAKSIGDDKVWEKATNALKEALKEHRIDYKIDEGGGAFYGPKIDIKITDALKRKWQCGTIQVDMNLPERFKLAFTNEYNHAEQPVMIHRAILGSFERFIAILSEHFGGNFPFFVAPTQIALIPINEEHHVFALKLKEALKKRDIFVEVLDKNDSLNKKVRLAEKQKIPMILVLGNEEVETEILSIRDREKQDQYKMPLKEFLNMVESKMQEVSF

SEQ ID NO: 58627 - protein, 203 aa, Helicobacter pylori
MSRNEVLLNGDINFKEVRCVGDNGEVYGIISSKEALHIAQNLGLDLVLISASAKPPVCKVMDYNKFRYQNEKKIKEAKKKQKQIEIKEIKLSTQIAQNDINYKVKHAREFIESNKHVKFKVVLKGRESQNSKAGLDVLFRVQTMMQDLANPEKEPKTEGRFVSWMFVPKAKEAPKNEKKTKENNPPFNRINLMKGENHAKNED

SEQ ID NO: 58628 - protein, 64 aa, Helicobacter pylori
MPKMKTNRGASKRFKVKKNLIKRGSAFKSHILTKKSPKRKANLNAPKHVHHTNAHSVMSLLCRA

SEQ ID NO: 58629 - protein, 116 aa, Helicobacter pylori
MRVKTGVVRRRRHKKVLKLARGFYSGRRKHFRKAKEQLERSMYYAFRDRKQKKREFRSLWVVRINAACRMHNTSYSRFMHALKVANIELDRKVLADMAMNDMQAFTSVLESVKEHL

SEQ ID NO: 58630 - protein, 455 aa, Helicobacter pylori
MASFSILSIFKIGVGPSSSHTIGPMEAGARFCESLKGILEQVVRVQITLHGSLALTGKGHLSDEAVLIGLHGIYANELEVTTKKALLHEALENKVLKLANQHHIPFDYAKDLIFDNKPLTRHQNALILKAFNSKNEVLKEETYYSVGGGFVYTEKELDNLSEEDGNESIAYDFSSAKELLELCQKHQKSIAEIVRLRENALKNHPDATMVKIYHAMLECYDNGANSKERYLPGSLKVTRLAPSIKTRLEKHPTSGKDPLALIDYISLYARAIAEENASGGKVVTAPTNGACAVVPSVLLYAKNHLFENLSQKAINDFLLTSAAIGYLYKKNASLSGAEAGCQAEIGVASSMAAGGLAHLCQATTQQVLIASEIAMEHHLGLTCDPVGGLVQIPCIERNVLGAIKAISASKLALEDEYKPKVSLDEVIATMYATGKDMNEKYKETSLGGLAKTLKC

SEQ ID NO: 58631 - protein, 413 aa, Helicobacter pylori
MAQEKAVPRDPKKLNAFDLRWMVSLFGTAVGAGILFLPIRAGGHGVWAIVVMSAIIFPLTYLGHRALAYFIGSKDKEDITMVVRSHFGAQWGFLITLLYFLAIYPICLVYGVGITNVFDHFFTNQLHLAPFHRGLLAVALVSLMMLVMVFNATIVTRICNALVYPLCLILLLFSLYLIPYWQGANLFVVPSFKEFVLAIWLTLPVLVFAFDHSPIISTFTQNVGKEYGVFKEYKLNQIELGTSLMLLGFVMFFVFSCVMCLNADDFVKAREQNIPILSYLANTLNNPLINYAGPVVAFLAIFSSFFGHYYGAKEGLEGIIIQSLKLKKASKPLSVSVTIFLWLTITLVAYINPNILDFIENLGGPIIALILFVMPMIAFYSVSSLKRFRNFKVDIFVFVFGSLTALSVFLGLF

SEQ ID NO: 58632 - protein, 242 aa, Helicobacter pylori
MKVNFFATCLGAAIYSNASLNAIKLLRKENLEVVFKKDQTCCGQPSYNSGYYEETKKVVLYNIKLYSNNDYPIILPSGSCTGMMRHDYLELFEGHAEFNMVKDFCSRVYELSEFLDKKLQVKYEDKGEPLKITWHSNCHALRVAKVIDSAKNLIRQLKNVELIELEKEEECCGFGGTFSVKEPEISAVMVKEKIKNIESRQVDVIVSADAGCLMNISTAMQKMGSLTKPMHFYDFLASRLGL

SEQ ID NO: 58633 - protein, 488 aa, Helicobacter pylori
MQENVPLSYDYSISKLFLYAMVGFGIVGMLIGIVLAFELSFPNLNYIAGEYGIFGRLRPLHTNAVIYGFTLGGIWASWYYIGQRVLKITYHQHPFLKIVGLLHFWLWIILLILGVISLFAGLTQSKEYAELMWPLDIIVVVAWVLWGVNMFGSMSVRRENTIYVSLWYYIATYVGIAVMYIFNNLSVPTYFVADMGSVWHSISMYSGSNDALIQWWWGHNAVAFVFTSGVIGTIYYFLPKESGQPIFSYKLTLFSFWSLMFVYIWAGGHHLIYSTVPDWVQTLSSVFSVVLILPSWGTAINMLLTMRGQWHQLKESPLIKFLVLASTFYMLSTLEGSIQAIKSVNALAHFTDWIIGHVHDGVLGWVGFTLIASMYHMTPRLFKREIYSGRLVDFQFWIMTLGIVLYFSSMWIAGITQGMMWRDVDQYGNLTYQFIDTVKVLIPYYNIRGVGGLMYFIGFIIFAYNIFMTITAGKKLEREPNYATPMSR

SEQ ID NO: 58634 - protein, 347 aa, Helicobacter pylori
MAIDEDKQKAISLAIKQIDKVFGKGALVRLGDKQVEKIDSISTGSLGLDLALGIGGVPKGRIIEIYGPESSGKTTLSLHIIAECQKNGGVCAFIDAEHALDVHYAKRLGVDTENLLVSQPDTGEQALEILETITRSGGIDLVVVDSVAALTPKAEIDGDMGDQHVGLQARLMSHALRKITGVLHKMNTTLIFINQIRMKIGMMGYGSPETTTGGNALKFYASVRIDIRRIASLKQNEQHIGNRAKAKVVKNKVAPPFREAEFDIMFGEGISKEGEIIDYGVKLDIVDKSGAWLSYQDKKLGQGRENAKALLKEDKALADEITLKIKESIGSNEEIMPLPDEPLEEME

SEQ ID NO: 58635 - protein, 426 aa, Helicobacter pylori
MLTIKDIHALEVMDSRGNPTIQASVVLSDNTKASAIVPSGASTGKREALELRDNDKTRFLGKGVLRACENVNSVIKHHLIGLEAINQAFVDERLRALDGTPNYANLGANAVLGVSMALARASAKALNLPLYRYLGGANALTLPVPMLNIINGGTHANNSIDFQEYMIMPLGFESFKEALRASAEVYHTLKKLLDGKNQLTSVGDEGGFAPNFSNNVEPLEVISQAIEKAGYKLGEEIALALDVASSELVDENFNYHLKGENKILDSHELVAYYKELVAKYPIVSIEDGLSEDDWEGWAFLSKELGRQIQLVGDDLFVTNASLLQKGIEKNIANAVLIKPNQIGTISETLETIRLAKHHAYQCVMSHRSGESEDSFIADFAVALNTGEIKTGSTARSERIAKYNRLLEIEHELKGGIYIGKELFKHG

SEQ ID NO: 58636 - protein, 323 aa, Helicobacter pylori
MFKRLRRLRSSENLRAMLRETRLNIDDFIAPLFVIESDSCIKNEISSMPGVYQMSMEPLLKECEELVGLGVKAVLLFGIPKHKDATGSHALNKDHIVAKAAKEIKKRFKDLIVIADLCFCEYTDHGHCGILENASVSNDKTLEILNLQGLILAESGVDILAPSNMMDGNVLSLRKTLDNAGYTHTPIMSYSTKFASSYYGPFRDVANSAPSFGDRKSYQMDYANQKEALLESLEDEKQGADILMVKPALAYLDIVKEIRDHTLLPLALYNVSGEYAMLKLAQKHNLINYESVLLETMTCFKRAGADMIISYHAKEVANLLQRN

SEQ ID NO: 58637 - protein, 422 aa, Helicobacter pylori
MNQVELLSPAGNLKKLKIALNYGADAVYGGVSHFSLRNRAGKEFTLETFKEGIDYAHALNKKVYATINGFPFNSQLKLLEEHIDKMAELEPDAFIIAAPGVVKLALKIAPHIPIHLSTQANVLNLLDAQVFYDLGVKRIVCARELSLNDAIEIKKALPNLELEIFVHGSMCFAFSGRCLISALQKGRVPNRGSCANDCRFDYEYYVKNPDNGVMMRLVEEEGVGTHIFNAKDLNLSGHIAEILSSNAISALKIEGRTKSSYYAAQTTRIYRLAVDDFYHNTLKPSFYASELNTLKNRGFTDGYLMRRPFERLDTQNHQTAISEGDFQVNGEITEDGRFFACKFTTTTNTAYEIIAPKNAAITPIVNEIGKIYTFEKRSYLVLYKILLENNTELETIHSGNVNLVRLPAPLPAFSFLRTQVRV

SEQ ID NO: 58638 - protein, 363 aa, Helicobacter pylori
MDNYTYSELLKSLQNKCDNIALIIKPEKIKQELERIEKEQEDPNFWQDVLKARDTNKEKVRLNRLLETYQKTKNSLDESVELFELAQNDNDEVTLSLLYEEAPILENSVQKVEIEIMLSGENDASNAIITIQPGAGGTESQDWASILYRMYLRWAERRGFKSEILDYQDGEEAGIKGVAFIIKGENAYGYLKNENGVHRLVRISPFDANAKRHTSFASVQISPELDDDIDIEIDEKDVRYDYYRSSGAGGQHVNKTESAVRITHFPTGIVVQCQNDRSQHKNKASALKMLKSKLYELELEKQQSSAKNEEKSEIGWGHQIRSYVLAPYQQVKDARSNTAYSNVEAILDGDIDAILEGVLIAKA

SEQ ID NO: 58639 - protein, 391 aa, Helicobacter pylori
MISFKEALKIHSSIPIKPLEIEVISLFESIGRILAEDIICIHALPKFNQSAMDGYGFKMQDLGKKTQVVQRIFAGDDVSALEVKENECVKIMTGAMVPKGIETIVPIECMLESHTNFALAPKDFKINANIRQKGENASLNSVLVPKNTRLNYGHIALIASQGLKEIKAFRKLKIALFSSGDELVPLGQNALECQVYDVNSVGIFNMLKNYNTHFLGVLKDDKNLQLKILESQDYDVILSSAGVSVGDKDFFKDALKEKNALFYYEKVNLKPGKPVTLARLNQSMIIGLPGNPLSCLLVLRVLILPLLERLSLNKDFKLKPFKAQINAPLKLKGERAHLILGNYSNHQFIPYNNNRYDSGAIQALARVDSIALIDEGVRLVQGEIEILRFEN

SEQ ID NO: 58640 - protein, 307 aa, Helicobacter pylori
MLVKGNEILLKAHKEGYGVGAFNFVNFEMLNAIFEAGNEENSPLFIQTSEGAIKYMGIDMAVGMVKTMCERYPHIPVALHLDHGTTFESCEKAVKAGFTSVMIDASHHAFEENLELTSKVVKMAHNAGVSVEAELGRLMGIEDNISVDEKDAVLVNPKEAEQFVKESQVDYLAPAIGTSHGAFKFKGEPKLDFERLQEVKRLTNIPLVLHGASAIPDNVRKSYLDAGGDLKGSKGVPFEFLQESVKGGINKVNTDTDLRIAFIAEVRKVANEDKSQFDLRKFFSPAQLALKNVVKERMKLLGSANKI

SEQ ID NO: 58641 - protein, 425 aa, Helicobacter pylori
MRLLLFNQNAFLLACMFVSSVYVNAVLDAYAIENPYISITLTSLLAPLSMLAFLKTPRNSAFALGFFVGALLFYWCALSFRYSDFTYLLPLIIVLIALVYGVLFYLLLYFENPYFRLLSFLGSSFIHPFGFDWLVPDSFFSYSVFRVDKLSLGLVFLACIFLSTKPLKKYRIIGVLLLLGALDFNGFKTSDLKKVGNIELVSTKTPQDLKFDSSYLNDIENNILKEIKLAQSKQKTLIVFPETAYPIALENSPFKAKLEDLSDNIAILIGTLRTQGYNLYNSSFLFSKESVQIADKVILAPFGETMPLPEFLQKPLEKLFFGESTYLYRNAPHFSDFTLDDFTFRPLICYEGTSKPAYSNSPSKIFIVMSNNAWFSPSIEPTLQRTLLKYYARRYDKIILHSANFSTSYILSPSLLGDILFRKRS

SEQ ID NO: 58642 - protein, 501 aa, Helicobacter pylori
MFSNQYIQQRIHKANSLREEGKNPYQNGLKRSLTNAAFLEKYAYVKGLEEPKDKEKCESIVGRVKLLRLMGKACFIKVEDESTILQVYVSQNELNDEFKSLKKHLEVGDIVLVKGFPFATKTGELSIHALEFHILSKTIVPLPEKFHGLSDIELRYRQRYLDLIVNPSVKDVFKKRSLIVSSVRKFFEMEGFLEVETPMMHPIPGGANARPFITYHNALEVERYLRIAPELYLKRLIVGGFEAVFEINRNFRNEGMDHSHNPEFTMIEFYWAYHTYEDLIELSKRLFDYLLKTLNLDSKIIYNDMEVDFNQTSVISYLDALETIGGISKDILEKEDRLLAYLLEQGIKVEPNLTYGKLLAEAFDHFVEHQLINPTFVTQYPIEISPLARRNDSNPNIADRFELFIAGKEIANGFSELNDPLDQLERFKNQVAEKEKGDEEAQYMDEDYVWALAHGMPPTAGQGIGIDRLVMLLTGAKSIKDVILFPAMRPVKNDFNVESEE

SEQ ID NO: 58643 - protein, 416 aa, Helicobacter pylori
MAYFLEQTDSEIFELIFEEYKRQNEHLEMIASENYTFASVMEAMGSVLTNKYAEGYPNKRYYGGCEVVDKIESLAIERAKKLFNCQFANVQAHSGSQANNAVYHALLKPYDKILGMDLSCGGHLTHGAKVSLTGKHYQSFSYGVNLDGYIDYEEALKIAQSVKPEIIVCGFSAYPREIDFKKFREIADEVGALLLGDIAHVAGLVVTGEHAHPFPHCHVVSSTTHKTLRGPRGGIILTNDEEIAAKIDKAIFPGTQGGPLMHVIAAKAVGFKENLKPEFKAYAQLVKSNMQVLAKALKEKNHKLVSGGTSNHLLLMDFLDKPYSGKDADIALGNAGITVNKNTIPGETRSPFVTSGIRIGSAALSARGMGAKEFEIIGNKISDILNDINNVSLQLHVKEELKAMVNQFPVYHQPIF

SEQ ID NO: 58644 - protein, 714 aa, Helicobacter pylori
MKITYCDALIIGGGLAGLRASIACKQKGLNTIVLSLVPVRRSHSAAAQGGMQASLANAKKSEGDNEDLHFLDTVKGSDWGCDQQVARMFVTTAPKAIRELASWGVPWTRIKKGDRPAVVNGEHVTITERDDRHGYILSRDFGGTKKWRTCFTADATGHTMLYAVANEALHHKVDIQDRKDMLAFIHHDNKCYGAVVRDLITGEISAYVSKGTLLATGGYGRVYKHTTNAVICDGAGAASALETGVAKLGNMEAVQFHPTALVPSGILMTEGCRGDGGVLRDKFGRRFMPAYEPEKKELASRDVVSRRILEHIQKGYGAKSPYGDHVWLDIAILGRNHVEKNLRDVRDIAMTFAGIDPADSKEQTKDNMQGVPANEPEYGQAMAKQKGWIPIKPMQHYSMGGVRTNPKGETHLKGLFCAGEAACWDLHGFNRLGGNSVSEAVVAGMIIGDYFASHCLEAQIEINTQKVEAFIKESQDYMHFLLHNEGKEDVYEIRERMKEVMDEKVGVFREGKRLEEALKELQELYARSKNICVKNKVLHNNPELEDAYRTKKMLKLALCITQGALLRTESRGAHTRIDYPKRDDEKWLNRTLASWPSAEQDMPTIEYEELDVMKMEISPDFRGYGKKGNFIPHPKKEERDAEILKTILELEKLGKDRIEVQHALMPFELQEKYKARNMRLEDEEVRARGEHLYSFNVHELLDQHNANLKGEHHE

SEQ ID NO: 58645 - protein, 275 aa, Helicobacter pylori
MGFLKGKKGLIVGVANNKSIAYGIAQSCFNQGATLAFTYLNESLEKRVRPIAQELNSPYVYELDVSKEEHFKSLYNSVKKDLGSLDFIVHSVAFAPKEALEGSLLETSKSAFNTAMEISVYSLIELTNTLKPLLNNGASVLTLSYLGSTKYMAHYNVMGLAKAALESAVRYLAVDLGKHHIRVNALSAGPIRTLASSGIADFRMILKWNEINAPLRKNVSLEEVGNAGMYLLSSLSSGVSGEVHFVDAGYHVMGMGAVEEKDNKATLLWDLHKEQ

SEQ ID NO: 58646 - protein, 336 aa, Helicobacter pylori
MKLSELLNAYSIETEFSNDFEVHALAELNKATPNDISYIDQARYLKLLKDSKAGAVFIRKKESSKVPKRMQALVVDNPHLAFAKASHAFKIPFFKNPESVNEPKHFERVTIMPNVVIGEGVEIGENSLIYPGVVIADGVKIGKNCILYPRVTLYQNTILEDNVTIHAGSVIGGDGFGYAHTALGEHVKIEHVGIVRIQKNVEIGANTAIDRAVFGETLIKEGVKIDNLVQIGHNCVLGEHSIVVSQVGLSGSTTTGRNVVFGGQVGIGGHLHVGEFTQIGGKSAVGKDLPPNTNFAGAIPAMEIHEWHHFLAHLRTNFRKQQKTSLLQKAKGFFKS

SEQ ID NO: 58647 - protein, 385 aa, Helicobacter pylori
MKDSFLFTSESVTEGHPDKMADQISDAVLDYIIERDQKAKVACETLVSNGFCMITGELKTSVYAPMQEIAREVVKKIGYTDALYGFDYRSAAVLNGVGEQSPDINQGVDREDGEIGAGDQGLMFGYACKETETLMPLPIHLAHQLTFALAQKRKDNTLPFLRPDGKSQVSVRYENNKPVSIDTIVISTQHSPEVSQKHLKEAVIEEIVYKVLSKEYLHDNIKFFVNPTGKFVIGGPQGDAGLTGRKIIVDTYGGSCPHGGGAFSGKDPSKVDRSAAYAARYVAKNLVASGVCDKATVQLAYAIGVIEPVSIYVNTHNTSKYSSAELEKCVKSVFKLTPKGIIESLDLLRPIYSLTSAYGHFGRELEEFTWEKTNKAEEIKAFFKR

SEQ ID NO: 58648 - protein, 331 aa, Helicobacter pylori
MEFYASLKSIAMHVPSERVKNAEFQQFLDTSDEWIEKRTGIKERRFANDEEKSSDLGVIAAKQAIERAHLTPKDIDLVVVATLSPDFLAMPSTACVLSAKLGIENKPAFDISAACTGFIYLLSVAKAYVESGMYENVLIVGAEKTSSVLDFKDRGTCILFGDGAGACVIGRTKRLKESILDVQISANGNFSNYLYTPRTLKPTPFNAKEEASEPFLCMKGNEVFKLAVKTLLKDVEMILEKNALKPEDVRLFIPHQANFRIIQAVREHLDFKDEQVVLTVHKYGNTSAASIPMAMGEAYEEGRLKKGDLMLLDAFGGGLTWGSALVYFGGS

SEQ ID NO: 58649 - protein, 621 aa, Helicobacter pylori
MSNQEYTFQTEINQLLDLMIHSLYSNKEIFLRELVSNASDALDKLNYLMLTDEKLKGLNTTPSIHLSFDSQKKTLTIKDNGIGMDKNDLIEHLGTIAKSGTKNFLSALSGDKKKDSALIGQFGVGFYSAFMVASKIVVQTKKVNSDQAYAWVSDGKGKFEISECVKDEQGTEITLFLKDEDSHFASRWEIDSVVKKYSEHIPFPIFLTYTDTKHEGEGDNQKEIKEEKCEQINQASALWKMNKSELKDKDYKEFYQSFAHDNSEPLSYIHNKVEGSLEYTTLFYIPSTAPFDMFRVDYKSGVKLYVKRVFITDDDKELLPSYLRFVKGVIDSEDLPLNVSREILQQNKILANIRSASVKKILSEIERLSKDEKNYHKFYEPFGKVLKEGLYGDFENKEKLLELLRFYSKDKEKLISLKEYKENLKENQKSIYYLLGENLDLLKASPLLEKYAQKGYDVLLLSDEIDAFVMPGVNEYDKTPFKDASHSESLKELGLEEIHDEVKDQFKDLMKAFEENLKDEIKGVELSSHLTSAVALIGDEQNAMMANWMRQMGQSVPESKKTLELNPNHAILQKLLKCEDKEQLSAFIWLLYDGAKLLEKGALKDAKSFNERLNSVLLKAL

SEQ ID NO: 58650 - protein, 621 aa, Helicobacter pylori
MVKESDILVVGGGHAGIEASLIAAKMGARVHLITMLIDTIGLASCNPAIGGLGKGHLTKEVDVLGGAMGIITDHSGLQYRVLNASKGPAVRGTRAQIDMDTYRILARNLVLNTPNLSVSQEMTESLILENDEVVGVTTNINNTYRAKKVIITTGTFLKGVVHIGEHQNQNGRFGENASNSLALNLRELGFKVDRLKTGTCPRVAGNSIDFEGLEEHFGDTNPPYFSYKTKDFNPTQLSCFITYTNPITHQIIRDNFHRAPLFSGQIEGIGPRYCPSIEDKINRFSEKERHQLFLEPQTIHKSEYYINGLSTSLPLDVQEKVIHSIKGLENALITRYGYAIEYDFIQPTELTHTLETKKIKGLYLAGQINGTTGYEEAAAQGLMAGINAVLALKNQAPFILKRNEAYIGVLIDDLITKGTNEPYRMFTSRAEYRLLLREDNTLFRLGEHAYRLGLMEEDFYKELKKDKQEIQDNLKRLKEYILTPSKEVLKRLDELDENPINDKVDGVSLLARDSFNAEKMRSFFSFLAPLNERVLEQIKIECKYNIYIEKQHENIAKMDSMLKVSIPKGFVFKGIPGLSLEAVEKLEKFRPKSLFEASEISGITPANLDVLHLYIHLRKNS

SEQ ID NO: 58651 - protein, 266 aa, Helicobacter pylori
MKEELFKEKSRYITGFVLIIVADLILYADNLLLFWAVLGGIYAVGFSEALRLFQVKASFSLYLILVLSWVAAYFNGRPIECALISAMVMASVIAYQKAHHSEAILPFLYPGVGFFALFGVYKDFGAVAIIWLLVVVVASDVGAFFGGKLLGKTPFTPTSPNKTLEGALIGVVLASVLGSFVGMGKLSGGFFMALFFSFLIALVAVFGDLYESYLKRKVGIKDSGKILPGHGGVLDRLDSMLFGALGLHALLYFLEIWKETAVFLGD

SEQ ID NO: 58652 - protein, 326 aa, Helicobacter pylori
MAKHDLVGSVLWDAYSKEVQRRMDNPTHLGVITEEQAKAKNAKLIVADYGAEACGDAVRLYWLVDESTDRIVDAKFKSFGCGTAIASSDMMVELCLNKRVQDAVKITNLDVERGLRDDPDTPAVPGQKMHCSVMAYDVIKKAAGMYLGKNAEDFEEEIIVCECARVSLGTIKEVIKLNDLKSVEEITNYTKAGAFCKSCVRPGGHEKRDYYLVDILKEVREEMEAEKLKATANKSQSGELAFREMTMVQKIKAVDKVIDENIRPMLMMDGGDLEILDIKESDDYIDVYIRYMGACDGCMSATTGTLFAIENALQELLDRSIRVLPI

SEQ ID NO: 58653 - protein, 456 aa, Helicobacter pylori
MILKKSGILAKKTSLFECQHCGFTSPKWLGKCVQCNAWESFIELNQAQKEVLNTLKKPIPQAQKSVSIAAIEHEEVIKFSSTQSELDIVLGGGIAKGGLYLVGGSPGVGKSTLLLKVASGLAKNQQKVLYVSGEESLSQIKMRAIRLDCIEKELYLLNEINWPVIKANIESENYFACVIDSIQTLYSPEISSAPGSISQVREITFELMRLAKTRDIAIFIIGHITKEGSIAGPRVLEHMVDSVLYFEGDPSRELRILRSFKNRFGPTSEIGLFEMKEQGLVSAKEASSLFFSKEEPMEGSAITITLEGSRALILEIQALVSECSFGSPKRLANGFDTNRLNMLIALLEKKLEIPLNRHDVFINVSGGIKISEPACDLAVIASILSSFKNRKIDNKTAFLGEVSLNGRILEAPNLNARLKEMENYGFLKAILPKKPSQKTSIKCYEANAVGKIVEWM

SEQ ID NO: 58654 - protein, 390 aa, Helicobacter pylori
MRKKGMFEKIQKEWLSNIQKDLLSGFVVGLSVIPETAGFAIMVGLDVGVAFYTTFYMAFVLSLFGARKAMISAAAGSVALILVGVVKNYGLEYAGVATLMAGVLQILLGYLKIGNLLRFIPQSVMYGFVNALGILLLMEQFKFLQNQNLGVFVLLAIGILIIYLFPLITKKIPSNLICILIVSAIALIFDMHAPNLGSIEQGVSGFHFIIIPKNLDFKIMIELLPYALSLALVGTIESLLTAKTLDVILKDGVSDKNKETKAQGLGNIISGLLGGMTGCALVGQSIINAKSGAKTRLSTFFAGFSLMVLILVFNEYVVKIPIVAVVAVMVMISFTTFNFQSIINIKKIKLYDTLNMLLVVAVVLYTHNLAIGVVVGVLVNALWIKSKGIA

SEQ ID NO: 58655 - protein, 483 aa, Helicobacter pylori
MKKTILLSLMVSSLLAENDGVFMSVGYQIGEAVQQVKNTGEIQKVSNAYENLNNLLTRYNELKQTASNTNSSTAQAIDNLKESASRLKTTPNSANQAVSSALSSAVAMWQVIVSNLANNSLPTSEYNKINAISQSLQNTLENKNNDLKIENDYDHLLTQASTIINTLQSQCPGIDGGNGKPWGINASGNACNIFGNTFNAITSMIDSAKKAAADARRTAPESPNQPSAFNNADFNKNLNQVSSVINDTISYLKGDNLATIYNTLQKTPDSKGFQSLVSRSSYSYSLNETQYSEFQTTTKEFGHNPFRSVGLINSQSNNGAMNGVGVQLGYKQFFGKNKFFGIRYYAFFDYNHAYIKSNFFNSASNVFTYGAGSDLLLNFINGGSDKNRKVSFGIFGGIALAGTTWLNSQFMNLKTTNSAYSAKINNTNFQFLFNTGLRLQGIHHGVELGVKIPTINTNYYSFMGAKLAYRRLYSVYFNYVLAY

SEQ ID NO: 58656 - protein, 306 aa, Helicobacter pylori
MGNLVIGSRGSELALWQANHIKERLKKECLIESEIQIVKTKGDKILDTPLNKIGGKGLFTKELEELLLKGAIDLAVHSLKDVPVVFEKGLDLACITKRADVRDTFLSVKFPDLMSLPKGAKVGTTSLRRSMQIKLKRQDLDTESLRGNVQTRLKKLECGEFDAIILAEAGLCRLEIQGAKYRKAFSVEEMIPSMGQGALGVEMLKNHKHFATLQKLNDEKSAFCCRLEREFIKGLNGGCQIPIGVHASLMGDRVKIQAVLGLPNGKEVITKEKQGDKTKAFDLVQELLEEFLQSGAKEILEKAQLF

SEQ ID NO: 58657 - protein, 577 aa, Helicobacter pylori
MLFSKLFAPTLKEPPKDAVLKSHKHLAQAGYIYQVGSGIYNFLPLAKKVLDKIENITHKRMQEHGAQNILMSFVVLASLWEKSGRLDKYGKELLVFKDRKDNDFVLSPTLEENITEIAANFIKSYKQLPVHLYQIHTKFRDEIRPRFGLVRAREFIMKDGYSFHEDAESLDKEFLNTQSAYKEILSDLGLDFRIVEADSGAIGGSKSREFVVLTECGEDTIVVCQNCDYAANIEIAKRSKRPEPLNVPKAQLAKFPTPNTTSAQSVAEFFKTEPYFVLKALVRKVIHKDKETLACFFVRGDDNLEEVKALNALNIIGANALELREASQKDLDNVGLIAGFIGPYGLKKHVSYIIFDEDLKEGDCLIAGANEKDFHAVGVDLKGFENLVYADIVQVKESDRCPNCQGALKYHKSLEVGHIFKLGQGYAKSLKASFLDKNGKEQFFEMGCYGIGISRLLSAILEQKSDDLGCVWTKNTAPFDVVIVVSNWKDEAQKKLAFEVYERLLQKGVDALLDDRDARFGAKMRDFELIGERLALIIGKQTLESKEFECIKRANLEKQTIKDIELEEKILEMLESE

SEQ ID NO: 58658 - protein, 449 aa, Helicobacter pylori
MELETHLSKYFTLAFTHKSMSLEMREKLAINSNATLKEFLQTIKNHCPNIKECMVLSTCNRFEIYASLKHGANTNEQKNALLKILAQNKKMSVSDLEKCVLMNTDESAVHHVFSVCSSLDSLVVGETQITGQMKNAYKFAFEEKFCSKDLTRLLHFAFKCAAKVRNLTGISKQGVSISSVAVKEALNIFEKERIKDKKALVIGLGEMAQLVIKHLLNKQFEALILGRNAAKFEDFIKELEEPKKVSFQNIENLNAYINEYELLFCATSSPHFIVQNRMLKETIFRRFWFDLAVPRNIEKPVLDNIFLYSVDDLEPMVRENVENRQESRMRAYEIVGLATMEFYQWIQSLEVEPVIKDLRELARISAQKELQKALKKRYVPKEYENNIEKILHNAFNTFLHNPTIALKKNAQKEESDVLVGAIKNLFNLDKSNANHAQNLNLYKCEYYEE

SEQ ID NO: 58659 - protein, 307 aa, Helicobacter pylori
MQEKQLKTIQNKIASWIKEIESAFIDELFSKIGPSKMLRSKLMLALLNEKTDAILLDKAFNLCAIVEMIQTASLLHDDVIDKAAMRRKLPSINALFGNFNAVMLGDVFYSKAFFELSKMGESIAKSLSNAVLRLSRGEIEDVFVGGSFNSDKQKYWRILEDKTAHFIEASLKSMAILLNKDAKMYADFGLNFGMAFQIIDDLLDITQDAKTLGKPNFSDFKEGKTTLPYLLLYEKLNQRDQGLLISYFKQDSHEIIEWTKEKFKQYGTIEETLKIAQVYSKKALEAIKGENNLILEKLAQDVIYRTF

SEQ ID NO: 58660 - protein, 144 aa, Helicobacter pylori
MKTFEILKHLQADAIVLFMKVHNFHWNVKGTDFFNVHKATEEIYEEFADMFDDLAERIVQLGHHPLVTLSEAIKLTRVKEETKTSFHSKDIFKEILEDYKYLEKEFKELSNTAEKEGDKVTVTYADDQLAKLQKSIWMLQAHLA

SEQ ID NO: 58661 - protein, 381 aa, Helicobacter pylori
MKKSKHLKRPYLKRSHLKHSDKASSFKGLLKKEDNVISLENFKPKESEDLLENFSNKKDMQELLGLLNQFILQSYKVEKEFKDYKALYEWVIEILPQAIWVVNENGSFFYKNSLANQSHEVFNKAKLENFNTEIEHENKSYLVQQNSIQGKQIITATDISAQKRQERLASMGKISAHLAHEIRNPVGSISLLASVLLKHANEKTKPIVVELQKALWRVERIIKATLLFSKGIQANRTKQSLKTLESDLKEALNCYTYSKDIDFLFNFSDEEGFFDFDLMGIVLQNFLYNAIDAIEALEESEQGQVKIEAFIQNEFIVFTIIDNGKEVENKSALFEPFETTKLKGNGLGLALSLQVVKAHEGSIALLENQEKTFEIKILNAS

SEQ ID NO: 58662 - protein, 492 aa, Helicobacter pylori
MELNQPPLPTEIDGDAYHKPSFNDLGLKESVLKSVYEAGFTSPSPIQEKAIPAVLQGRDVIAQAQTGTGKTAAFALPIINNLKNNHTIEALVITPTRELAMQISDEIFKLGKHTRTKTVCVYGGQSVKKQCEFIKKNPQVMIATPGRLLDHLKNERIHKFVPKVVVLDESDEMLDMGFLDDIEEIFDYLPSEAQILLFSATMPEPIKRLADKILENPIKIHIAPSNITNTDITQRFYVINEHERAEAIMRLLDTQAPKKSIVFTRTKKEADELHQFLASKNYKSTALHGDMDQRDRRSSIMAFKKNDADVLVATDVASRGLDISGVSHVFNYHLPLNTESYIHRIGRTGRAGKKGMAITLVTPLEYKELLRMQKEIDSEIELFEIPTINENQIIKTLHDAKVSEGIISLYEQLTEIFEPSQLVLKLLSLQFETSKIGLNQQEIDAIQNPKEKTPKPSNKKTPQHERARSFKKGQHRDRHPKTNHYSKKPKRR

SEQ ID NO: 58663 - protein, 516 aa, Helicobacter pylori
MLEIKNLNCVLNAHFSLQNINISLNPSERVAIVGESGSGKSSIANIIMRLNPRFKPHNGEVLFETTNLLKESEEFMQHLRGNAIAYIAQDPLSSLNPLHKIGKQMSEAYFLHYKNASKTLLKEQVLNAMKQVQLDEKFLDRYPYELSGGQRQRVCIAMGIINAPKLLICDEPTTALDAQIQNQILDLPKQLSAEKNIALLFISHDLKAVKRLADRVYVLKKGEIVETNLTKDLFNDPKHEYSKLLIQASNLPAKNLKALDETLLEVKDFSVYYLQKRFFRPSLKKPLIASVNFSLKAKENIGIIGESGSGKSSLALGLLKLALNSGEEKILGQSVGSLNSKAFKPYRKILQMVFQDPYASLNPRLSIQSILTEALRFAYPKASKEEWHHLAKLCLEEVCLSHELLNSYAYELSGGERQRVAIARAIALKPKIILLDEPTSALDKSIQKSVLELLLDLQEKQDLSYLFISHDLDVIKAFCDKVLVISEGKVVEMNTIKEVFDNPKHAYTKRLLESRL

SEQ ID NO: 58664 - protein, 411 aa, Helicobacter pylori
MADVVVGIQWGDEGKGKIVDRIAKDYDFVVRYQGGHNAGHTIVHKGVKHSLHLMPSGVLYPKCKNIISSAVVVSVKDLCEEISAFEDLENRLFVSDRAHVILPYHAKKDAFKEKSQNIGTTKKGIGPCYEDKMARSGIRMGDLLDDKILEEKLNAHFKAIEPFKKAYDLGENYEKDLMGYFKTYAPKICPFIKDTTSMLIEANQKGEKILLEGAQGTLLDIDLGTYPFVTSSNTTSASACVSTGLNPKAINEVIGITKAYSTRVGNGPFPSEDTTPMGDHLRTKGAEFGTTTKRPRRCGWLDLVALKYACALNGCTQLALMKLDVLDGIDAIKVCVAYERKGERLEIFPSDLKDCVPIYQTFKGWEKSVGVRKLDDLEPNVREYIRFIEKEVGVKIRLISTSPEREDTIFL

SEQ ID NO: 58665 - protein, 420 aa, Helicobacter pylori
MDVLSVSEINAQIKALLEATFLQVRVQGEVSNLTIHKVSGHAYFSLKDSQSVIKCVLFKGNANRLKFALKEGQEVVVFGGISVYVPRGDYQINCFEIEPKDIGSLTLALEQLKEKLRLKGYFDEENKLPKPHFPKRVAVITSQNSAAWADMKKIASKRWPMCELVCINTLMQGEGCVQSVVESIVYADSFHDTKNAFDAIVVARGGGSMEDLYSFNDEKIADALYLAKTFSMSAIGHESDFLLSDLVADLRASTPSNAMEILLPSSDEWLQRLDGFNVKLHRSFKTLLHQKKAHLEHLVASLKRLSFENKHHLNALKLEKLKIALENKTLEFLRFKKTLLEKISTQTLTSPFLQTKTERLNRLENALKLAHANLKLPQFGALVSKNNQAIELEALKRGDKIELSNEKTRASAEILSVDRV

SEQ ID NO: 58666 - protein, 856 aa, Helicobacter pylori
MNLFEKMTDQLHETLDSALALALHHKNAEVTPMHMLFAMLNNSQGILIQALQKMPVDIQALRLSVQSELNKFAKVSQISKQNIQLNQALIQSLENAQGLMAKRGDSFIATDVYLLANMGLFESVLKPYLDAKELQKTLESLRKGRTIQDKNDDSNLESLEKFGIDLTQKALENKLDPVIGRDEEIIRMMQILIRKTKNNPILLGEPGVGKTAVVEGLAQRIMNKEVPKTLLNKRVIALDLSLLVAGAKYRGEFEERLKKVIEEVKKSANVILFIDEIHTIVGAGASEGGMDAANILKPALARGELHTIGATTLKEYRKYFEKDMALQRRFQPILLNEPSINEALQILRGLKETLETHHNITINDSALIASAKLSSRYITDRFLPDKAIDLIDEGAAQLKMQMESEPAKLSSVKRSIQRLEMEKQALEMEKKESNAKRMQEILKELSDLKEEKIQLEAQFENEKEVFKEISRLKMEMESLKKEAERFKRNGDYQQAGEIEYSKIPENKKKEEELQRKWEAMQQNGALLQNALTENNIAEIVSQWTHIPVQKMLQSEKNRVLNIESELQKRVVGQEKAIKAIAKAIKRNKAGLSDSNKPIGSFLFLGPTGVGKTESAKALAQFLFDSDKNLIRIDMSEYLEKHAMSRLIGAAPGYVGYEEGGQLTEAVRRKPYSVVLLDEVEKAHPDVFNLLLQVLDEGHLTDSKGVRVDFKNTILILTSNVASGALLEENLSEAEKQKAIKESLRQFFKPEFLNRLDEIISFNALDSHAVINIVGILFENIQKKALERGINITLDEEAKELIAEAGFDRFYGARPLKRALYEMVEDKLAELILEDKVKENDSVAFVVENNEIVPKIK

SEQ ID NO: 58667 - protein, 378 aa, Helicobacter pylori
MLLKNASFYDDEVLKRADIRLKDSLITEIKENLSPINNEEVIECRDLFVLPSFIDLSVTGLEGYENLKQKAFKGGVGLLNVFNCDQSGIKNIMAIKNNQLADIATLKNKGGEILIAPSDAFLELISHYAKSYNLPLLISLENSFEALNSGELAYELGQNFVENAFENTRLVRFMEVSRALQIPVLLDKVNSITTLKLIKAFNDLGAKLQAQTPLSHLVLDESVYEDYEPRFKIAPPLRDKESQNALKEALKNNEIAMLTSLHASKNSNAQLFEESAFGCESIEDAFSVAYTFLVQKKVISFQQLIKVMAINQAKFLKLNAGEVKENQLANLMIVDLNAQTRVSNQNSPFYGLELYGEVQRMILKGQTTFIKENACKKS

SEQ ID NO: 58668 - protein, 409 aa, Helicobacter pylori
MQEIIGASLVFLCNEKCEVLEDYGVVFDEKIVEIGDYQSLTLKYPHLKAQFFENSVLLPAFINAHTHFEFSNNKASFDYGSFSGWLGSVLNNGGAILENCQGAIQNAISTQLKSGVGSVGAISNHLIEVNLLKESPLNAVVFLEFLGSSYSLEKLKAFEAKFKELKDLEDKKLKAALAVHAPYSVQKDMALSVIQLAKDSQSLLSTHFLESLEELEWVENSKGWFENFYQHFLKESHFKSLYKGANDYIDMFKDTHTLFVHNQFASLEALKRIKSQVKNAFLITCPFSNRLLSGQALDLERTKEAGLSVSVATDGLSSNISLSLLDELRAFLLTHNMPLLELAKIALLGATRHGAKALALNNGEIEANKRADLSVFGFNEKFTKEQAILQFLLHAKEVECLFLGGKRVI

SEQ ID NO: 58669 - protein, 84 aa, Helicobacter pylori
MSLLVNDECIACDACREECPSEAIEEGDPIYNIDPDRCTECYGYDDDEPRCVSVCPVDAILPDPNNAESKEELKYKYESLKEQD

SEQ ID NO: 58670 - protein, 340 aa, Helicobacter pylori
MKIAIVRLSALGDIIVSAVFLAVIKECLPNAQIEWFVDERFSAILEHSPYIDKLHPIALKSALKTLNPLKIFKLFKSLRAYEYDIIIDMQGLVKSALITQMLKAPKKVGFDYASAREGLSMFFYSQKVSIAYDEPVLKRNFTLLSHALNLPQKEISKEISESLSSRAKAFSYQPSPKIDALNLNKNKPKILFILETSKINKTYPIERFKELALILENFQICLLWHADEYKATTLYHALKHQRDVLLLPKLTLNEVKALLFKMDLIIGGDTGITHLAWALQKPSITLYGNTPMERFKLESPINVSLTGNSNANYHKKDFSIQNIEPKKIKECVLNILKEKE

SEQ ID NO: 58671 - protein, 328 aa, Helicobacter pylori
MTYKERLIHEKILKQDDKGFKTELRILSIFIVESLVNILGFILAKMPHSWFLRCIKAVAWLMKTFDKCRYFDAKANLDFVFGDSKSEEEKKRIIKKGYENFAFIILETIRVIFIPKDEYDARFTLINEENVWKSLNKEGQAITLCMHFGYWEAVGTTLAQYYENYGRGCLGRLTKFAPINHMIMSRREAFGVRFVNKIGAMKELIKMYNQGNGLVGILVDQNVVPKDGVVVKFFDRDATHTTIASILSRRYNIDIQPVFIDFNDDYSHYTATYYPSIRSQITDNAQNDILECTQAQASLCEEVIRNHPESYFWFHRRFKSTHPEIYQR

SEQ ID NO: 58672 - protein, 371 aa, Helicobacter pylori
MDFQLQATDNNARAGLLNLAHSQVATPVFMPVGTQGCIKSLDATDAQEILGAKLILANTYHMYLRPGEKVVEELGGLHRFAQFYGSFLTDSGGFQAFSLSDNVKLQEDGIVFKSHIDGSKHLFTPAKVLDIQYSLNSDIMMVLDDLVGLPAPLKRLEESIKRSAKWANMSLEYHKEKNRPSNNLFAIIQGGTHLKMRSLSVGLTHEGFDGYAIGGLAVGESADEMLETIAHTAPLLPKDKPRYLMGVGTPENILDAISLGVDMFDCVMPTRNARNATLFTHSGKISIKNAPYKLDNTPIEENCACYACKRYSKAYLHHLFRAKELTYARLASLHNLHFYLELVKNARNAILEKRFLSFKKEFLEKYNSRSH

SEQ ID NO: 58673 - protein, 2893 aa, Helicobacter pylori
MKKFKKKPKSIKRSHQNQKTILKRPLWLMPLLISGFASGVYANNLWDLLNPKVGGEYVHWVKGSQYCAWWEFAGCLKNVWGANHKGYDAGNAANYLSSQNYQAISVGSGNETGTYSLSGFTNYVGGNLTINLGNSVVLDLSGSNSFTSYQGYNQGKDDVTFTVGAINLNGTLEVGNRVGSGAGTHTGTATLNLNANKVNINSNINAYKTSQVNIGNANSVITIGSVSLSGDVCSSLASVGIGANCSTSGPSYSFKGTTNATNTAFSNASGSFTFEENATFSGAKWNGGTYTFNKEFSATNNTAFSSGSFNFKGVSSFNGTSFSNASYTFDNQATFQNSSFNGGTFTFNNQTNPTNNAQHPQIQNSSFSGNATTLKGFVNFQQAFNNSNHQLTIQNASFNNATFNNTGKITIEKDASFNNTTFNTSVDTNNMSVTGGVTLSGKNDLKNGSTLDFGSSKITLAQGTTFNLTSLGSEKSVTILNSSGGITYSNLLNHAINGLTSALKTNESLSNPQSFAQGLWDIITYNGVTGQLLNENAATSKPTDSSPSKSSTNSTQVYQVGYKIGDTIYKLQETFSHNSIIIQALESGTYTPPPVINGSKFDLSASNYINADMPWYDHKYYIPKSQNFTESGTYYLPSVQIWGSYTNSFKQTFSANGSNLVIGYNSTWTDHNVSSSGTVSFGDTSGSALNGHCGPWPYYQCTGTTNGTYSAYHVYITANLRSGNRIGTGGAANLIFNGVDSINIANATITQHNAGIYSSSMTFSTQSMDNSQNLNGLNSNGKLSVYGTTFTNEAKDGKFIFNAGQAVFENTNFNGGSYQFSGDSLNFSNNNQFNSGSFEISAKNASFNNANFNNSASFNFNNSNATTSFVGDFTNANSNLQIAGNAVFGNSTNGSQNTANFNNTGSVNISGNATFDNVVFNGPTNTSVKGQVTLNNITLKNLNAPLSFGDGTITFNAHSVINIAESITNGNPITLVSSSKEIEYNNAFSKNLWQLINYQGHGASSEKLVSSAGNGVYDVVYSFNNQTYNFQEVFSQNSISIRRLGVNMVFDYVDMEKSDHLYYQNALGFMTYMPNSYNNNLGNANNTIYYYDKSIDFYASGKTLFTKAEFSQTFTGQNSAIVFGAKSIWTSLSDAPQSNTIIRFGDNKGAGSNDASGHCWNLQCIGFITGHYEAQKIYITGSIESGNRISSGGGASLNFNGLQGILLTNATLYNRAAGTQSSSMNFISNSANIQAQNSYFIDDTAQNGGNPNFSFNALNLDFSNSSFRGYVGKTQSVFKFNAKNAISFTNSTNLSSGLYQMQAKSVLFDNSNLSVSVGTSSIKANAINLSQNASINASNHSTLELQGDLNVNDTSSLNLNQSTINVSNNATINDYASLIASNGSHLNFNGAVNFNSANITTSLNNSSIVFKGAVSLGGQFNLSNNSSLDFQGSSAITSNTAFNFYDNAFSQSPITFHQALDIKAPLSLGGNLLNPNNSSVLDLKNSQLVFGDQGSLNIANIDLLSDLNDNKNRVYNIIQADMNSNWYERISFFGMHINDGIYDAKNQTYSFTNPLNNALKITESFKDNQLSVTLSQIPGIKNTLYNIGSEIFNYQKVYNNANGVYSYSDDAQGVFYLTSNVKGYYNPNQSYQASGSNNTTKNNNLTSESSIISQTYNAQGNPISALHIYNKGYNFNNIKALGQMALKLYPEIKKVLGNDFSPSSLNALNSNALNQLTKLITPNDWKNINELIDNANNSVVQNFNNGTLIVGATQIGQTDTNSAVVFGGLGYQTPCDYTDIVCQKFRGTYLGQLLESSSADLGYIDTTFNAKEIYLTGTLGSGNAWGTGGSASVTFNSQTSLILNQANIVSSQTDGIFSMLGQEGINKVFNQAGLANILGEVAVQSINKAGGLGNLIVNTLGSNSVIGGYLTPEQKNQTLSQLLGQNNFDNLMNDSGLNTAIKDLIRQKLGFWTGLVGGLAGLGGIDLQNPEKLIGSMSINDLLSKKGLFNQITGFISANDIGQVISVMLQDIVKPSNALKNDVAALGKQMIGEFLGQDTLNSLESLLQNQQIKSVLDKVLAAKGLGPIYEQGLGDLIPNLGKKGLFAPYGLSQVWQKGDFSFNAQGNVFVQNSTFSNANGGTLSFNAGNSLIFAGNNHIAFTNHAGTLQLLSDQVSNINITTLNASNGLKINAANNNVSVSQGNLFVSASCAQQSDPTTANIANPCALSAQSTNGASSNNASNNAPIALSNNDESLMVAANDFNFSGNIYANGVVDFSKIKGSANIKNLYLYNNAQFQANNLTISNQAVLEKNASFVTNNLNIQGAFNNNATQKIEVLQNLVIASNASLSTGIYGLEVGGALNNSGAIHFNLENTQTPTPLIQAEGIINLNTTQTPFMNVNNSMANNTTYTLLKSSRYIDYNINPNSLQSYLNLYTLININGNHIEEKNGALTYLGQRVLLQDKGLLLSVALPNSNNASQNNILSLSVLYNQVKMSCGDKAMDFTPPTLQDYIVGIQGQSALNQIEAVGGNAIKWLSTLMMETKENPFFAPIYLKNHSLNEILGVTKDLQNTASLISNPNFRDNATNLLELASYTQQTSRLTKLSDFRSREGESDFSLLELKNKRFSDPNPEVFVKYSQLSKHPNNLWVQGVGGASFISGGNGTLYGLNAGYDRLVKNVILGGYVAYGYSDFNGNIMHSLGNNVDVGMYARAFLKRNEFTLSANETYGGNATSINSSNSLLSVLNQRYNYNTWTTSVNGNYGYDFMFKQKSVVLKPQVGLSYHFIGLSGMKGNDAAYKQFLMHSNPSNESVLTLNMGLESRKYFGKNSYYFVTARLGRDLLIKSKGSNTVRFVGENTLLYRKGEVFNTFASVITGGEMHLWRLVYVNAGVGLKMGLQYQDINITGNVGMRVAF

SEQ ID NO: 58674 - protein, 559 aa, Helicobacter pylori
MIFGDFKYQKSVKKLTATNLNELKNALDFISQNRGNGYFVGYLLYEARLAFLDENFQSQTPFLYFEQFLERKKYSLEPLKEHAFYPKIHSSLDQKTYFKQFKAVKERLKNGDTYQVNLTMDLFLDTKAKPKRVFKEVVHNQNTPFKAFIENEFGSVLSFSPELFFELEFLDTAIKIITKPMKGTIARSKNPLIDEKNRLFLQNDDKNRSENVMIVDLLRNDLSRLALKNSVKVNQLFEIISLPSVYQMISEIEAKLPLKTSLFEIFKALFPCGSVTGCPKIKTMQIIESLEKRPRGVYCGAIGMVEEKKALFSVPIRTLEKRVHENFLHLGVGSGVTYKSKAPKEYEESFLKSFFVMPKIEFEIVETMKIIKKDQKLEINNKNAHKERLMNSTRYFNFKYDENLLDFELEKEGVLRVLLNKKGKLIKEYKTLEPLKSLEIRLSEAPIDKRNDFLYHKTTYAPFYQKARALIKKGVMFDEIFYNQDLELTEGARSNLVLEIHNRLLTPYFSAGALNGTGVVGLLKKGLVGHAPLKLQDLQKASKIYCINALYGLVEVKIK

SEQ ID NO: 58675 - protein, 104 aa, Helicobacter pylori
MSYAIFKHGGKQYKVVEGDIVLLDKMDKEPKALVELVEVLAVSKEGKLSCGKPFVNGAKIEAEVINEGRGKKVITFKKRRRKDSKTKRGFRRDFTRVRITKIVA

SEQ ID NO: 58676 - protein, 88 aa, Helicobacter pylori
MAHKKGQGSTQNNRDSAGRRLGVKKFGSEFVRAGNIIVRQRGTKMHPGNNVGMGKDHTLYALIDGVVKFEHKDRNRKKVSVVSQNFGE

SEQ ID NO: 58677 - protein, 549 aa, Helicobacter pylori
MNNVFVKGLFFFLLLFGFFLKASESPNATLNPSKENVSVEEQKRFGGVLVFARGADGSSMDPALVTDGESYVATGNIYDTLVQFRYGTTEVEPALATSWDISPDGLVYTFHLRKGVYFHQTKYWNKKVEFSAKDVLFSFERQMDKAKRYYSPGAKSYKYWEGMGMSHIIKSIEALDDYTIRFTLNGPEAPFLANLGMDFLSILSKDYADYLAQNNKKDELAKKPIGTGPFKFFLWNKDEKIILLKNQDYWGPKAYLDKVVVRTIPNSSTRALALRTGEIMLMTGPNLNEVEQLEKVPNIVVDKSAGLLASWLSLNTQKKYFDNPLVRLAINHAINADDYIKVLYEGFAQKMVNPFPPTIWGYNYNIKPYEYDLKKAKELLKQAGYPNGFKTTIFTTATRNPKGAVFIQASLAKIGIDVKIEVYEWGAYLKRTGLGEHEMAFSGWMADIADPDNFLYTLWSEQAASAIPTQNHSFYKNKEFSNLLIKAKRVSDQKEREALYLKAQEIIHKDAPYVPLAYPYSVVPHLSKVKGYKTTGVSVNRFFKVYLEK

SEQ ID NO: 58678 - protein, 334 aa, Helicobacter pylori
MLSFIIKRILWAIPTLFGVSIIVFMMVHLVPGDPALVILGEKANQAAIDALREQFGLNKPLIEQYFFFINNVLHGNFGTSIMTGEPVMHEFWQRFPATVELALIALFMALVLGISVGVLAAIKRYSVFDYSSMTFALAGISMPVFWLGLMLIYIFSVQLGWLPVFGRLSDVYYLDGPTGLYLIDSLIARDYGAFMDTIKHLILPSIVLATVSTAVIARMTRASMAEVSKEDYVRTAKAKGCSSFRVIFVHTLRNALIPVTTIAGLMLAGLLGGSMITETVFSWPGIGKWIVNALNQRDFPIIQSMSLIIAMMYIGANLLVDILYAFIDPRIRLS

SEQ ID NO: 58679 - protein, 287 aa, Helicobacter pylori
MILEVKDLKTYFFTDKGVNKAVDGVSFGLKKSQTLCIVGESGSGKSITSLSILGLIEKPGQIVGGSIQFLGQDLLQLKEKQMQKEIRGKKIGMIFQEPMTSLNPSYTVGFQINEVLKIHHPNLNKKERLERVVYELERVGIPHAGDKYHEYPFNLSGGQRQRVMIAMAMVCEPEILIADEPTTALDVTIQAQILELMKELQQKKGTSILFITHDLGVVAQIADEVVVMYKGHVVEQASAKELFADPRHPYTKALLSAIPKPGKEYRKKRLETVDENVDYLSFQKELR

SEQ ID NO: 58680 - protein, 268 aa, Helicobacter pylori
MKLLEIKELKKSYAIDRGLFKPKRVIHALNGISFEVEQNEVLSIVGESGCGKSTTAKILAGIERQDSGAIYFNGKRHLHFSKQDWFDYRKKVQMIFQDPYSSLNPRWKVGEIIAEPLLLNSHFSKKEIKTKVLEIMQKVGLKLEWIDRYPHQFSGGQRQRIGIARALILHPSVVICDEPVSALDVSIQAQVLNLLLDLQKEMGLTYIFISHDLGVVEHISDKIIVMNQGQIVETGDVDSVISAPKHPYTQKLLNAVPHLEKSMQRFAK

SEQ ID NO: 58681 - protein, 360 aa, Helicobacter pylori
MFVDSVEIIIASGKGGPGMVSFRREKFVIKGGPDGGDGGDGGDVYFEVDNNTDTLASFRGTKHHKAKNGAPGGTRNCAGKKGEDKIIVVPPGTQVFVGDELWLDLVEPKERVLALKGGKGGLGNAHFKSATKQQPTYAQKGLEGVEKCVRLELKLIADIGLVGFPNAGKSTLISTISNAKPKIANYEFTTLVPNLGVVSVDEKSGFLMADIPGIIEGASEGKGLGISFLKHIERTKVLAFVLDASRLDLGIKEQYQRLRLELEKFSSALANKPFGVLLNKCDVVENIDEMTKDFCAFLNLGAQKLNEFGLEPYLGFLHPHLTNDFENNPNEQSALFVLPLSAVSALNVHALKFVLLEALP

SEQ ID NO: 58682 - protein, 321 aa, Helicobacter pylori
MPKIPITLITGFLGSGKTSFLSEYLNQTDHQGVALIINEIGQAALDQRILSVQYCGEKMLYLNAGCVCCNKRLDLVESLKATLNNYEWHGEILRRIIIETTGLANPAPILWTILSDTFLGVHFEIQSVVACVDALNAREHLTNNEAKEQIVFADSVLLTKTDLQNDSAALTKLKERIQALNPSAEIFDKRAIDYESLFSRKNRARNFMPRMPKDSHSQGFETLSINFEGTMEWSAFGIWLSLLLHQYGTQILRIKGIIDIGSGFLVSINGVMHVIYPPKHILKDQNGSNLVFIMRHLEREKILNSLKGFKDFLGIKGFETQ

SEQ ID NO: 58683 - protein, 745 aa, Helicobacter pylori
MKKHILSLALGSLLVSTLSAEDDGFYTSVGYQIGEAAQMVTNTKGIQQLSDNYENLNNLLTRYSTLNTLIKLSADPSAINAVRENLGASTKNLIGDKANSPAYQAVFLAINAAVGLWNTIGYAVMCGNGNGTESGPGSVIFNDQPGQDSTQITCNRFESTGPGKSMSIDEFKKLNEAYQIIQQALKNQSGFPELGGNGTKVSVNYNYECRQTADINGGVYQFCKAKNGSSSSSNGGNGSSTQTTATTTQDGVTITTTYNNNKATVKFDITNNAEQLLNQAANIMQVLNTQCPLVRSTNNENTPGGGQPWGLSTSGNACSIFQQEFSQVTSMIKNAQEIIAQSKIVSENAQNQNNLDTGKPFNPYTDASFAQSMLKNAQAQAEMFNLSEQVKKNLEVMKNNNNVNEKLAGFGKEEVMTNFVSAFLASCKDGGTLPNAGVTSNTWGAGCAYVGETISALTNSIAHFGTQEQQIQQAENIADTLVNFKSRYSELGNTYNSITTALSKVPNAQSLQNVVSKKNNPYSPQGIETNYYLNQNSYNQIQTINQELGRNPFRKVGIVNSQTNNGAMNGIGIQVGYKQFFGQKRKWGARYYGFFDYNHAFIKSSFFNSASDVWTYGFGADALYNFINDKATNFLGKNNKLSLGLFGGIALAGTSWLNSEYVNLATVNNVYNAKMNVANFQFLFNMGVRMNLARSKKKGSDHAAQHGIELGLKIPTINTNYYSFMGAELKYRRLYSVYLNYVFAY

SEQ ID NO: 58684 - protein, 541 aa, Helicobacter pylori
MHTLIKGILEEILEEEVIVEYPKDREHGHYATPIAFNLAKVFKKSPLAIAEELALKISTHEKTQGLFDSVVACKGYINFTLSLDFLERFTQKALELKEKFGSQVKSERSQKIFLEFVSANPTGPLHIGHARGAVFGDSLAKIARFLGHEVLCEYYVNDMGSQIRLLGLSVWLAYREHVLKESVTYPEVFYKGEYIIEIAKKANNDLEPSLLKENEETIIEVLSGYARDLMLLEIKDNLDALGIHFDSYASEKEVFKHKDAVFEQLEKANALYEKDSKIWLKSSLYQDESDRVLIKEDKSYTYLAGDIVYHDEKFKQDYTKYINIWGADHHGYIARVKASLEFLGYDSNKLEVLLAQMVRLLKDNEPYKMSKRAGNFILIKDVVDDVGKDALRFIFLSKRLDTHLEFDVNTLKKQDSSNPIYYIHYANSRIHTMLEKSPFSKEEVLQTPLTNLNAEEKYLLFSALSLPKAIESSFEEYGLQKMCEYAKTLASEFHRFYNAGKILDTPKAKELLKICLIVSLSLSNAFKLLGIEIKTKISARD

SEQ ID NO: 58685 - protein, 505 aa, Helicobacter pylori
MKMILFNQNPMITKLLESVSKKLELPIENFNHYQELSARLKENQEWLLIADDECLEKLDQVDWLELKETISQNKNSVCMYKKGNEAQPFLEGFEVKIKKPFLPTEMLKVLQKKLGSNASELEPSQNLDPTQEVLETNWDELENLGDLEALVQEEPNNEEQLLPTLNDQEEKEEVKEEEKEEVKEEEKEEVKEEEKEEVKETPQEEKKPKDDETQEGETLKDKEVSKELEAPQELEIPKEETQEQDPIKEETQENKEEKQEKTQDSPSAQELEAMQELVKEIQENSNGQENKEKTQESAEIPQDKEIQEVVTEKTQAQELEVPKEKTQESAEALQETQAHELEKQEIAETPQDVEIPQSQDKEVQELEIPKEETQENTETPQDVETPQEKETQEDHYESIEDIPEPVMAKAMGEELPFLNEAVAKIPNNENDTETPKESVTETSKNENNTETPQEKEESDKTSSPLELRLNLQDLLKSLNQESLKSLLENKTLSIKITLEDKKPNA

SEQ ID NO: 58686 - protein, 260 aa, Helicobacter pylori
MQKDYQKLIVYLCDFLEKEVQKRGFKKVVYGLSGGLDSAVVGVLCQKVFKENAHALLMPSSVSMPENKTDALNLCEKFSIPYTEYSIAPYDAIFSSHFKDASLTRKGNFCARLRMAFLYDYSLKSDSLVIGTSNKSERMLGYGTLFGDLACAINPIGELFKTEVYELARRLNIPKKILNKPPSADLFVGQSDEKDLGYPYSVIDPLLKDIEALFQTKPIDTETLAQLGYDEILVKNITSRIQKNAFKLELPAIAKRFNPE

SEQ ID NO: 58687 - protein, 330 aa, Helicobacter pylori
MALPVYYDKDIDLGVIQSLQVGIIGYGAQGEAQALNLRDSKVKARIGLYQGSLSVSKAKKEGFEVLEVKELVQNSDVIMALLPDELHKEVLEKEVIPFLKEGQIVGFAHGFSVHFNQVVLPKGVGAILVAPKGPGSALREEYLKNRGLYHLIAIEQESSIHNAKAVALSYAKAMGGGRMGVLETSFKEECESDLFGEQAVLCGGLEAIVRMGFETLIKAGYPEELAYFECVHEVKLVADLLHYKGVEGLRKHISNTAEFGAIKAREPMGKLLKKRMQKILKKIQNGSFAKDFLLEKSLNYPRLNTERKALKETKIEQIGEILRAPFNHKK

SEQ ID NO: 58688 - protein, 516 aa, Helicobacter pylori
MKQKLKAQIKERMASIAYNEKGFPSPFLFKDLKKAALKIIEAMRTNTEILVVGDYDADGVISSAIMAKFFESLNYKHVRIAIPNRFMDGYGISKKFLEKHHAPLIITVDNGINAFEAARFCKEKNYTLIITDHHCLHHDEVPDAYAVINPKQPDCDFIQKEVCGALVAFYLCYGIHQLLGKEKSHSSELLCLAGVATIADMMPLTFFNRFLVSKALYFLQKESLGAMGFLRQREVFRKRSLKASDISFNIAPLINSAGRMQDAKMALDFLSANNSQDGYSLYERLKACNLKRKMIQQQVFEEAFKHAMVGEKIIVAFKDNWHEGVLGIVASKLVEATQKPSLVFTFKEGVYKGSARSSSNIDLIDALNGVSSLLLGYGGHRQACGLSVEKNNIISLFETLENFDFKVLPFCKTEPPLTLKLKDIDRELLEIIEMGEPYGQENPEPLFQAKNLEVIEEKIIKESHQVLRFKDKECVKEAIYFSAERFLKAGEKVSVLFSVELDECSNEPKMFVKSLL

SEQ ID NO: 58689 - protein, 538 aa, Helicobacter pylori
MDRAKFIFVTGGVLSSLGKGISSSSIATLLQHCNYQVSILKIDPYINIDPGTMSPLEHGEVFVTSDGAETDLDIGHYERFLNRNLTRLNNFTTGQIFSSVIENERKGEYLGKTIQIVPHVTDEIKRRIKSAAKGLDFLIVEVGGTVGDMEGMFYLEAIRQLKLELGNEKVINVHVTLIPYIQTTNELKTKPTQHSVQELRRLGVTPQIILARSPKPLDKELKNKIALSCDVEQDSVIVATDTKSIYACPILFLQEGILTPIARRFNLNKLHPKMAAWNTLVEKIIAPKHKVKIGFVGKYLSLKESYKSLIEALIHAGAHLDTQVNIEWLDSENFNEKTDLEGVDAILVPGGFGERGIEGKICAIQRARLEKLPFLGICLGMQLAIVEFCRNVLGLKGANSTEFNQRCEYPVVYLIGDFMDQNHQKQVRTYNSPLGGTMRLGEYECEIMPNSLLEKAYKKPSIKERHRHRYEINPKYRQEWENKGLKVVGFGSNHLIEAIELEDHPFFVGVQFHPEFTSRLQSPNPIILDFIKSALSKS

SEQ ID NO: 58690 - protein, 222 aa, Helicobacter pylori
MAENSFKNVSTQPKVFFLLPAKTLFLLGGVFSAFFILIAGLVFFDYAHLMDNAIFNFARSTPFNSSPILTLILQNIANLGSSQFVLPLSLLVGVFLSLYRRNLVLGVWFVLSVILFEALLESLKHLFAYSIQWLSRSANFPNATALSLVLFYGLLILLIPHLITHQTLKNVLFYSLFGLIFLIGLALIVLGVSFSSVLGGFCLGALGACFSIGIYLSVFQKI

SEQ ID NO: 58691 - protein, 343 aa, Helicobacter pylori
MATKLTPKQKAQLDELSMSEKIAILLIQVGEDTTGEILRHLDIDSITEISKQIVQLNGTDKQIGAAVLEEFFAIFQSNQYINTGGLEYARELLTRTLGSEEAKKVMDKLTKSLQTQKNFAYLGKIKPQQLADFIINEHPQTIALILAHMEAPNAAETLSYFPDEMKAEISIRMANLGEISPQVVKRVSTVLENKLESLTSYKIEVGGLRAVAEIFNRLGQKSAKTTLARIESVDNKLAGAIKEMMFTFEDIVKLDNFAIREILKVADKKDLSLALKTSTKDLTDKFLNNMSSRAAEQFVEEMQYLGAVKIKDVDVAQRKIIEIVQSLQEKGVIQTGEEEDVIE

SEQ ID NO: 58692 - protein, 242 aa, Helicobacter pylori
MRCFKATIAYDGAYFLGYAKQPNKLGVQDKIEDALNALGIKSVVIAAGRTDKGVHANNQVLSFHAPKHWNAAKLFYYLAPKLAPHIVLKKLEEKNFHARFDAQKRAYRYLLTKNLKTPFLAPYIACGDYGSLDALNTALKQFTGKHDFSMFKKEGGATTNPKRTIFNAFAYKTFIIGHECVVFKIIGDAFLRSSVRLIIQACVQYSLEKITLAEIQAQIHNLKATIRTPIMANGLYLHRVYY

SEQ ID NO: 58693 - protein, 341 aa, Helicobacter pylori
MEVSRKKIYNPNSTESVNERKIFGGNPTSMFDLNKIKYQWADHLWKTMLANTWFAEEVSMNDDKRDYLKLSAEEKIGYDRALAQLIFMDSLQANNLIDNINPFITSPEINLCLVRQAYEEALHSHAYAVMVESISANTEEIYDMWRNDMQLKSKNDYIAQVYMELAKNPTEENILKALFANQILEGIYFYSGFSYFYTLARSGKMLGSAQMIRFIQRDEVTHLILFQNMINALRNERADLFTPQLINEVIGMFKKAVEIEALWGDYITQGKILGLTSSLIEQYIQFLADSRLSKVGIAKVYGVQHPIKWVESFSSFNEQRSNFFEARVSNYAKGSVSFDDF

SEQ ID NO: 58694 - protein, 30 aa, Helicobacter pylori
MAKLVDALDLGSSAARHEGSIPFFRTILND

SEQ ID NO: 58695 - protein, 458 aa, Helicobacter pylori
MNKVNKENKKVEKKELSRILIANRGEIALRAIQTIQEMGKESIAIYSIADKDAHYLNTASAKVCIGGAKSSESYLNIPAIISAAELFEADAIFPGYGFLSENQNFVEICSHHSLEFIGPSAKVMALMSDKSKAKSVMKEAGMPVIEGSDGLLKSYQEAEEIADKIGYPVIIKAAAGGGGRGMRVVGDKSKLKNLYLAAETEALSAFGDGSVYLEKFINKPKHIEVQILADKHGNVIHVGERDCSVQRRQQKLIEETPAVVLEEGVRERLLETAIKAAKYIGYVGAGTFEFLLDSNMKDFYFMEMNTRLQVEHTISEMVSGLNLIEWMIKIAQGEKLPKQESFSLKGHAIECRITAEDPKKFYPSPGKITEWIAPGGVNVRLDSHAHANYVVPTHYDSMIGKLIVWGENRERAIAKMKRALKEFKVEGIKTTIPFHLEMLENADFRQAKIHTKYLEENF

SEQ ID NO: 58696 - protein, 156 aa, Helicobacter pylori
MNLSEIEELIKEFKASDLGHLKLKHEHFELVLDKESAYAKKSALNPAHSPAPIMVEASMPSVQTPVPMVCTPIVDKKEDFVLSPMVGTFYHAPSPGAEPYVKAGDTLKKGQIVGIVEAMKIMNEIEVEYPCKVVSVEVGDAQPVEYGTKLIKVEKL

SEQ ID NO: 58697 - protein, 700 aa, Helicobacter pylori
MLRFVSKTICLSLIGLFNPLEAFQKHQKDGFFIEAGFETGLLEGTQTKEEVITTQKIYENPLTHPQTKEQPKEQNKSDTATPQSAYGKYYIPQSTILKNATALFTTDKIENGLTFYSQNPVYANMVNGSVTIQNFLPYNLNNVELSFKDAQGKVVNLGVIETIPKQSQITLPASLFNDSEFEQADSFNYQQLQATATQFSDANTQSLFQKLSKITTNVTMSYENADTNNFKGNCHDCVSDFTPQTAEELTNLMLDMIAVFDSKSWEEAVLNAPFQFSNSSSECGSDFPKCVNPFNNGRVAPIYEKYVLTPQSVIDAFRRTINLEVNILKSGFVGLGYELDDNDGNLGIEASALNPEKLFGKTLNKVDIVELRDIIHEFSHTKGYTHNGNMTYQRVRLCQENGGAIQECEGGKEELVNGKEELKFTNGKEVKDQDGYTYDVCSFYKDNHQVYTASNYPNSIYTNCAQVPAGLIGVTTAVWQQLINQNALPINFANLNSPTNHLNAGLNAQNFATSIVSAIAQNFSTTSTTTYRSSSKNFRSPILGVNVKIGYQHYFNDYIGLAYYGIIKYNYAKTNDEKIQQLSYGGGMDVLFDFITTYANKKQDNPTKKVFASSFGVFGGLRGLYNSYYVFNQVKGSGNLDIVTGFNYRYKHSKYSVGISVPLIQSGIKIASNNGIYANSVVLNEGGSHFKVFFNYGWIF

SEQ ID NO: 58698 - protein, 226 aa, Helicobacter pylori
MRFVYHPLAKEPVLKIEGESYTHLYRSRRVKSASRLDLRNLKDGFLYTYEHAEITKKHALLKLVGARLLEVMASKKTHLILSVIEIKNIEKILPFLNQLGVSKLSLFYADFSQRNEKIDIAKLERFQKILIHSCEQCGRSALMELEVFSNTKEALKAYPKASVLDFKGETLPASADFEKGVIIGPEGGFSEPERGYFKEREIYRIPLDMVLKSESACVFVASIAQV

SEQ ID NO: 58699 - protein, 936 aa, Helicobacter pylori
MKNLKSLLSFLLASFWVAIPLIALYALACAIATFIENDYGTSASKAIVYNTPWFNFLHAYLLVVLIGTFINSKALERKRYASLFFHSSLIFIILGAAITRFFGVEGLMHVRENSAQSSFESADTYLNITLNDTTKLSLKTPLTFYHSKRLRPIHATLNHKPLILEPLEIYKQNAIKKDDATILVLKATYNGVSRKFNLIKTNRNEGIEESEVFKDDKLSLSFGSAYIELPFQIKLKRFELERYAGSMSPSSYASEVEVLKLDNTLIKPYRIFMNHVLDYEGYRFFQSSYDMDEKGTILSVNKDPGKIPTYLGYAMLILGALWLLLDKNGRFLKLSRFLKSQQVASFLLALILISPFTSSFANEAPIDMHGGKSAKIERQSVENSAQKENSKSAILERLKRLREYSKDHLKAFQRLQVQDFDGRIKPLDTISIEYIHKILKKDDFQGLNAMQVLLGIMFFPNDWRSIKMIYTSTKALRKLIGTPLDESRIAFRDAFDSRGYKLKNLVEEVNQKSPNARNELDKDVLKVDERINLVYTLFSAQFLRIFPSDKTTAWLSPIEAISSPNKEISSVATEFLKNIFSGFDDALKTNQWDKVEKTLKDLSIYQKEHAKNLYLSSSKVDSEIFLNHTNFFNRLTLPYILLGLLLFIVVISSLVKNTIPNIWLTKILYFAILLCALAHSMGLVLRWYVSGHSPWSNAYESMLYIAWASVIAGFILRSKLALSASSFLAGIALFVAHLGFMDPQIGHLVPVLKSYWLNIHVSVITASYSFLGLCFVLGILSLVLFILRKQGRFNLDKTILSISAINEMSMILGLFMLTAGNFLGGVWANESWGRYWGWDPKETWALISICVYALILHLRFLGSHNWPFILASSSVLGFYSVLMTYFGVNYYLSGLHSYAAGDPLPIPTFLYFLVAIPFALVILAYFKRHLSLPKLA

SEQ ID NO: 58700 - protein, 448 aa, Helicobacter pylori
MYVEKILQSLQKKYPYQKEFHQAVYEAITSLKPLLDSDKSYEKHAILERLIEPEREIFFRVCWLDDNNQIQVNRGCRVEFNSAIGPYKGGLRFHPSVNESVIKFLGFEQVLKNSLTTLAMGGAKGGSDFDPKGKSEHEIMRFCQAFMNELYRHIGATTDVPAGDIGVGEREIGYLFGQYKKLVNRFEGVLTGKGLTYGGSLCRKEATGYGCVYFAEEMLQERNSSLEGKVCSVSGSGNVAIYTIEKLLQIGAKPVTASDSNGMIYDKDGIDLELLKEIKEVRRGRIKEYALEKKSAEYTPTENYPKGGNAVWHVPCFAAFPSATENELSVLDAKTLLSNGCKCVAEGANMPSSNEAIGLFLQAKISYGIGKAANAGGVSVSGLEMAQNASMHPWSFEVVDAKLHHIMKEIYKNVSQTAKEFKDPTNFVLGANIAGFRKVASAMIAQGV

SEQ ID NO: 58701 - protein, 276 aa, Helicobacter pylori
MTLSQALNKAKKGLSQKGFRGGLESEILLGFVLQKERVFLHTHAYLELNHEEEVRFFELVEKRLNNCPIEYLLESCDFYGRSFFVNEHVLIPRPETEILVQKALDIISQYHLKEIGEIGIGSGCVSVSLALENPNLSIYASDISPNALEVASKNIEHFCLKERVFLKQTRLWDHMPMIEMLVSNPPYIARNYPLEKSVLKEPHEALFGGVKGDEILKEIVFLAAKLKIPFLVCEMGYDQLKSLKECLEFCGYDAEFYKDLSGFDRGFVGVLKSFLR

SEQ ID NO: 58702 - protein, 165 aa, Helicobacter pylori
MSNQLKDLFERQKEASAGSKQEDNEEVLQFIGFIIGDEEYAIPILNILEIVKPIGYTRVPETPNYVLGVFNLRGNVFPLISLRLKFGLKAEKQNKDTRYLVVRHNDQIAGFFIDRLTEAIRIKQTDIDPVPETLSDNNNLTYGIGKQNDRLVTILRVEEILKKDF

SEQ ID NO: 58703 - protein, 222 aa, Helicobacter pylori
MLDYRQKIDALITKIEKARTAYSRHHIVKIVAVSKNASPEAIQHYYNCSQRAFGENKVQDLKTKMHSLEHLPLEWHMIGSLQENKINALLSLKPALLHSLDSLKLALKIEKRCEILGVNLNALLQVNSAYEESKSGVVPEEALEIYSQISETCKHLKLKGLMCIGAHTDDEKEIEKSFITTKKLFDQIKNASVLSMGMSDDFELAIACGANLLRIGSFLFKE

SEQ ID NO: 58704 - protein, 556 aa, Helicobacter pylori
MSKIADDQNFNDEEENFAKLFKKELEKEETLEKGTIKEGLVVSINENDGYAMVSVGGKTEGRLALNEITDEKGQLLYQKNDPIIVHVSEKGEHPSVSYKKAISQQKIQAKIEELGENYENAIIEGKIVGKNKGGYIVESQGVEYFLSRSHSSLKNDANHIGKRVKACIIRVDKENHSINISRKRFFEVNDKRQLEVSKELLEATEPVLGVVRQITPFGIFVEAKGIEGLVHYSEISHKGPVNPEKYYKEGDEVYVKAIAYDAEKRRLSLSIKATIEDPWEEIQDKLKPGYAIKVVVSNIEHYGVFVDIGNDIEGFLHVSEISWDKNVSHPNNYLSVGQEIDVKIIDIDPKNRRLRVSLKQLTNRPFDVFESKHQVGDVLEGKVATLTDFGAFLNLGGVDGLLHNHDAFWDKDKKCKDHYKIGDVIKVKILKINKKDKKISLSAKHLVTSPTEEFAQKHKTDSVIQGKVVSIKDFGVFINADGIDVLIKNEDLNPLKKDEIKIGQEITCVVVAIEKSNNKVRASVHRLERKKEKEELQAFNTSDDKMTLGDILKEKL

SEQ ID NO: 58705 - protein, 764 aa, Helicobacter pylori
MKLSINDLNVFVNTPKDIAKLCEDLSRLGLEVESCIPCIAPKNVVVGKILEKAPHKNAEKLSVCQVDVGKEVLQIVCGAKNVAPNQFVPVALNGALIGSTTIAKTELRGVESHGMICSSIELGFPKINDGILELDESVGELVLGKELNEYAPFNTHVLEISLTPNRGDCLSVLGIAREISAFYHTPLKPIKALNFTPKSGLITLSAGENIESHLAYYLICNHSLKTPLNIKLSLAHNNALSENDLNNFIEFSTHFSGVIMNAYSLNTTPMDLSVKNDENNLESVYINHQKRSTIAIKHQVQKDLSECLLLEASYTDPISLSLKLHALKDKTLQKDNALIYRSARGSNPNLSDGLNFLSAHLKATILESKQTEHSLKDRTLTFQLEDITEILGLAVEKEKIQGILKNLGFKVSVKEPNSKPQILEVIAPNFRHDIKTIQDIAEEILRFVGIDNLVSKPLHCVSSKNSNPNYDTHRFFENLKHKALACGFKEVIHYVFYSKEKQQKLGFEVLEDPLELQNPITTELNTLRTSLVCGLLDASLRNKNLGFKSIALYEKGSVYNSKREEIQKLGFLISGLQKKESYPDTKGKAWDFYSFAECVSKVIGDFSLEKLTTQTPINHPYQSAKIIQNHEIIGVIAKIHPKVIQELDLFESYYAEIDAFKLKRPAMLLKPFSIYPSSVRDLTLIIDENTAFSGIKKALKDAQIPNLSEILPLDIFKESNNSIALSVRCVIHSLEKTLNDEEVNSAVQKALEILEKEFNARLKG

SEQ ID NO: 58706 - protein, 328 aa, Helicobacter pylori
MHTLIERLEKVTNSKELEEARLNALGKKGVFADKFNQLKHLNGEEKNAFAKEIHHYKQAFEKAFEWKKKAIIELELEERLKKEKIDVSLFNAIKTSSSHPLNYTKNKIIEFFTPLGYKLEIGSLVEDDFHNFSALNLPPYHPARDMQDTFYFKDHKLLRTHTSPVQIHTMQEQTPPIKMICLGETFRRDYDLTHTPMFHQIEGLVVDQKGNIRFTHLKGVIEDFLHYFFGGVKLRWRSSFFPFTEPSAEVDISCVFCKQEGCRVCSHTGWLEVLGCGMVNNAVFEAIGYENVSGFAFGMGIERLAMLTCQINDLRSFFETDLRVLESF

SEQ ID NO: 58707 - protein, 508 aa, Helicobacter pylori
MILVLDFGSQYTQLIARRLRERGIYTEIVPFFESIENIQKKAPKGLILSGGPASVYAKDAYKPSGKIFDLNVPILGICYGMQYLVDFFGGVVVGANEQEFGKAVLEITQNSVIFEGVKIKSLVWMSHMDKVIELPKGFTTLAKSPNSPHCAIENGKIFGLQFHPEVVQSEEGGKILENFALLVCGCEKTWGMQHFAQREIARLKEKIANAKVLCAVSGGVDSTVVATLLHRAIKDNLIAVFVDHGLLRKNEKERVQAMFKDLKIPLNTIDAKEVFLSKLKGVSEPELKRKIIGETFIEVFEKEAKKHHLKGKIEFLAQGTLYPDVIESVSVKGPSKVIKTHHNVGGLPEWMDFKLIEPLRELFKDEVRLLGKELGVSQDFLMRHPFPGPGLAVRILGEISESKIKRLQEADFIFIEELKKANLYDKVWQAFCVLLNVNSVGVMGDNRTYENAICLRAVNASDGMTASFSFLEHSFLEKVSNRITNEVSGINRVVYDITSKPPGTIEWE

SEQ ID NO: 58708 - protein, 623 aa, Helicobacter pylori
MRLLLWWVLVLSLFLNPLRAVEEHETDAVDLFLIFNQINQLNQVIETYKKNPERSAEISLYNTQKNDLIKSLTSKVLNERDKIGIDINQNLKEQEKIKKRLSKSINGDDFYTFMKDRLSLDILLIDEILYRFIDKIRSSIDIFSEQKDVESISDAFLLRLGQFKLYTFPKNLGNVKMHELEQMFSDYELRLNTYTEVLRYIKNHPKEVLPKNLIMEVNMDFVLNKISKVLPFTTHSLQVSKIVLALTILALLLGLRKLITWLLALLLDRIFEIMQRNKKMHVNVQKSIVSPVSVFLALFSCDVALDIFYYPNASPPKVSMWVGAVYIMLLAWLVIALFKGYGEALVTNMATKSTHNFRKEVINLILKVVYFLIFIVALLGVLKQLGFNVSAIIASLGIGGLAVALAVKDVLANFFASVILLLDNSFSQGDWIVCGEVEGTVVEMGLRRTTIRAFDNALLSVPNSELAGKPIRNWSRRKVGRRIKMEIGLTYSSSQSALQLCVKDIKEMLENHPKIANGADSALQNVSDYRYMFKKDIVSIDDFLGYKNNLFVFLDQFADSSINILVYCFSKTVVWEEWLEVKEDVMLKIMGIVEKHHLSFAFPSQSLYVESLPEVSLKEGAKI

SEQ ID NO: 58709 - protein, 650 aa, Helicobacter pylori
MQKSLITTPIYYVNDIPHIGHAYTTLIADTLKKYYTLQGEEVFFLTGTDEHGQKIEQSARLRNQSPKAYADSISTIFKDQWDFFNLDYDGFIRTTDSEHQKCVQNAFEIMFEKGDIYKGAYSGYYCVSCESYCAISKADNTNDKVLCPDCLRETTLLEEESYFFRLSAYEKPLLDFYAKNPEAILPVYRKNEVTSFIEQGLLDLSITRTSFEWGIPLPKKMNDPKHVVYVWLDALLNYASALGYLNDLDNKMAHFECARHIVGKDILRFHAIYWPAFLMSLNLPLFKQLCVHGWWTIEGVKMSKSLGNVLDAQKIAMEYGIEELRYFLLREVPFGQDGDFSKKALIERINANLNNDLGNLLNRLLGMAKKYFNHSLKSTKITAYYSKELEKVHQILDNANSFVPKMQLHKALEELFNVYDFLNKLIAKEEPWVLHKNNESEKLEALLSLIANALLQSSFLLYAFMPKSAVKLANAFNTEITPDNYERFFKAKKLQDMILQDTEPLFSKMEKIEKTEKAGEASPEKNEKEKKDAKEKAPLKQENYIGIEDFKKVEIKVGLIKEAQRIEKSNKLLRLKVDLGEGRLRQIISGIALDYEPESLVGQMVCVVANLKPAKLMGEMSEGMILAVRDSDNLALISPTREKIAGSLIS

SEQ ID NO: 58710 - protein, 389 aa, Helicobacter pylori
MVIVLVVDSFKDTSNGTSMTAFRFFEALKKRGHVMRVVAPHVDNLGSEEEGYYNLKERYIPLVTEISHKQHILFAKPDEKILRKAFKGADMIHTYLPFLLEKTAVKIAREMQVPYIGSFHLQPEHISYNMKLGWFSWFNMMLFSWFKSSHYRYIHHIHCPSKFIVEELEKYNYGGKKYAISNGFDPMFRFEHPQKSLFDTTPFKIAMVGRYSNEKNQSVLIKAVALSKYKQDIVLLLKGKGPDEKKIKLLAQKLGVKAEFGFVNSNELLEILKTCTLYVHAANVESEAIACLEAISVGIVPVIANSPLSATRQFALDERSLFEPNNAKDLSAKIDWWLENKLERERMQNEYAKSALNYTLENSVIQIEKVYEEAIRDFKNNPHLFKTLS

SEQ ID NO: 58711 - protein, 427 aa, Helicobacter pylori
MLNAIKFRIYPNAQQKELISKHFGCSRVVYNYFLDYRQKQYAKGIKETYFTMQKVLTQIKRQEKYHYLNECNSQSLQMALRQLVSAYDNFFSKRARYPKFKSKKNAKQSFAIPQNIETKTETQTIALPKFKEGIKAKLHRDLPKDSVIKQAFISCIADQYFCSLSYETKEPIPKPTIIKKAVGLDMGLRTLIVTSDKIGYPHIRFYQKLEKKLTKAQRRLSKKVKDSNNRKKQAKKVSRLHLACSNTRDDYLHKISNEITNQYDLIGVETLNVKALMRTYHSKSLANASWGKFLTMLEYKAQRKGKTLLSIDRFFPSSQLCSYCGVNTGKKHESITKFTCPHCQTTHHRDYNASVNIRNYALGMLDDRHKVKTDKARVGIIRSDYTHHTNECVKACGASSNGVSSKYGNILDLASYGAMKQEKAQSL

SEQ ID NO: 58712 - protein, 246 aa, Helicobacter pylori
MKNTFKAFAFLIVFFSSALLAQDLKIAAAANLTRALKALVKEFQKEHPKDTVNISFNSSGKLYAQIIQNAPFDLFISADMIRPKKLYDKKITPFKEEVYAKGVLVLWSEDLKMDSLEILKNPKIKRIAMANPKLAPYGKASMEVLENLKLTPSLKSKIVYGASISQAHQFVATKNAQIGFGALSLMDKKDKNLSYFIIDKALYNPIEQALIITKNGANNPLAKVFKDFLFSPKARAIFKEYGYIVD

SEQ ID NO: 58713 - protein, 463 aa, Helicobacter pylori
MSLIVTRFAPSPTGYLHIGGLRTAIFNYLFARANQGKFFLRIEDTDLSRNSIEAANAIIEAFKWVGLEYDGEILYQSKRFEIYKEYIQKLLDEDKAYYCYMSKEELDALREEQKARKETPRYDNRYRDFKGTPPKGIEPVVRIKVPQNEVIGFNDGVKGEVKVNTNELDDFIIARSDGTPTYNFVVTIDDALMGITDVIRGDDHLSNTPKQIVLYKALNFKIPNFFHVPMILNEEGQKLSKRHGATNVMDYQEMGYLKEALVNFLARLGWSYQDKEVFSMQELLELFDPKDLNSSPSCFSWHKLNWLNAHYLKNQSVQELLKLLKPFSFSDLSHLNPTQLDRLLDALKERSQTLKELALKIDEVLIAPVEYEEKVFKKLNQALVMPLLEKFKLELNKANFNDESALENAMRQIIEEEKIKAGSFMQPLRLALLGKGGGIGLKEALFILGKTESVKRIEDFLKN

SEQ ID NO: 58714 - protein, 599 aa, Helicobacter pylori
MKNIRNIAVIAHVDHGKTTLVDGLLSQSGTFSEREKVDERVMDSNDLERERGITILSKNTAIYYKDTKINIIDTPGHADFGGEVERVLKMVDGVLLLVDAQEGVMPQTKFVVKKALSFGICPIVVVNKIDKPAAEPDRVVDEVFDLFVAMGASDKQLDFPVVYAAARDGYAMKSLDDEKKNLEPLFETILEHVPSPSGSVDEPLQMQIFTLDYDNYVGKIGIARVFNGSVKKNESVLLMKSDGSKENGRITKLIGFLGLARTEIENAYAGDIVAIAGFNAMDVGDSVVDPANPMPLDPMHLEEPTMSVYFAVNDSPLAGLEGKHVTANKLKDRLLKEMQTNIAMKCEEMGEGKFKVSGRGELQITILAENLRREGFEFSISRPEVIIKEENGVKCEPFEHLVIDTPQDFSGAIIERLGKRKAEMKAMNPMSDGYTRLEFEIPARGLIGYRSEFLTDTKGEGVMNHSFLEFRPFSGSVESRKNGALISMENGEATAFSLFNIQERGTLFINPQTKVYVGMVIGEHSRDNDLDVNPIKSKHLTNMRASGSDDAIKLTPPRTMVLERALEWIEEDEILEVTPLNLRIRKKILDPNMRKRAKK

SEQ ID NO: 58715 - protein, 528 aa, Helicobacter pylori
MKLKKRKVAAALLKRFTLPLLFTTGSLGAVTYEVHGDFINFAKVGFNHSPINPVKGIYPTETFVNLTGKLEGSVHLGRGWTVNLGGVLGGQAYDGTKYDRWAKDFTPPSYWDKTSCGTDSMSLCMNATKMWQQSGPGGVINPRGIGWEYMGEWNGLFPNYYPANAYLPGGSRRYQVYKANLTYDSDRVHMVMGRFDITEQEQMDWIYQLFQGFYGTFKLTKNMKFLLFSGWGRGIADGQWLFPIYREKPWGVHKAGIIYRPTKNLMIHPYVYLIPMVGTLPGAKIEYDTNPEFSGRGIRNRTTFYALYDYRWNNAEYGRYAPARYNTWDPFLDNGKWRGLQGPGGATLLLRHHIDINNYFVVGGAYLNIGNPNMNLGTWGNPVAVDGIEQWVGSIYSLGFAGIDNITDADAFTEYVKGGGKHGKFSWSVYQRFTTAPRALEYGIGMYLDYQFSKHVKAGLKLVWLEFQIRAGYNPGTGFLGPNGQPLNLNTGLFESSAFAQGPQNMGGIAKSITQDRSHLMTHISYSF

SEQ ID NO: 58716 - protein, 378 aa, Helicobacter pylori
MFEKLKFFKIKKDDEIQPEVNLNSEIYEQFKVFRLPLILIQLLVLLGTLGYFALENYSLMQAFFQTTYTMTATGFGALNESQFGPISIFLTSILMFFGAGIIAFSVAILVSVVNKGTLTRLIKEKGMIYKIARLKDHYVICYHNEYTIELSKQFRSAQIPFVVVDNDPSFEEEAIKHKYPYYIIGDPHTNLAMLKTHLSSARGVVALSKILPVNVALMVSVRLFEKELKRKPYYIIASAHSDEGLEKLKKLGADMVVSPTKLMAQRVSAMAVRPDMENILERFINKKDTLLDLEEVIVPKTSWLVLRKLKEAHFREIAKAFVIGITQKDGKYIPMPDGETIIASESKLLMVGTSEGVATCKQLISNHQRPKEVDYISL

SEQ ID NO: 58717 - protein, 62 aa, Helicobacter pylori
MAKRCALTFKGPMIGNHVSHANNKNKRRLLPNLRSIKIQLDDGTTKRIKVAASTLRTMRKGA

SEQ ID NO: 58718 - protein, 353 aa, Helicobacter pylori
MLYSLLYGYFNINLFQYLTFRAGLGFFIAFFLTLFLMPKFILWAKAKKANQPISSFVPSHQNKKDTPTMGGIVFVFATIVASVLCASLGNLYVLLGLIVLVGFSFVGFRDDYTKINQQSNAGMSAKMKFGMLFILSLIVSVLLSLKGLDTFLYAPFLKNPLFEMPTMLAVGFWVLVFLSTSNAVNLTDGLDGLASVPSIFTLLSLSIFVYVAGNAEFSKYLLYPKVIDVGELFVVSLALVGSLFGFLWYNCNPASVFMGDSGSLALGGFIAYNAIVSHNEILLVLMGSIFVIETLSVILQVGSYKTRKKRLFLMAPIHHHFEQKGWAENKVIVRFWIISMLSNLVALLSLKVR

SEQ ID NO: 58719 - protein, 422 aa, Helicobacter pylori
MKISLLGHGKTTLALGRFFKKNHNEVKFFDDKFLSSFKDSEGFLCYPSKDFNPNDSQLEIVSPGISFTHPLVIKAKHLVSEYDYINSLFDLVFTPTIISISGTNGKTTTTEMLTMLLEDFKAVSGGNIGTPLIELFEKRSPLWVLETSSFSLHYTNKAYPLIYLLINIEADHLTWHCNFENYLNAKLKVLTLMPKTSLAILPLKFKEHPIIQNSQAQKIFFDKSEEVLERLKIPSNALFFKGAFLLDAALALLVYEQFLKIKNLKWQDYRENALKRLNAFKIGSHKMEEFRDKQGRLWVDDSKATNIDATLQALKTFKNQKIHLILGGDIKGVNLTPLFEEFKNYKISLYAIGSSAFIIQALALEFNVSCQVCLELEKAVQEIKSVLSQNEIALLSPSAASLDQFSSYKERGEKFKAFVLKD

SEQ ID NO: 58720 - protein, 442 aa, Helicobacter pylori
MGKFSKLGFILATLGSSIGLGHIWRFPYMVGHNGGSAFVLLYLVLTLSLGIAMLLVEMLIGNLGKKDVVSNYQILDPKRKKYYPFTSFFILGGPLILSFYAVVLGWVLYYLFVVTFDLPKDLEQAKMQFSMLQNGSLIWPVIGFSACLLPTIWFVSRGIEEGIEKLNVVLMPLLFVIFIGLLIYAMTLESMPKALHFLFNFEIQKIDFKVVMDALGQMFFSLSLGVGTIITYSAFTPKKENLFKSSLFIVLPGILISLIAGVMIFTFVFEYHADVSQGPGLVFISLPLTFAKMGMSGQIVSLFFFMALVFAGITSTVSLIEPLALYLINRFNFSRLQASLWIGVVVYVLGVLVILSMNERYAKFLSFAHKSVFGWLDFITSSFLMPLGGLFSVLFIGWILNKKRSFLATKHFFNANAFKAWHFSVRFIAPVVILAIFILQFK

SEQ ID NO: 58721 - protein, 374 aa, Helicobacter pylori
MKISVSKNDLENALRYLQAFLDKKDASSIASHIHLEVIKEKLFLKASDSDIGLKSYIFTQSSDKEGVGTINGKKFLDIISCLKDSNIILETKDDSLAIKQNKSSFKLPMFDADEFPEFPVIDPKVSIEVNAPFLVDAFKKIAPVIEQTSHKRELAGILMQFDQKHQTLSVVGTDTKRLSYTQLEKISIHSTEEDISCILPKRALLEILKLFYENFSFKSDGMLAVIENEMHTFFTKLIDGNYPDYQKILPKEYISSFTLGKEEFKESIKLCSSLSSTIKLTLEKNNALFESLDSEHSETAKTSVEIEKGLDIEKAFHLGVNAKFFLEALNALGTTQFVLRCNEPSSPFLIQESLDEKQSHLNAKISTLMMPITL

SEQ ID NO: 58722 - protein, 773 aa, Helicobacter pylori
MQNYQSHSIKVLKGLEGVRKRPGMYIGDTNVGGLHHMVYEVVDNAVDESMAGFCDTINITLTDEGSCIVEDNGRGIPVDIHPTEKIPACTVVLTILHAGGKFDNDTYKVSGGLHGVGVSVVNALSKRLIMTIKKEGQIYRQEFEKGIPTSELEIIGKTKSAKESGTTIEFFPDESVMEVVEFQAGILQKRFKEMAYLNDGLKISFKEEKTQLQETYFYEDGLKQFVKDSAKKELLTPIISFKSMDEETRTSIEVALAYADDYNENTLSFVNNIKTSEGGTHEAGFKMGLSKAILQYIGNNIKTKESRPISEDIKEGLIAVVSLKMSEPLFEGQTKSKLGSSYARALVSKLVYDKIHQFLEENPNEAKIIANKALLAAKAREASKKARELTRKKDNLSVGTLPGKLADCQSKDPLESEIFLVEGDSAGGSAKQGRDRVFQAILPLKGKILNVEKSHLSKILKSEEIKNMITAFGCGIQESFDIERLRYHKIIIMTDADVDGSHIQTLLMTFFYRYLRPLIEQGHVYIAQAPLYKYKKGKTEIYLKDSVALDHFLIEHGINSVDIEGIGKNDLMNLLKVARHYRYALLELEKRYNLLEILRFLIETKDALSLDMKVLEKSILEKLEGLNYQILRSFATEESLHLHTQTPKGLVEFNLDDNLFKEVLFEEANYTYQKLMEYNLDFLENKDILAFLEEVENHAKKGANIQRYKGLGEMNPNDLWETTMHKENRSLIKLKIEDLEKTDAVFSLCMGDEVEPRRAFIQAHAKDVKQLDV

SEQ ID NO: 58723 - protein, 452 aa, Helicobacter pylori
MLRLLIGLLLMSFISLQSASWQEPLRVSIEFVDLPKKIIRFPAHDLQVGEFGFVVTKLSDYEIVNSEVVIIAVENGVATAKFRAFESMKQRHLPTPRMVARKGDLVYFRQFNNQAFLIAPNDELYEQIRATNTDINFISSDLLVTFLNGFDPKIANLRKACNVYSVGVIYIVTTNTLNILSCESFEILEKRELDTSGVTKTSTPFFSRVEGIDAGTLGKLFSGSQSKNYFAYYDALVKKEKRKEVRIKKREEKIDSREIKREIKQEAIKEPKKANQGTQNAPTLEEKNYQKAERKLDAKEERRYLRDERKKAKATKKAMEFEEREKEHDERDEQETEGRRKALEMDKGDKKEERVKPKENEREIKQEAIKEPSDGNNATQQGEKQNAPKENNAQKEENKPNSKEEKRRLKEEKKKAKAEQRAREFEQRAREHQERDEKELEERRKALEAGKK

SEQ ID NO: 58724 - protein, 254 aa, Helicobacter pylori
MKIGVYGASGRIGKLLLEELKGGYKGLALSSVFVRQKCETDFSSFSHAPLVTNDLKAFVRACECVIDFSLPKGVDNLLEALLECPKILVSGTTGLEKETLEKMQQLALKAPLLHAHNMSIGIMMLNQLAFLTSLKLKDADIEIIETHHNLKKDIPSGTALSLYETCAKARGYDEKNALITHREGLRSKESIGIAALRGGDVAGKHTIGFYLEGEYIELSHTATNRSIFAKGALEVALWLKDKAAKKYEINEMFG

SEQ ID NO: 58725 - protein, 481 aa, Helicobacter pylori
MIVRTQNSESKIKEFFEFCKENEVEFVDFRFSDIKGTWNHIAYSFGALTHGMLKEGIPFDASCFKGWQGIEHSDMILTPDLVRYFIDPFSADVSVVVFCDVYDVYKNQPYEKCPRSIAKKALQHLKDSGLGDVAYFGAENEFFIFDSIKIKDASNSQYYEVDSEEGEWNRDRSFENGVNFGHRPGKQGGYMPVPPTDTMMDIRTEIVKVLNQVGLETFVVHHEVAQAQGEVGVKFGDLVEAADNVQKLKYVVKMVAHLNGKTATFMPKPLYGDNGSGMHTHVSVWKNNENLFSGETYKGLSEFALHFLGGVLRHARGLAAFTNASTNSYKRLIPGYEAPSILTYSANNRSASVRIPYGISKNSARFEFRFPDSSSNPYLAFAAILMAGMDGVKNKIDPGEAMDINLFKLTLDEIREKGIKQMPHTLRRSLEEMLADKQYLKESQVFSEEFIQAYQSLKFNAEVFPWESKPHPFEFITTYSC

SEQ ID NO: 58726 - protein, 150 aa, Helicobacter pylori
MMKVLLLEDVKNLGKAGEVCEVKDGYGNNFLIANQKAKLATNEVINKYKAEVKKKAEKEALEKAQKLQMVETLQTITLTIHKKVGANGSLFGAITKEEITERLKEQHASLNLDKKDIELKHPIKSTGIYEIEVKLGSGVVGVFKIDVVAE

SEQ ID NO: 58727 - protein, 180 aa, Helicobacter pylori
MFEATTILGYRGELNHKKFALIGGDGQVTLGNCVVKANATKIRSLYHNQVLSGFAGSTADAFSLFDMFERILESKKGDLFKSVVDFSKEWRKDKYLRRLEAMMIVLNFDHIFILSGMGDVLEAEDNKIAAIGSGGNYALSAARALDHFAHLEPRKLVEESLKIAGDLCIYTNTNIKILEL

SEQ ID NO: 58728 - protein, 302 aa, Helicobacter pylori
MMKTKAGFVALIGKPNAGKSTLLNTLLNAHLALVSHKANATRKLMKCIVPFKDKEWYESQIIFLDTPGLHHQEKLLNQCMLSQALKAMGDAELCVFLASVHDDLKGYEEFLSLCQKPHILALSKIDTATHKQVLQKLQEYQQYDSQFLALVPLSAKKSQNLNALLECISQHLSPSAWLFEKDLMSDEKMRDIYKEIIRESLFDFLSDEIPYESDVMIDKFIEEERIDKVYARIIVEKESQKKIVIGKNGVNIKRIGTNARLKMQEVGEKKVFLNLQVIAQKSWSKEEKSLQKLGYIHRRNRD

SEQ ID NO: 58729 - protein, 1927 aa, Helicobacter pylori
  MISC_FEATURE (907)..(907): X=any amino acid
MNEENDKLETSKKAQQDSPQDLSNEEATEANHFENLLKESKESSDHHLDNPTETQTHFDGDKSEETQTQMDSEGNETSESSNGSLADKLFKKARKLVDNKKPFTQQKNLDEETQELNEEDDQENNEYQEETQTDLIDDETSKKTQQHSPQDLSNEEATEANHFENLLKESKESSDHHLDNPTETQTNFDGDKSEETQTQMDSEGNETSESSNGSLADKLFKKARKLVDNKKPFTQQKNLDEETQELNEEDDQENNEYQEETQTDLIDDETSKKTQQHSPQDLSNEEATEANHFENLLKESKESSDHHLDNPTETQTNFDGDKSEEITDDSNDQEIIKGSKKKYIIGGIVVAVLIVIILFSRSIFHYFMPLEDKSSRFSKDRNLYVNDEIQIRQEYNRLLKERNEKGNMIDKNLFFNDDPNRTLYNYLNIAEIEDKNPLRAFYECISNGGNYEECLKLIKDKKLQDQMKKTLEAYNDCIKNAKTEEERIKCLDLIKDENLKKSLLNQQKVQVALDCLKNAKTDEERNECLKLINDPEIREKFRKELELQKELQEYKDCIKNAKTEAEKNKCLKGLSKEAIERLKQQALDCLKNAKTDEERNECLKNIPQDLQKELLADMSVKAYKDCVSKARNEKEKQECEKLLTPEARKKLEQQVLDCLKNAKTDEERKKCLKDLPKDLQSDILAKESLKAYKDCVSQAKTEAEKKECEKLLTPEAKKLLEEEAKESVKAYLDCVSQAKTEAEKKECEKLLTPEAKKKLEEAKKSVKAYLDCVSRARNEKEKKECEKLLTPEAKKLLEQQALDCLKNAKTDKERKKCLKDLPKDLQKKVLAKESVKAYLDCVSQAKTEAEKKECEKLLTPEARKLLEEAKKSVKAYLDCVSQAKTEAEKKECEKLLTPEARKLLEEXAKESVKAYLDCVSQAKNEAEKKECEKLLTLESKKKLEEAKKSVKAYLDCVSQAKTEAEKKECEKLLTPEAKKLLEQQALDCLKNAKTEADKKRCVKDLPKDLQKKVLAKESLKAYKDCVSKARNEKEKKECEKLLTPEAKKLLEEAKKSVKAYLDCVSQAKTEAEKKECEKLLTPEARKLLEEAKESVKAYKDCVSKARNEKEKKECEKLLTPEAKKLLEQQVLDCLKNAKTEADKKRCVKDLPKDLQKKVLAKESVKAYLDCVSRARNEKEKKECEKLLTPEAKKLLEEAKESLKAYKDCLSQARNEEERRACEKLLTPEARKLLEQEVKKSIKAYLDCVSRARNEKEKKECEKLLTPEARKFLAKQVLNCLEKAGNEEERKACLKNLPKDLQENILAKESLKAYKDCLSQARNEEERRACEKLLTPEARKLLEQEVKKSVKAYLDCVSRARNEKEKKECEKLLTPEARKFLAKELQQKDKAIKDCLKNADPNDRAAIMKCLDGLSDEEKLKYLQEAREKAVADCLAMAKTDEEKRKCQNLYSDLIQEIQNKRTQNKQNQLSKTERLHQASECLDNLDDPTDQEAIEQCLEGLSDSERALILGIKRQADEVDLIYSDLRNRKTFDNMAAKGYPLLPMDFKNGGDIATINATNVDADKIASDNPIYASIEPDIAKQYETEKTIKDKNLEAKLAKALGGNKKDDDKEKSKKSTAEAKAENNKIDKDVAETAKNISEIALKNKKEKSGEFVDENGNPIDDKKKAEKQDETSPVKQAFIGKSDPTFVLAQYTPIEITLTSKVDATLTGIVSGVVAKDVWNMNGTMILLDKGTKVYGNYQSVKGGTPIMTRLMIVFTKAITPDGVIIPLANAQAAGMLGEAGVDGYVNNHFMKRIGFAVIASVVNSFLQTAPIIALDKLIGLGKGRSERTPEFNYALGQAINGSMQSSAQMSNQILGQLMNIPPSFYKNEGDSIKILTMDDIDFSGVYDVKITNKSVVDEIIKQSTKTLSREHEEITTSPKGGN

SEQ ID NO: 58730 - protein, 255 aa, Helicobacter pylori
MKIGVFDSGVGGFSVLKSLLKAQLFDEIIYYGDSARVPYGTKDPTTIKQFGLEALDFFKPHQIKLLIVACNTASALALEEMQKHSKIPVVGVIEPSILAIKRQVKDKNAPILVLGTKATIQSNAYDNALKQQGYLNVSHLATSLFVPLIEESILEGELLETCMRYYFTPLEILPEVVILGCTHFPLIAQKIEGYFMEHFALSTPPLLIHSGDAIVEYLQQNYALKKNACAFPKVEFHASGDVVWLEKQAKEWLKL

SEQ ID NO: 58731 - protein, 438 aa, Helicobacter pylori
MNENAPTHKSSHKVKTHTPVSGYHIEDLRTYPTEKLLEIANKLKVENPQEFKRQDLMFEILKTQVTQGGYILFTGILEIMPDGYGFLRGFDGSFSDGHNDTYVSPSQIRRFALRNGDIVTGQVRSPKDQEKYYALLKIEAINYSPSDEIRNRPLFDNLTPLFPDEQIKLEYEPTKVTGRMLDLFSPVGKGQRALIVAPPRTGKTELMKELAQGITSNHPEVELIILLVDERPEEVTDMQRSVKGQVFSSTFDLPANNHIRIAELVLERAKRRVEMGKDVVVLLDSITRLARAYNAVTPSSGKVLSGGVDANALHRPKRFFGAARNIEEGGSLTIIATALIETGSRMDEVIFEEFKGTGNSEIVLARNIADRRIYPAFDILKSGTRKDNILLGKDRLTKVWVLRNVMQQMDDIEALSFVYSKMQQTKDNEEFLNLMNEK

SEQ ID NO: 58732 - protein, 67 aa, Helicobacter pylori
MKKGIHPEYIPCKVTCVTSGKEIEVLSTKPEMRIDISSFCHPFYTGSDKIADTAGRVEKFKQRYNLK

SEQ ID NO: 58733 - protein, 287 aa, Helicobacter pylori
MLYFLPTPIGNLADITLRALEVLERCEVFLCEDTRVSKRLLHLLAQNPIISHSFPNIATKKREFIAFHSHNDQEFLNQIKPSFFDKEIAVMSDAGMPSLSDPGMSLAAYALKHNIQYDVLPGANALTTAFCASGFLEGRFFYAGFLPHKSKERRLKIAKILNALAYLEEKTPVVFYESPHRLLETLKDLNDLAKGMHLFAAKELTKLHQQYYLGEVSQIIERLQQSTIQGEWVLVLLNEKKIEPCMGLSALLELDLPPKIKAKIEAVMTQKNAKELYFQRLLEEKNQ

SEQ ID NO: 58734 - protein, 312 aa, Helicobacter pylori
MAVYLDFENHIKEIQNEIELALIRGDEDAKEILEKRLDKEVKSIYSNLTDFQKLQLARHPDRPYAMDYIDLILKDKYEVFGDRHYNDDKAIVCFVGKIDNVPVVVIGEEKGRGTKNKLLRNFGMPNPCGYRKALKMAKFAEKFNLPILMLVDTAGAYPGIGAEERGQSEAIAKNLQEFASLKVPTISVIIGEGGSGGALAIAVADKLAMMEYSIFSVISPEGCAAILWDDPSKTEVAIKAMKITPRDLKEAGLIDDIILEPSKGAHRDKFSAANTIKEYFLDALRTIQQDPHFLDNRYQKLMSLGSFVESMN

SEQ ID NO: 58735 - protein, 412 aa, Helicobacter pylori
MRRIVVTGMGMINSLGLNKEDSFLAIAKGECGIKHIESFDASAFPVRIAGEITDFDPTEVMNPKDVKKAGRFIQLALKATREAMKDSGILDAHNRCPEELANRMGVSSGSGIGGLGNIEANSIFCFEKGPRKVNPFFITSALVNMIGGFTSIEFGIKGPNLSSVTACAAGTHAIIEAVKTILLNGADKMLVVGAESTICPVGIGGFASIKALSTRNDDPKKASRPFDKDRNGFVMGEGAGALVLEEYESAKRRGAKIYAEFAGYGESGDANHITAPAPEGEGAFRAMKMALEMAKVEIGYVNAHGTSTHYNDLYESIALKNVFGSKEKVPPVSSTKGQIGHCLGAAGALEAVISIMAMNQGILPPTINQEMPDPECDLDYIPNAAREKRVDAVMSNSFGFGGTNGVVIFKKA

SEQ ID NO: 58736 - protein, 78 aa, Helicobacter pylori
MALFEDIQAVIAEQLNVDAVQVTPEAEFVKDLGADSLDVVELIMALEEKFGVEIPDEQAEKIINVGDVVKYIEDNKLA

SEQ ID NO: 58737 - protein, 247 aa, Helicobacter pylori
MQFTGKNVLITGASKGIGAEIAKTLASMGLKVWINYRSNAEVADALKNELEEKGYKAAVIKFDAASESDFIEAIQTIVQSDGGLSYLVNNAGVVRDKLAIKMKTEDFHHVIDNNLTSAFIGCREALKVMSKSRFGSVVNVASIIGERGNMGQTNYSASKGGMIAMSKSFAYEGALRNIRFNSVTPGFIETDMNANLKDELKADYVKNIPLNRLGSAKEVAEAVAFLLSDHSSYITGETLKVNGGLYM

SEQ ID NO: 58738 - protein, 70 aa, Helicobacter pylori
MPGIKVREGDAFDEAYRRFKKQTDRNLVVTECRARRFFESKTEKRKKQKISAKKKVLKRLYMLRRYESRL

SEQ ID NO: 58739 - protein, 366 aa, Helicobacter pylori
MGLSVGIVGLPNVGKSSTFNALTKTQNAQSANYPFCTIEPNKAIVNVPDRRLDALAQIVKPERILHSVVEFVDIAGLIKGASKGEGLGNQFLANIKECEVILQVVRCFEDDNITHVNDKIDPLNDIETIELELILADIAALDKRIDRLQKALKSSKDAKNLLECALSLKTHLEELKPAKTFPLNTSEAFLELDKELRFLSHKKMIYVANVGEEDLNALNEHAKKVKNHAKEQNSEFVALCAKLEEEMVSMSGDEVKEFLQSLGVEESGLEKTIRLSFKELGLINYFTAGVKEVRSWTIKKGSSAPVAAGVIHKDFEKGFIRAETISYDDFIAYKGEAGAKEKGALRIEGKDYIVQDGDVLHFRFNI

SEQ ID NO: 58740 - protein, 496 aa, Helicobacter pylori
MLKIKLEKTTFENAKAECSLVFIINKDFSHAWVKNKELLETFKYEGEGVFLDQENKILYAGVKEDDVHLLRESACLAVRTLKKLAFKSVKVGVYTCGAHSKDNALLENLKALFLGLKLGLYEYDTFKSNKKESVLKEAIVALELHKPCEKTCANSLEKSAKEALKYAEIMTESLNIVKDLVNTPPMIGTPVYMAEVAQKVAKENHLEIHVHDEKFLEEKKMNAFLAVNKASLSVNPPRLIHLVYKPKKAKKKIALVGKGLTYDCGGLSLKPADYMVTMKADKGGGSAVIGLLNALAKLGVEAEVHGIIGATENMIGPAAYKPDDILISKEGKSIEVRNTDAEGRLVLADCLSYAQDLNPDVIVDFATLTGACVVGLGEFTSAIMGHNEELKNLFETSGLESGELLAKLPFNRHLKKLIESKIADVCNISSSRYGGAITAGLFLNEFIRDEFKDKWLHIDIAGPAYVEKEWDVNSFGASGAGVRACTAFVEELLKKA

SEQ ID NO: 58741 - protein, 151 aa, Helicobacter pylori
MNKLLKFSQVFIGSDHAGLHLAEFVQRFLEDKDFKIQAFLPTMRVDYPDYAKLVCQKVLENAQSYGILVCATGIGMSMGANRFKGIRAALCLDAYMAKMTRLHNNANVLCLGEKISGIGVVESILEAFFSTEFEQGRHVLRIQKLDESLKS

SEQ ID NO: 58742 - protein, 290 aa, Helicobacter pylori
MKFLRSVYAFCSSWVGTIVIVLLVIFFIAQAFIIPSRSMVGTLYEGDMLFVKKFSYGIPIPKIPWIELPVMPDFKNNGHLIEGDRPKRGEVVVFIPPHEKKSYYVKRNFAIGGDEVLFTNEGFYLHPFESDTDKNYIAKHYPNAMTKEFMGKIFVLNPYKNEHPGIHYQKDNETFHLMEQLATQGAEANISMQLIQMEGEKVFYKKINDDEFFMIGDNRDNSSDSRFWGSVAYKNIVGSPWFVYFSLSLKNSLEMDAENNPKKRYLVRWERMFKSVGGLEKIIKKENATH

SEQ ID NO: 58743 - protein, 678 aa, Helicobacter pylori
MKSLSNALFSLFLKGFYFTFFMSLLFVFNRIGFILYTGYYKHALKNPVFDEIIKTLFNGARYDNRVVSSLAILFIIIGLLGLFIPKHQTKMLNIVAYFSIAIILFLNIANIVYYGIYGNVFDENLLEFLHEDTLTILKMSGEYPIFSSFSLFLILSVLTSFIYFKLQNDLFKPKNAYQAAHTKPLKTFILFALFSLTQMFYINAQLSFVGASLDLSIEPAKDPFLMKITPGAFRNLYLLARNYRQSHNLKFSDFAKETPLEVAKNYFHLKENPSNNLYELLTQTSRNNSNQTIQHVFYIVSESLSSWHFDPKFDAIGLTSALQDLVKKEHAHMLSAFIESAPRTVKSLDVQITGLPYINDNNLVNSGVILPSFPMAIGNITKTLGYKNNFYYGGSGIWNKLTSFTKKQGFHALYFNNHLLEFAQNKPYPKPIESNWGVHDNILFDYILENTNPHEKTFSMVMTLSNHAIKNVNLKAFGVPLEKIQQFVEKTPKSENLPDANSLGHIYWYDKVIVSFIKKASQKFPNSLFIITGDHFDRSYEYAKNDLYIIKSVPLILYAPTLKPKKISQVGSHLDIAPTIIELVAPKGFQFVSFGKPLFSNNTTNPPSHPNYALGYEAIATKDYFYNPSLGLRYLNESPKEPKDKQNDKIEASKFYQQLESLKALSYYLLYHGANLKD

SEQ ID NO: 58744 - protein, 339 aa, Helicobacter pylori
MEITLFDPIDAHLHVRENALLKAVLGYSSEPFSAAVIMPNLSKPLIDTPTTLEYEEEILNHSSNFKPLMSLYFNDGLTLEELQCAKEKGVRFLKLYPKGMTTNAQNGTSDLLGEKTLEVLENAQKLGFILCIHAEQTGFCLDKEFLCHSVLETFALSFPKLKIIIEHLSDWRSIALIEKHDNLYATLTLHHISMTLDDLLGGSLNPHCFCKPLIKTKKDQERLLSLALKAHPKISFGSDSAPHFISKKHSANIPAGIFSAPILLPALCELFEKHNALENLQAFISDNAKTIYGLENLPSKKARLSKKPFMIPTHTLCLNEKIAILRGGETLSWNLQEIA

SEQ ID NO: 58745 - protein, 324 aa, Helicobacter pylori
MPENSKLQPAKLGKNFDPVDHSNRNFFFSLILSVLLHWLIYFLFEHREDFFPSKPKLVKLNPENLLVLKRGHSQDPSKNTQGAPKPTLAGPQKPPTPPTPPTPPTPPTPPKPIEKPKPEPKPKPKPEPKKPNHKHKALKKVEKVEEKKVVEEKKEEKKIVEQKVEQKVEQKKIEEKKPVKKEFDPNQLSFLPKEVAPPRQENNKGLDNQTRRDIDELYGEEFGDLGTAEKDFIRNNLRDIGRITQKYLEYPQVAAYLGQDGTNAVEFYLHPNGDITDLKIIIGSEYKMLDDNTLKTIQIAYKDYPRPKTKTLIRIRVRYYLGGN

SEQ ID NO: 58746 - protein, 1001 aa, Helicobacter pylori
MGCVFTNFRLRRSQTPKAKTPMIFEKQDYQQECIYNIITLLDGFDFKRHDALNLKDCLNQFHAACEIPVKNVSGKLNVDVLMETGTGKTFTYLNLIFALHKAYGQNKFIIFVPRKAILESVKQNIRLTKDYFYLEFKRHLKTYTYEGVKSPSNIINHYIKNQDELSVLLLTNSAIDKEGNILNKNSENLFNTKSIFENIADLKPISIIDEPHLLKGEAFGKYFGKIGALYFRFGATFAKEKEHALSNVAFCLDSISAFRNYLVKQIRIHSVMQDAQSPFLLNADSKSAKIAFYKAGILKQITLSKGEDLGKINASFNGVSLVKTAKDKAYLSNGATLEKASYKLAQDEISALLEKAIDLHFEKEAFLFDQNIKALSLFFIPKIEDFRQIDNKGTPFIKTEFERLYKLKRASILARENLSPSYKEYLKRDFDESGNLRVHQGYFSGDSVALNKGKKESKKEDIEANDIKMILSEKEKLLSFQTPLRFIFSVWALQEGWDNPNIFTLIKLANSTSETSRHQQVGRGLRIAINQEGKRVTHGFLKGNDNAFYKINYLDMLVSGEEVGFIEGLQKEIEASSFIGGGNALDREDLAKLGLNEREINKLFVELENSNALEFDETNNAYKIIAPICETMQNNEERIKDFLSDEEYHAVLSAFKMAENPTNKRDQIINANQPQEKVKIRQNLAKEFKELWQTINAQSQLSYQNIQKTKLIESIAKAFNESHVSAEVIKFESKRYDPQTNRIITEQSSTLKIRDYANALQKEINALLLDFAKDERLPLKFTLELYNALNKEHFTNSPKKAFKLLKGIIKDKLHENLLSCVSYGFCQNAFSNTAFDKTDPLYCEDGSPKNEIEKHKIGKYKSAQTPSPNYLYETIIYDSKIEEEVSEEGVQTLEGKSIEVFAKLPKFKIPTPYKNYEPDFAYLLKDEKGAKIFFVCETKGYEKESDIPPDEKRKIEYAKKFFETLSQNLKNAKKEIRVVFATRINKQDLFNTLKNALKETP

SEQ ID NO: 58747 - protein, 659 aa, Helicobacter pylori
MLKKIFYGFIVLFLIVMGLLAILIAQVWVTTDKDIAKIKDYRPGVASQILDRKGRLIANIYDKEFRFYARFEEIPPRFIESLLAVEDTLFFEHGGINLDAIMRAMIKNAKSGRYTEGGSTLTQQFVKNMVLTREKTLTRKLKEAIISIRIEKVLSKEEILERYLNQTFFGHGYYGVKTASLGYFKKPLDKLTLKEITMLVALPRAPSFYDPTKNLEFSLSRANDILRRLYSLGWISSNELKGALNEVPIVYNQTSTQNIAPYVVDEVLKQLDQLDGLKTQGYTIKLTIDLDYQRLALESLRFGHQKILEKIAKEKPKTNASNEDEDNLNASMIVTDTSTGKILALVGGIDYKKSAFNRATQAKRQFGSAIKPFVYQIAFDNGYSTTSKIPDTARNFENGNYSKNSEQNHAWHPSNYSRKFLGLVTLQEALSHSLNLATINLSDQLGFEKIYQSLSDMGFKNLPKDLSIVLGSFAISPIDAAEKYSLFSNYGTMLKPMLIESITNQQNDVKTFTPMETKKITSKEQAFLTLSVLMDAVENGTGSLARIKGLEIAGKTGTSNNNIDAWFIGFTPTLQSVIWFGRDDNTPISKGATGGVVSAPVYSYFMRNILAIEPSLKRKFDVPKGLRKEIVDKIPYYSTPNSITPTPKRTDDSEERLLF

SEQ ID NO: 58748 - protein, 1028 aa, Helicobacter pylori
MYKTAINRPITTLMFALAIVFFGTMGFKKLSVALFPKIDLPTVVVTTTYPGASAEIIESKVTDKIEEAVMGIDGIKKVTSTSSKNVSIVVIEFELEKPNEEALNDVVNKISSVRFDDSNIKKPSINKFDTDSQAIISLFVSSSSVPATTLNDYAKNTIKPMLQKINGVGGVQLNGFRERQIRIYANPTLMNKYNLTYADLFSTLKAENVEIDGGRIVNSQREFSILINANSYSVADVEKIQVGNHVRLGDIAKIEIGLEEDNTFASFKDKPGVILEIQKIAGANEIEIVDRVYEALKRIQAISPNYEIRPFLDTTGYIRTSIEDVKFDLVLGAILAVLVVFAFLRNGTITLVSAISIPISIMGTFALIQWMGFSLNMLTMVALTLAIGIIIDDAIVVIENIHKKLEMGMSKRKASYEGVREIGFALVAISAMLLSVFVPIGNMKGIIGRFFQSFGITVALAIALSYVVVVTIIPMVSSVVVNPRHSRFYVWSEPFFKALESRYTKLLQWVLNHKIIISIAVVLVFVGSLFVASKIGMEFMLKEDRGRFLVWLKAKPGVSIDYMTQKSKIFQKAIEKHAEVEFTTLQVGYGTTQNPFKAKIFVQLKPLKERKKEHQLGQFELMSVLRKELRSLPEAKGLDTINLSEVTLIGGGGDSSPFQTFVFSHSQEAVDKSVENLKKFLLESPELKGKVESYHTSTSESQPQLQLKILRQNANKYGVSAQTIGSVVSSAFSGTSQASVFKEDGKEYDMIIRVPDDKRVSVEDIKRLQVRNKYDKLMFLDALVEITETKSPSSISRYNRQRSVTVLAEPNRNAGVSLGEILTQVSKNTKEWLVEGANYRFTGEADNAKESNGEFLVALATAFVLIYMILAALYESILEPFIIMVTMPLSFSGAFFALGLVHQPLSMFSMIGLILLIGMVGKNATLLIDVANEERKKGLNIQEAILFAGKTRLRPILMTTIAMVCGMLPLALASGDGAAMKSPIGIAMSGGLMISMVLSLLIVPVFYRLLAPIDDKIKRFYQNQKTLE

SEQ ID NO: 58749 - protein, 1238 aa, Helicobacter pylori
MTYRSSKTDLKNERFSKNRSFKGIKKKIAKKYTIKNSPLTIYSLKTHSNPSLSINKKIFLGLGFVSALSAEDYNSSVYWLNSVNENNNNKSYYISPLRTWAGGNRNFTQNYNNSQLYIGTKNASSTPNHSSVWFGEKGYVGFITGVFKAKDIFITGAVGSGNEWKTGGGAILVFESSNELSANGAYFQNNRAGTQTSWINLISNNSVNLTNTDFGNQTPNGGFNAMGRKITYNGGIVNGGNFGFDNVDSNGATTISGVTFNNNGALTYKGGNGIGGSITFTNSNINHYKLNLNANSVTFNNSALGSMPNGNANTIGNAYILNASNITFNNLTFNGGWFVFNIPDAHVNFQGTTTINNPTSPFVNMTGKVTINPNAIFNIQNYTPSIGSAYTLFSMKNGSITYNDVNNLWNIIRLKNTQATKDADKNHTSSNNNTHTYYVTYNLGGTLYNFRQIFSPDSIVLQSVYYGANNLYYTNSVNIHDNVFNLKNINDDKADTIFYLNGLNTWNYTNARFTQTYGGKNSALVFNATTPWANGSIPKSNSTVRFGGYEGVNWGKTGYITGTFTADRVYITGNMMTGNGAQTGGGATLNFVGATEINIAGATFKNLKTTSQNSYMTFMALGDSSGSAKINVSQSDFYDWTGGGYDFTGNGVFDSVNFNKAYYKFQGTENSYNFKNTNFLAGNFKFQGKTTIEKSVLSDASYTFDGTNNTFTEDKFNNGSFNFSHAEQTDAFNNNSFNGGSFSFNAKQVNFSGNSFNGGVFNFNNTPKVSFTDDTFNVNNQFKINGTQTTFTFNKGVVFNMQGLLSSLSVGTTYQLLNAKSVDYKDNNALYQMLRWISGENPSGTLVNKDQSAPNSAKIYNVHFTDNGLTYYIKENFNNGITLTRLCTLGYTHCVNIDNDAFNLKNVNNNASNTVFYLNGMTTWKIAGTGVFTQDYSGANSVLVFNQTTPFLAGANPTSNSVVSFGKTSGAEWGLVGYIQGVFKANQIDITGTIRSGNGAKTGGGATLVFNAQKRLNIANAHLNNDKAGLQNSWMNFIVNNGNLNVTNAKFSNQTPHGGFNLKANNITWDKGSVNGGGNFGVDNADSNGATTISGVTFNNNGTLIYKGGENSAGNSLTLENNTFNSYNINAKAQNLIFNNNSFNGGSYSFNDTKNTTFKGTNTLINSDPFSRLKGSVSIENNSVFNIERDLTDKTTYTLLSGNSIKYNNQALAGQCFFKKFMEFNPLWWRTRDSIKSG

SEQ ID NO: 58750 - protein, 1943 aa, Helicobacter pylori
MQFTQSNGQKFVFEETFNPGSITYKYFTIHSSLFHTDADSKDIWSQVRKQFDFIPGKTPVCVGVCYIAPYKNQDLIGSSAFAWSLNFGATVVGTLLLGSAQEKANNNGGSIWFGKNNLLYLHGNFNATNIFLTNNFNVGNPNAGGGATINFNADETLNADGLNYTNFQTVALGLQTSASQHSWANFNSKLSMEIKNSNFRDFTWGGFNFNSGRITFENTTFSGWTNINGATESGSSYVNMVANTDLIFSNSILGGGIRYDLKANNIIFNNSQMVIDVSKNVNQSSLNGNVTFNNSRLSVKPNAAINIGDSQTQTALENASSLSFYNNSVANFNGTTAFNGVSYLNLNPNAQVSFNQVNFNNANVTFYGIPLFGKTPDFGNSARLINFKGNTNFNQATLNLRAKNIHINFQGVSTFKQNSTMNLAESSQASFNALKVEGETNFNLNNSSLLNFNGNSVFNAPVSFYANHSQISFTKLATFNSDASFDLSNNSTLNFQSVLLNGALNLLGNGSNNLAINAKGNFSFGSKGILNLSYMNLFGGDKKTSVYDVLQAQNIDGLMGNNGYEKIRFYGIQIDKADYSFDNGVHSWRFTNPLNTTETITETLHNNRLKVQISQNGVSNNKMFNLAPSLYDYQKNPYNETENSYNYTSDKVGTYYLTSNIKGFNQNNKTPGTYNAQNQPLQALHIYNQAITKQDLNMIASLGKEFLPKIANLLSSGALDNLNSPNSFETLFGIFEKYGITLNQENWKSLLKIINNFSNTTNYDFSQGNLVVGAIKEGQTNTKSVVWFGGEGYKEPCAVGDNTCQMFRQTNLGQLLHSSTPYLGYINANFRAKNIYITGTIGSGNAWGSGGSANVSFESGTNLVLNQAKIDAQGTDKIFSYLGQGGIEKLFGEKGLGNALSNIIYEESLNDNAIPKDLANMIPKDFGSKTLSSLLSPTEVNNLLGVSAFKNAIMEILNSKTVGDVFGENGLLNALDPTERKKIDQMLLEQIQAHSSGFEKFIVKTLGIENVENFINNWYGKQSLSSFANNFVPGGLNQALDKIGSSSDAKDLQNFLDKTTFGDILNQMIEQAPLINKLISWLGPQDLSVLVNIALNSITNPSKELTSTISSIGEKALNDLLGDGVVNKIMSNQVLGQMINKIIADKGFGGVYQQGLGSILPQSLQDELKKLGMGSLLGSRGLHNLWQRGNFNFVAKDYLFTNNSSFSNATGGELNFVAGKSIIFNGKNTINFTQYQGKLSFISKDFSNISLDTLNATNGLTLNAPKNDISVQKGQICVNVLNCMGEKKAHSSSATAPTNETLEANANNFAFLGAIKANGLVDFSKVLQNTTIGTLDLGPNATFKANHLIVNNAFNNNSNYRADISGNLNVVKGAALSTNENGLNVGGDFKSEGSLIFNLNNKTNQTIINVAGNSTIMSYNNQALIHFNTQLKQGAYTLINAKRMLYGYDNQIIRGGSLSDYLKLYTLIDFNGKRMQLNGDSLSYDNQPVNIKDGGLVVSFKDNQGQMVYSSILYDKVQVSVSDKPMDIHAPSLEYYIKYIQGSAGLDAIKSAGNNSILWLNELFVAKGGNPLFAPYYLQDNPTEHIVTLMKDITSALGMLSKPNLKNNSTDALQLNTYTQQMSRLAKLSNFASFDSTDFSERLSSLKNQRFADAIPNAMDVILKYSQRDKLKNNLWATGVGGVSFVENGTGTLYGVNVGYDRFIKGVIVGGYAAYGYSGFYERITNSKSDNVDVGLYARAFIKKSELTFSVNETWGANKNQISSNDTLLSMINQSYKYSTWTTNAKVNYGYDFMFKNKSIILKPQIGLRYYYIGMTGLEGVMHNALYNQFKANADPSKKSVLTIELALENRHYFNTNSYFYAIGGFGRDLLVNSMGDKLVRFIGNNTLSYRKGELYNTFASITTGGEVRLFKSFYANAGVGARFGLDYKMINITGNIGMRLAF

SEQ ID NO: 58751 - protein, 656 aa, Helicobacter pylori
MIKSQKEYLERIAYLNTLSHHYYNLDEPIVSDAIYDELYQELKAYEEKNPNGIQANSPTQKVGATTTNSFNKNPHLMRMWSLDDVFNQSELQAWLQRILKAYPSASFVCSPKLDGVSLNLLYQHGKLVKATTRGNGLEGELVSANAKHIANIPHAIAYNGEIEIRGEVIISKKDFDALNQERLNANEPLFANPRNAASGSLRQLDSEITKKRKLQFIPWGVGKHSLNFLSFKECLDFIVSLGFSAIQYLSLNKNHQEIEDNYHTLIREREGFFALLDGMVIVVNELNIQKELGYTQKSPKFACAYKFPALEKHTKIVGVINQVGRSGAITPVALLEPVEIAGAMINRATLHNYSEIEKKNIMLSDRVVVIRSGDVIPKIIKPLESYRDGSQHKIERPKVCPICSHELLCEEIFTYCQNLNCPARLKESLIHFASKDALNIQGLGDKVIEQLFEEKLIFNALDLYALKLEDLMRLDKFKIKKAQNLLDAILKSKNPPLWRLINALGIEHIGKGASKTLAKYGLNVLEKSEAEFLEMEGFGVEMARSLVNFYASNQEFIRSLFELLNPKNSDMAEEKQKSSSVFNNKTIVLTGTLSKPRQEYAQMLENLGAKISSSVSAKTDFLIAGENPGSKLALAQKHGVSVLNEEELLKRLKELD

SEQ ID NO: 58752 - protein, 577 aa, Helicobacter pylori
MRSHFCTEISEKDVGKIVKVAGWCNTYRDHGGVVFIDLRDKSGLVQLVCDPSSKAYEKALEVRSEFVLVAKGKVRLRGAGLENPKLKTGKIEIVLEELIIENKSATPPIEIGNKHVNEDLRLKYRYLDLRSPNSYEIFKLRSEVALITRNTLAQKGFLEIETPILSKTTPEGARDYLVPSRVHEGEFFALPQSPQLFKQLLMVGGMDRYFQIARCFRDEDLRADRQPEFTQIDAEMSFCDENDVMGVVEDLLQEIFKAVGHTISKPFKRMPYKEAMENYGSDKPDLRFELPLIEVGDCFRDSSNAIFSNTAKDPKNKRIKALNVKGADALFSRSVLKELEEFVRQFGAKGLAYLQIKEDEIKGPLVKFLSEKGLKNILERTDAQVGDIVFFGAGDKKIVLDYMGRLRLKVAETLDLIDKDALNFLWVVNFPMFEKTENGYHAAHHPFTMPKNIECEDIEEVEAHAYDVVLNGVELGGGSIRIHKEEMQKKVFEKINIHEEEAQKKFGFLLEALKFGAPPHGGFAIGFDRLIMLMTKSHSIRDVIAFPKTQKASCLLTNAPSPINEEQLRELHIRLRK

SEQ ID NO: 58753 - protein, 191 aa, Helicobacter pylori
MKQLFLIIGAPGSGKTTDAELIAKNNSETIAHFSTGDLLRAESAKKTERGLLIEKFTSQGELVPLEIVVETILSAIKSSGKGIILIDGYPRSVEQMQALDKELNAQNEVILKSVIEVEVSENTAKERVLGRSRGADDNEKVFHNRMRVFLDPLGEIQNFYKNKKVYKAIDGERSIEEIVGEMQEYILSFGN

SEQ ID NO: 58754 - protein, 762 aa, Helicobacter pylori
MSDAPKRSLNPTLMMNNNNTPPKPLEESLDLKEFIALFKTFFAKERDTIALENDLKQTFTYLNEVDAIGLPTPKSVKESDLIIIKLTKLGTLHLDEIFEIVKRLHYIVVLQNAFKTFTHLKFHERLNAIVLPPFFNDLIALFDDEGKIKQGANATLDALNESLNRLKKESVKIIHHYARSKELAPYLVDTQSHLKHGYECLLLKSGFSGAIKGVVLERSANGYFYLLPESAQKIAQKIAQIGNEIDCCIVEMCQTLSHSLQKHLLFLKFLFKEFDFLDSLQARLNFAKAYNLEFVMPSFTQKKMILENFSHPILKEPKPLNLKFEKSMLAVTGVNAGGKTMLLKSLLSAAFLSKHLIPMKINAHHSIIPYFKEIHAIINDPQNSANNISTFAGRMKQFSALLSKENMLLGVDEIELGTDADEASSLYKTLLEKLLKQNNQIIITTHHKRLSVLMAENKEVELLAALYDEEKERPTYTFLKGVIGKSYAFETALRYGVPHFLIEKAKTFYGEDKEKLNVLIENSSALERELKQKNEHLENALKEQEYLKNAWLLEMEKQKEIFHNKKLELEKSYQQALNILKSEVASKDTSSMHKEIHKASEILSKHKTNQEIPQIITNFQANEKARYKNESVLIVQILDKGYYWIETELGMRLKAHGSLLKKIQKPPKNKFKPPKTTIPKPKEASLRLDLRGQRSEEALDLLDAFLNDALLGGFEEVLICHGKGSGILEKFVKEFLKNHPKVVSFSDAPINLGGSGVKIVKL

SEQ ID NO: 58755 - protein, 449 aa, Helicobacter pylori
MLETPKVLLKNLQDCKIHFIGIGGIGISGLAKYLKAQGATISGSDIAISPSVKYLKALGVEINIPHDPKAINNQDVIIHSAIIKEDNKEIQRAKELEIPILSRKDALYSILKDKRVFSVCGAHGKSSITAMLSAICPSFGAIIGAHSKEFDSNVRESANDSLVFEADESDSSFLFSNPYAAIVPNTEPEHLEHYGHDLERFFFAYEYFLDHAQKRVIYKEDPFLKNYSKNAIVLEKKDIYNIQYILKDGEPYTSFELKDLGAFLVWGLGEHNATNASLAILSALDELHLEEIRNNLLNFKGIKKRFDILQKNALILIDDYAHHPTEISATLKSARIYANLLNTQEKIIVIWQAHKYSRLMDNLEEFKKCFSEHCDRLIILPVYSASEVKRDIDLKAHFKHYNPTFIDRVRKKGDFLELLVNDNVVETIEKGFVIGFGAGDITYQLRGEM

SEQ ID NO: 58756 - protein, 359 aa, Helicobacter pylori
MLENRVKTKQIFIGGVAIGGDAPISTQSMTFSKTADIESTKNQIDRLKLAGADLVRVAVSNEKDALALKELKKVSPLPLIADIHFHYKFALIAAQSVDAIRINPGNIGSKEKIKAVVDACKEKNIPIRIGVNAGSLEKQFDQKYGPTPKGMVESALYNAKLLEDLDFTNFKISLKASDVIRTIEAYRMLRPLVIYPFHLGVTEAGNLFSSSIKSAMALGGLLMEGIGDTMRVSITGELENEIKVARAILRHSGRLKEGINWISCPTCGRIEANLVDMAIKVEKRLSHIKTPLDISVMGCVVNALGEAKHADMAIAFGNRSGLIIKEGKVIHKLAEKDLFETFVIEVENLAKEREKSLKD

SEQ ID NO: 58757 - protein, 402 aa, Helicobacter pylori
MFELEEGLKELFDIYEKSSHELYLVGGCVRDYLMGITPKDYDLTSNALVNESKELLLKRHFRVLETGIKHGTITALKNHQSYEITTFRIEKGHIKHRKPKELVFSVHLTDDLKRRDFSMNAIAYSPTKGLIDPFKGQNAIENQMIECVGEARLRFFEDALRILRSLRFSATLGFKIAPNTKEAVFACKDLLKHLSKERLQSELNKLLMGKNAYEVAKEYQEILELVIQEKIENLGFLKNAPFNLELRLLGFFKHQKSLESLRYPKKTIVLFSKAKECHKSFLNIHNKTELKFLLKNYDLEPFNLALDFYALKNPKHALKIKGLLKEIFDSNEPFKKEHLALKGGALQSLGYQHQKIGEILNACLDLVIANPKNNALEWLIEWVKGHYLPNDTINLSPIGRRN

SEQ ID NO: 58758 - protein, 273 aa, Helicobacter pylori
MIKKCLFPAAGYGTRFLPITKTIPKEMLPIVDKPLIQYAVEEAMEAGCEVMAIVTGRNKRSLEDYFDTSYEIEHQIQGTNKENALKSIRNIIEKCCFSYVRQKQMKGLGHAILTGEALIGNEPFAVILADDLCISHDHPSVLKQMTSLYQKYQCSIVAIEEVALEEVSKYGVIRGEWLEEGVYEIKDMVEKPNQEDAPSNLAVIGRYILTPDIFEILSETKPGKNNEIQITDALRTQAKRKRIIAYQFKGKRYDCGSVEGYIEASNAYYKKRL

SEQ ID NO: 58759 - protein, 422 aa, Helicobacter pylori
MDFLEIVGQVPLKGEVEISGAKNSALPILAATLLSRQEVKIKSLPQVVDIKAMALLLQNLGASLEWLNPNTLQIGAKSLNHTEATYDLVRKMRASILVLGPLLARFKECLVSLPGGCAIGARPVDLHLKAMQQLGAKITIEQGYIHAKAPKGLKGNDILFDKISVTGTENALMAASLAKGITRIINAAKEPEIAQLCAFLQSGGVEIHGIGSSELKIRGVENDALNLKDIQIIPDRIEAGTYLCVGAITNSQLKINHIIPNHLQAITDKLIEIGFSLDIQENSIEIHPAKKRQAFEITTKEYPGFPTDMQAQFMALATQCLGTSVIEETLFENRFMHASELQRLGANISLKTNVATISGSTELTGSDVMATDLRASSALVLAALVAKGVSRVHRIYHLDRGYERLEDKINALGAKVARLKEK

SEQ ID NO: 58760 - protein, 207 aa, Helicobacter pylori
MQKLAVFDFDSTLVNAETIESLARAWGVFDEVKTITLKAMNGETDFHKSLILRVSKLKNMPLKLAKEVCESLPLFEGALELVSALKEKNYKVVCFSGGFDLATNHYRDLLHLDAAFSNTLIVENDALNGLVTGHMMFSHSKGEMLLVLQRLLNISKTNTLVVGDGANDLSMFKHAHIKIAFNAKEVLKQHATHCINEPDLALIKPLI

SEQ ID NO: 58761 - protein, 475 aa, Helicobacter pylori
MMPFEAVIGLEVHVQLNTKTKIFCSCSTSFGESPNSNTCPVCLGLPGALPVLNKEVVKKAIQLGTAIEANINQYSIFARKNYFYPDLPKAYQISQFEVPIVSDGKLEIDTKEGAKIVRIERAHMEEDAGKNIHEGSYSLVDLNRACTPLLEIVSKPDMRNSEEAIAYLKKLHAIVRFIGISDANMQEGNFRCDANVSIRPKGDEKLYTRVEIKNLNSFRFIAKAIEYEIERQSAAWENGRYNEEVVQETRLFDTHKGITLSMRNKEESADYRYFKDPDLYPVFIDEKLLKEAQKINELPSAKKIRYMKDFNLKEDDANLLVSDPLLAQYFESMLHLGVKAKTSVTWLCVELLGRLKAEITLENCGVSTHMLGALAKRIDEGKISGKSAKDVLDKLLEEQGGDVDALIEQMGLSQVNDTEAIVKVIEEVLKNNADKVLEYKSGKDKLFGFFVGQAMKNLKGANPSVVNAILKEKLG

SEQ ID NO: 58762 - protein, 365 aa, Helicobacter pylori
MNTLGRFLRLTTFGESHGDVIGGVLDGMPSGIKIDYALLENEMKRRQGGRNVFITPRKEDDKVEITSGVFEDFSTGTPIGFLIHNQRARSKDYDNIKNLFRPSHADFTYFHKYGIRDFRGGGRSSARESAIRVAAGAFAKMLLREIGIVCESGIIEIGGIKAKNYDFNHALKSEIFALDEEQEEAQKTAIQNAIKNHDSIGGVALIRARSIKTNQKLPIGLGQGLYAKLDAKIAEAMMGLNGVKAVEIGKGVESSLLKGSEYNDLMDQKGFLSNRSGGVLGGMSNGEEIIVRVHFKPTPSIFQPQRTIDINGNECECLLKGRHDPCIAIRGSVVCESLLALVLADMVLLNLTSKIEYLKTIYNEN

SEQ ID NO: 58763 - protein, 433 aa, Helicobacter pylori
MNENINENIFEEVGDACVKCAKCVPGCTIYRIHKDEATSPRGFLDLMRLNAQNKLQLDTNLKHLLETCFLCTACVEICPFHLPIDTLIEKAREKIAQKHGIAWYKKSYFSLLKNRKKMDRVFSTAHFLAPCVFKQVGDSLEPRAVFKGLFKRFKKSALPPLNQKSFLQKHAEMKLLENPIQKVAIFIGCLSNYHYQQVGESLLYILEKLNIQAIIPKQECCSAPAYFTGDKDTTLFLVKKNIEWFESYLDKVDAIIVPEATCASMLINDYYKVFLGEKDKDLYVKRLEKITPKIYLASVFLEKHTPLKSLLEKIPKGKKETITYHNPCHAKKTLNAHKEVRNLLNLHYEIKEMPDNCCGFGGITMQTQKAGFSLKVGLLRAKEIIDTKAAILSAECGACHMQLNNALKSLDDPNTPPFLHPLELIAKALKSAE

SEQ ID NO: 58764 - protein, 933 aa, Helicobacter pylori
MTQAWLMKPLLKKKSKSLEAMMATNHNDEKTLFDAILLQDLADAMYNVMPTKLGDRNYWENFTKKTGNIARTLNNRLKIIFDKNPEFFHGFLDSLRENIHQNIKEDEALDMITSHIITKPIFDALFGDNIKNPIAKALDKMVEKLSTLGLEGETKDLKNLYESVKTEALHAKSQKSQQELIKNLYNTFFKEAFKKQSEKLGIVYTPIEVVDFILRATNGILKKHFNTDFNDQSITIFDPFTGTGSFIARLLSKENALISDEALKEKFQKNLFAFDIVLLSYYIALINITQAAQNRDGSLNNFKNIALTDSLDYLEEKTNKGVLPLYEDLKENKGIKDTLANQNIRVIIGNPPYSAGAKSQNDNNQNLSHPKLEKLVYEKYGKNSTSRSVGKTTRDTLIQSIRMASDVVKDRGVIGFVVNGGFIDSKSADGFRKCVAKEFSHLYVLNLRGNQRTSGEVSKKEGGKIFDSGSRATVAIIFFVKDKSTPDNTIFYYEVEDYLKREAKLNWLANFENLDFVPFEKITPNDKGDWINQRNDAFEKLIPLKRDKTLQNDSVFDINSLGVVSGRDPWVYNFSPNILTQSVQKCIDTYNADLKRFNARFREAFKQRAQSVKAGDLYKQLNDKEITTDKTKIAWTDGLKNKLIKNKSARESSEERVRLALYRPFNKQWLYWDKDWINRQREFSKIFPDKDAQNVVINTGVGNGKDFSALVSDFISDYSLISPNQAYPLYYYDDLGNRHYAISGYCLNLFRRHYGDNLIAEEEIFYYIYAIFHHKGYLEKYKNSLAKEAPRIALSEDFKELSVLGKELAELHLNYESGEMHDNIKYTTLMNAEIEGYYDVDKMTKKGDCIIYNQNIAITKIPKKAFDYVINGKSAIDWVIERYQKTMDKESLIENNPNDYAGGKYVFELLCRVITLSVKSVDLIEKISEKRFE

SEQ ID NO: 58765 - protein, 362 aa, Helicobacter pylori
MKHPLEELKDPTENLLLWIGRFLRYKCTSLSNSQVKDQNKVFECLNELNQACSSSQLEKVCKKARNAGLLGINTYALPLLKFHEYFSKARLITERLAFNSLKNIDEVMLAEFLSVYTGGLSLATKKNYRIALLGLFSYIDKQNQDENEKSYIYNITLKNISGVNQSAGNKLPTHLNNEELEKFLESIDKIEMSAKVRARNRLLIKIIVFTGMRSNEALQLKIKDFTLENGCYTILIKGKGDKYRAVMLKAFHIESLLKEWLIERELYPVKNDLLFCNQKGSALTQAYLYKQVERIINFAGLRREKNGAHMLRHSFATLLYQKRHDLILVQEALGHASLNTSRIYTHFDKQRLEEAASIWEEN

SEQ ID NO: 58766 - protein, 168 aa, Helicobacter pylori
MVLYHYYFKTPKSFPLEYLHLCANESHLLRLDFDAANFSHNTPMNTPLKLSVQALERYFLGQLFEFNTPLDLIGTFFQKQVWSALMTIPYGKTKSYDEIAKLINNPRSCRAVGNANRNNPISLIVPCHRVVRKNGTLGGYNGGIEVKKWLLEFESKILNQQAKNSLIS

SEQ ID NO: 58767 - protein, 289 aa, Helicobacter pylori
MLFAMIGSGGFIAPKHLQAIRDTGHFLDCSFDIHDSVGVLDEYFAQSEFFTNIEDFEKHLEQSKDMGKEINYLSVCTPTHTHFDHIRFGLRNGMHVICEKPLVLDPGEIQELKDLEVKHQKRVFSLLPLRLHCDTLALKEKIKSELDKNPSKVFDITLTYISVQGKWYFSSWRADVNRSGGLATQMGVNIFDTLIYLFGSVKDKVINKEEPDCVGGILFLEHAKIRWFFSINPEHMGVAKEKVYHKMILEGEEVNLTQSFDNLYIESYKQILAQGGFGLDDAMASVKLA

SEQ ID NO: 58768 - protein, 788 aa, Helicobacter pylori
MITVVKRNGRIEPLDITKIQKYTKDATDNLEGVSQSELEVDARLQFRDKITTEEIQQTLIKTAVDKIDIDTPNWSFVASRLFLYDLYHKVSGFTGYRHLKEYFENAEEKGRILKGFKEKFDLEFLNSQIKPERDFQFNYLGIKTLYDRYLLKDANNNPIELPQHMFMSIAMFLAQNEQEPNKIALEFYEVLSKFEAMCATPTLANARTTKHQLSSCYIGSTPDNIEGIFDSYKEMALLSKYGGGIGWDFSLVRSIGSYIDGHKNASAGTIPFLKIANDVAIAVDQLGTRKGAIAVYLEIWHIDVMEFIDLRKNSGDERRRAHDLFPALWVCDLFLKRVLEDAMWTLFDPYECKDLTELYGQDFEKRYLEYEKDPKIIKEYINAKDLWKKILMNYFEAGLPFLAFKDNANRCNPNAHAGIIRSSNLCTEIFQNTAPNHYYMQIEYTDGTIEFFEEKELVTTDSNITKCANKLTSTDILKGKPIYIATKVAKDGQTAVCNLASINLSKINTEEDIKRVVPIMVRLLDNVIDLNFYPNRKVKATNLQNRAIGLGVMGEAQMLAEHQIAWGSKEHLEKIDALMEQISYHAIDTSANLAKEKGVYKDFENSEWSKGIFPIDKANNEALKLTEKGLFNHACDWQGLREKVKANGMRNGYLMAIAPTSSISILVGTTQTIEPIYKKKWFEENLSGLIPVVVPNLNVETWNFYTSAYDIDAKDLIKAAAVRQKWIDQGQSLNVFLRIENASGKTLHDIYTLAWKLGLKSTYYLRSESPSIDEKSVLDRSVECFNCQ

SEQ ID NO: 58769 - protein, 433 aa, Helicobacter pylori
MLSVIILAAGKGTRMRSSLPKTLHTICGEPMLFYILETAFSISDDVHLILHHQQERIKEAVLERFKGVIFHTQIVEKYSGTGGAIMQKDKTPISTKHERVLILNADMPLITKDALAPLLESKNNAIGLLHLADPKGYGRVVLENHQVKKIVEEKDANDEEKEIKSVNAGVYGFERDFLEKYLPKLHDQNAQKEYYLTDLIALGINENETIDAIFLKEECFLGVNSQTERAKAEEIMLERLRKNAMDLGVVMQLPNSIYLEKGVSFKGECVLEQGVRLIGNCLIENAHIKAYSVIEESQIVNSSVGPFAHARPKSVICNSHVGNFVETKNAKLQGTKAGHLSYLGDCEIGKNTNVGAGVITCNYDGKKKHQTIIGENVFIGSDSQLVAPINIGSNVLIGSGTTITKDIPSGSLSLSRAPQTNIENGYFKFFKKP

SEQ ID NO: 58770 - protein, 767 aa, Helicobacter pylori
MKRILVSLAVLSHSAHAVKTHNLERVEASGVANDKEAPLSWRSKEVRNYMGSRTVISNKQLTKSANQSIEEALQNVPGVHIRNATGIGAVPSFSVRGFGGGSSGHSNTAMVLVNGIPIYVAPYVDISIPIFPVTFQSVDRISVTKGGESVRYGPNVFGGVINVITKGIPTKWESQVSERATFWGKSENGGFFNQNSKNLDKSLANNMLFDTYLRTGGMMNKHFGIQAQANWLKGQGFRYNSPTNIQNYMLDSLYQINDSNKITAFFQYYNYFMADPGSLGIEAYNQNRFQNNRPNNNKSGRAKRWGAVYQNFFGDTDKIGGDFTFSYYGHDMSRDFQFDSNFLNVNTNPKLGPVYTDQNYPGFFIFDHLRRYIMNAFEPNLNLVVNTNKVKQTFNVGMRFMTMDMYFRLDQSTCEKTDIFNGVCRMPPFVLSKKPSNNQNLFNNYTAVWLSDKIELFDSKLVITPGLRYTFLNYNNKEPEKHDFSVWNITKKRQNEWSPALNIGYKPMENWIWYANYRRSFIPPQHTMLGITRTNYNQIFNEIEVGQRYSYKNLLSFNTNYFVIFAKRYYAGGYSPQPINARSQGVELELYYAPIRGLQFHVAYTYIDARITSNADDIAYYFTGIVNKPFDIKGKRLPYVSPNQFIFDMMYTYKHTTFGISSYFYSRAYSSMLNQAKSQTVCLPLNPEYTGGLEYGCNSVGLLPLYFVLNVQVSSVLWQSGRHKITGSLQINNLFNMKYYFRGIGTSPTGREPAPGRSITAYLNYEF

SEQ ID NO: 58771 - protein, 391 aa, Helicobacter pylori
MNEVVVVAAKRSAVGSFLGSLKSVGAREMGVSVLKDALNASGLKPSDVDSVILGNVLGAGLGQNIARQIQLDAGIPNDKNAFSVNMVCGSSMKAIQLAHDSIMLGRDEMVVCGGVENMSAAPYLSFDMRDGKRMGNANMIDSMIHDGLWDAFNNYHMGITADNVAQAYHISREDQDNFALQSQLKARAAINAGKFQEEITPIEIANKKGVVVFKEDEYPRETTLESLAKLKPAFKKDGSVTAGNSSGINDGASIIILCSTKKAQTLGLKAMATIKGFGLGGCSPDIMGICPSIAIKNNLKNVKMNLNDIHLFELNEAFAAQSLAVLKELELNPNIVNVNGGAIAIGHPIGASGARILVTLLHEMKRSGHGVGCASLCVGGGQGLSVVVEQK

SEQ ID NO: 58772 - protein, 454 aa, Helicobacter pylori
MFLLRHLTSACVFLASKCLPDSFVLVALLSFVVFVLVYCLTGQDAFSVISSWGNGAWTLLGFSMQMALILVLGQALANAKLVQKLLKYLASLPKGYYTALWLVTFLSLIANWINWGFGLVISAIFAKEIAKNVKGVDYRLLIASAYSGFVIWHGGLSGSIPLSVATQNENLSKISAGVIEKAIPISQTIFSSYNLIIIGIILVGLPFLMAMIHPKKEEIVEIDSKLLKDEYKEIELISHQQDKTIAHFLENSALLSYLLVFLGFGYLGVYFFKGGGISLNIVNTIFLFLGILLHKTPLAYVKAIDRSARSVAGILLQFPFYAGIMGMMASHSVGGHSLAQMLSLAFTHIANEKTFVLMTFLSAGIVNIFIPSGGGQWAIQAPIMLPAGQSLGVDPGVVSMAIAWGDAWTNMIQPFWALPALAIAGLGAKDIMGYCVLTLIFVGLVVCGVFYFLV

SEQ ID NO: 58773 - protein, 128 aa, Helicobacter pylori
MSDFEVPPKAKGFKRLFKALFYSKDGLKCAWIEESAFRQIVILALFCIVLASYLAKDFLEWGLLILPCFLSVVVELINSSIEKAVDFTGTEFHPLAKKAKDMASAAQLIGLIFWTLIWGRYLLALYLK

SEQ ID NO: 58774 - protein, 827 aa, Helicobacter pylori
MQDNSVNETKNIVEVGIDSSIEESYLAYSMSVIIGRALPDARDGLKPVHRRILYAMHELGLTSKVAYKKSARIVGDVIGKYHPHGDNAVYDALVRMAQDFSMRLELVDGQGNFGSIDGDNAAAMRYTEARMTKASEEILRDIDKDTIDFVPNYDDTLKEPDILPSRLPNLLVNGANGIAVGMATSIPPHRMDEIIDALVHVLENPNAGLDEILEFVKGPDFPTGGIIYGKAGIIEAYKTGRGRVKVRAKVHVEKTKNKEIIVLDEMPFQTNKAKLVEQISDLAREKQIEGISEVRDESDREGIRVVIELKRDAMSEIVLNHLYKLTTMETTFSIILLAIYNKEPKIFTLLELLHLFLNHRKTIIIRRTIFELEKAKARAHILEGYLIALDNIDEIVRLIKTSQSPEAAKNALMERFTLSEIQSKAILEMRLQRLTGLERDKIKEEYQNLLELIDDLNGILKSEDRLNGVVKTELLEVKEQFSSPRRTEIQESYENIDIEDLIANEPMVVSMSYKGYVKRVDLKAYEKQNRGGKGKLSGSTYEDDFIENFFVANTHDILLFITNKGQLYHLKVYKIPEASRIAMGKAIVNLISLAPDEKIMATLSTKDFSDERSLAFFTKNGVVKRTNLSEFESNRSCGIRAIVLDEGDELVSAKVVDKNAKHLLIASHLGIFIKFPLEEVREIGRTTRGVIGIKLNENDFVVGAVVISDDGNKLLSVSENGLGKQTLAEAYRGQSRGGKGVIGMKLTQKTGNLVGVISVDDENLDLMILTASAKMIRVSIKDIRETGRNASGVKLINTADKVMYVNSCPKEEEPENLETSSAQNLFE

SEQ ID NO: 58775 - protein, 935 aa, Helicobacter pylori
MDKIIIQGARENNLKNIFLEIPKNQFVVFTGLSGSGKSTLAFDTLYAEGQRRYLESLSSYARQFLDKVGKPNVDKIEGLTPAIAIDQKTTSKNPRSTVGTITEIYDYLRLLFARVGEQFCPTCLEPISSMSTSDIISQICHLEENSKIIILAPIIKDKKGSFNDKLESLRLKGYVRAFVDGVMVRLDEEIHLHKTKKHTIEAVVDRVVVNNENASRIASAIEKALKESYGELEVEILQDNAPSIRKHYSEHKACFKCKMSFEELEPLSFSFNSPKGACESCLGLGTKFSLDISKILDPNTPLNQGAIKVIFGYNRSYYAQMFEGFCEYNGIDSALCFNELNKEQQDALLYGNGTEISFHFKNSPLKRPWKGIIQIAYDMFKEQKDLSDYMSEKTCSSCEGHRLKASSLSVQVAGLKMADFLTKPIEEVYHFFNDPTHFSYLNEQEKKIAEPILKEILERVFFLYDVGLGYLTLGRDARTISGGESQRIRIASQIGSGLTGVLYVLDEPSIGLHEKDTLKLINTLRNLQKKGNTLIVVEHDKETIKHADFVVDIGPKAGRHGGEVVFSGSVKELLQNNHSTALYLNGTKKIERPKFELPKEKHFLEIKNVNINNIKNLSVQIPLKQLVCITGVSGSGKSSLILQTLLPTAQTLLNHAKKTQSLNGVEIVGLEHLDKVIYLDQAPIGKTPRSNPATYTGVMDEIRILFAEQKEAKILGYSASRFSFNVKGGRCEKCQGDGDIKIEMHFLPDVLVQCDSCKGAKYNPQTLEIKVKGKSIADVLNMSVEEAYEFFAKFPKIAVKLKTLMDVGLGYITLGQNATTLSGGEAQRIKLAKELSKKDTGKTLYILDEPTTGLHFEDVNHLLQVLHSLVALGNSMLVIEHNLDIIKNADYIIDMGPDGGDKGGKVIASGTPLEVAQNCEKTQSYTGKFLALELK

SEQ ID NO: 58776 - protein, 308 aa, Helicobacter pylori
MQEIESLHQSVLLQEVLQAFMPLEEGVLIDCTLGLGGHSKALLSQKPHLKLIGIDKDKFAQEIAKERLKAFEGRYNLLSGGFAKRFKEALETHNKEIKGVLVDLGVSSLQLDDDNRGFNFHSHTLDMRMDLESELNAQKVINSYPIVALEKIFRDYGEIKEYKKIAHKIAERRAKKPFKNAKDLSEFLSSFSKNKKIHPATLVFQAVRIEVNSELEELKEFLQCARNLKGAILCVISFHSLEDALVKNAFKDYAKNCICDPSSFKCACSNNHALGEILTKKPITPSPEEIKNNRRSRSAKMRVFQFKP

SEQ ID NO: 58777 - protein, 300 aa, Helicobacter pylori
MRKTISALFLSACIGLSSVYADNALILQTDFSLKDGAVSAMKGVAFSVDSHLKIFDLTHEIPPYNIWEGAYRLYQTASYWPKGSVFVSVVDPGVGTKRKSVVLKTKNGQYFVSPDNGTLTLVAQTLGIDSVREIDEKANRLKGSEKSYTFHGRDVYAYTGARLASGAITFEQVGPELPPKVVEIPYQKAKATKGEVKGNIPILDIQYGNVWSNISDKLLNQAKIKLNDTLCVTIFKGSKKQYEGKMPYVASFGDVPEGQPLVYLNSLLNVSVALNRDNFAQKYQIKSGADWNIDIKKCAK

SEQ ID NO: 58778 - protein, 240 aa, Helicobacter pylori
MDILKAEHLNKQIKKTKIVSDVSLEVKSGEVVGLLGPNGAGKTTTFYMICGLLEPSGGSVYLNDVNLAKYPLHKRSNLGIGYLPQESSIFKELSVEENLALAGESTFKNSKESEEKMESLLDAFNIQAIRERKGMSLSGGERRRVEIARALMKNPKFVLLDEPFAGVDPIAVIDIQKIIESLIGLNIGVLITDHNVRETLSVCHRAYVIKSGTLLASGNANEIYENALVRKYYLGENFKV

SEQ ID NO: 58779 - protein, 578 aa, Helicobacter pylori
MQVLALKYRPKHFSELVGQESVAKTLSLALDNQRLANAYLFSGLRGSGKTSSSRIFARALMCEEGPKAVPCDTCIQCQSALNNHHIDIIEMDGASNRGIDDVRNLIEQTRYKPSFGRYKIFIIDEVHMFTTEAFNALLKTLEEPPSHVKFLLATTDALKLPATILSRTQHFRFKKIPENSVISHLKTILEKEQVSYETSALEKLAHSGQGSLRDTITLLEQAINYCDNAITESKVAEMLGAIDRSVLEDFFQSLINQDEARLKERYAILENYETESVLEEMMLFLKAKLLSPDFYSILLIERFFKIIMSSLSLLKEGANASFVLLLLKMKFKEALKFKALDDAILELEQTPFNQNPSISYNAPKQESKNIEKREKIEQIERIEGTEKREKLEKKENAETPQTPMLSAKDRIFHNLFKQVQTLVYERNYELGAVFEKNIRFIDFDSQTKTLTWESLATDKDKELLRERFKIVKSIVDGVFGKGESIKIALKNHSENKSTLEVVKELKFPYSKPKPTTETTAETKEKETKEKEIQENDTKEIQEVQPKQAPTALQEFMANHSELIEEIKSEFEIKSVELL

SEQ ID NO: 58780 - protein, 328 aa, Helicobacter pylori
MDFKNKKWLFLAPLAGYTDLPFRSVVKKFGVDVTTSEMVSSHSLVYAFDKTSKMLEKSPLEDHFMAQISGSKESVVKEAVEKINALEHVNGIDFNCGCPAPKVANHGNGSGLLKDLNHLVKLLKTIRENTSKKITSVKVRLGFEKKIPKEIAHALNDAPVDYVVVHGRTRSDKYQKDKIDYESIALMKKILKKPVIANGEIDSVKKAFEVLQITQADGLMIGRAALRAPWIFWQIRNNTTKLPAVVKKDLVLEHFDKMVEFYGDMGVIMFRKNLHAYAKGEMQASAFRNCVNTLTEIKSMRESIEEFFNQEMLQSEVPLWVELNQKSV

SEQ ID NO: 58781 - protein, 336 aa, Helicobacter pylori
MQDFKTHLEPLKEGKNLLGFSGGLDSTCLFFLLVGENIVFDIALVDYNTQKQRLEIIQHAQKLAKTHHKKCYIHHAPKIAHNFEMQARKIRYDFFETLIKEHSYKHLILAHHLNDRLEWFLMQLSKGAGLNTLLSFQAYEKRESYAIVRPLLYTPKDTLKTLAKDLKFFEDDSNSSLKFKRNCFRKNYANSLMQDYSKGIIQSFKFLDQEKERLYPLTIVSQMHGITFFKYSQNALFMVDKILKQKGYVLSFSQKEEIKRSFFSLEIAQKFIIESDKEHVFIALKPPKTLSMPKDFKDRARRLDIPKRLRPVLYAEFLKQPTHDFLTRFKQSLMDL

SEQ ID NO: 58782 - protein, 439 aa, Helicobacter pylori
MQVKENKQLCLISLGCSKNLVDSEVMLGKLYNYTLTNDAKSADVILINTCGFIESAKQESIQTILNAAKDKKEGAILIASGCLSERYKDEIKELIPEVDIFTGVGDYDKIDIMIAKKQNQFSEQVFLSEHYNARIITGSSVHAYVKISEGCNQKCSFCAIPSFKGKLQSRELDSILKEVENLALKGYTDMTFIAQDSSSFLYDKGQKDGLIQLIRAIDKQQALKSARILYLYPSSTTLELIGAIESSPIFQNYFDMPIQHISDSMLKKMRRNSSQAHHLKLLDAMKQVKESFIRSTIIVGHPEENESEFEELSAFLDEFQFDRLNIFAFSAEENTHAYSLEKVPKKTINARIKALNKIALKHQNHSFKALLNKPIKALVENKEGEYFYKARDLRWAPEVDGEILINDSELTTPLKPGHYTIAPSEFKDNILLAKVLSPF

SEQ ID NO: 58783 - protein, 369 aa, Helicobacter pylori
MLLFTPGPVAINEEMRTSFSQPMPHHRTKDFEKIFQSVRENLKKMTGLEEVLLLSSSGTGAMEASVISLCQKELLFVNAGKFGERFGKIAKAHSIKAHELVYEWDTPAQVDEILSVLKANPNIDAFCIQACESSGGLRHPVEKIAQAIKETNPNVFVIVDAITALGVEPLEITHVDALIGGSQKAFMLPPAMSLVALSQNAIERIEERNVGFYFNLKSELKNQRNNTTSYTAPILHTLGLQRYFELVQNLGGFEALYRETKKAALATQKAVLALGLKIFPKSPSLSMTTIVNEHAKELRNLLKEKYQVQFAGGQEPYKDALIRINHMGIIPVYKSAYALNALELALNDLDLREFDGVANATFLKQYYGI

SEQ ID NO: 58784 - protein, 347 aa, Helicobacter pylori
MEFCVLFGGASFEHEISIVSAIALKGVLKDRIKYFIFLDENHHFYLIEESNMHSKYFAQIKEKKLPPLILTHNGLLKNSFLGAKIIELPLVINLVHGGDGEDGKLASLLEFYRIAFIGPRIEASVLSYNKYLTKLYAKDLGVKTLDHVLLNEKNRANALDLMNFNFPFIIKPNNAGSSLGVNVVKEEKELVYALDGAFEYSKEVLIEPFIQGVKEYNLAGCKIKKDFCFSYVEEPNKQEFLDFKQKYLDFSRNKAPKANLSNALEEQLKENFKKLYNDLFDGAIIRCDFFVIKNEVYLNEINPIPGSLANYLFDDFKTTLENLAQSLPKTPKIQIKNSYLLQIQKNK

SEQ ID NO: 58785 - protein, 241 aa, Helicobacter pylori
MAKRSIAYLDSVFDISYTFIDHHSPLNALFLHGWGSSKEIMQQAFQGCFLNYNHLYVDLPGFNQSPNDEKVLETKDYANIINLFLKSVGKKAHVVFGHSFGGKVAILCENERMVLLSSAGILEPKPLKVRCKILLAKIFKKLGLNLGFLRSKDAMGLNQAMYETFKKVISEDFSDHFKRCEKEVLLFWGKDDKATPLSSAQKMQTLLKRSVLFVLEGDHFFFLNQAKEIEKLVENYHHAKS

SEQ ID NO: 58786 - protein, 493 aa, Helicobacter pylori
MQSLSWLNLAFRWLFITGLGYYIMTLLQWYHYSVFRILTKHHKMRWHGIYFLLPLGVFILSYAFTMPFVFDFFCGVIQMPMLIVWAKRNDKPLVFTPRVKRFFIFLLLFLILHEILNIELVPLDGISLALGYLCLFIFVLSASLISEKALSKQYLQTAKDKITSLKNLKVIAITGSFGKTSTKNFLLQILQTTFNAHASPKSVNTLLGLANDINQNLDDRSEIYIAEAGARNKGDIKEITCLIEPHLVVVAEVGEQHLEYFKTLENICETKAELLDSKRLEKAFCYSVEKIKPYAPKDSPLIDYSSLVKNIQSTLKGTSFEMLIGSVWERFETKVLGEFSAYNIASAILIAKHLGLETERIKRLVLELNPIAHRLQLLEVNQKIIIDDSFNGNLKGMLEGIRLASLHKGRKVIVTPGLVESNTESNEALAQKIDGVFDVAIITGELNSKTIASQLKTPQKILLKDKAQLENILQATTIQGDLILFANDAPNYI

SEQ ID NO: 58787 - protein, 318 aa, Helicobacter pylori
MKARGFKAKMRGFKIFSGSAHPAFGKEVSKHLGFPLSKAVIGKFSDGEINIQISESVRGKDIFIIQPTCVPVNDNLMELLVMVDALRRSSANSITAVLPYFGYARQDRKAAPRVPITAKMVANLMQEVGIERIITMDLHAGQIQGFFDVPVDNLYGSIVFRDYIRSKALKNPVIASPDVGGVTRARYFANQMGLDLIIVDKRREKANESEVMNIIGSAKERDVILVDDMIDTAGTICKAALALKEQGATSVMALGTHAVLSGNAIKRIKESALDEVVVTNSIPLVQKCDKITTLSVAPLFAEVIRRIYHNESVQSLFT

SEQ ID NO: 58788 - protein, 462 aa, Helicobacter pylori
MQIATAIWKTRIWQLQTHFDKKEAHLKHLEAQHKEFVRDEKRYLEKEKKELEKERQILEQEKENFKKQRAVCKESQAKALDAMLNYMAYTKDEIKSMILEQLEEELEAQKSALIRRYEKEAKEEGKKKSYAILAEATARFAGNYAAENLTTRIALPCSDYIGRVIGKDGKNIEAFKKVSGVDIEFSEDSSELCLSSFNLYRREVASETLKILIEDGRIQPNRIEEVYHRVARNLEKELLSEGESVVLELELGAMEDELKILIGKMRYRSSFGQNALQHSKEVALLAGLIAEQLGGDKKLARRAGILHDIGKALTQELGRDHVNLGVEVCKRHKEDPVVINAIYAHHGHEEILSVECASVCAADALSAGRPGARRKSDEEYAKRMQALEEIALEFDGVEKAYAMESGRELRVIVKSNQVRDNQVPIIARKIAKKIEESAQYVGEVGVQVVRESRFKTTATLKQ

SEQ ID NO: 58789 - protein, 200 aa, Helicobacter pylori
MACKLLFWKLKDYQNILLYSPLGHELDIRPLIFRLRQKNKCVWLPKSIKKGAHFSKESFTIAPFRLPLRRLGWFDEPSLSRYYKQELDCIVVPILGMDTSFRRVGFGLGMYDRSLPQLLKRRLKRPLIVFVSRELAIANGVLTNAYDIEADLYMNARIVVKNNKRKHYEQRVNLHFIRSLGSVFDYRSSHVLCDEKDLLR

SEQ ID NO: 58790 - protein, 293 aa, Helicobacter pylori
MFNFFKKIVNKIKGEEAKEKKRQSVPKEELEEILIGFDIQYDLIESLLKHLGDLITPKQLEVALLRFVRGDSYYDKTRLKTITTKPLVHLIVGVNGAGKTTTIAKLAKLSLKQHKKALLGAGDTFRAAAVKQLQLWGEKLNIQVISAKEGSDPSSLAYNTIESAIAKNIDEVFIDTAGRLHNQTNLKNELSKIARTCSKVLKDAPFYKFLILDGTQGSSGLTQAKIFHETLALDGVIMTKLDGTSKGGAILSVLYELKLPILYLGMGEKEDDLIAFDEERFIEDLVDAVFVGQ

SEQ ID NO: 58791 - protein, 321 aa, Helicobacter pylori
MLVDSFNRVIDYIRVSVTKQCNFRCQYCMPATPLNFFDNEELLPLDNVLEFLKIAIDEGVKKIRITGGEPLLRKGLDEFIAKLHAYNKEVELVLSTNGFLLKKMAKDLKNAGLAQVNVSLDSLKSDRVLKISQKDALKNTLEGIEESLKVGLKLKLNTVVIKSVNDDEILELLEYAKNRHIQIRYIEFMENTHAKSLVKGLKEREILDLIAQKYQIIEAEKPKQGSSKIYTLENGYQFGIIAPHSDDFCQSCNRIRLASDGKICPCLYYQDAIDAKEAIINKDTKNIKRLLKQSVINKPEKNMWNDKNSETPTRAFYYTGG

SEQ ID NO: 58792 - protein, 358 aa, Helicobacter pylori
MAEEEKTELPSAKKIQKAREEGNVPKSMEVVGVLGLLAGLISIFVFFIWWVDGFSEMYRHVLKDFSLDFSKESVQELFNQLAKDTFLLLLPILIILVVVAFLSNVLQFGWLFAPKVIEPKFSKINPINGVKNLFSLKKLLDGSLITLKVFLAFFLGFFIFSLFLGELNHAALLNLQGQLLWFKNKALWLISSLLFLFFVLAFIDLAIKRRQYTNSLKMTKQEVKDEYKQQEGNPEIKAKIRQMMLKNATNKMMQEIPKANVVVTNPTHYAVALKFDEEHPVPVVVAKGTDYLAIRIKGIAREHDIEIIENKTLARELYRDVKLNAAIPEELFEAVAIVFAQVAKLEQERQKQKIIKPL

SEQ ID NO: 58793 - protein, 440 aa, Helicobacter pylori
MLVRLGVVACLFWLHYAYATTLKITNVVPFGSSSVKMVFNQEVKKFKEVSLKNFKSYLELEAILTIPKKHYQFSKQSFITIAQFSPKLVRVVIGYAPKMTYEVKILKDKLYVSIVEKKPLIRHQMALKPPKHHALKHTTPKPAHKPIKKEAKKVKEKTPTKHAHSKHTHSPLNERSTKKEIPKKEIPKKEAENESKNQVFIAEKNDTFIKTKRKKHKKIVLDAGHGGKDCGAMSANLVCEKDIVLEVVKFLHKELKKRDYSVLLTRDKDIYIDLVARTELANKKSADLFISVHANSIPKHSTSNAHGIETYFLSTARSERARKVAEQENKDDVNLMDYFSKSLFLNSLNTQRLIVSNKLAIDVQYGMLQSVRKNYPDVVDGGVREGPFWVLAGALMPSILIEIGYNSHAIESKRIQSKPYQKILAKGIADGIDSFFSKND

SEQ ID NO: 58794 - protein, 363 aa, Helicobacter pylori
MVSTLKPLKIGKHTIKFPIFQGGMGVGISWDELAGNVAKEGALGVISAVGTGYYKNMRFVERIVAKKPFEALNFYSKKALNEIFANARKICGNNPLGANILYAINDYGRVLRDSCEAGANIIITGAGLPTNMPEFAKDFSDVALIPIISSAKALKILCKRWSDRYKRIPDAFIVEGPLSGGHQGFKYEDCFKEEFRLENLVPKVVEASKEWGNIPIIAAGGIWDRKDIDTMLSLGASGVQMATRFLGTKECDAKVYADLLPTLKKEDILLIKSPVGYPARAINTGVIKRIEEGNAPKIACVSNCVAPCNRGEEAKKVGYCIADGLGRSYLGNREEGLYFTGANGYRVDKIISVHELIKELTEG

SEQ ID NO: 58795 - protein, 402 aa, Helicobacter pylori
MEQKIAIALKEIARGTNEIIGLEYIEKLVRKYYETNERFIVKAGFDPTAPDLHLGHTVLIQKLALLQQYGARVKFLIGDFTAMIGDPTGKNETRKPLNREQVLENAKTYEEQIYKILDEKHTEVCFNSTWLDALGAKGMIELCAKFSVARMLERDDFTKRYKENRPISIVEFLYPLLQGYDSVAMDADIELGGNDQKFNLLVGRFLQRAYGLNKEQSVITMPLLEGLDGVQKMSKSLGNYVGITEEPNAMFGKIMSVSDDLMWRYYTLLSTKTLEEIEDLKHGILNQTLHPKAVKEDLASEIVARYYDNDQAIKAKEQFSKVFSANLLPEILSESDFDEGVGILDVLKQIGFCPSTSQARRDIQGGGVKINQEVIKNESYRFVKGNYVIQLGKKRFMKLNIN

SEQ ID NO: 58796 - protein, 775 aa, Helicobacter pylori
MNEIDKSVDIGFLRILDVIKKVTTPKGGIEILRTLIDFTPKIENALNLAAKSHKGQYRKSGEPYIVHPICVASLVAFCGGDEAMVCAALLHDVVEDTPCKIETIEQEFGQDVANLVDALTKITEIRKEELGVSSQDPRMVVSALTFRKILISAIQDPRALVVKISDRLHNMLTLDALPHDKQVRISKETLAVYAPIASRLGMSSIKNELEDKSFYYIYPEEYKNIKEYLHKNKQSLLLKLNAFASKLEKKLFDSGFSHSDFKLVTRVKRPYSIYLKMQRKGAVNIDEILDLLAIRILLKNPIDCYKVLGIIHLNFKPIVSRFKDYIALPKENGYKTIHTTIFDESSVYEVQIRTFDMHMGAEYGNSAHWKYKAGGVDHEDHHEGMRWLQNFKYHDSDLKNDPKEFYELAKNDLYREDIVVFSPHGDTYTLPVGAIALDFAYMVHSDLGDKATDAYINSKKALLNQELRSGDVVKIIKGDKIIPRFIWMDQLKTSKAKNHLRIQRRNRLKEVDTKSMINILATFFGRSVFEDMDLKDYKNFEERLTDCGVETTLTEAMKSFENLAKLTEEIENKVFSLKEDAILEYQEMSLWTRGLRYLGFKTNVLNFLAPNRQWQCKELEHFSVCSSNALEIKQVLLNDCCYPKYGDEIIAIVTDLKDPKAIAHHKFCKKAMAEVDAKVPMVYIEWHKRDRTIYKMMFYLGEKKSVLAGLLTFLNRNECNIVGVSYLGYKDKYSSHCEVSFEIATDKADWIRALINRKYQDRIVELSSLDDAYES

SEQ ID NO: 58797 - protein, 240 aa, Helicobacter pylori
MQAKIKNKRVLVKFSGEALAGDNQFGIDIHVLDHIAKEIKSLVENDIEVGIVIGGGNIIRGVSAAQGGIIRRTSGDYMGMLATVINAVAMQEALEHIGLDTRVQSAIEIKEICESYIYRKAIRHLEKGRVVIFGAGTGNPFFTTDTAATLRAIEIGSDLIIKATKVDGIYDKDPNKFKDAKKLDTLSYNDALIGDIEVMDDTAISLAKDNKLPIVVCNMFKKGNLLQVIKHQQGVFSMVK

SEQ ID NO: 58798 - protein, 853 aa, Helicobacter pylori
MMKDFLEDYKKSVSERGSEGIPPLPLNAKQVQAVVEILTKDPTNAAFAKELLIHRVSPGVDEGAKVKAEFLAKLSQKKLECVHISALEATTLLGTMLGGYNVEPLIMGLESQDKNIAKESAKALKTTLLVYGSFDKIAAMSKTNALAKEVLESWANAEWFLNKEPLNECIEACVFKIDGETNTDDLSPASDAFTRSDIPLHAKAMLKNRIENYEQRIKAIKTKGVPVAYVGDVVGTGSSRKSATNSIMWHFGKDIPFVPNKRSGGIVIGGVIAPIFFATCEDSGALPIVADVKDLKEGDLIKIYPYKGEITLNDKVVSTFKLEPETLLDEVRASGRIPLIIGRGLTNKARKFLGLGESEAFKKPSAPKSDAKGYTLAQKIVGHACGVKGILPGTYCEPKVTTVGSQDTTGAMTRDEVKELASLKFDAPFVLQSFCHTAAYPKPSDVSLHATLPGFITQRGGVALHPGDGVIHTWLNRMGLPDTLGTGGDSHTRFPLGISFPAGSGLVAFAAVTGTMPLNMPESVLVRFKGEMNPGITLRDLVNAIPYYAIKKGLLTVEKKGKINVFNGRILEIEGLPDIKMEQAFELSDASAERSAAACVVRLNKEPMIEYLKSNIKLIDEMIASGYEDKETLKKRRDAMQAWVDNPVLLEPDSNAQYAAVIEIDVAEITEPILACPNDPDDVATLSEVLADTTGKRPHAIDEVFIGSCMTNIGHFRAFGEIVKNAPPSQARLWVVPPSKMDEQELINEGYYAIFGAAGARTEVPGCSLCMGNQARVRDNAVVFSTSTRNFDNRMGRGAKVYLGSAELGAACALLGRIPTKEEYMNLVSEKLESQKDKIYRYMNFNLMENFRL

SEQ ID NO: 58799 - protein, 865 aa, Helicobacter pylori
MIKAIIGKIIGTRNDRWIKQYKKQVLTINALEPTYEKMSDDELQNAFEELKKRVRSTEKDLQEKTLLEVLPESFAITREASKRILKMCHFDVQLIGGMVLNDGKIAEMKTGEGKTLVATLAVALNALKGESVYVVTVNDYLAHRDSKEMEPLYHFLGYSVGTITASVRDDDERLEIYSKDIVYGTNNEFGFDYLRDNMKYSLEHKVQKSHAFAIVDEVDSILIDEARTPLIISGPVDRRMENYNKADEVAKSMQVEIDFTIDEKNRAILITEEGIKKAENLFGVDNLYKIENAALSHHLDQALKANYLFFIDKDYIVANNEVVIVDEFTGRLSEGRRFSEGLHQALEAKEGVSIKEESQTLADITFQNYFRMFSKLAGMTGTAQTEATEFLEIYNLEVVSIPTNLAIKRKDLNDLIYKSEKEKFDAVILKIKELHDKGQPVLVGTASIEKSETLHALLKKERIPHTVLNAKQHTKEAEIIKDAGLKGAVTIATNMAGRGVDIKLTDEIKELGGLYIIGTERHESRRIDNQLRGRSGRQGDPGTSQFYLSLEDNLLRIFGSDRIKGVMEKLGLKDGEHIESKLVTRAVENAQKKVENLHFESRKHLLEYDDVANEQRKSVYKFRDELLDVNYDISAKIAENREYALNQIFSKLKAFDHQNLSEEELLGLKNILKEDFNAHVSLEDLKKASPIENFVAEKLKSDYENKMKVLDSEQRSRIERIVYLQILDNAWREHLYTMDNLKTGINLRGYNQKDPLVEYKKESYNLFLEFIEDIKTEAIKTFSKIQFENEQDSSDAERYLDNFSEEREHESVTYRHEEALDEDLNVAMKAFAKTPKRNEPCPCQSGKKYKDCCAKSGPKKGLFAK

SEQ ID NO: 58800 - protein, 410 aa, Helicobacter pylori
MPNRSLIFFLIKRYLRFDKSQPFISITALLAFFGVAVGVMVLIVAMAIMNGMSKEFEKKLFVMNYPLTLYTTSPYGISEEVVQALEKKFPNLLFSPYLQTQSLIKSAHSMNGGVVFGVDFSKEKRINEVLNDALKNINENDLFKNPFNLIVGKSLRYSLNLDLNQKADLFFTELEPTGLTLSPIMKRFTIKGDFDSGLKSYDMSYMYAGLQAISAIRRLPLGLYDGVHVYSKTPMKDIEILRNALKTINHHGIGIEGWWQQNGNFFSAMELEKRALFIVLMLIILMASLNIISSLLMVVMNRRKEIALLFSMGSSQKEIQKTFFYLGNIIGLGGVALGVVLAFLSMYLLSVFPIISLPADVYGINTLPLNLSLMDFTLTLIGSVIIVGLSSYYPSKKASTIDALSVLRNE

SEQ ID NO: 58801 - protein, 176 aa, Helicobacter pylori
MQTIHIGVLSASDRASKGIYEDLSGKAIQEVLSEYLLNPLEFYYEIVADERDLIEKSLIKMCDEYQCDLVVTTGGTGPALRDITPEATEKVCQKMLPGFGELMRMTSLKYVPTAILSRQSAGIRNKSLIINLPGKPKSIRECLEAVFPAIPYCVDLILGNYMQVNEKNIQAFRPKQ

SEQ ID NO: 58802 - protein, 344 aa, Helicobacter pylori
MILKRVTEALEAYKNGEMLIVMDDEDRENEGDLVLAGIFSTPEKINFMATHARGLICVSLTKDLAKKFELPPMVSVNDSNHETAFTVSIDAKEARTGISAFERHLTIELLCKDTTKPSDFVRPGHIFPLIAKDGGVLARTGHTEASVDLCKLAGLKPVSVICEIMKEDGSMARRGDKFLSDFALKHNLKTLYVSDLISYRLENESLLKMFCQEEREFLKHQTQCYTFLDHQQKNHYAFKFKGAKTHDLAPLVRFHPIKEDFDFLTTDAFEVFFKALEYLKHEGGYLIFMNTHSKENNVVKDFGIGALVLKNLGIKDFRLLSSCEDRQYKALSGFGLKLVETISL

SEQ ID NO: 58803 - protein, 787 aa, Helicobacter pylori
MNGYLRVKTSYFLALNALTFLSFNSLVGAKEQHHTLQKVTTTEQKFNPSAPLSWQSEEMRNSTSSRTVISNKELKKTGNLNIENALQNVPGIQIRDATGTGVLPKISVRGFGGGGNGHSNTNMILVNGIPIYGAPYSNIELAIFPVTFQSVDRIDVIKGGTSVQYGPNTFGGVVNIITKEIPKEWENQAAERITFWGRSSNGNFVDPKEKGKPLAQTLGNQMLFNTYGRTAGMLGKHVGISAQGNWINGQGFRQNSPTKVQNYLLDAVYKINATNTFKAYYQYYQYNSYHPGTLSAQDYAYNRFINERPDNQDGGRAKRFGIVYQNYFGDPDRKVGGDFKFTYFTHDMSRDFGFSNQYQSVYMSSQNKILPFKGKGKISATNPNCGLYSYSDTNSPCWQFFDNIRRSVVNAFEPKLNLIVNTGKVKQTFNMGMRFLTEDLYRRSTTRKNPSMPNNGSGFDAGTSLNNFNNYTAVYASDEINFNNGMLTITPGLRYTFLNYEKKDAPPFKAGQTGKTIKDRYNQWNPAVNVGYKPIKELLFYFNYQRSYIPPQFSNIGSFVGTSTDYFQIFNVMEGGSRYYFNNQVSFNANYFVIFANNYFTGRYGDNKEPVNARSQGVELELYYTPIRGLNFHAAYTFIDANITSHTMVTNPANPKGPKKDIFGKKLPFVSPHQFILDASYTYAKTTIGLSSFFYSRTYSDVLNTVPFIQYAPTIKNGAITTKTAGMTPWYWVWNLQISTTFWERKKQSVNASLQINNIFNMKYWFSGIGTSLTGKKPRLLGASQRM

SEQ ID NO: 58804 - protein, 119 aa, Helicobacter pylori
MIGIDIVSIARIEKCVKRFKMKFLERFLSPSEIVLCKDKSSSIAGFFALKEACSKALQVGIGKELSFLDIKISKSPKNAPLITLSKEKMDYFNIQSLSASISHDAGFAIAVVVVSSSNE

SEQ ID NO: 58805 - protein, 255 aa, Helicobacter pylori
MLSRLEKERYLRHIMLEDVGEEGQLKLLKSSVLVIGAGGLGSAVLMYLCAAGIGKIGIVDFDVVDMSNLQRQIIHSQDFLNQSKASSAKARLKQLNAGIEIEAFEERFKAHNALSLIEPYDFIIDATDNFNAKFLINDACVLAQKPYSHAGVLEYRGQSMSVLPHSACLACVFDKPPKKGLNPISGLFGVLPGVLGCIQASECLKYFLGFETLLINTLLIADIKTMDFKKIQAPKNPECRVCGTHKITHLQDYEI

SEQ ID NO: 58806 - protein, 226 aa, Helicobacter pylori
MEHRVFTIANFFSSNHDFITGFFVVLTAVLMFLISLGASRKMQMVPMGLQNVYESIISAILSVAKDIIGEELARKYFPLAGTIALYVFFSNMIGIIPGFESPTASWSFTLVLALIVFFYYHFEGIRVQGFFKYFAHFAGPVKWLAPFMFPIEIISHFSRIVSLSFRLFGNIKGDDMFLLIMLLLVPWAVPVAPFMVLFFMGILQAFVFMILTYVYLAGAVLTDEGH

SEQ ID NO: 58807 - protein, 453 aa, Helicobacter pylori
MITLKQALSLSQDELETLKNEIDAKVRASDLNAYIKAPSLNGASAKGVPILIKDNISVKGWEITCSSKILEGYVAPYHASVMENLHQNSMAGFGLSNMDEFAMGSTTESSCYGITKNPRDKNRVPGGSSGGSAAAVAGGLAVAALGSDTGGSIRQPASYCGCVGLKPTYGRVSRYGLIAYCSSFDQIGPITQNVEDASILFDAISGYDSKDSTSANLKPTQTFKNLNRDKRFKIAVLMDHIKDASNEVQLAYENTLKALKEMGHEIVEKKMLDSHYQISIYYIISMAEASSNLARFDGVRYGRRAQNIKDLKELYLKSRSEGFGDEVKRRIMLGNFVLSSGYYDAYYLKAQQMRLIIKEQYNKIFEEVDLIFTPVAPTSAHLFNYHASPLEMYLSDIYTIGANLSGLPALSLPVAKDPLGLPIGMQFIAKAFDEQSLLDVSYALEQELDLKLD

SEQ ID NO: 58808 - protein, 458 aa, Helicobacter pylori
MNTSHKTLKTIAILGQPNVGKSSLFNRLARERIAITSDFAGTTRDINKRKIALNGHEVELLDTGGMAKDALLSKEIKALNLKAAQMSDLILYVVDGKSIPSDEDLKLFREVFKINPNCFLVINKIDNDKEKERAYAFSSFGMPKSFNISVSHNRGISALIDAVLSALDLNQIIEQDLDADILESLETPNNALEEEIIQVGIIGRVNVGKSSLLNALTKKERSLVSSVAGTTIDPIDETILIGDQKICFVDTAGIRHRGKILGIEKYALERTQKALEKSHIALLVLDVSAPFVELDEKISSLADKHSLGIILVLNKWDIRYAPYEEIIATLKRKFRFLEYAPVITTSCLKARHIDEIKHKIIEVYECFSKRIPTSLLNSVINQATQKHPLPSDGGKLVKVYYATQFATKPPQISLIMNRPKALHFSYKRYLINTLRKEFNFLGTPLILNAKDKKSAQQN

SEQ ID NO: 58809 - protein, 94 aa, Helicobacter pylori
MNKAEFIDLVKEAGKYNSKREAEEAISAFTLAVETALSKGESVELIGFGKFETAEQKGKEGKVPGSDKTYKTEDKRVPKFKPGKTLKQKVEEGK

SEQ ID NO: 58810 - protein, 587 aa, Helicobacter pylori
MKNFSPLCCFKKLKKRHLIALSLPLLSYANGFKIQEQSLNGTALGSAYVAGARGADASFYNPANMGFTNDWDENRSEFEMTTTVINIPAFKFQVPTTNQGLYSVTSLQIDKSQQNILGIINTIGLSNILKALGNTAATNGLSQAINRVQGLMNLTNQKVVTLASKPDTQIVNGWTGTTNFVLPKFFYKTRTHNGFTFGGSFTAPSGLGMKWNGKGGEFLHDVFIMMVELAPSMSYTVNKHFSVGVGLRGLYATGSFNNTVYVPLEGASVLSAEQILNLPNNVFADQVPSNMMTLLGNIGYQPALNCQKAGGDMSDQSCQEFYNGLKKIMGYSGLIKASANLYGTTQVVQKSNGQGVSGGYRVGSSLRVFDHGMFSVVYNSSVTFNMKGALVAITELGPSLGSVLTKGSLNINVSLPQTLSLAYAHQFFKDHLRIEGVFERTFWSQGNKFLVTPDFANATYKGLSGTVASLDSETLKKMVGLANFKSVMNMGAGWRDTNTFRLGVTYMGKSLRLMGAIDYDQAPSPQDAIGIPDSNGYTVAFGTKYNFRGFDLGVAGSFTFKSNRSSLYQSPNIGQLRIFSASLGYRW

SEQ ID NO: 58811 - protein, 333 aa, Helicobacter pylori
MPNHQNMLDNQTILITGGTGSFGKCFVRKVLDTTNAKKIIVYSRDELKQSEMAMEFNDPRMRFFIGDVRDLERLNYALEGVDICIHAAALKHVPIAEYNPLECIKTNIMGASNVINACLKNAISQVIALSTDKAANPINLYGATKLCSDKLFVSANNFKGSSQTQFSVVRYGNVVGSRGSVVPFFKKLVQNKASEIPITDIRMTRFWITLDEGVSFVLKSLKRMHGGEIFVPKIPSMKMTDLAKALAPNTPTKIIGIRPGEKLHEVMIPKDESHLALEFEDFFIIQPTISFQTPKDYTLTKLHEKGQKVAPDFEYSSHNNNQWLEPDDLLKLL

SEQ ID NO: 58812 - protein, 219 aa, Helicobacter pylori
MFDADCLKLMFVAGSQDFYHIKGGKNDRINALLDTLELALQSKITAFQFRQKGDLALQDPTQIKQLAMKCQKLCQKYGAPFIVNDEVQLALELKADGVHVGQEDMAIEEVITLCKKRQFIGLSVNTLEQALKARHLDAVAYLGVGPIFPTPSKKDKQVVGVELLKKIKDSGIKKPLIAIGGITMHNAPKLREYGGIAVISAIAQAKDKALAVGKLLNNA

SEQ ID NO: 58813 - protein, 273 aa, Helicobacter pylori
MDFCKIKEILRRLVVLKELRQKRPLVHNITNYVAAQFVANGLLALGASPLMSDAIDEMRDLAKISDALAINIGTLNDRAILCAKEAIKHYKALNKPIVLDPVGCSASALRHDTSLELLKSGGISALRGNAAELGSLVGISCESKGLDSNDAATPVEIIKLAAQKYSVIAVMTGKTDYVSDGKKVLSITGGSEYLALITGAGCLHAAACASFLSLKKDPLDSMAQLCALYKQAAFNAQKKVLENNGSNGSFLFYFLDALSLPIELENSLIKEEW

SEQ ID NO: 58814 - protein, 866 aa, Helicobacter pylori
MQVIHQYSNKGGKYQNRYDVSILVNGLPLVHVELKKRGVAIREAFNQIKRYKRDSFSAEDGLFDFVQIFVISNGTSSKYYSNTTRIAQLEKNHKADTFEFTNYWADSKNHNIEDLMDFAKAFFAKRSLLNVLTCYCVFTSEEVLLVMRPYQIVAAERILEKIKTAQNSKTKNQSKGYIWHTTGSGKTLTSFKSATLAKELESVSKVLFVVDRKDLDYQTMKEYDKFQKDCANSNTSTKILKEQLEDSNAKIIITTIQKLDKFVKSHKGHAIFNEEVVMIFDECHRSQLGSMHQAITKAFKKYHLFGFTGTPIFAANCDKNNPLGTTEQKFGKCLHQYTIIDAIRDKNVLPFRVEYHNTIKAKEDIKDNKVRAVDEKNALLDTRRIKEITKCILERFNQATKNKKFNSILACSSIEALKKYYQAFKEEKHDLKIAAIFSYSANEEIDTLEDENNESACRLDKSSRDFLEGAIADYNGMFGVSFDTSDQKFQSYYKDLSQKMKERKIDLLMVVNMFLTGFDATRLNTLWVDKNLKYHGLIQAFSRANRILDSVKTHGNIVCFRDLEQDLNDALMLFGNKDAQSIALLRKYEDYLKGYTDNNKEYEGYEGLIKRLLTEFPLKEPIVSESQKKDFIKLFGKILKLENILNSFENFKKDDYINPRDFQDYQSKYLDFYDAMRSEKGKDKEEINDDLIFEIELIKQVEVNIDYILNLIEEFAKEHGVEIQGVKTKIEPIINSSIELRNKKDLIMDFIDKYNKDQEVHAHFQDYIHQKREEEFQNIIEENRLNEEKAYSFMQHAFKGGEISFSGTEFPKIIEEKPSMFGKNSRYQEVKEKVAASLSRFFHRFCDLTSAIFKKNEVKKDEVNEK

SEQ ID NO: 58815 - protein, 527 aa, Helicobacter pylori
MENNPNNNQASLERNELHNTIWKVANELRGSVDGWDFKQYVLGILFYRYISENMTHYINKEERKRDPSFDYAKLSDEKAERGRKHLIEQKGFFIPPSALFCNALKNACHNEDLNVTLQNIFNEIEKSSLGTPSEENVKGLFADLDVNSNKLGSSHQNRVEKLTKILEAIGGMQLGDYLKSGIDVFGDAYEYLMAMYASNAGKSGGEFFTPQEVSELLAKITLHGQESVNKVYDPCCGSGSLLLQFSKVLGDKNVSKGYFGQEINLTTYNLCRINMFLHDINYSKFHIAHGDTLLDPKHEDDEPFDAIVSNPPYSTKWVGDSNPILINDERFSPAGVLAPKNAADLAFTMHMLSYLSNSGTAAIVEFPGVLYRGNAEAKIREYLVKENVIDCVIALPDNLFFGTSIATCILVLKKNKQDDTTLFIDASKEFVKEGKKNKLKERNREKILQTYIERKEIKHFCALANIEKIKENDYNLSVNRYVEQEDTKEAIDIKALNSEIAQIVEKQSALRNRLESIIKELEGGQNA

SEQ ID NO: 58816 - protein, 227 aa, Helicobacter pylori
MVFDRTISVREKKAAKTLGIIGIVFFILFGIVISGVAFQKEWVQQLDLFFIDLIRNPAPIQKSAWLSFVFFSTWFAQSKLTTPIALLIGLWFGFQKRIALGVWFFFSILLGEFTLKSLKLLVARPRPVTNGELVFAHGFSFPSGHALASALFYGSLALLLCYSNANNRIKTIIAVVLLFWIFLMAYDRVYLGVHYPSDVLGGFLLGIAWSCCSLALYLGFLKRPYNQ

SEQ ID NO: 58817 - protein, 533 aa, Helicobacter pylori
MLQTINLTQRYATKKLFENVNIKLDKNKRYGLIGANGAGKSTFLKILSKSIDCSSGEVIITSGMKMGVLGQDQYAFEDLSLKDAVLIGNKRLYDAIKEKERLYTEGDLSDDKVNARLGELETICVEEDPMYECEVAIEKILEDLGIPSSKHNDLMKTLPSSDKFKILLAQVLFPKPDILLLDEPTNNLDLNAIEWLENNLKRHEGTMVVISHDRHFLNAVCTHILDLDFHSVREFSGNYDDWYIASTLIAKQQEAERNKKLKEKEELEKFIARFSANASKAKQATSRQKQLDKLDIQSLAVSSRRDPSIIFKPKRTIGNEALECENISKSYDDQIVLNQVSLKVMPKDKIALIGPNGVGKSTLCKILVEELKPDKGVVKWGATVSKGYFPQNVSEEISGEETLYQWLFNFNKKIESAEVRNALGRMLFNGEEQEKCVNALSGGEKHRMVLSKLMLEGGNFLVLDEPTNHLDLEAIIALGEALFKFDGALICVSHDRELIDAYANRIIELVPSPKGASIIDFKGSYEEYLASKK

SEQ ID NO: 58818 - protein, 327 aa, Helicobacter pylori
MSLKVFDYEDVQLIPNKCIVNSRSECDTTVILGKHAFKMPIVPANMQTIINESIAEFLAENGYFYIMHRFDGAARIPFVKKMKKRQWISSISVGVKKEECLFVEELAKQGLAPDYITIDIAHGHSNSVIEMIQRIKTHLPETFVIAGNVGTPEAVRELENAGADATKVGIGPGKVCITKIKTGFGTGGWQLAALRWCAKAARKPIIADGGIRTHGDIVKSIRFGATMVMIGSLFAGHEESSGETKIENGIAYKEYFGSASEFQKGEKKNIEGKKIWIQHKGSLKDTLVEMHQDLQSSISYAGGRDLEAIRKVDYVIVKNSIFNGDAI

SEQ ID NO: 58819 - protein, 192 aa, Helicobacter pylori
MIDNLIKKEFLAHKEALEKSLEGLQEALKQSVHLLIETLENQGKILICGNGGSASDAQHFAAELTGRYKLERKGLSAISLNTDISALTAIANDYGYEEVFARQVEALGVKNDVLIGISTSGNSKNVLKAYEKAKDLEMKTLSLAGRDGGKMKPLSDMALIVPSDDTPRIQEMHILMIHILCDCIERHFAHKN

SEQ ID NO: 58820 - protein, 461 aa, Helicobacter pylori
MKKILVIGDLIADYYLWGKSERLSPEAPVPVLEVQRESKNLGGAANVANNLISLKAKVFLCGVVGDDLEGEHFISALKARGIDASGILIDKTRCTTLKTRIIAQNQQIARVDKEIKDPLNADLRKKLLDFFTEKIQEIDGVILSDYNKGVLDFELTQAMIALANQHHKLILCDPKGKDYSKYSHASLITPNRTELEHALHLKLDSHANLSKALQILKETYHIAMPLVTLSEQGIAFLEKGELVNCPTIAKEVYDVTGAGDTVIASLTLSLLESMSLKDACEFANAAAAVVVGKMGSALASLEEIALILNQTHPKILSLEKLLETLDQQKIIFTNGCFDLLHKGHASYLQKAKALGDILIVGLNSDASIKRLKGDKRPIVSEKDRAFLLASLSCVDYVVVFEEDTPIKLIQALKPDILVKGADYLNKEVIGSEFAKETHLMEFEEGYSTSAIIEKIKRTCND

SEQ ID NO: 58821 - protein, 246 aa, Helicobacter pylori
MQMMHNLSFLGMFLAALSMSLGHCVGMCGGIVSAFSQIRFSKVTSFSYQLTCHALYNVGRISTYMLLGAIAASLGHSLSVSMGFRGVLFISMGIILICLALLGARMEKLSFQIPFISFLMKKTLQSQNILGLYFLGVLNGFLPCMMVYSFLASVILSHSAFMGAMLGLSFGLGTSMPLFLMGIFLSKISVSYRKFFNLLSKILMGVFGLYILYMGIMLINHKMPHAMHHQNNTTQHDHKGVHSHEH

SEQ ID NO: 58822 - protein, 542 aa, Helicobacter pylori
MNKPFLILLIALIVFSGCNMRKYFKPAKHQIKGEAYFPNHLQESIVSSNRYGAILKNGAVIGDKGLTQLRIGKNFNYESSFLNESQGFFILAQDCLNKIDKKTNKSKVAKTEETELKLKGVEAEVQDKVCHQVELISNNPNASQQSIVIPLETFALSASVKGNLLAVVLADNSANLYDITSQKLLFSEKGSPSTTINSLMAMPIFMDTVVVFPMLDGRLLVVDYVHGNPTPIRNIVISSDKFFNNITYLIVDGNNMIASTGKRILSVVSGQEFNYDGDIVDLLYDKGTLYVLTLDGQILQMDKSLRELNSVKLPSSLNTIVLNHNKLYSLEKRGYVIEVDLNDFDSYNVYKTPTIGSFKFFSSNRLDKGVFYDKNRVYYDRYYLDYNDFKPKLYPVVEKSASKKSQKGEKGNAPIYLQERHKAKENKQPLEENKVKPRNSGFEEEEVKTRRPEPIRDQNNATQQGETKNNESKNAPVLKENAAKKEVPKPNSKEEKRRLKEEKKKAKAEQRAREFEQRAREHQERDEKELEERRKALEMNKK

SEQ ID NO: 58823 - protein, 360 aa, Helicobacter pylori
MPTILVSALEASSNAHLEELRQNLPEDYRFIGVFEGKEVLYSPREFSIMGFRDVIGRLGFLLKAHKEMVQLAKQADMVLLMDSSSFNIPLAKKIKKQDPHKKIMYYILPQVWAWKKWRAKSLEKYCDFLGAILPFEVGYYQKKAQYVGHPLLDEIKHYKKDIKGETLVFMPGSRKSEIAKMFPLFVKAAQMLEQNEGFKRRVLVVPSFFKGLDLKALYGEDIQLFEISYDAHKSLFEAEFAFICSGTATLEAALIGTPFVLAYRAKTMDFLIARMLVNLHYIGLANIFYNALNNETPGLGESQLHPELIQHFLSVEGLLKAYKEMDRERYFKESLRLREYLKHGSARKIANEMAFLLNLT

SEQ ID NO: 58824 - protein, 505 aa, Helicobacter pylori
MVNKDVKQTTAFGAPVWDDNNVITAGPRGPVLLQSTWFLEKLAAFDRERIPERVVHAKGSGAYGTFTVTKDITKYTKAKIFSKVGKKTECFFRFSTVAGERGSADAVRDPRGFAMKYYTEEGNWDLVGNNTPVFFIRDAIKFPDFIHTQKRDPQTNLPNHDMVWDFWSNVPESLYQVTWVMSDRGIPKSFRHMDGFGSHTFSLINAKGERFWVKFHFHTMQGVKHLTNEEAAEVRKYDPDSNQRDLFNAIARGDFPKWKLSIQVMPEEDAKKYRFHPFDVTKIWYLQDYPLMEVGIVELNKNPENYFAEVEQAAFSPANVVPGIGYSPDRMLQGRLFSYGDTHRYRLGVNYPQIPVNKPRCPFHSSSRDGYMQNGYYGSLQNYTPSSLPGYKEDKSARDPKFNLAHIEKEFEVWNWDYRADDSDYYTQPGDYYRSLPADEKERLHDTIGESLAHVTHKEIVDKQLEHFKKADPKYAEGVKKALEKHQKMMKDMHGKDMHHTKKKK

SEQ ID NO: 58825 - protein, 461 aa, Helicobacter pylori
MMANILGAGVYSDIFFVAFKLPNLFRRIFAEGSFSQSFLPSFIRSSIKGSFASLVGLIFCIVLFMWCLLVALNPLWLAKLLAYGFDEETLKLCAPIVAINFWYLLLVFITTFLGALLQYKHSFFASAYSASLLNVCMILALLISKEKTHLEALYYLSYGVLLGGVAQILLHFYPLVKLGLLNLLWKGFLSFKTKNAAKKKYRSKRIKRDLKGFFKQFLPSVLGNSSAQIASFLDTTIASFLASGSVSYLYYANRVFQLPLALFAIAISTALFPSIAIALKNNQQDLILQRLQKAWFFLVGVLLLCSIGGIMLSKEITELLFERGQFSPKDTLITSQVFSLYLLGLLPFGLTKLFSLWLYAKLEQKKAAKISLISLFLGLAASLSLMPLLGVLGLALANSLSGLFLFVLTIKAFGFQLFLGIIKNLKSWLVILFLACVEILLLLAFKSWVTHLYLFYYFQGF

SEQ ID NO: 58826 - protein, 465 aa, Helicobacter pylori
MFIYDTKLKQKVPFEPLVQNKANIYVCGPTVYDDAHLGHARSAIAFDLLRRTLELSGYEVMLVRNFTDIDDKIINKALKENKSIQELSSIYIESYTRDLNALNVKKPSLEPKASEYLDAMVGMIETLLEKNIAYQVSNGDIYLDTSKDKDYGSLSVHNSSIEFGRIGLVQEKRLEQDFVLWKSYKGDNDVGFDSPLGKGRPGWHIECSSMVFETLALTNTPYQIDIHAGGADLLFPHHENEACQTRCAFGVELAKYWMHNGFVNINNEKMSKSLGNSFFVKDALKNYDGEILRNYLLGVHYRSVLNFNEEDLLVSKKRLDKIYRLKQRVLGTLGGINPNFKKEILECMQDDLNVSKALSVLESMLSSTNEKLDQNPKNKALKGEILANLKFIEELLGIGFKDPSAYFQLGVSESEKQEIENKIEERKRAKERKDFLKADSIREELLKQKIALMDTPQGTIWEKFF

SEQ ID NO: 58827 - protein, 255 aa, Helicobacter pylori
MVLEVKNLSFKYSQKLILDKLSFSVPKNSITSILAPNGSGKTTLLKCLLGLLKPLEETEIKACNKDILPLKPYEKAKLIAYIPQVEYYAFNFSVLDFVLMGKATHLNLFAMPKAKHIKEATSVLERLDLESLKDQGINDLSGGQRQMVLLARSLLQRTPLLLLDEPTSALDLKNQALFFDAIKDEMKKRELSVLVNIHDPNLVARHSTHVVMLKDKKLFLQASTPIAMTSHNLSALYDTPLEAIWHDNKLVVYAL

SEQ ID NO: 58828 - protein, 326 aa, Helicobacter pylori
MLKTYHIALACVILAVVVLLFGGESLSLEEWQEVCLNVKNHFLHNEELSSLSIIILEIRLPRVILALLVGASLSGSGVVMQTIFRNPLVDPFLLGISSGAMLGVAMAIAVVESNIAILAFFGAILASLAVLAMNRVLGNSVLSLVLSGVVLSAFLSALAGAIKFFVIPQKAQAIVVWLLGSLSLSSYKDCLIAFIGLSLGFIPLFLLRWRINLLSLSDAQSLSLGINPVLLRSLCLVCVSVASALAVSVSGTIGWIGLVIPHVARLFFGANLQKLLLSSLLMGAFFLLLADVVAKTITPYDLPVGIATSVLGAPFFLWLLFRTRGV

SEQ ID NO: 58829 - protein, 174 aa, Helicobacter pylori
MPQIQSSHSNHFDFTIDTADRTKLLMSYLVVPTTANFNNVMHGGELLNLLDKVAYVCSTRYCAKGTVTLSVDGVTFKYPIPVGNLLTFLASINYVGNTSCEVGIKVLSEDIKTREITHTNSCYFTMVAVENGKPTPMPKYEPKTEVEIRRYEGALKRKEMRTRGYLKSGKHEGV

SEQ ID NO: 58830 - protein, 370 aa, Helicobacter pylori
MSVDHLISPFRDKRTLLALSNAIKKLAFKLEKKLVIMEVCGGHTHSIMKYGLLDLMPNNLEFVHGPGCPVCVMPRARLDEAYELATIKDSIVLSLGDMMRVPGSYGSLIQAREKGLDARFLYSPMQALEIAKENPTKKVIYIAIGFETTTPMSASVLWSAKKEKINNLFFHINHILVPPSVSAILKDPACQINALLAPSHVSVISGAQIYAPLVDRFKIPIIVSGFEPVDILESVLMLIKQALNKEAKLEIQYKRAVSFEGNVKAQELVNACMEVRENFEWRGLGNIKRSALKLKEAFASYDAEEVFKEYLSHKTSKENKACKCGEILKGIAKPLDCSLFATTCTPQNPIGSCMVSSEGACAAYYRYKRV

SEQ ID NO: 58831 - protein, 301 aa, Helicobacter pylori
MAIDLAEVTGAKAAQERKKEQPTIANGLDKNAFMKLFLEQLKNQDPTAPMETDKIITQTAQLTQVEMQEENKKTMQEVASAMKSNKETNESLKDFQGALKDTMENLNKGMDDSLKANNALREVTALNSVSMIGKIAETDVSGANFDGNNKLSFSLFFDEKIDASKGVPAIQILNENNELVKTIPLKDYNGQKGYINFEWDGTNEKGEKVPKGNYKIKAEYNLDSHSKQYLQTRIGRGEVESVIFDKGKPMLRMGEMVLPIDSAIEFYQPDQKPLEQKLSDQKPIDQKPLDQKPQTPPKETA

SEQ ID NO: 58832 - protein, 529 aa, Helicobacter pylori
MKQNLKPFKMIKENLMTQSQKVRFLAPLSLALSLSFNPVGAEEDGGFMTFGYELGQVVQQVKNPGKIKAEELAGLLNSNTTNNTNTNIAGTGGNVAGTLGNLFMNQLGNLIDLYPILNTKNIHQCGTTNNGSSSATTAAATTNNGLCFQGNLDLYNEMVGSIKTLSQNISKNIFQGNNNTTSQNLSNQLSELNTASVYLTYMNSFLNANNQAGGIFQNNTNQAYGNGVTAQQIAYILKQASITMGPSGDSGAAAAFLDAALAQHVFNSANAGNDLSAKEFTSLVQNIVNNSQNALTLANNANISNSTGYQVSYGGHIDQARSTQLLNNTTNTLAKVTALNNELKANPWLGNFAAGNSSQVNAFNGFITKIGYKQFFGENKNVGLRYYGFFSYNGAGVGNGPTYNQVNLLTYGVGTDVLYNVFSRSFGSRSLNAGFFGGIQLAGDTYISTLRNSPQLANRPTATKFQFLFDVGLRMNFGILKKDLKSHNQHSIEIGVQIPTIYNTYYKAGGAEVKYFRPYSVYWVYGYAF

SEQ ID NO: 58833 - protein, 1085 aa, Helicobacter pylori
MPKRTDISNILLIGSGPIVIGQACEFDYSGTQSCKTLKSLGYRVILINSNPATVMTDPEFSHQTYIQPITPENIATIIEKEKIDAILPTMGGQTALNAVMQMHQKGMLEGVELLGAKIEAIKKGEDRQAFKEAMLKIGMDLPKGRYAYTELEALEAINEIGFPAIIRASFTLAGGGSGVAYNIEEFQELAKNALDASPINEILIEESLLGWKEYEMEVIRDSKDNCIIVCCIENIDPMGVHTGDSITIAPSLTLTDKEYQRMRDASFAILREIGVDTGGSNVQFAIHPETLRMVVIEMNPRVSRSSALASKATGFPIAKVATMLAVGFSLDEIQNDITNTPASFEPSLDYIVVKIPRFAFEKFAGVSSTLGTSMKSIGEVMAIGGNFLEALQKALCSLENNWLGFESLSKDLEAIKKEIRRPNPKRLLYIADAFRLGVCVDEVFELCQIDRWFLSQIQKLVEVEESINSSVLTDAKKLRGLKNLGFSDARIAAKIKENENLEVSPFEVELARSNLQIVPNFEEVDTCAAEFLSLTPYLYSTYAPNPLPPIENKQEKKEKKILIIGSGPNRIGQGIEFDYCCVHASLALKDLNIKSVMFNCNPETVSTDYDTSDTLYFEPIHFECVKSIIQRERVDGIIVHFGGQTPLKLAKDLAKMQAPIIGTPFKVIDIAEDREKFSLFLKELDIKQPKNGMAKSVDEAYSIANVIGFPIIVRPSYVLGGQHMQILENIEELRHYLESVTHALEISPKNPLLIDKFLEKAVELDVDAICDKKEVYIAGILQHIEEAGIHSGDSACFIPSTLSPEILDEIERVSAKIALHLGVVGLLNIQFAVHQNSLYLIEVNPRASRTVPFLSKALGVPLAKVATRVMVLEDLKEALKFYDKKNIVGYSKGVYKPKMPHFVALKEAVFPFNKLYGSDLILGPEMKSTGEVMGIARSLGLAFFKAQTACFNPIKNKGLIFVSIKDKDKEEACVLMKRLVQLGFELCATEGTHKALEKAGVKSLKVLKISEGRPNIMDLMMNGEISMAINTSDHKSQDDAKLIRASVLKNHVSYFTTLSTIEVLLLALEESSKEDELLALQDYLK

SEQ ID NO: 58834 - protein, 2529 aa, Helicobacter pylori
MAFKKARLISKFISKGSFKLNKISKKIFTLNQILKCEKPLKRHKKALKPIKKLSNRNKSFLKASVLLIGALGGLSHLRANECRYWSWSSWSYQDNIESGPNSPTHNSYCLFSSTQGSGTYYLNTLTTYSAGGASFTQKFNNGTLNVGENIRFGGTGINGGDVGYITGTYDAQTINFNSSHLTTGNSYADGGGATLNFNAANNITINQASFDNSHAGTQKSYMNFKGSNIKVSGSSFTDDTDGGFSFSGNSNNSTISFNQTSFNQGTYHFSNSATLSFNHSAFNQGTYNFNSTQSAFNNSAFNQGTYHFNGNASFDNDTFNQGTYSFNTSKVSFSGINTLNSSSPFASLKGSVSFGSDAIFNLNQTLNNQTYDILTTNGAIQYGVYQSYLWDLINYKGDKAISHVEVGNNTYDVTFDINGQDETLQETFNKQSIITQFLGDDLQQQAQKTYQQDLSNSQSALNNAASDNKIANSDTDYTKNKNATIKKDAQGLENTNQQIAQDEQALQGDLDKLKQLANSPTGFSEQAFNQAQKQEQQDEQTLQNEEKTFNSEQEGLKQAIQQAQAQQQKQQQKQEQQQAQQTYQEDLTHSQSALNDVASDNTIASNDTNYTNNQNTAIKEDAQGLENTNQQIAQDEQALQGDLDKLKQLANSPTGFSEQAFNQAQKQEQQDEQTLQNEEKTFNSEQERLKQAIANAKPTSPTPSHAPTPTKHTAPNTPPNKVPPTPPTQNPPAESVWSGVYWLQNKTYSNKGIYYIDPNLSGQSGQSGNTLSTYTANLFGRSFSVNIQNGTLIIGNNTESVNSNGLIWIGHGGFGYITGTFSAANIYLTNNFKTGEGVSNSDGGGANITFKASDNITMDGLNYNDAETVTKMIQTGASQHSYATFDALNNISVTNSSFSDMTWGKFSFSAKNISFSNASFSGFTNPGGSSVISANATNSLSFINSRLNGGAVYNLQANSLIFNNTQAVFNVLYSRGTSNFNATTQLLGNTNFTLSSQSLLNFNGDTTLQNNANITLGNKSQAAFKNSLTLDNNSNLSLDNQSVLNANNTSAFNNQASLNIYNGSQATFNSLFFNGGTLSLNASSKLNASNASFSNNTTINLDDSVLSASNTSSLNANINFQGASQADFGGNTIIDTASFNFDSASSLNFNNLTANGALNFNGYTPSLTKALMSVSGQFVLGNNGDINLSDINIFDNITKSVTYNILNAQKGITGISGANGYEKILFYGMKIQNATYSDNNNIQTWSFINPLNSSQIIQESIKNGDLTIEVLNNPNSASNTIFNIAPELYNYQASKQNPTGYSYDYSDNQAGTYYLTSNIKGLFTPKGSQTPQAPGTYSPFNQPLSSLNIYNKGFSSENLKTLLGILSQNSATLKEMIESNQLDNITNINEVLQLLDKIKITQVQKQALLETINHLTDNINQTFNNGNLIIGATQDNVTNSTSSIWFGGNGYSSPCTLDSATCSSFRNTYLGQLLGSTSPYLGYINADFKAKSIYITGTIGSGNAFESGGSADVTFQSANNLVLNKANIEAQATDNIFNLLGQKGIEKIFNQGNLANVLSQVAMEKIKQAGGLGNFIENALSPLSKELPASLQNETLGQLIGQNNLDDLLNNSGVMNAIQNIISKKLSIFGNFVTPSIIENYLAKQSLKSMLDDKGLLNFIGGYMNASELSSILSVVLKDITNPPTSLQKDIGVVANDLLNEFLGQDVIKKLESQGLVSNIINNIISQGGLSGVYNQGLGSVLPPSLQNALKENDLGTLLSPRGLHDFWQKGYFNFLSNGYVFVNNSSFSNATGGSLNFVANKSIIFNGDNTIDFSKYQGALIFASNDVSNINITTLNATNGLSLNAGLNNVSVQKGEICVNLANCPTTKNSSSTNSSVTPTNESLSVRANNFTFLGAIASNGAIDLSQVKNNSVIDTLNLNENAALQANNLTITNAFNNASNSTANINGNFTLNQQATLSTNASGLNVMGNFNSYGDLVFNLSHSVSHAIINAQGSATIMANNNNPLIQFNTSSKEVGTYTLIDSAKAIYYGYNNQITGGSSLDNYLKLYTLIDINGKHMVMTDNGLTYNGQAVSVKDGGLVVGFKDSQNQYIYTSILYNKVKIAVSNDPINNLQAPTLKQYIAQIQGTQGVDSIDQAGGSQAINWLNKIFETKGSPLFAPYYLESHSTKDLTTIAGDIANTLEVIANPNFKNDATNILQINTYTQQMSRLAKLSDTSTFASADFHERLEALKNKRFADAIPNAMDVILKYSQRNRVKNNVWATGVGGASFINGGTGTLYGINVGYDRFIKGVIVGGYAAYGYSGFHANITQSGSSNVNMGVYSRAFIKRSELTMSLNETWGYNKTFINSYDPLLSIINQSYKYDTWTTDAKINYGYDFMFKDKSVIFKPQIGLAYYYIGLSGLRGIMDDPIYNQFRANADPNKKSVLTINFALESRHYFNKNSYYFVIADVGRDLFINSMGDKMVRFIGNNTLSYRDGGRYNTFASIITGGEIRLFKTFYVNAGIGARFGLDYKDINITGNIGMRYAF

SEQ ID NO: 58835 - protein, 193 aa, Helicobacter pylori
MNTYKNSLNHFLNLVDCLEKIPNVGKKSAFKMAYHLGLENPYLALKITHALENALENLKTCSSCNALSESEVCEICSDESRQNSQLCMVLHPRDVFILEDLKDFLGRYYVLNSIEEVDFNALEKRLIEENIKEIIFAFPPTLANDSLMLYIEDKLQHFHLTFTKIAQGVPTGVNFENIDSVSLSRAFNSRIKA

SEQ ID NO: 58836 - protein, 303 aa, Helicobacter pylori
MSSPNLSFYYNECERFESFLKNHHLHLESFHPYLEKAFFEMVLNGGKRFRPKLFLAVLCALVGQKDYSNQQTEYFKIALSIECLHTYSLIHDDLPCMDNAALRRNHPTLHAKYDETTAVLIGDALNTYSFELLSNALLESHIIVELIKILSANGGIKGMILGQALDCYFENTPLNLEQLTFLHEHKTAKLISASLIMGLVASGIKDEELFKWLQAFGLKMGLCFQVLDDIIDVTQDEEESGKTTHLDSAKNSFVNLLGLERANNYAQTLKTEVLNDLDALKPAYPLLQENLNALLNTLFKGKT

SEQ ID NO: 58837 - protein, 377 aa, Helicobacter pylori
  MISC_FEATURE (354)..(354): X=any amino acid
MLKRASFVEVDTASLRHNFSAVKSIVPKDACVMAVVKANAYGAGAIKASEIFLQEGANYLGVATLDEALELRSHFSKTPILILGYSPNANASMLVDNDLSAMIFSLEQAEVFSQMALKSQKRLKVHIKIDTGMHRLGLEPNFKSIETIKKIRALKGLEIEGIFTHLSNADAKIKTHAKNQMKAFNAFLEQLLDQKIEFQYRHAYNSAGILSLCNGNENRLLNLYRPGIMLYGFYPSNGMKESCPTILKNVISLKAQIVQIRSVKKGEFIGYGEHFYTNEETLVGVLALGYADGLMRALGNRIQVAINNQLAPLIGKVCMDQCFVKLNNIQAKEGDEVILFGDKSAKANDASEIXALLNTIAYETISTLSKRLERVYI

SEQ ID NO: 58838 - protein, 150 aa, Helicobacter pylori
MRCVVYSIAKSSPLELVKIYQKQCRQFDCELELVDLFPKNTANAQKVSKKLAQKSYSLAFEPYLNPKAKNIALHPKAQRGDSFAFSKMLENHLNINFFIAGAYGFEENFLKDCQAWSLSEMTFSHEVAKIVLCEQIYRALSIIFKHPYHK

SEQ ID NO: 58839 - protein, 289 aa, Helicobacter pylori
MGFADFFKNFKINKLRTAPSKEEQPSHWVKCPKCYALMYHKEVFSKYSVCLKCHYHFRMKAAERIEFLCDVGSFEEFDKHLRPNDPLNFVDKESYKQRIKKYEKRTNRPSSVISGEAKINRMPLQIVVFDFSFMGGSLGSVEGEKIVRAINRAVAKREALLIVSASGGARMQESTYSLMQMAKTSAALNRLSEAKLPFISLLSDPTYGGVSASFAFLGDLIIAEPGAMIGFAGPRVIKQTIGADLPEGFQTAEFLLEHGLIDMIVHRKDLKKTLSDLIAMMTHKTSKIF

SEQ ID NO: 58840 - protein, 303 aa, Helicobacter pylori
MQDFSSLLLKLQEYWKNQGCLVIQPYDIPAGAGTFHPATLLRSLDKKPWNVAYVAPSRRPTDGRYGENPNRLGSYYQFQVVIKPSPSNIQELYLKSLEVLGINLNEHDIRFVEDNWESPTLGAWGLGWEVWLDGMEVTQFTYFQQVGGIACSPIPVEITYGLERLAMYVQKVENILEIEWAKKNHDSVNYAQVHLESEYEFSKYHFETASVKRLLEMFKNAQAEALHCLENKLPLPAYDFVMLCSHFFNILDARKAISVAERQNYILQIRDLAKGCALLYKEQEEEREERLKNALTKAENGVS

SEQ ID NO: 58841 - protein, 312 aa, Helicobacter pylori
MEIAVFGGGAWGRALAFAFGEKNEVKIISRRDLNEPLKKLNDALISKGSAPIEQVDLQRGLKATLYVIAISVQHLREWFQNASLPKNAKVLIASKGIEVLNKAFVSEIAKDFIDPNSLCFLAGPSFAAEIIQGLPCALVIHSNNQALALEFANKTPSFIRAYAQQDIIGGEIAGAYKNVIAIAGGVCDGLKLGNSAKASLLSRGLVEMQRFGAFFGGKTETFLGLSGAGDLFLTANSILSRNYRVGLGLAQNKPLEVVLEELGEVAEGVKTTNAIVEIARKYGIYTPIASELALLLKGKSVLESMNDLIRRA

SEQ ID NO: 58842 - protein, 153 aa, Helicobacter pylori
MIEENYKEERYTERVNQGGVWGSFKRKFLSWADDDAGYDEEKDYENLLNNEKLQKKLREWRRTKNQQNNNKTFNTNDTNSFETIQSVIAEQLNVDAVQVTPEAEFVKDLGADSDVVELIMALEEKFGIEIPDEQAEKIVNVGDVMRYIEKQLI

SEQ ID NO: 58843 - protein, 359 aa, Helicobacter pylori
MKRALLWLMLMGVFSMGVSLKAKEYSEIILEEKNLQPMGLKVVKLDKEIFSKGLPFNAYIDFDSKSSVVQSLSFDASVVAVYKREGEQVKAGDAICEVSSIDLSNLYFELQNNQNKLKIAKDITKKDLELYKAGVIPKREYQTSFLASQEMGLKVEQLESAFKSFGVDPKNPKGQYGFRIVASDSGLLALAPKNVGEKILAFTSYVRISKSDDLIAQIKLPVGVSKSIKRDSPVYNEEGEKIGKIQSVSVVLDKGSNTILATALLDEGNYHVGEMVEMYIQGSQPKDSVLIPSNALIRNGKDYLVFVRTPKGFRPVVVQVLEERSKIFIVNAQNLHPNDSVAVGSLIGLKGMINNLGEE

SEQ ID NO: 58844 - protein, 701 aa, Helicobacter pylori
MHSDELLVEILVEELPAQALLNEYKEMPKKLHALFNKRALEVGNIEIFYTPRRLCLLIKDFPLLTQETKEEFFGPPVKIACNHQDKTQGLNALGLGFYQKLGLKDHQYFQTAFKNNKEVLYHAKIHEKEPTKDLIMPIVLEFLEGLNFGKSMRWGNVEKSFIRPIHNICVLFNGEDFSGIEVKEYGFKTKQATKVHRQEGFDFIQVDSPKAYFEVLEKNHVILDPKKREAKILQEIKELETKHHIIVETDRDLLDEVVAITEYPSALLGEFDKAFLKLPSEIIITSMKENQRYFATFCQKSQEESPTLHNGFIVVSNAINKDKQKIILGNQKVLKARLSDAVFFYENDLKKPLDNAPLESVVFVQGLGTLKDKMERESIIAQYLTQKYISSLNMPLEKALELVKRAVQIAKADLLSEVVYEFSELQGIMGYYYALKQNENELVALSVKEQYLPASENAPLPSSVFSSIVALSLKLDSLFSLFSVGKIPSGSKDPFALRRLSFGLLKIIAHYGLEFDLKADLKNLFQKVGVYQSFDLEILEKFLLERFHNLIDCNPSIIRSVLNTNERDIVKIIQKVKALKRFLDDPKNAQKKELLFSAFKRLANINKDRNPNESSEFSTNLFKEPKEHALFEAFNAIKMNAFESLDSKIEAYFGLHAPLEEYFKSVLVMDKDIEIQKNRKNFLWGVYQSFLEIGDIKEIAI

SEQ ID NO: 58845 - protein, 436 aa, Helicobacter pylori
MNFQENLAALDLEYLWHPCSQMQEHQNFPIIPIKKAQGIYLYDFNDNAYMDLISSWWVNLFGHNNAYISQQLKNQIDDLEHVLLASFSHKPIITLSQRLCQLTHMDKCFYADNGSSCVEIALKMSYHAHFLKNQTRRKKLFLSLSNSYHGETLGALSVGDVKLYKDTYTPLLLKNLTTPVPKNDHEIENSLNALKRLLDKHSEEICAFIAEPLLQCAGNMHIYSARYLKQAVLLCKQKNIHIIFDEIATGFGRTGSMFAYEQCEIKPDFLCLSKGISGGYLPLSALLTHNEIYNQFYAPYEENKAFLHSHSYTGNALACACANATLDIFEKENVIEKNKALSGFIFNTLQNALKPLMEQQVVSDLRHLGMVFAFEVFIQTKERLSLAVFKKTLKKGLLLRPLNNTIYLMPPYIITHEEVKKAVAGLVEILDELRKG

SEQ ID NO: 58846 - protein, 492 aa, Helicobacter pylori
MEHKEIVIGVDLGSRKICAIVAEFKEGILRIIGTAHQDSKEINSKAIKRGRINSLAHASNAIKEVINSAKKMAGLNADEDRNNPMPHFGEYHPKTKAIVSFSGAYTESIRDVTGVASTKDNVVTIDEINRAINSACAKAGLDNDKHILHALPYRFTLDKQEVNDPLGMSGTRLEVFIHIVYTEKNNIENLEKIMIQSGVEIENIVINSYAASIATLSNDERELGVACVDMGGETCNLTIYSGNSIRYNKYLPVGSHHLTTDLSHMLNTPFPYAEEVKIKYGDLSFEGGEETPSQNVQIPTTGSDGHESHIVPLSEIQTIMRERALETFKIIHRSIQDSGLEEHLGGGVVLTGGMALMKGIKELARTHFTNYPVRLAAPVEKYNIMGMFEDLKDPRFSVVVGLILYKAGGHTNYERDSKGVIRYHESDDYTRTAHQSSPTPHIHSSPTERNLSDLKAPSAPLNTAKNDDFLPIKPTEQKGFFKSFLDKISKFF

SEQ ID NO: 58847 - protein, 385 aa, Helicobacter pylori
MVHQSEMENYNIGQASIEEVSDPAYKGAKIVVIGVGGGGSNMIKHLVEYGVHQDVTPIATNTDGQHLKNNPAPVKILLGKESTGGLGAGGIPDIGRKAAEESANEIKEAIKDAKLVIISTGLGGGTGTGATPTIVKIAKEVGALTIAIVTKPFKYEGNQKRKRAEEGLKELEQSSDSILVIPNDKILLTMKKNASTTECYREVDDVLVRAVSGISTIITKPGNINVDFADLKSALGFKGFALMGIGEATGEESAKLAVQNAIQSPLLDDASIEGAKSIIVFFEHHPDYPMMAYSQACDFIQDQAHQDVDVKFGQHTSDNIPIDHVRVTIIATGAERNSGGASLESIATPSQPVVKQTRKVGNGEYLKIPTEEELSIPTTMRIQQD

SEQ ID NO: 58848 - protein, 121 aa, Helicobacter pylori
MKKIKPIKQMIATCKKTLFKSYGYYLARTFSMSAIGHESDFLLSDLVADLRASTPSNAMEILLPNSDEWLQKLDGFNVKLHRSFKILLHQKKAHLEHLADFLEKRNYPVNHSEPGSQALHR

SEQ ID NO: 58849 - protein, 427 aa, Helicobacter pylori
MLNAIKFRIYPNAQQKELISKHFGCSRVVYNYFLDYRQKQYAKGIKETYFTMQKVLTQIKRQEKYHYLNECNSQSLQMALRQLVSAYDNFFSKRARYPKFKSKKNAKQSFAIPQNIETKTETQTIALPKFKEGIKAKLHRDLPKDSVIKQAFISCIADQYFCSLSYETKEPIPKPTIIKKAVGLDMGLRTLIVTSDKIGYPHIRFYQKLEKKLTKAQRRLSKKVKDSNNRKKQAKKVSRLHLACSNTRDDYLHKISNEITNQYDLIGVETLNVKALMRTYHSKSLANASWGKFLTMLEYKAQRKGKTLLSIDRFFPSSQLCSYCGVNTGKKHESITKFTCPHCKTTHHRDYNASVNIRNYALGMLDDRHKVKTDKARVGIIRSDYTHHTNECVKACGASSNGVSSKYGNILDLASYGAMKQEKAQSL

SEQ ID NO: 58850 - protein, 355 aa, Helicobacter pylori
MPHNKLTKSQRELFCNLKAFLYTKAKNFTPIQDVKDMALILDTQDKILKCHNIEQLKQLCHILYNQGIKHTIMMQGLFLFFNYFKDNLKLRSFRMLSEEQVINFLFELAQNRKPSSMAKYVMYLRQFFDYLDRKRRYSFDFTLKNLAFAKTKESLPRHLNDKDLKSFLKTLLDYKPATSFEKRNKCILLIVILGGLRKCEVLNIELKHIQVEEQNYSILIQGKGRKERKAYIKKSLLEPSLNAWLSDEYRLKYFNGAYLFKKDKQKAQNSLTLYSFIPLIFKLAQIKHYKQYGTGLHLFRHSFATLIYQETQDLVLTSRALGHSSLLSTKIYIHTTQEHNKKVALVFDSLIEDKK

SEQ ID NO: 58851 - protein, 427 aa, Helicobacter pylori; identical to SEQ ID NO: 58711

SEQ ID NO: 58852 - protein, 186 aa, Helicobacter pylori
MYCFYSLTISASHLKVKRLRLLNEEMLVNFLFELAKQRKINSMAKYVMYIRQFFDYLDRTKHYEFYFSLKNIAFAKHKDNLPKHLNSKDLKSFIYTLINYRTRSSYEKRNKCILLLIILGGLRKSEVFNLELRNIVLEKEHYILLIKGKNNKERKAFIKIAQTDIDTLAPLIRILLESIAKNLLSH

SEQ ID NO: 58853 - protein, 444 aa, Helicobacter pylori
MKHFSVKRLLGLSSVLLVTLGASMHAQSYLPKHESVTLKNGLQVVSVPLENKTGVIEVDVLYKVGSRNETMGKSGIAHMLEHLNFKSTKNLKAGEFDKIVKRFGGVSNASTSFDITRYFIKTSQANLDKSLELFAETMGSLNLKEDEFLPERQVVAEERRWRTDNSPIGMLYFRFFNTAYVYHPYHWTPIGFMDDIQNWTLKDIKKFHSLYYQPKNAIVLVVGDVNSQKVFELSKKHFESLKNLDEKAIPTPYMKEPKQDGARTAVVHKDGVHLEWVALGYKVPAFKHKDQVALDALSRLLGEGKSSWLQSELVDKKRLASQAFSHNMQLQDESVFLFIAGGNPNVKAEALQKEIVALLEKLKKGEITQAELDKLKINQKADFISNLESSSDVAGLFADYLVQNDIQGLTDYQRQFLDLKVSDLVRVANEYFKDTQSTTVFLKP

SEQ ID NO: 58854 - protein, 200 aa, Helicobacter pylori
MCGAWFFGARVFEFFTSLFESMKVLKLLPNFLTILRIVLSLFLLFLLLNTRTYFSFLTPFQTNMISSLVFLFAALTDLLDGYIARSYKAKSRFGEIFDPLADKILILSAFLGLVYLDRVNAWIPFVILGREFFISGLRVLAANEKKDIPVNALGKYKTVSQVVAIGALLADVTYSYALVAIAVFLTLYSGIDYTIKYYKS

SEQ ID NO: 58855 - protein, 519 aa, Helicobacter pylori
MLLIVFFKFYFQYSIKKKSFYFIFVIIQAIFIFNLRRCRMDNQKITHQNITQKQGELKRDMKMRHLLMIAFGGAIGTGLFVGTGGNIASAGPLGTLIAYCFGGLVVYCIMLSLGELASVYPTTGSFGDYAAKFIGPGTGYMVFWMYWLGWVITVALEYIAIGMLMQRWFADIPIHYWVILCIALVFLLNFFSVKIFAEGEFFFSLIKVLAVIAFIGIGAIGIIYQIYSHGFGSIFDNFHFGDKGFFPNGSAAVFSAMLAVIFAFTGTEVIGVAVGETKNASEVMPKAIKATLWRIVFFFLGSVFVISVFLPMNDSSITQSPFVSVLERINLPFIGMGIPYVADIMNAVIITAMFSTANSGLYGASRMIYGLSKQKMFFKVFSQLNRQGTPTYAMFFSLSFSLIGLLVQIYAKENVVEALINVISFTVIIVWVSVSVSQYSFRKQYLKAGHSLEDLPYKAPFLPFLQLIGITGCAIGVIGSAMDKDQRIGMILTIVFAVICYIGYYFTQKANENNKKDLI

SEQ ID NO: 58856 - protein, 443 aa, Helicobacter pylori
MSPLKTIRIYSYHDSIKDSIKAVVNISTEKKIKNNFIGGGVFNDPFFQQFFGDLGGMIPKERMERALGSGVIISKDGYIVTNNHVIDGADKIKVTIPGSNKEYSATLVGTDSESDLAVIRITKDNLPTIKFSDSNDISVGDLVFAIGNPFGVGESVTQGIVSALNKSGIGINSYENFIQTDASINPGNSGGALIDSRGGLVGINTAIISKTGGNHGIGFAIPSNMVKDTVTQLIKTGKIERGYLGVGLQDLSGDLQNSYDNKEGAVVISVEKDSPAKKAGILVWDLITEVNGKKVKNTNELRNLIGSMLPNQRVTLKVIRDKKERAFTLTLAERKNPNKKETISAQNGAQGQLNGLQVEDLTQETKRSMRLSDDVQGVLVSQVNENSPAEQAGFRQGNIITKIEEVEVKSVADFNHALEKYKGKPKRFLVLDLNQGYRIILVK

SEQ ID NO: 58857 - protein, 406 aa, Helicobacter pylori
MSLIRVNGEAFKLSLESLEEDPFETKETLETLIKQTSVVLLAAGESRRFSQTIKKQWLRSNHTPLWLSVYESFKEALDFKEIILVVSELDYIYIKRHYPEIKLVKGGASRQESVRNALKIIDSAYTLTSDVARGLANIEALKNLFLTLQQTSHYCIAPYLPCYDTAIYYNEALDREAIKLIQTPQLSHTKALQSALNQGDFKDESSAILQAFPDRVSYIEGSKDLHKLTTSGDLKHFTLFFNPAKDTFIGMGFDTHAFIKDKPMVLGGVVLDCEFGLKAHSDGDALLHAVIDAILGAIKGGDIGEWFPDNDPKYKNASSKELLKIVLDFSQSIGFELFEMGATIFSEIPKITPYKPAILENLSQLLGLEKSQISLKATTMEKMGFIGKQEGLLVQAHVSMRYKQKL

SEQ ID NO: 58858 - protein, 288 aa, Helicobacter pylori
MSKSLYQTLNVSENASQDEIKKSYRRLARQYHPDLNKTKEAEEKFKEINAAYEILSDEEKRRQYDQFGDNMFGGQNFSDFARSRGPSEDLDDILSSIFGKGGFSQRFSQNSQGFSGFNFSNFAPENLDITAALNVSVLDTLLGNKKQVSINNETFSLKIPIGVEEGEKIRVRNKGKTGRTTRGDLLLEIHIEEDEMYRREKDDITQIFDLPLKTALFGGKIEIATWHKTLTLTIPPNTKAMQKFRIKEKGIKNRKTSHVGDLYLQARLILPKTETLSNELKALLEKEL

SEQ ID NO: 58859 - protein, 391 aa, Helicobacter pylori
MSLTSLLNPKSLEDFLGQEHLVGKDAPLFKALQSKHFPHAFFYGPPGVGKTSLAQIIAYMLERPILLFNATDFKLEDLRLKLKNYQNTLLKPVVFIDETHRLNKTQQEFLLPIMEKDHALILGASTQDPNYSLSHAIRSRSFIFELTPLNKSDLDRLCAKALTLLKKQIEPGAKTYLLNNSAGDARALLNLLDLSAKIEDPITLKTLQSLRPHSLNDGSYSDDTHYNLTSALIKSLRGSDENASIYYLARLIAGGENPEFIARRLVIFASEDIGNANPNALNLAASCLFAVKQIGYPEARIILSQCVIYLACSPKSNTAYRAINQALDCVQKGSLYPIPKHLLPNAKDYLYPHDYNGYVKQDYLEKPLDLVSSQGIGFEKTLLEWLDKIRN

SEQ ID NO: 58860 - protein, 163 aa, Helicobacter pylori
MMREILTSRFFPSLFKKRLDFSNRVVLGLGSNLKNPLKILKNCFLYFKNHSKIGKIFSSPIYINPPFGYTKQPNFYNATIILKTSLSLRHFFALVFYIERRFGRQRKRDFKDAPRTLDIDIIAFNQVILRQNDLALPHPKWSERDSVLVPLALQQILFKKGEW

SEQ ID NO: 58861 - protein, 429 aa, Helicobacter pylori
MLKERLKAFFSADSVFTLIFALFFLTSFKKPLTQVLLIVLMVFLFFRCYFQASLKETFAINHLKTMSFKWLTLAFLGVFLSIFPNMFNMHDSQTFRYNLFALNMSLTYACGALCLLFASCLRIKLNQKILFYSMAVANFINGLLSLVQKIYFNMPRAQGFSTVKEYVVLVSVSILGCYIYALYSHNQKEKLFFTLSVFVGFLVVILSATRSATIAFVITFLILSCFILYAKKSLKPLGYMVVVSLILSALYVGSNALEKKGAIEQSRVQNQSFEEDLKRYAKKDADSSIGWRLERWKEALTVLRLRPFFGMAASEKCQRLEEILSLSKSYRAKDLILCYERYDNQIIHILATRGIIGFLIWLFFLLVIVKIFWSGIKQNSLISFFILMTLAFYLIFGIGFDPFDFFITGSFFVGMIMMAVFLKKDKSAF

SEQ ID NO: 58862 - protein, 90 aa, Helicobacter pylori
MALNLEKKQEIIKAFATKENDTGSCEVQVALLNERIKLLTEHLKANPKDHSSRLGLLKLVAQRRNLLKYIKRTNHARYVVLIEKLGIKDR

SEQ ID NO: 58863 - protein, 662 aa, Helicobacter pylori [sequence omitted]

SEQ ID NO: 58864 - protein, 944 aa, Helicobacter pylori
MSGMVDLKEFLAELGKTQKELKNVIEQAKDIGLELKTNSKMTPEQAGKLYKYIVDGIKEQIQANQPAKNPEQDNKDDLNTAVASKSLNKKVSKTPKKEETKSQPKPKKTKEKKKEAPTPIAKKKGGIEIVNTFENQTPPTENTPKVVSHSQIEKAKQKLQEIQKSREALNKLTQSNANNASNANNAKKEISEVKKQEQEIKRHENIKRRTGFRVIKRNDEVENESENSVTESKKPTQSAAAIFEDIKKEWQEKDKQEAKKAKKPSKPKATPTAKNNKSHKIDFSDARDFKGNDIYDDETDEILLFDLHEQDNFNKEEEEKEIRQNINDRVRVQRKNPWMNESGIKRQSKKKRAFRNDNSQKVIQSTTAIPEEVRVYEFAQKANLNLADVIKTLFNLGLMVTKNDFLDKDSIEILAEEFHLEISVQNTLEEFEVEEVLEGVKKERPPVVTIMGHVDHGKTSLLDKIRDKRVAHTEAGGITQHIGAYMVEKNDKWVSFIDTPGHEAFSQMRNRGAQVTDIAVIVIAADDGVKQQTIEALEHAKAANVPVIFAMNKMDKPNVNPDKLKAECAELGYNPVDWGGEHEFIPVSAKTGDGIDNLLETILIQAGIMELKAIEEGSARAVVLEGSVEKGRGAVATVIVQSGTLSVGDSFFAETAFGKVRTMTDDQGKSIQNLKPSMVALITGLSEVPPAGSVLIGVENDSIARLQAQKRATYLRQKALSKSTKVSFDELSEMVANKELKNIPVVIKADTQGSLEAIKNSLLELNNEEVAIQVIHSGVGGITENDLSLVSSSEHAVILGFNIRPTGNVKNKAKEYNVSIKTYTVIYALIEEMRSLLLGLMSPIIEEEHTGQAEVRETFNIPKVGTIAGCVVSDGVIARGIKARLIRDGVVIHTGEILSLKRFKDDVKEVSKGYECGIMLDNYNEIKVGDVFETYKEIHKKRTL

SEQ ID NO: 58865 - protein, 293 aa, Helicobacter pylori
MVVSVPATSANLGPGFDCLGLSLNLRNRFFIEPSSFHAVKLVGEGEGIPKFLTNNIFTKVFYEILKKHGNDGSFKFLLHNKVPITRGMGSSSAMIVGAVASAFAFLGFDFDRENIVNTALIYENHPDNITPAVFGGYNAAFVEKKKVISLKTKIPSFLKAVMVIPNRAISTKQSRHLLPKRYSVQESVFNLSHASLMTMAIVQGKWDLLRCCSKDRMHQYKRMQTYPVLFAIQKIALENNALMSTLSGSGSSFFNMCYEEDAPKLKQVLSKKFPKFRVAVLDFDNDGVLIEKD

SEQ ID NO: 58866 - protein, 295 aa, Helicobacter pylori
MKQTTINHSVELVGIGLHKGVPVKLVLEPLGENQGIVFYRSDLGVNLPLKPENIVDTKMATVLGKDNARISTIEHLLSAVHAYGIDNLKISVDNEEIPIMDGSALTYCMLLDEAGIKELDAPKKVMEIKQAVEIRESDKFVKIEPDSQLSLNFTIDFNHPVIAKQAHHFVFSKTAYKEQVAKARTFGFLQEVNYLRSIGLAKGGSLNNCIVLDENSILNKEGLRCEKEFVCHKILDAMGDLMVLGMPVMGKYTSFSGSHKLNSMLVKAILADAKNYEVLIAADPAKEFALQKAFA

SEQ ID NO: 58867 - protein, 270 aa, Helicobacter pylori
MSMQTAPIKKITLNHLQAKKNQEKIIAITAYDALFAQIFDPLVDVILVGDSLNMSFFNQNDTLSASVEMMLYHTKAVCAGAKTPFIITDMPFGSYKDEKTALKNAIRVYKETQASAIKLEGGKEKAKLVKTLTNEGVIVVGHIGLMPQFVRLDGGYKIKGKNEEQQKKLLEDALSLEEAGVGLLVLEGITTPIAQKITQKIKIPTIGIGSGKDCDGQILVWSDMLGFFDSFKPKFVREYLKGKELIQNAIKQYADDVKKGNFPNELESYH

SEQ ID NO: 58868 - protein, 345 aa, Helicobacter pylori
MKEFDLESYDYYLPKELIASYPVLPKEKAKLLVYERRSQKITHTTFEHVLDFFPKNALIVLNDTKVIKARLFGSKHAFLPSKTTEVFFHRFFKNNTALTQIKGKIKVGDKIFFDANYHAEVLELLHNGQRLIAFYDNKTPLNQENILKLLEQYGHMPLPPYIKRADESLDAHEYQSVFAKHMGAVAAPTASLHFSQNTLEKLLKDFKHAFLTLHVGAGTFLSVETKDIREHQIHTEVLRIPKKSQEILQKSQEILCVGTTALRSVEYFKRLENPNQEAFECDIFLHFANPILHVNYLLTNFHLPKSSLLMLVSTMIGLEKTKEIYKTAIEKKYRFYSYGDGMLIL

SEQ ID NO: 58869 - protein, 178 aa, Helicobacter pylori
MNPLLQDYARILLEWNQTHNLSGAKNLSELEPQITDALKPLEFIKDFKSCLDIGSGAGLPAIPLALEKPEVKFILLEPRIKRAAFLNYLKSVLPLKNIEIIKKRLEDYQNLLQVDLITSRAVASSSFLIEKSQRFLKDKGYFLFYKGEQLKDEIACKDTECFMHQKRVYFYKSKESLC

SEQ ID NO: 58870 - protein, 124 aa, Helicobacter pylori
MKLLVVDDSSTMRRIIKNTLSRLGYEDVLEAEHGVEAWEKLDANADTKVLITDWNMPEMNGLDLVKKVRSDSRFKEIPIIMITTEGGKAEVITALKAGVNNYIVKPFTPQVLKEKLEVVLGTND

SEQ ID NO: 58871 - protein, 632 aa, Helicobacter pylori
MKPTNEPKKPFFQSPIILAVLGGILLIFFLRSFNSDGSFSDNFLASSTKNVSYHEIKQLISNNEVENVSIGQTLIKASHKEGNNRVIYIAKRVPDLTLVPLLDEKKINYSGFSESNFFTDMLGWLMPILVILGLWMFMANRMQKNMGGGIFGMGSAKKLINAEKPNVRFNDMAGNEEAKEEVVEIVDFLKYPERYANLGAKIPKGVLLVGPPGTGKTLLAKAVAGEAHVPFFSMGGSSFIEMFVGLGASRVRDLFETAKKQAPSIIFIDEIDAIGKSRAAGGVVSGNDEREQTLNQLLAEMDGFGSENAPVIVLAATNRPEILDPALMRPGRFDRQVLVDKPDFNGRVEILKVHIKGVKLANDVNLQEVAKLTAGLAGADLANIINEAALLAGRNNQKEVRQQHLKEAVERGIAGLEKKSRRISPKEKKIVAYHESGHAVISEMTKGSARVNKVSIIPRGMAALGYTLNTPEENKYLMQKHELIAEIDVLLGGRAAEDVFLEEISTGASNDLERATDIIKGMVSYYGMSSVSGLMVLEKQRNAFLGGGYGSSREFSEKTAEEMDLFIKNLLEERYKHVKQTLSDYREAIEIMVKELFDKEVITGERVREIISEYEVANNLESRLIPLEEQAS

SEQ ID NO: 58872 - protein, 745 aa, Helicobacter pylori
MKESFYIEGMTCTACSSGIERSLGRKSFVKKIEVSLLNKSANIEFDENQTNLDEIFKLIEKLGYSPKKALTKEKKEFFSPNVKLALAVIFTLFVVYLSMGAMLSPSLLPESLLAIDNHSNFLNACLQLIGALIVMHLGRDFYIQGFKALWHRQPNMSSLIAIGTSAALISSLWQLYLVYTNHYTDQWSYGHYYFESVCVILMFVMVGKRIENVSKDKALDAMQALMKNAPKTALKMQNNQQIEVLVDSIVVGDILKVLPGSAIAVDGEIIEGEGELDESMLSGEALPVYKKVGDKVFSGTFNSHTSFLMKATQNNKNSTLSQIIEMIYNAQSSKAEISRLADKVSSVFVPSVIAISILAFVVWLIIAPKPDFWWNFGIALEVFVSVLVISCPCALGLATPMSILVANQKASSLGLFFKDAKSLEKARLVNTIVFDKTGTLTNGKPVVKSVHSKIELLELLSLALSIEKSSEHVIAKGIVEYAKEHNAPLKEMSGVKVKTGFGISAKTDYQGTKEIIKVGNSEFFNPINTLEIKENGILVFVGRAISEKEDELLGAFVLEDLPKKGVKEHIAQIKNLGINTFLLSGDNRENVQKCAFELGIDGYISNAKPQDKLNKIKELKEKGQIVMMVGDGLNDAPSLAMSDVAVVMAKGSDVSVQAADIVSFNNDIKSVYSAIKLSQATIKNIKENLFWAFCYNSVFIPLACGVLYKANLMLSPAIAGLAMSLSSVSVVLNSQRLRNFKIKDH

SEQ ID NO: 58873 - protein, 66 aa, Helicobacter pylori
MKATFQVPSITCNHCVDKIEKFVGEIEGVSFIDVSVEKKSVVVEFDAPATQDLIKEALLDAGQEVV

SEQ ID NO: 58874 - protein, 551 aa, Helicobacter pylori
MKLFFKRYSKYLKEHYKSFIVVLFSSLVVALSTAWGTYLVKPTLDEIFINKDTHMLKILPFLVILAYLGKSGGMYLGTYFTNFIGLDIVKKIRNTMLESLLKMEMDFFNRTKKGELIARITNDIGLIRASLSNYLSESIREGLTIVGLVGVVIYQSPKLALVGLVIMPLAAIPISKIIRKVKKLAKSHQESNAKITARLSEVFNNVEAIKISNGEKLEHKAFVKENEAFFKIGIKNIAVAEISSPLMEFLGSIAIALVIYLGGNEVIRGHISVGAFFSFITALFMLYTPIKRLTRIVSNFQEALVASDRIHEILEREPAIVDGELTLNNAIHTIEFKKVWLAYTLDNQERYVLNDISLKFQQNEIIALKGESGSGKSSLVNLILRLYEPSKGEIFINDQKIESITQKSLREKISVVTQRVFIFNGSVAENVAYGLEIDEVKIKECLKKAQALDFVEKMPHGIESVLDEFGANLSGGQRQRIAIARALYKDVQVLIFDEATSALDNNTEESVKQSILELKQNRLIILISHNPSTLKLATKHVKLEHGRLTEC

SEQ ID NO: 58875 - protein, 280 aa, Helicobacter pylori
MLNFLSISSEPKIKSLAIGKFDGLHLGHQALFKELKDPKALLIIEKKHYTKGYLTPLKYRAKLVGMPLFFVYLEEISQLNALDFLDLLKKKFPHLERLVVGYDFRFGHERQNDALFLKERFEKTIIVPEVKVQEISVHSKMIKLALSHGDLSLANKLLGRPYEVCGEVISDQGLGHKELAPTLNIKTKDFILPSFGVYASLVKIKDPIYQKSVSFIGNRLSTDQNFAIECHVLDTIIENPPQEIALRWVQKIRDNMRFSSLKELKNQIQQDILRAKEILR

SEQ ID NO: 58876 - protein, 641 aa, Helicobacter pylori
MRLSNADLERLKSMANALRFLCADMIDKANSGHPGVCLGLADVMVVLSLHLNLNPTNPKWLNRDRLVFSGGHASALAYSLLHLWGFDLSLEDLKRFRQLHSKTPGHPELHHTEGIEITTGPLGQGFANAVGFSMASQYAQNLLDKEAISHKVYCLCGDGDLQEGISYESASLAGHLRLDNLIVIYDSNQISIEGAINISFSEQVKTRFVAQNWEVLECDGHDYQAIHNALEEAKKSTKPTLLIAHTIIGKGAVGLEGSEKTHGSPLNKEVLKQSKENAQINPNESFIISPKNKMHFEEVKVRGVSLEALWEKSLSPKIKEKIHALKDFDFSAIHYPTFKKGESLATRVSNGMILNAIAKECEGFLGGSADLAPSNNTQLKHSGDFPLGQNLHFGIREHAMGAITNALAAYGLFVPFCATFFVFSDYLMPSIRLSALMKLKALFIFTHDSIGVGEDGATHQPIEQLNHLRALPNFYAFRPSDAFENTACMQIALSLNAPSGLILSRQNLPVLDEVSKERVLKGAYVKHHSKDPIITLVASGSEVSLALESAKILERENIQTQVISAPCFDLLIEQDESYLKELFKGKVLVIEASRAIEWYRFADKIIGMDSFGSSAKGDKLFEKFGFSVENITAQAKRLLNA

SEQ ID NO: 58877 - protein, 858 aa, Helicobacter pylori
MQPMKSKKLYLALIIGVLLAFLTLSSWLGNSGLVGRFGVWFAALNKKYFGHLSFINLPYLAWVLFLLYKTKNPFTEIVLEKTLGHLLGILSLLFLQSSLLNQGEIGNSARLFLRPFIGDFGLYALITLMVVISYLILFKLPPKSVFYPYMNKTQNLLKEIYKQCLQAFSPNFSPKKEGFENTPSDIQKKETKNDKEKENRKENPINENHKTPNEEPFLAIPTPYNTTLNDSEPQEGLVQISSHPPTHYTIYPKRNRFDDLTNPTNPPLKEIKQETKEREPTPTKETLTPTTPKPIMPTLAPIIENDNKTENQKTPNHPKKEENPQENTQEEMIEGRIEEMIKENLKKEEKEVQNAPNFSPVTPTSAKKPVMVKELSENKEILDGLDYGEVQKPKDYELPTTQLLNAVCLKDTSLDENEIDQKIQDLLSKLRTFKIDGDIIRTYSGPIVTTFEFRPAPNVKVSRILGLSDDLAMTLCAESIRIQAPIKGKDVVGIEIPNSQSQIIYLREILESELFQKSSSPLTLALGKDIVGNPFITDLKKLPHLLIAGTTGSGKSVGVNAMILSLLYKNPPDQLKLVMIDPKMVEFSIYADIPHLLTPIITDPKKAIGALQSVAKEMERRYSLMSEYKVKTIDSYNEQAPSNGVEAFPYLIVVIDELADLMMTGGKEAEFPIARIAQMGRASGLHLIVATQRPSVDVVTGLIKTNLPSRVSFRVGTKIDSKVILDTDGAQSLLGRGDMLFTPPGANGLVRLHAPFATEDEIKKIVDFIKAQKEVQYDKDFLLEESRMPLDTPNYQGDDILERAKAVILEKKITSTSFLQRQLKIGYNQAATITDELEAQGFLSPRNAKGNREILQNF

SEQ ID NO: 58878 - protein, 427 aa, Helicobacter pylori; identical to SEQ ID NO: 58711

SEQ ID NO: 58879 - protein, 425 aa, Helicobacter pylori
MLDFDLVLFGATGDLAMRKLFVSLYEIYTHYGFKNDSRIIASGRKELSNEEFLTLLCEKTQLHSREKGREFLAHISYLCVRLDNPKDFEELSKIATKNKPLIFYFSISPSFFATTAQHLAKNALNHANTRLILEKPLGHDLKTCKEIFQSISVFFKEEQIFRIDHYLGKKGVQNILELRLNNPILNILWDQISAVEICVYETLGVEERGEFYDKIGALRDMVQNHLLQVLSLIATDLPNNLKDLRKEKIKVLKTLQPPKDFKKQVIRAQYQGYRDENKVHKESQTETFVAIKAFLDTPKFKGVPFYLKHAKKMPHNQASVKIHFNAVNTLEFFLSQDKITLTLKDHQNPLILETHNKQEFLRPYAKLLYDAIQNNHNNFAHQLELEASWVFIDTLIEGFMNNATPLYSYESHHLNESEFLKPLYQ

SEQ ID NO: 58880 - protein, 348 aa, Helicobacter pylori
MRVQSKGFAIFSKDGHFKPHDFSRHAVGPKDVLIDILYAGICHSDIHSAYSEWKEGIYPMVPGHEIAGAIKEVGKEVKKFKVGDVVGVGCFVNSCKACKPCKEHQEQFCAKVVFTYDCLDYFHDNEPHMGGYSNNIVVDENYVISVDKNAPLEKVAPLLCAGITTYSPLKFSKVTKGTKVGVAGFGGLGSMAVKYAVAMGAEVSVFARNEHKKQDALSMGVKHFYTDPKQCKEELDFIISTIPTHYDLKDYLKLLTYNGDLALVGLPPVEIAPALSVFDFIHLGNRKVYGSLIGGIKETQEMMDFSIKHNIYPEIDLILGKDIDTAYHNLTHGKAKFRYVIDMKKSFD

SEQ ID NO: 58881 - protein, 440 aa, Helicobacter pylori
MLERYANEEMKALWNEQTKFETYLEVEKAVVRAWNKLGQIQDSDCEKICAKAAFNLERIKEIEKTTKHDLIAFTTCVAESLGEESRFFHYGITSSDCIDTAMALLMTKSLKLIQKGVKNLYETLKNRALEHKDTLMVGRSHGVFGEPITFGLVLALFADEIKRHLKALDLTMEFISVGAISGAMGNFAHAPLELEELACEFLGLKTANISNQVIQRDRYARLACDLALLASSCEKIAVNIRHLQRSEVYEVEEAFSTGQKGSSAMPHKRNPILSENITGLCRVIRSFTTPMLENVALWHERDMSHSSVERFALPDLFITSDFMLSRLNSVIKNLVVYPKNMLKNLALSGGLVFSQRVLLELPKKGLSREESYSIVQENAMKIWEVLQQGAFKNTDENLFLNALLNDERLKKYLSEDEIKACFDYNYYTKNVGAIFKRVFE

SEQ ID NO: 58882 - protein, 567 aa, Helicobacter pylori
MRRSFLKTIGLGVIALFLGLLNPLSAASYPPIKNTKVGLALSSHPLASEIGQKVLEEGGNAIDAAVAIGFALAVVHPAAGNIGGGGFAVIHLANGENVALDFREKAPLKATKNMFLDKQGNVVPKLSEDGYLAAGVPGTVAGMEAMLKKYGTKKLSQLIDPAIKLAENGYAISQRQAETLKEARERFLKYSSSKKYFFKKGHLDYQEGDLFVQKDLAKTLNQIKTLGAKGFYQGQVAELIEKDMKKNGGIITKEDLASYNVKWRKPVVGSYRGYKIISMSPPSSGGTHLIQILNVMENADLSALGYGASKNIHIAAEAMRQAYADRSVYMGDADFVSVPVDKLINKAYAKKIFDTIQPDTVTPSSQIKPGMGQLHEGSNTTHYSVADRWGNAVSVTYTINASYGSAASIDGAGFLLNNEMDDFSIKPGNPNLYGLVGGDANAIEANKRPLSSMSPTIVLKNNKVFLVVGSPGGSRIITTVLQVISNVIDYNMNISEAVSAPRFHMQWLPDELRIEKFGMPADVKDNLTKMGYQIVTKPVMGDVNAIQVLPKTKGSVFYGSTDPRKEF

SEQ ID NO: 58883 - protein, 503 aa, Helicobacter pylori
MSQLKLEEISSVIEEKIKNFELDCDMAEVGKVVSYADGVAKVYGLNGVMSYEVLEFETGDKGVAANLEEDSVGVIVFGFGNNIKEGTSVKRTKSLMKVPVGDAVVGRVLNALGEPIDGKGEIETNEFSLIEQKAPGIMDRKSVHEPLQTGIKAIDALVPIGRGQRELIIGDKQTGKTTVAIDAIINQKGQNVICIYVAIGQKESTVAQVVRKLEEYGAMEYSVVINASASDSAAMQYLAPYSGVAMGEYFRDHARHALIIYDDLSKHAVAYREISLILRRPPGREAFPGDVFYIHSRLLERAAKLCDEKGAGSLTALPIVETQAGDVSAYIPTNIISITDGQIFLETDLFYSGIRPAINVGLSVSRVGGAAQIKATKQVSGTLRLDLAQYRELQAFTQFASDLDEASKKQLERGQRMVEVLKQAPYSPLPIEKQVVIIYAGAKGFLDSVSVKKVVDFEEQLHPFLEAKYPQVLEEIHTKKALDKDLEAMLRKVLEEFKLTYSE

SEQ ID NO: 58884 - protein, 264 aa, Helicobacter pylori
MMSEIIAVANQKGGVGKTTTAVNLAASLAVHEKKILLIDFDPQANATSSLGFRRDKIDYDIYHVLIGRKQISQVILKTQMPFLDLVPSNLGLAGFEKTFYDSQDENKRGELMLKNALESVVGLYDYIIIDSPPALGPLTINSLSAAHSVIIPIQCEFFALEGTKLLLNTIRMLQKSTNPKLKIRGFLPTMHVPQLNLTKGVLAELFKYFDSEFFRDSATGEYIMIPKSVKLAESPSFGKPILLYDIKSNGSIAYQKLAQSILQG

SEQ ID NO: 58885 - protein, 118 aa, Helicobacter pylori
MKNRYIQQFEDAQLKDKTMPAFKAGDTLRLGITIKEGEKTRTQYFEGVCIAIRGNGVDKTFCVRKIGANNIGVEKIFPFYSESLASVEVLRVGRVRRAKLYYLRDRRGKAARIKEVRH

SEQ ID NO: 58886 - protein, 229 aa, Helicobacter pylori
MKFSVLTLFPQLVWPYFEDSILKRALEKNLFELEVLNLRDFSANKYQKADHTLIGGGAGQILDPEMVENALHSVKNPKHTIFLSAVGKPFKQTDAMRLAQKKHVVLVCGRYEGFDERSIELGADEVFCIGDFILTGGELGALCLIDSIARHIQGVLGNAQSLENESFENHYLEAPNFANAVFKSKEINKIPAPLEYSKGNHAKIKQLKLDLSKLRTKFYRLDLFKQHKS

SEQ ID NO: 58887 - protein, 184 aa, Helicobacter pylori
MVSMLLVGRIGKSVGLNGGLRLHLESDFPECLKKGVKVSVAPLNAFSCVSSFKEYIIHSYEHAKNLLFLETIQTPEKAKELTNLGLFMSEAESKKLCVLKEGEFFYCDLVGLSVVEENEILGKVIEIQRISQTDYFLVETTLNLVEKGLAKIFLIPYRDFYIQEILLQDKKITTHNAKTLLENS

SEQ ID NO: 58888 - protein, 115 aa, Helicobacter pylori
MHESDPLNTPFSQADCKDYSHCVATFLEKYLKKVVSFPQALSVEHTLLEDKVKQITIYTHPSDMGHVIGKEGKMVSAIKAFISGVKAKDGFSYKIVVFASKNGDKNPHVLGDQTP

SEQ ID NO: 58889 - protein, 76 aa, Helicobacter pylori
MTVIRLTRIGRKKKPFYRVVVTDSRKRRDGGWIESIGYYNPLSEPKDIKIDKERLNYWKGVGAKMSERVEKLSQKA

SEQ ID NO: 58890 - protein, 448 aa, Helicobacter pylori
MFQALSDGFKNALNKIRFQDDEKALDRALDELKKTLLKNDVHHKVARELLKKVESQTKLNGIGKQQFLDALEKSLLEILSAKGSSGFTFAQTPPTVVLMAGLQGSGKTTTTAKLAHYLKTKNKKVLLCACDLQRLAAVEQLKVLGEQVGVEVFYEENKSVKEIASNALKRAKEAQFDVLLVDSAGRLAIDKELMQELKEVKEILNPHEVLYVADALSGQDGVKSANTFNEEIGVSGVVLSKFDSDSKGGIALGITYQLGLPLRFIGSGEKIPDLDVFVPERIVGRLMGAGDIVSLAEKTASVLNPNEAKDLSKKLKKGQFTFNDFLNQIEKVKKLGSMSSLISMIPGLGNMASALKDTDLESSLEVKKIKAMVNSMTKKEQENPEILNGSRRKRIALGSGLEVSEINRIIKRFDQASKMAKRLTNKKGISDLMNLMSQAKNQTPPKMR

SEQ ID NO: 58891 - protein, 874 aa, Helicobacter pylori
MIMKQEPTTYQPEEIEKKIYEICSHRGYFEIDGNEAIQEKNKRFCLMMPPPNVTGVLHIGHALTLSLQDILARYKRMDGYKTLYQPGLDHAGIATQNVVEKQLLSQGIKKEDLGREEFIKKVWEWKEKSGGAILEQMKRLGVSAAFSRTRFTMDKGLQRAVKLAFLKWYEKGLIIQDNYMVNWCTKDGALSDIEVEYEERKGALYYIRYYLENQKDYLVVATTRPETLFGDSALMVNPNDERYKHLVGQKAILPLIHRTIPIIADEHVEMEFGTGCVKVTPGHDFNDYEVGKRHHLETIKIFDEKGILNAHCGEFENLERLEARDKVVERLKENALLEKIEEHTHQVGHCYRCHNVVEPYVSKQWFVKPEIAQSSIEKIQQGLARFYPSNWINNYNAWMRELRPWCISRQLFWGHQIPVFTCENNHQFVSLDTPLSCPTCKSETLEQDKDVLDTWFSSGLWAFSTLGWGQEKSGLFNESDLKDFYPNTTLITGFDILFFWVARMLFCSESLLGELPFKDIYLHALVRDEKGEKMSKSKGNVIDPLEMIEKYGADSLRFTLANLCATGRDIKLSTTHLENNKNFANKLFNAASYLKLKQESFKDKERLNEYQTPLGRYAKSRLNSATKEARNALDNYRFNDATTLLYRFLWGEFCDWFIEFSKVENEAIDELGSVLKEALKLLHPFMPFISESLYHKLSNTELENTESIMVMPYPKDLAQDEKLEHEFEVIKDCIVSLRRLKIMLETPPIVLKEASVGLREAIENTERLQTYAQKLARLEKVSVISSKPLKSVSDVGEFCQTYANLENLDLSPLVARLKKQLEKLEKEKLKLNLHNENFVKNAPKSVLEKAKESLKTLLEKESKIKQELDLLEQP

SEQ ID NO: 58892 - protein, 353 aa, Helicobacter pylori
MKFALTGGGTGGHLSIAKALAIELEKQGIEAIYLGSTYGQDKEWFENSPLFSERYFFNTQGVVNKSFFKKIGSLFLQAKAAFKAKEILKKHQITHTISVGGFSAGPASFASLLNKIPLYIHEQNAIKGSLNRYLSPKAKAVFSSYAFKDKGNHVLTSYPVQNAFFDFARTRTEIKHILFLGGSQGAKAINEFALLNAPKLTKQGIKITHICGPNSYEQVRFFYQELGLLDKIELFAFHNNITEIMHRADLCVSRAGASSVWELCANGLPTIFIPYPFASNNHQYYNVLEFEKENLCYVVPQNELLPKKLFEVIRKLNQKDDQGNKNLTTISNQLQQKIAKDGAKTIIETILSA

SEQ ID NO: 58893 - protein, 1230 aa, Helicobacter pylori
MIKKARKFIPFFLIGSLLAEDNGWYMSVGYQIGGTQQFINNKQLLENQNIINSVTQSAINIAGPTTGLITLSSQTVIDALGYGVSNTVGNQLEGISNILNQIGKRKDFYSSRQISSISQQIIGLKGSSDPLKAHSSQITAKLLSNTQSAFDQGIALSTNIISSINSLNPSNNTQEVKKQLQNTAQSMTELLQQIEHSITKTTSTTYAQSLLSNLTDAVNASSNNTAYVSALVNALNTLGVGVFPTTTTTHVVLNPPGQVVFYPTNSILGSTSSNSNNQQQYNNTLLMNTLQGTLSANTQNNPNGCANQVQCLEQFIQNLAPLAATPTSNNQANQQVQAIAQKLQSVAINTLDNNAINNTTYNLNNLHNALNFQAYESTIEQYNNALKQISWISFTEPKNLLKNTSNNYQIGTVTNAQGQNISAYDCMTATGSLSSNASSGISCSATSSTSSTNSFDNSLVATSKVQTINGKEQIGVNSFNLVSQVWSVYNSLKTSEENLQKNANILCANGTQSGTSSCNSSSGGLSISGNAQLQNILSPTSGTTTNTQAKSNAPKLKAMVVVNNEEEAKTANLAQSSGTTTQSPNSTVMGALNTVLQNVSNFQQSIQNAFQNQESNIQAWANAIYNTNGSQSQEMTPNNNQDLRIQLRANFYQLINTINQQVPTDMNALINQSQQTQQTSGSASNNNACASGMSGSNGNWCYQQWSDSKAYYSGLQSALGYQTQATTQSGSNGGNSITYNVQQITLTSNGLLNQIITNLKSVNGGNGASGTGSGNGTSQINTAYQMLTDASDGKLGTYSSSSGSNNGYTPCNSTNGSNKTSGNNCYEPNKQQNATTATATTDSNLQKVYNDAQKIANIIASSGNNKGVENGLKQFFEALKNNSSSLSNLCGNGSSGSSGTTCSGWLINLLGAIPTNGVSDTNNLINLLTEFIKTAGFIQNNDSSVSTSLTSAFQAITSAISQGFQALQNDISPNAILTLLQEITSNTTTIQSFSQTLRQLLGDKTFFMAQQKLIDAMINARNQVQNAQNQANNYGSQPVLSQYAAAKSTQHGMSNGLGVGLGYKYFFGKARKLGLRHYFFFDYGFSEIGLANQSVKANIFAYGVGTDFLWNLFRRTYNTKALNFGLFAGVQLGGATWLSSLRQQIIDNWGSANDIHSTNFQVALNFGVRTNFAEFKRFAKKFHNQGVISQKSVEFGIKVPLINQAYLNSAGADVSYRRLYTFYINYIMGF

SEQ ID NO: 58894 - protein, 177 aa, Helicobacter pylori
MHLDRQSLEKAKHLIQSGLIDTIEVGTIKGLQEIHRFLFEGLYEFAGKIRDKNIAKGNFRFANCLYLDLILPRIESMPQNNFNQIVEKYVEMNIAHPFLEGNGRATRIWLDLLLKKELKKIVLWDRIDKAAYLSAMERSPVNDLEIKTLLKKHLSSNTNDPLTLIKGITQSYYYEGL

SEQ ID NO: 58895 - protein, 545 aa, Helicobacter pylori
MLTQLKTYPKLLKHYEEIKEVHMRDWFFKDKERASRYFLQFESLSLDYSKNRLNDTTLKLLFELANDCSLKEKIEAMFKGEKINTTEKRAVLHTALRSLNDTEILLDNMEVLKSIRSVLKRMRAFSDSVRSGKRLGYTNQVITDIVNIGIGGSDLGALMVCTALKRYAHPRLKMHFVSNVDGTQILDVLEKLNPASTLFIVASKTFSTQETLTNALTARKWFVERSGDEKHIAKHFVAVSTNKEAVQQFGIDEHNMFEFWDFVGGRYSLWSAIGLSIMIYLGKKNFNALLKGAYLMDEHFRNAPFESNLPVLMGLIGVWYINFFQSKSHLIAPYDQYLRHFPKFIQQLDMESNGKRISKKGEIIPYDTCPVVWGDMGINAQHAFFQLLHQGTHLIPIDFIASLDKKPNAKGHHEILFSNVLAQAQAFMKGKSYEEALGELLFKGLDKDEAKDLAHHRVFFGNRPSNILLLEKISPSNIGALVALYEHKVFVQGVIWDINSFDQWGVELGKELAVPILQELEGHKSNAYFDSSTKHLIELYKNYNQ

SEQ ID NO: 58896 - protein, 217 aa, Helicobacter pylori
MALDWDFMFHSIPAFFKGLELTLYISFFGILLSLLVGFLCAIVLYFKTRFLSPVVYIYGEIARNTPLLIQLFFLYYGLNEIGLSALECAILALGFLGGGYMSQSFLLGFKSLASIQRESALSLGFSPLKMMYYIILPQSLSVSMPSIGANVIFLLKETSVVGAIALTDIMFVAKDFIGIYYKTTESLLMLSLTYLIALLPLSVLFVILERFFKKKVA

SEQ ID NO: 58897 - protein, 277 aa, Helicobacter pylori
MKTNGLFKMWGLFLVLIALVFNACSDSHKEKKDALEVIKQRGVLKVGVFSDKPPFGSVDSKGKYQGYDVVIAKRMALDLLGDENKIEFIPVEASARVEFLKANKVDIIMANFTRTKEREKVVDFAKPYMKVALGVVSKDGVIKNIEELKDKELIVNKGTTADFYFTKNYPNIKLLKFEQNTETFLALLNNKATALAHDNTLLLAWTKQHPEFKLGITSLGDKDVIAPAIKKGNPKLLEWLNNEIDSLISSDFLKEAYQETLAPVYGDEIKPEEIIFE

SEQ ID NO: 58898 - protein, 407 aa, Helicobacter pylori
MQKTSNTLALGSLTALFFLMGFITVLNDILIPHLKPIFDLTYFEASLIQFCFFGAYFIMGGVFGNVISKIGYPFGVVLGFVITATGCALFYPAAHFGSYGFFLGALFILASGIVCLQTAGNPFVTLLSKGKEARNLVLVQAFNSLGTTLGPIFGSLLIFSTTKMGDNASLIDKLADAKSVQMPYLGLAVFSLLLALIMYLLKLPDVEKEMPKETTQKSLFSHKHFVFGALGIFFYVGGEVAIGSFLVLSFEKLLNLDSQSSAHYLVYYWGGAMVGRFLGSVLMNKIAPNKYLAFNALSSIVLIALAIIIGGKIALFALTFVGFFNSIMFPTIFSLATLNLGHLTSKASGVISMAIVGGALIPPIQGAVTDMLTATESNLLYAYGVPLLCYFYILFFALKGYKQEENS

SEQ ID NO: 58899 - protein, 641 aa, Helicobacter pylori
MKKTKKTILLSLTLAASLLHAEDNGVFLSVGYQIGEAVQKVKNADKVQKLSDTYEQLSRLLTNDNGTNSKTSAQAINQAVNNLNERAKTLAGGTTNSPAYQATLLALRSVLGLWNSMGYAVICGGYTKSPGENNQKDFHYTDENGNGTTINCGGSTNSNGTHSSSGTNTLKADKNVSLSIEQYEKIHEAYQILSKALKQAGLAPLNSKGEKLEAHVTTSKPENNSQTKTTTSVIDTTNDAQNLLTQAQTIVNTLKDYCPMLIAKSSSESSGAATTNAPSWQTAGGGKNSCATFGAEFSAASDMINNAQKIVQETQQLSANQPKNITQPHNLNLNTPSSLTALAQKMLKNAQSQAEILKLANQVESDFNKLSSGHLKDYIGKCDASAISSANMTMQNQKNNWGNGCAGVEETLSSLKTSAADFNNQTPQINQAQNLANTLIQELGNNPFRNMGMIASSTTNNGALNGLGVQVGYKQFFGEKKRWGLRYYGFFDYNHAYIKSNFFNSASDVWTYGVGSDLLFNFINDKNTNFLGKNNKISVGFFGGIALAGTSWLNSQFVNLKTISNVYSAKVNTANFQFLFNLGLRTNLARPKKKDSHHAAQHGMELGVKIPTINTNYYSFLDTKLEYRRLYSVYLNYVFAY

SEQ ID NO: 58900 - protein, 391 aa, Helicobacter pylori
MMITKQSYQKFALMRVFVFSLSAFIFNTTEFVPVALLSDIAKSFEMESATVGLMITAYAWVVSLGSLPLMLLSAKIERKRLLLFLFALFILSHILSALAWNFWVLLLSRMGIAFAHSIFWSITASLVIRVAPRNKKQQALGLLALGSSLAMILGLPLGRIIGQILDWRSTFGVIGGVATLIALLMWKLLPHLPSRNAGTLASVPVLMKRPLLMGIYLLVIMVISGHFTTYSYIEPFIIQISQFSPDITTLMLFVFGLAGVVGSFLFGRLYAKNSRKFIAFAMVLVICPQLLLFVFKNLEWVVFLQIFLWGIGITSLGISLQMRVLQLAPDATDVASAIYSGSYNVGIGSGALFGSIVIHQLGLGYIGFVGGALGLLALFWLRFITIKFKKT

SEQ ID NO: 58901 - protein, 346 aa, Helicobacter pylori
MKTYNVAIVGASGAVGQELIKGLENSFFPIKKFVPLASTRSAGKKIKAFNKDYEILETTHEVFEREKIDIAFFSAGGSVSEEFATSASKTALVVDNTSFFRLNKDVPLVVPEINAKEIFNAPLNIIANPNCSTIQMTQILNPLHLHFKIKSVIVSTYQAVSGAGNKGIESLKNELKTALECLEKDPTIDLNQVLQAGAFAYPIAFNAIAHIDTFKENGYTKEELKMLHETHKIMGVDFPISATCVRVPVLRSHSESLSIAFEKEFDLKEVYEVLKNAPSVAVCDDPSHNLYPTPLKASHTDSVFIGRLRKDLFDKKTLHGFCVADQLRVGAATNALKIALHYIKNA

SEQ ID NO: 58902 - protein, 442 aa, Helicobacter pylori
MITPKVLSGFKDRLPKDAIQKAQLLAKVSVVFQSFGFVPIETPHLEYAQTLLPDASSDIQKEIYRFKDHGDRDVALRFDLTVPLARFVSLHHQTLGMPFKRYAIGNVFRGERAQKGRYREFTQCDFDFIGSESLVCDAEIIQVIVASLKALDLEDFCVSINHRKILNGICEYFGISQVNEALRIVDKLEKIGLNGVEEELKKECGLNSNTIKELLELIQIKQNDLSHAEFFEKIAYLKDYNENLKKGIQDLERLYQLLGDLQISQNLYKIDFSIARGLGYYTGIVYETTLNEMKSLGSVCSGGRYDHLTKNFSKENLQGVGASIGIDRLIVALSEMQLLDERSTQAKVLIACMHEEYFSYANRLAESLRQSGIFSEVYPEAQKIKKPFSYANHKGHEFVAVIGEEEFKSETLSLKNMHSGMQLNCLSFLKALEIIGENDEDL

SEQ ID NO: 58903 - protein, 329 aa, Helicobacter pylori
MQQRHLGPLKVGALALGCMGMTYGYGEVHDKKQMVKLIHKALELGINFFDTAEAYGEDNEKLLGEAIKPFKDKVVVASKFGIYYADPNDKYATMFLDSSPNRIKSAIEGSLKRLKVECIDLYYQHRMDTNTPIGEVAEVMQLLIKEGKIKAWGMSEAGLSSIQKAHQICPLSALQSEYSLWWREPEKEILGFLEKEKIGFVAFSPLGKGFLGAKFEKNATFASEDFRSVSPRFNQENLAKNYALVELIQDHAHAKGVTPAQLALSWILHTQKIIVPLFGTTKESRLIENIGALQVSWSQKELEIFQKELTAIKIEGARYPERINEMVNQ

SEQ ID NO: 58904 - protein, 692 aa, Helicobacter pylori
MARKTPLNRIRNIGIAAHIDAGKTTTSERILFYTGVSHKIGEVHDGAATMDWMEQEKERGITITSAATTCFWKDHQINLIDTPGHVDFTIEVERSMRVLDGAVSVFCSVGGVQPQSETVWRQANKYGVPRIVFVNKMDRIGANFYNVENQIKLRLKANPVPINIPIGAEDTFIGVIDLVQMKAIVWNNETMGAKYDVEEIPSDLLEKAKEYREKLVEAVAEQDEALMEKYLGGEELSIEEIKKGIKAGCLNMSLVPMLCGSSFKNKGVQTLLDAVIDYLPAPTEVVDIKGIDPKTEEEVFVKSSDDGEFAGLAFKIMTDPFVGQLTFVRVYRGKLESGSYVYNSTKDKKERVGRLLKMHSNKREDIKEVYAGEICAFVGLKDTLTGDTLCDEKNAVVLERMEFPEPVIHIAVEPKTKADQEKMGVALGKLAEEDPSFRVMTQEETGQTLIGGMGELHLEIIVDRLKREFKVEAEIGQPQVAFRETIRSSVSKEHKYAKQSGGRGQYGHVFIKLEPKEPGSGYEFVNEISGGVIPKEYIPAVDKGIQEAMQNGVLAGYPVVDFKVTLYDGSYHDVDSSEMAFKIAGSMAFKEASRAANPVLLEPMMKVEVEVPEEYMGDVIGDLNRRRGQINSMDDRLGLKIVNAFVPLVEMFGYSTDLRSATQGRGTYSMEFDHYGEVPSNIAKEIVEKRKG

SEQ ID NO: 58905 - protein, 155 aa, Helicobacter pylori
MRRRKAPVREVLGDPVYGNKVVTKFINKMMFDGKKSVAEKIIYKAFNKIEEKSGEKGIEVFEKALERVRPLVEVRSRRVGGATYQVPVEVRASRQQSLSIRWILEATRKRNERMMVDRLANELMDAASDKGAAFKKKEDVHKMAEANKAFAHYRW

SEQ ID NO: 58906 - protein, 135 aa, Helicobacter pylori
MPTINQLIRKERKKVVKKTKSPALVECPQRRGVCTRVYTTTPKKPNSALRKVAKVRLTSKFEVISYIPGEGHNLQEHSIVLVRGGRVKDLPGVKYHIVRGALDTAGVNKRTVSRSKYGTKKAKATDKKATDNKKK

SEQ ID NO: 58907 - protein, 2890 aa, Helicobacter pylori
MSKKIPLKNRLRADFTKTPTDLEVPNLLLLQRDSYDSFLYSKEGKESGIEKVFKSIFPIQDEHNRITLEYAGCEFGKSKYTVREAMERGITYSIPLKIKVRLILWEKDTKSGEKNGIKDIKEQSIFIREIPLMTERTSFIINGVERVVVNQLHRSPGVIFKEEESSTSLNKLIYTGQIIPDRGSWLYFEYDSKDVLYARINKRRKVPVTILFRAMDYQKQDIIKMFYPLVKVRYENDKYLIPFASLDANQRMEFDLKDPQGKVILLAGKKLTSRKIKELKENHLEWVEYPMDILLNRHLAEPVMVGKEVLLDMLTQLDKNKLEKIHDLGVQEFVIINDLALGHDASIIQSFSADSESLKLLKQTEKIDDENALAAIRIHKVMKPGDPVTTEVAKQFVKKLFFDPERYDLTMVGRMKMNHKLGLHVPDYITTLTHEDIITTVKYLMKIKNNQGKIDDRDHLGNRRIRAVGELLANELHSGLVKMQKTIKDKLTTMSGAFDSLMPHDLVNSKMITSTIMEFFMGGQLSQFMDQTNPLSEVTHKRRLSALGEGGLVKDRVGFEARDVHPTHYGRICPIETPEGQNIGLINTLSTFTRVNDLGFIEAPYKKVVDGKVVGETIYLTAIQEDSHIIAPASTPIDEEGNILGDLIETRVEGEIVLNEKSKVTLMDLSSSMLVGVAASLIPFLEHDDANRALMGTNMQRQAVPLLRSDAPIVGTGIEKIIARDSWGAIKANRAGVVEKIDSKNIYILGESKEEAYIDAYSLQKNLRTNQNTSFNQVPIVKVGDKVGAGQIIADGPSMDRGELALGKNVRVAFMPWNGYNFEDAIVVSECITKDDIFTSTHIYEKEVDARELKHGVEEFTADIPDVKEEALAHLDESGIVKVGTYVSAGMILVGKTSPKGEIKSTPEERLLRAIFGDKAGHVVNKSLYCPPSLEGTVIDVKVFTKKGYEKDARVLSAYEEEKAKLDMEHFDRLTMLNREELLRVSSLLSQAILEEPFSHNGKDYKEGDQIPKEEIASINRFTLASLVKKYSKEVQNHYEITKNNFLEQKKVLGEEHEEKLSILEKDDILPNGVIKKVKLYIATKRKLKVGDKMAGRHGNKGIVSNIVPVADMPYTADGEPVDIVLNPLGVPSRMNIGQILEMHLGLVGKEFGKQIARMLEDKTKDFAKELRAKMLEIANAINEKDPLTIHALENCSDEELLEYAKDWSKGVKMAIPVFEGISQEKFYKLFELAKIAMDGKMDLYDGRTGEKMRERVNVGYMYMIKLHHLVDEKVHARSTGPYSLVTHQPVGGKALFGGQRFGEMEVWALEAYGAAHTLKEMLTIKSDDIRGRENAYRAIAKGEQVGESEIPETFYVLTKELQSLALDINIFGDDVDEDGAPKPIVIKEDDRPKDFSSFQLTLASPEKIHSWSYGEVKKPETINYRTLKPERDGLFCMKIFGPTKDYECLCGKYKKPRFKDIGTCEKCGVAITHSKVRRFRMGHIELATPVAHIWYVNSLPSRIGTLLGVKMKDLERVLYYEAYIVKEPGEAAYDNEGTKLVMKYDILNEEQYQNISRRYEDRGFVAQMGGEAIKDLLEEIDLITLLQSLKEEVKDTNSDAKKKKLIKRLKVVESFLNSGNRPEWMMLTVLPVLPPDLRPLVALDGGKFAVSDVNELYRRVINRNQRLKRLMELGAPEIIVRNEKRMLQEAVDVLFDNGRSTNAVKGANKRPLKSLSEIIKGKQGRFRQNLLGKRVDFSGRSVIVVGPNLKMDECGLPKNMALELFKPHLLSKLEERGYATTLKQAKRMIEQKSNEVWECLQEITEGYPVLLNRAPTLHKQSIQAFHPKLIDGKAIQLHPLVCSAFNADFDGDQMAVHVPLSQEAIAECKVLMLSSMNILLPASGKAVAIPSQDMVLGLYYLSLEKSGVKGEHKLFSSVNEIITAIDTKELDIHAKIRVLDQGNIIATSAGRMIIKSILPDFIPTDLWNRPMKKKDIGVLVDYVHKVGGIGITATFLDNLKTLGFRYATKAGISISMEDIITPKDKQKMVEKAKVEVKKIQQQYDQGLLTDQERYNKIIDTWTEVNDKMSKEMMTAIAQDKEGFNSIYMMADSGARGSAAQIRQLSAMRGLMTKPDGSIIETPIISNFKEGLNVLEYFNSTHGARKGLADTALKTANAGYLTRKLIDVSQNVKVVSDDCGTHEGIEITDIAVGSELIEPLEERIFGRVLLEDVIDPITNEILLYADTLIDEEGAKKVVEAGIKSITIRTPVTCKAPKGVCAKCYGLNLGEGKMSYPGEAVGVVAAQSIGEPGTQLTLRTFHVGGTASRSQDEREIVASKEGFVRFYNLRTYTNKEGKNIIANRRNASILVVEPKIKAPFDGELRIETVYEEVVVSVKNGDQEAKFVLRRSDIVKPSELAGVGGKIEGKVYLPYASGHKVHKGGSIADIIQEGWNVPNRIPYASELLVKDNDPIAQDVYAKEKGVIKYYVLEANHLERTHGIKKGDMVSEKGLFAVIADDNGREAARHYIARGSEILIDDNSEVSTNSVISKPTTNTFKTIATWDPYNTPIIADFKGKVGFVDVIAGVTVAEKEDENTGITSLVVNDYIPSGYKPSLFLEGANGEEMRYFLEPKTSIAISDGSSVEQAEVLAKIPKATVKSRDITGGLPRVSELFEARKPKPKDVAILSEVDGIVSFGKPIRNKEHIIVTSKDGRSMDYFVDKGKQILVHADEFVHAGEAMTDGVISSHDILRISGEKELYKYIVSEVQQVYRRQGVSIADKHIEIIVSQMLRQVRILDSGDSKFIEGDLVSKKLFKEENARVIALKGEPAIAEPVLLGITRAAIGSDSIISAASFQETTKVLTEASIAMKKDFLEDLKENVVLGRMIPVGTGMYKNKKIVLRALEDNSKF

SEQ ID NO: 58908 - protein, 125 aa, Helicobacter pylori
MAISKEEVLEYIGSLSVLELSELVKMFEKKFGVSATPTVVAGAAVAGGAAAESEEKTEFNVILADSGAEKIKVIKVVREITGLGLKEAKDATEKTPHVLKEGVNKEEAETIKKKLEEVGAKVEVK

SEQ ID NO: 58909 - protein, 164 aa, Helicobacter pylori
MQKQHQRQHKVELVANLKSQFADAKALLICDYKGLSVRKLEALRNKARNQGIKVQVIKNTLAHIAMKETGYSDLDLKETNVFLWGGDQIALSKLVFDFQKEHKDHFVLKAGLFDKESVSVAHVEAVSKLPSKEELMGMLLSVWTAPARYFVTGLDNLRKAKEEN

SEQ ID NO: 58910 - protein, 234 aa, Helicobacter pylori
MAKKVFKRLEKLFSKIQNDKAYGVEQGVEVVKSLASAKFDETVEVALRLGVDPRHADQMVRGAVVLPHGTGKKVRVAVFAKDIKQDEAKNAGADVVGGDDLAEEIKNGRIDFDMVIATPDMMAVVGKVGRILGPKGLMPNPKTGTVTMDIAKAVSNAKSGQVNFRVDKKGNVHAPIGKASFPEEKIKENMLELVKTINRLKPSSAKGKYIRNAALSLTMSPSVSLDAQELMDIK

SEQ ID NO: 58911 - protein, 141 aa, Helicobacter pylori
MAKKVVGEIKLQIPAGKANPSPPVGPALGQRGVNIMEFCKAFNERTKDMGSFNIPVIITVYQDKSFTFITKKPPVTDLIKKASGVEKGSDNPLKNKIAKLTHKQVEEIAQLKMEDLNTSTMEAAKKIVMGSARSMGVEVVD

SEQ ID NO: 58912 - protein, 176 aa, Helicobacter pylori
MMDWYAIQTYSGSEQSVKKAIENLANDHNIRDRIQEIIVPTEDIIEVSKKSKTKVTERSLYPGYVFIKVDLDTVLWHKIQSLPRVSRFIGENKKPTPLSEADIGHILEKMNNRAAPKPKIFFEQGEVVRVVEGPFANFTATVEEYDVEHRKLKLNVSIFGRNTPIEILHSQVEKII

SEQ ID NO: 58913 - protein, 52 aa, Helicobacter pylori
MKVKIGLKCSDCEDINYSTTKNAKTNTEKLELKKFCPRENKHTLHKEIKLKS

SEQ ID NO: 58914 - protein, 399 aa, Helicobacter pylori
MAKEKFNRTKPHVNIGTIGHVDHGKTTLSAAISAVLSLKGLAEMKDYDNIDNAPEEKERGITIATSHIEYETENRHYAHVDCPGHADYVKNMITGAAQMDGAILVVSAADGPMPQTREHILLSRQVGVPHIVVFLNKQDMVDDQELLELVEMEVRELLSAYEFPGDDTPIVAGSALRALEEAKAGNVGEWGEKVLKLMAEVDAYIPTPERDTEKTFLMPVEDVFSIAGRGTVVTGRIERGVVKVGDEVEIVGIRPTQKTTVTGVEMFRKELEKGEAGDNVGVLLRGTKKEEVERGMVLCKPGSITPHKKFEGEIYVLSKEEGGRHTPFFTNYRPQFYVRTTDVTGSITLPEGVEMVMPGDNVKITVELISPVALELGTKFAIREGGRTVGAGVVSNIIE

SEQ ID NO: 58915 - protein, 171 aa, Helicobacter pylori
MLDLSYSLERVLQEDPAARNKWEVLLLYPGIHALLCYRLAHALHKRRFYFIARALSQLARFITGIEIHPGAKIGRGLFIDHGMGVVIGETTEIGDDVTIYHGVTLGGTGKFKGKRHPTLGNRVVVGAGAKVLGAICVGDDVKIGANAVVLSDLPTGSTAVGSKAKTITKDR

SEQ ID NO: 58916 - protein, 105 aa, Helicobacter pylori
MKFLALFFLALVGVAFAHDGGMGGMDMIKSYSILGAMIGLGIAAFGGAIGMGNAAAATITGTARNPGVGGKLLTTMFVAMAMIEAQVIYTLVFAIIAIYSNPFLS

SEQ ID NO: 58917 - protein, 688 aa, Helicobacter pylori
MDFITINSSNKTEEFALKQVAKQATSSLLYRLGKTIILASVCVEREPVSEDFLPLVVQFLEKSYAAGKIPGGFVKREGRAQDFEILTSRLIDRTLRPLFPKDYRYPTQITLMVLSHDIENDLQVSALNAASAALFLAHIAPIKSVSACRIARMDNEFIINPSASLLNQSSLDLFVSGTKESLNMIEMRSLGQKLNALEEPLMLEALELAQKSLEETCTLYEEIFTPHQNELFFKESQGIVFNERLLDLLKNQYFDEIIKGIESSALSERENVFNEIARKISEAHSEFSLEEIELSLEKVKKTEIRRMIIKDKIRPDKRALEEVRPILIESDLLPMAHSSILFTRGQTQSLVVGVLGTDNDAQTHESLEHKAPIKERFMFHYNFPPFCVGEASSIGAASRRELGHGNLAKRALETSIKNKEQVIRLVSEILESNGSSSMASVCAGSLALYASGVEIYDLVAGVAMGMVSEGQDHAILSDISGLEDAEGDMDFKIAGNLEGITAMQMDTKMSGIKLEILYQALLQAKEARKHILKIMHEAKEKIVINFSHLPTTEIFNVAPDKIVEIIGQGGRVIKEIVEKFEVKIDLNKPSGEVKIMGNKERVLKTKEFILNYLHSLDQELEQYAIDEVLEAQVKRIVDFGAFLSLPKGGEGLLRKQNMDKCQVVLKEGDSIRCRVISFNKGKIALDLA

SEQ ID NO: 58918 - protein, 228 aa, Helicobacter pylori
MLVEIENLTKTYGSLKALDNINLKLPKQQFIGLLGPNGAGKTTLLKILAGLNLNYQGEVKILNQKIGIETKKSVAFLSDGDFLDPKLTPLKAIAFYKDFFSDFDSSKALDLLKRFSVPLKREFKALSKGMREKLQLILTLSRNASLYLFDEPVAGIDPIAREEIFELIAKEFSQNASLLVSTHLVVDVEKYLDSAIFLKEAKVVAFGGVGELKKGYSSLEAAYKERLK

SEQ ID NO: 58919 - protein, 234 aa, Helicobacter pylori
MDNTLKHLAIIMDGNGRWAKLKNKARAYGHKKGVKTLKDITIWCANHKLECLTLYAFSTENWKRPKSEVDFLMKMLKKYLKDERSTYLNNNIRFRAIGDLEGFSKELRDTILQLENDTRHFKDFTQVLALNYGSKNELSRAFKSLLESPPSHINLLESLENEISNRLDTHDLPEVDLLLRTGGEMRLSNFLLWQSSYAELFFTPILWPDFTPKDLENIISDFYKRVRKFGELKC

SEQ ID NO: 58920 - protein, 405 aa, Helicobacter pylori
MLIVQKYGGTSMGSIERIHNVAQRVLESVTLGHQVVVVVSAMSGETDRLLEFGKNFSHNPNKREMDRIVSVGELVSSAALSMALERYGHRAISLSGKEAGILTSSHFQNAVIQSIDTKRITELLEKNYIVVIAGFQGADIQGETTTLGRGGSDLSAVALAGALKAHLCEIYTDVDGVYTTDPRIEEKAQKIAQISYDEMLELASMGAKVLLNRSVELAKKLSVKLVTRNSFNHSEGTLIVAEKDFKGERMETPIVSGIALDKNQARVSMEGVEDRPGIAAEIFGALAEYRINVDMIVQTIGRDGKTDLDFTIVKTQIEETKQALKPFLAQMDSIDYDENIAKVSIVGVGMKSHSGVASIAFKALAKDNINIMMISTSEIKISVLIDIKYAELAVRTLHAVYQLDQ

SEQ ID NO: 58921 - protein, 380 aa, Helicobacter pylori
MIVKRLNPDALKNALQKIGPEKIAQDRMHQKGVSFVFEIQHLPLSATLILKQEAISVGGDFATPRDCILAKEPFYDGVLIASAKQLERLIVKCHSQPFGLKHLAQELKSHLKAPKPNTPQIMAVLNLTPDSFYEKSRFDSKKALEEIYQWLEKGITLIDIGAASSRPESEIIDPKIEQDRLKEILLEIKSQKLYQCAKFSIDTYHATTAQMALEHYFSILNDVSGFNSAEMLEVAKDYKPTCILMHTQKTPKDMQENVFYHNLFDEMDRFFKEKLEVLEKYVLQDIILDIGFGFAKLKEHNLALIKHLSHFLKFKKPLLVGASRKNTIGLITGREVQDRLAGTLSLHLMALQNGASVLRVHDIDEHIDLIKVFKSLEETD

SEQ ID NO: 58922 - protein, 298 aa, Helicobacter pylori
MRNTILFGVSMILLANLCFGIMSAFVKITADYFSPMENVFYRSITMTLLLLLIYPFKPYRLKSYKQGGFKKLAFRVVVGGLAMLAFFYNIEKISLATATAFSQCAPIYTVLLSPLLLKEKLKRSTLISACIGIVGVVLISDPSVENVGPVEIFMGILSGIFVSLAYITLRDLREYYDKQAVILAFAFGMSLLGLVGMFIDIPFLSTGIHVPRKEDILWISLIGISGTLGQYFLTYAYMNAPAGIIAPIEYTRIVWGLLFGLYLGDTFLDLKSSLGVALILCSGLLIALPALLKELKKI

SEQ ID NO: 58923 - protein, 375 aa, Helicobacter pylori
MVSLYLENGLFLQAQSFGASGTQAGELVFNTSMSGYQEVISDPSYKGQFVVFSMPEIGVVGANSKDDESFFSCAGVLARHYNEFFSNSRADFSLSAYLKERGVLGVCGVDTRSLIKTLRHHGCLMMVASTIEHDKNKLEEILKNAPKISHSPLVSSVSTPKITTHQRATFDFKTLDYKPFDEKTSHKIIAVLDFGAKGNILNELQNVGLKALIYPHHTKASELIKAYEKKEISGIFLSNGPGDPLSLQQEIGEIKQLINAKIPMLGICLGHQLLSIAQGYPTYKLKFGHHGSNHPVKNLKTNAVEITAQNHNYCVPEDIEEIAIITHRNLFDNTIEGVRYKNAPIISVQHHPESSPGPKESHYIFKEFVELLKDF

SEQ ID NO: 58924 - protein, 847 aa, Helicobacter pylori
MDIRNEFLQFFQNKGHAVYPSMPLVPNDATLLFTNAGMVQFKDIFTGIVPRPSIPRAASSQLCMRAGGKHNDLENVGYTARHHTLFEMLGNFSFGDYFKEEAILFAWEFVTKNLGFKPKDLYISVHEKDDEAVKLWEKFVPVDRIKKMGDKDNFWQMGDSGPCGPCSEIYIDQGEKHFKGSEDYFGGEGDRFLEIWNLVFMQYERSNDGVLSPLPKPSIDTGMGLERVQALLEHKLNNFDSSLFAPLMEEISELTSLDYASEFQPSFRVVADHARAVAFLLAQGVHFNKEGRGYVLRRILRRALRHGYLMGLKEAFLYKVVGVVCEQFANTHAYLKESKEMVVKECFEEEEHFLETLESGMELFNLSLKHLNENKIFDGKIAFKLYDTFGFPLDLTNDMLRSHGACADMQGFELCMQEQVKRSKASWKGKQNNADFSAILNAYAPNVFVGYETTECSAKVLGFFDSDFKEITDANPNQEVWVLLEKTPFYAEGGGAIGDRGALFKDNGEVAIVLDTKNFFGLNFSLLEIKKALKKGDQVIAQVSDERFEIAKHHSATHLLQSALREVLGSHVSQAGSLVESKRLRFDFSHAKALNDEELEKVEDLVNAQIFKHLNSQVEHMPLNQAKDKGALALFSEKYAENVRVVSFKEASIELCGGIHVENTGLIGGFRIVKESGVSSGVRRIEAVCGKAFYQLAKEENKELKNAKTLLKNNDVIAGINKLKESVKNSQKAPVSMDLPVEKIHGVNLVVGVVEQGDIKEMIDRLKSKHERLLAMVFKKENERITLACGVKNAPIKANVWANEVAQILGGKGGGRGDFASAGGKDIENLQAALNLAKNTALKALEG

SEQ ID NO: 58925 - protein, 733 aa, Helicobacter pylori
MKKHILSLALGSLLVSTLSAEDDGFYTSVGYQIGEAAQMVTNTKGIQQLSDNYENLNNLLTRYSTLNTLIKLSADPSAINAVRENLGASAKNLIGDKANSPAYQAVLLAINAAVGFWNVVGYVTQCGGNANGQESTSSTTIFNNEPGYRSTSITCSLNGHKPGYYGPMSIENFKKLNEAYQILQTALKNGLPALKENNGKVSVTYTYTCSGQGNNNCSPSVNGTKTTTQTIDGKSVTTTISSKVVGSIASGNTSHVITNKLDGVPDSAQALLAQASTLINTINEACPYFHATNSSEANAPKFSTTTGKICGAFSEEISAIQKMITDAQELVNQTSVINSNEQSTPVGNNNGKPFNPFTDASFAQGMLANASAQAKMLNLAHQVGQAINPENLSENFKNFVTGFLATCNNKSTAGTGGTQGSAPGTVTTQTFASGCAYVEQTLTNLGNSIAHFGTQEQQIQQAENIADTLVNFKSRYSELGNTYNSITTALSKVPNAQSLQNVVSKKNNPYSPQGIETNYYLNQNSYNQIQTINQELGRNPFRKVGIVNSQTNNGAMNGIGIQVGYKQFFGQKRKWGARYYGFFDYNHAFIKSSFFNSASDVWTYGFGADALYNFINDKATNFLGKNNKLSLGLFGGIALAGTSWLNSEYVNLATVNNVYNAKMNVANFQFLFNMGVRMNLARSKKKGSDHAAQHGIELGLKIPTINTNYYSFMGAELKYRRLYSVYLNYVFAY

SEQ ID NO: 58926 - protein, 85 aa, Helicobacter pylori
MERKRYSKRYCKYTEAKISFIDYKDLDMLKHTLSERYKIMPRRLTGNSKKWQERVEVAIKRARHMALIPYIVDRKKVVDSPFKQH

SEQ ID NO: 58927 - protein, 179 aa, Helicobacter pylori
MFNKVIMVGRLTRNVELKYLPSGSAAATIGLATSRRFKKQDGTLGEEVCFIDARLFGRTAEIANQYLSKGSSVLIEGRLTYESWMDQTGKKNSRHTITADSLQFMDKKSDNPQANAMQDSIMHENSNNAYPANHNAPSQDPFNQAYAQNAYAKENLQAQPSKYQNSVPEINIDEEEIPF

SEQ ID NO: 58928 - protein, 142 aa, Helicobacter pylori
MRHYETMFILKPTLVEEEIKSKIEFYKEVITKHHGVIETSLDMGMRNLAYEIKKHKRGYYYVAYFKAEPSMIVELERLYRINEDVLRFIVIKYESKKEVEAWHALVDRANKKPSHAKEKHEKTEHTHSHHTEEAESVGSHSE

SEQ ID NO: 58929 - protein, 340 aa, Helicobacter pylori
MYRKDLDHYLKQRLPKAVFLYGEFDFFIHYYIQTISALFKCDNPDIETSLFYASDYEKSQIATLLEQDSLFGGSSLVVLKLDFALHKKFKENDINLFLKALERPSHNRLIIGLYNAKSDTTKYKYTSDAIVKFFQKSPLKDEAICARFFIPKTWESLKFLQERANFLHLDISGHLLNALFEINNEDLGVSFNDLDKLAVLNAPITLEDIQELSSNAGDMDLQKLILGLFLKKSALDIYDYLLKEGKKDADILRGLERYFYQLFLFFAHIKTTGLMDAKEVLGYAPPKEIAENYAKNALRLKEAGYKRVFEIFRLWHIQSMQGQKELGFLYLTSIQKIINP

SEQ ID NO: 58930 - protein, 263 aa, Helicobacter pylori
MKLKSFGVFGNPIKHSKSPLIHNACFLTFQKELRFLGHYHPILLPLESHIKSEFLHLGLSGANVTLPFKERAFQVCDKIKGIALECGAVNTLVLENDELVGYNTDALGFYLSLKQKNYQNALILGAGGSAKALACELKKQGLQVSVLNRSSRGLDFFQRLGCDCFMEPPKSAFDLIINATSASLHNELPLNKEVLKGYFKEGKLAYDLAYGFLTPFLSLAKELKTPFQDGKDMLIYQAALSFEKFSASQIPYSKAFEVMRSVF

SEQ ID NO: 58931 - protein, 594 aa, Helicobacter pylori
MVFKILGLWLGVFCFLEATPYLYLGEEPKYKDNFTHFEYANPNAKKGGVLRNDAIGTFDSLNPFALKGTKAEGLDLIYDTLMVQSLDEPFAEYPLIAKDAEVAKDNSYVIFTIDKRARFSNNAPILASDVKFSFDTIMKLGSPIYRQYYQDVKKAVVLDKHHVKFIFKTTENKELPLILGQLQIFSKKAFQEDYFEKNPLLIPVSSGPYVIASFDVGKKITYQRNPNYWARNLPSRKGQFNFDQIKFEYYKDETIALQAFLSGAYDWRLESTAKVWARGYVGKAMDNKEITKYLIAHKMPSGMQGFFFNTRREIFKDKRVREALFYAFDFEWANKNLFFSQYKRTTSFFSNSIYASPPLPSPEEKALLAPYEKSLDERVFKEPYVVPRTDGVDVLGYNLRENLKYAQKLLESTGFSYKNMRLVDKNNKPFSFTLLLNSPAFERLALAFAKNLRVLGIEMKIQRVDLSQYVNRIKSYDFDMIVGVIGQSSFPGNEQRFYFGSLSAKEKGTRNYAGISSKAVDDLIEKIINAKDYKEQLAAIQAMDRVLLWGFYVIPHFYLPNYRIAAYNYIGMPEISPSYGFSPYLWWIKEKDLQ

SEQ ID NO: 58932 - protein, 339 aa, Helicobacter pylori
MVTITLTKTTRNNMHKKRVFSGIQPTGQIHLGNYLGAIKHWVEMQDEYENLFCVVNSHAITLPIDPAFLKSQSYELVKLLLACGIDPKQSGLFIQSEVDEHPALAWLLNCQVSMGEMQRMTQFKDKSLKNPKSVNVGLFNYPILMASDILLYQSDLVPVGEDQKQHLELTRNIAEKFNRDFGNCFKVPEPLIAKVGARVMGLDDPKVKMSKSHQGANHAIFLLDEPDIIVKKIKKAATDSMGVIAFDEKREGIFNLLNIYMLLSNESPENIEERFKNKGYGDFKKELAEVMIQALKPIQERYKEISDDEVKAILNGGAEKARPLARATYQKAKELMGLI

SEQ ID NO: 58933 - protein, 185 aa, Helicobacter pylori
MLQAIYNETKDLMQKSIQALNRDFSTLRSAKVSVNILDHIKVDYYGTPTALNQVGSVMSLDATTLQISPWEKNLLKEIERSIQEANIGVNPNNDGETIKLFFPPMTSEQRKLIAKDAKAMGEKAKVAVRNIRQDANNQVKKLEKDKEISEDESKKAQEQIQKITDEAIKKIDESVKNKEDAILKV

SEQ ID NO: 58934 - protein, 201 aa, Helicobacter pylori
MDIKACYQNAKALLEGHFLLSSGFHSNYYLQSAKVLEDPKLAEQLALELAKQIQEAHLNIECVCSPAIGGILAGYELARALGVRFIFTERVDNTMALRRGFEVKKNEKILVCEDIITTGKSAMECAKVLEEKGAQIVAFGALANRGICKRAHSHLKAQEGACLPSHLPLFALEDFVFDMHKPSSCPLCATSVAIKPGSRGN

SEQ ID NO: 58935 - protein, 844 aa, Helicobacter pylori
MITMNINGKTIECQEGQSVLEAARSAGIYIPTICYLSGCSPTVACKMCMVEMDGKRVYSCNTKAKNNATILTNTPTLMDERKSIMQTYDVNHPLECGVCDKSGECELQDMTHLTGVEHQPYAVADDFKALDFWAKALYDPNLCIMCERCVTTCKDNVGENNLKATKADLHAPDKFKDSMSKDAFSVWSRKQKGIISFVGSVPCYDCGECIAVCPVGALSYKDFAYTANAWELKKIHSTCSHCSAGCLISYDVRHFDTLGEESKIFRVLNDFYHNPICGAGRFAFDVSSSPKGSANLKEAQNALKECEAVRIGGDITNEEAFLIERLRKELDFKIYNQEAYRFQQFLKVLGEIKRPSVEEIKTSHLVVTIGSSIKTENPLVRYAINNALKLNKASLIAMHPIKDNALANLCRSSFCITHEVGAEEILLGMLLKMLNIESAALKSLEDSKQNIVDEAALKALEEERKKALEQAEQGCSIGENKAENQEENKTEATTPKEENQEENKTEVKEEKIEVPTKTTYLLLEEAGINLETYEKILALLQKSNNTLLVVGEEIYSHKQAHNIAKMLRLLAQKSAIKLILIPPSANALGIASICQLSEEIFEHEKIVGIRAQGDFTINSDDRVFGKDAASKVDFILPSLNQLEGTITNIEGRVLPLKPALRFEGYDLSDIMQGFGFVEENLIECTHKLPTEAGFKAIEFDYLTNYFANDRVNHRGYLLGTSHFEKSAKECETIECEPIKPLKEKIAFNAYLKYPETQFNNATNKSENLQLKAGVYVSKAFLKKLNKEVGQNITLSKEEEELTGVLYLDESLDQEVFVISPSLLKNHSGFFREGVFDSVDLKEQA

SEQ ID NO: 58936 - protein, 612 aa, Helicobacter pylori
MQYSSLLSVVLFLPLIGAIYAGLFGAKAKALHVGVFNSLCVLVSFIGAVVLFIQAWHHQSYEKYLFDWIVVGNFKVGFSLMLDNINAVMIVVVTLVSFLVHVYSIGYMEHDAGFNRYFSYLSGFVFSMLVLVLSDNFLGLFIGWEGVGLCSYLLIGFWYHKTSANNASIEAFVMNRITDLGMLMGIILIFWNFGTLQYKEVFSMLNNTDYSMLFYISVFLFIGAMGKSAQFPMHTWLANAMEGPTPVSALIHAATMVTAGVYLVIRANPLYSAVFEVGYFIACLGAFVALFGASMALVNKDLKRIVAYSTLSQLGYMFVAAGLGAYAIALFHLFTHAFFKSLLFLGSGNVMHAMEDNLDITKMGALYKPMRITAVFMIIGSVALCGIYPFAGYFSKDKILEVAFGMHHHILWFALLIGAIFTAFYSFRLIMLVFFAPKQHEINHPHEAQNFMLLSMLPLGVLAVIAGFFEEPFFHFISQVIPSVGEYLVPLALLISITTIVVLLSIAYAIFKYKNGITSKKEGGFLYKLLLNQYYIPQLYQGIAKVFSAIASFLHQVVELKIIDAIVDAIGRSVFVIGRVFRISQDGNLTSMLRFMVAGVLILLAFVAFFGR

SEQ ID NO: 58937 - protein, 801 aa, Helicobacter pylori
MWLKSKIFLLMGLFSHSLNALSLTLTQGKEGGEDFSVLTLRHNKAFSCFYANEKPPSGIEASLSIIRAKRPIECVIDSIPKEGFTPLENAFFNITYSMHQQQFILHIKPKVMRRLTLFSFDRDYKKAIPLFVENDPKARMWQIIGYDQNIPFLSKKDNAQKGLNFPIVIKDAQTPIIQELDVNNKPLLTTKGYDLNAYLEAKKQMDSQAYFDALRTISRAFKNYPQTMFKKDLYLLEIIALGQLGIKKSLLIDIGTQWIKNYPTDPNIPEALYYVAKALDENNHYKQAMRYYKRILLEYKNSRYAPLAQMRLAIEAAEGSDLSNANMLFKEAFSNAKDKESASEIALNWAEAEINYQNFNNAKYLIDKVVQSNPDYISTHSESALDLLKLLKKNQMNASAIEIAHLLLNQDDDLKAKEQALYDLGALYARIKDFKNAHLYNLQYLQDHAELDKASVVRARDEKALFSMEGNTQEKIAHYDKIIQNFPNSNEALKALELKAQLLFENKRYAEVLSMQKNLPKDSPLIQKTLNVLAKTPLENHRCEEALKYLSQITTFEFSPKEEIQAFDCLYFASLKEKAQIIALNAFKTAKAPSEKLIWLYRLGRNYYRLGDFKNSTLASKDALILAQSLNKKEFYDIAFVLFSDYMQNNEKELALHLYAFLEKHFKGDKRMALVYFKLLENEKDPKSVKIYATSLLKLQDAYKDYSYTPFSEFALIDAYRTTKDYLKALETLDKLLNRRLSLEDHQKALYLQSSLLDLTHQKAKSRASLEKCVQLKQKDQTNAWQNLCEQGLNLFKNKES

SEQ ID NO: 58938 - protein, 393 aa, Helicobacter pylori
MNKKAYFGEFGGSFVSELLVPALRELEQAFDACLKDEKFQKEYFRLLKDFVGRPSPLTLCQNIVSNPKVKLYLKREDLIHGGAHKTNQALGQALLAKKMGKTRIIAETGAGQHGVATAIACALLNLKCVVFMGSKDIKRQEMNVFRMHLLGAEVREVNSGSATLKDAVNEALRDWASSYKDTHYLLGTAAGPHPYPTMVKTFQKMIGDEVKSQILEKENRLPDYVIACVGGGSNAIGIFSAFLNDKEVKLIGVEPAGLGLETNKHGATLNKGRVGILHGNKTYLLQDDEGQIAESHSISAGLDYPGVGPEHSYLKESGRAVYESASDAEALEAFKLLCQKEGIIPALESSHALAYALKLAQKCEEESIIVVNLSGRGDKDLSTVYNALKGGLK

SEQ ID NO: 58939 - protein, 452 aa, Helicobacter pylori
MPSVLENILKDKLLEVSDLKKNHALPININPSDRDFKKALLEKKTSFILECKKASPSKGLIRKDFDLLKITKTYEKFASCISVLADSKYFLGSYENIKIVSQHSTKPILCKDFIIDAFQIKLARMMGANAVLLMLSVLDDKNYLELFNLAKSLNMSVLTEVSNQQEIEHLLKLQYDIIGINNRDLHTLKTDINHTLKLRPLLPKDALIISESGIYSHAQIKALAPYVNGFLVGSSLMKEKDLKKACIKLILGENKVCGLTRIKDAKAVYKNHFIYGGLIFEKSSPRYIKPKEALKITKAVKKLDFVGVFVKDSIKKIQKIVKKLDLKAVQLYGYSQKEIAQLKKALPKTCAIWQVISVMSAKDLVPKTKEASLILYDTKGDKMGGNGVSFDWEILENVKTPFMLAGGLNLDNIQKALKVEALGLDFNSGLEISPGIKNKDKIKRLARILREY

SEQ ID NO: 58940 - protein, 182 aa, Helicobacter pylori
MKKALISTLFGVSLAFAKPYTIDKANSSVWFEVKHFTFNETRGAFDNFDGKIDLEPNTKMLSVFEGNIDVKSVNTRDRKRDNHLKTADFFDVVKYPKGSFKMTKYEDGKIYGDLTLRGVTKPVVLEAKIQAPLQNPMNKKEFMVLQAEGKINRKDFGIGKTFSDAVVGDEVKIELKLEAYAQ

SEQ ID NO: 58941 - protein, 217 aa, Helicobacter pylori
MQVSQYLYQNVQSIWGDCISHPFVQGIGRGTLERDKFRFYIIQDYLFLLEYAKVFALGVVKACDEAVMREFSNAIQDILNNEMSIHNHYIRGLQITQKELQNARPTLANKSYTSYMLAEGFKGSIKEVAAAVLSCGWSYLVIAQNLSQIPNALEHAFYGHWIKGYSSKEFQACVNWNINLLDSLTLTSSKQEIEKLKDIFITTSEYEYLFWDMAYQS

SEQ ID NO: 58942 - protein, 116 aa, Helicobacter pylori
MRHKHGYRKLGRTSSHRKALLKNLAIALIEHNKIETGIYKAKELRSYIEKLTTAARVGDFNAHRHVFAYLQNKEATHKLVTEIAPKYAQRNGGYTRIQRTTFRRGDASTLATIEFV

SEQ ID NO: 58943 - protein, 344 aa, Helicobacter pylori
MKVIKTAPLIPSEIKVLEKEGNRVKISLAPFEFGYAVTLAHPIRRLLLLSSVGYAPVGLKIEGVHHEFDSLRGVTEDVSLFIMNLKNIRFIAKALVGQDSSLENQSVVVDYSFKGPMELRARDLNSEQIEIVNPEMPLATINEDAQLNFSLIIYKGMGYVPSENTRELMPEGYMPLDGSFTPIKKVVYEIENVLVEGDPNYEKIIFDIETDGQIDPYKAFLSAVKVMSKQLGVFGERPIANTEYSGDYAQRDDAKDLSAKIESMNLSARCFNCLDKIGIKYVGELVLMSEEELKGVKNMGKKSYDEIAEKLNDLGYPVGTELSPEQRESLKKRLEKLEDKGGND

SEQ ID NO: 58944 - protein, 208 aa, Helicobacter pylori
MARYRGAVERLERRFGVSLALKGERRLSGKSALDKRAYGPGQHGQRRAKTSDYGLQLKEKQKAKMMYGISEKQFRSIFVEANRLDGNTGENLIRLIERRLDNVVYRMGFATTRSSARQLVTHGHVLVDGKRLDIPSYFVRSGQKIEIKEKTKSNSQVVRAMELTAQTGIVPWIDVEKDKKYGIFTRYPEREEVVVPIEERLIVELYSK

SEQ ID NO: 58945 - protein, 131 aa, Helicobacter pylori
MAKRNVTAKKKVVKKNIARGVVYISATFNNTNITITDEMGNVICWSTAGGLGFKGSKKSTPYAAQQAVESALSKAKEHGVKEVGIKVQGPGSGRETAIKSVGATEGIKVLWIKDITPLPHNGCRPPKRRRV

SEQ ID NO: 58946 - protein, 120 aa, Helicobacter pylori
MARIAGVDLPKKKRVEYALTYIYGIGLKSSREILEAVGISFDKRVHELSEDEVSSIAKKIQQSYLVEGDLRKKVQMDIKSLMDLGNYRGIRHRKGLPVRGQTTKNNARTRKGKKKTVGSK

SEQ ID NO: 58947 - protein, 37 aa, Helicobacter pylori
MKVRPSVKKMCDNCKIIKRRGVIRVICATPKHKQRQG

SEQ ID NO: 58948 - protein, 72 aa, Helicobacter pylori
MARDDVIEVDGKVIEALPNATFKVELDNKHVVLCRISGKMRMHYIRIALGDRVKLELTPYSLDKGRITFRYK

SEQ ID NO: 58949 - protein, 420 aa, Helicobacter pylori
MNKAIASKILITLGFLFLYRVLAYIPIPGVDLAAIKAFFDSNSNNALGLFNMFSGNAVSRLSIISLGIMPYITSSIIMELLSATFPNLAKMKKERDGMQKYMQIVRYLTILITLIQAVSVSVGLRSISGGANGAIMIDMQVFMIVSAFSMLTGTMLLMWIGEQITQRGVGNGISLIIFAGIVSGIPSAISGTFNLVNTGVINILMLIGIVLIVLATIFAIIYVELAERRIPISYARKVVMQNQNKRIMNYIPIKLNLSGVIPPIFASALLVFPSTILQQATSNKTLQAVADFLSPQGYAYNILMFLLIIFFAYFYSSIVFNSKDIADNLRRNGGYIPGLRPGEGTSSFLNSVASKLTLWGSLYLALISTVPWILVKAMGVPFYFGGTAVLIVVQVAIDTMKKIEAQIYMSKYKTLSAVGF

SEQ ID NO: 58950 - protein, 135 aa, Helicobacter pylori
MIMGLENLKPAKGSVKKIKRVGRGQGSGMGKTATRGGKGQTARTGYKAKRGFEGGQQPLQRRLPKIGFRTKDSHIYSINVEKNEAIKNLEEITFSSLRALHHFPLYIEGVKLIGKDAKNLASKIKDERIKTSGQK

SEQ ID NO: 58951 - protein, 153 aa, Helicobacter pylori
MTERKGMEEINREEFQEVVVNIGRVTKVVKGGRRFRFNALVVVGNKNGLVGFGLGKAKEVPDAIKKAVDDAFKNLIHVTIKGTTIAHDIEHKYNASRILLKPASEGTGVIAGGSTRPIVELAGIKDILTKSLGSNNPYNVVRATFDALAKIKA

SEQ ID NO: 58952 - protein, 119 aa, Helicobacter pylori
MMNAKALYKKKALRDRRKLRIKSKLLGDALRPRVSVFRSNRYFYAQAIDDVKQSTITHIDGRKMGFKNTQEDAKKLGALFAEELKKAGIERAVYDRNGYLYHGVVAAFAESLRENGIAL

SEQ ID NO: 58953 - protein, 178 aa, Helicobacter pylori
MSRIGKRIIEIPSSVQASVEGSKLLFKNSKEKHELETHNRVKITLENNQLSFQPVGEDAQSRAYWGTYGALANNIVIGLSTGFSKTLEVNGVGYKVALGNKTLDLSLGFSHPVKYPIPAGIEMVVEKNTITIKGSDKQKVGQVAAEIRSFRPPEPYKGKGVKYSDEVIIRKAGKTAKK

SEQ ID NO: 58954 - protein, 131 aa, Helicobacter pylori
MVNDIIADSLTRLRNASMRRLEFTQLYYAKIVVSILEIFKEKGFIKDFNVKDKDKKQSVYVQLAYDEKGHSKISEVKRLSKPGRRVYKQKNELKRFKNGYGVIVVSTSKGVITNEEAYRQNVGGEVLCSIW

SEQ ID NO: 58955 - protein, 61 aa, Helicobacter pylori
MAKKSMIAKAQRKPKFQVRAYTRCRICGRPHSVYRDFGLCRVCLRKMGSEGLIPGLRKASW

SEQ ID NO: 58956 - protein, 181 aa, Helicobacter pylori
MFGLKQFYQSEVRTKLAQELDIKNPMLLPKLEKIVISVGAGAHAKDMKIMQNIAQTISLIAGQKAVITKAKKSVAGFKIREGMAVGAKVTLRNKRMYNFLEKLIVISLPRVKDFRGISRNGFDGCGNYTFGINEQLIFPEVVYDDIMVSHGMNITMVTSTDNDKEAFKLLELLGLPFAKVR

SEQ ID NO: 58957 - protein, 73 aa, Helicobacter pylori
MKSEIKKNDIVKVIAGDDKGKVAKVLAVLPKTSQVVVEGCKVVKKAIKPTDDNPKGGFIHKEKPMHISNVKKA

SEQ ID NO: 58958 - protein, 122 aa, Helicobacter pylori
MIQSFTRLNVADNSGAKEIMCIKVLGGSHKRYASVGSVIVASVKKAIPNGKVKRGQVVKAVVVRTKKEIQRKNGSLVRFDDNAAVILDAKKDPVGTRIFGPVSREVRYANFMKIISLAPEVV

SEQ ID NO: 58959 - protein, 86 aa, Helicobacter pylori
MNTKEPHKRLVQGKVISKFAEKSAVILVERKVVHEKYRKIVKKFKKYTIHDENNQVKVGDFVSAIECRPLSKTKSFTLKEILVVGV

SEQ ID NO: 58960 - protein, 66 aa, Helicobacter pylori
MKYTELKDKSIKELEELLHAKKAELFELRVKLKAMQLSNPNEIKKARRNIARINTAINAHYSSSVE

SEQ ID NO: 58961 - protein, 141 aa, Helicobacter pylori
MLMPKRTKYRKQMKGRNRGKAHRGNSIAFGDIAIKAIEHGRIDSRQIESARVAMTRHIKRAGKVWIRVFPDKPLTAKPLETRMGKGKGSVEKWVMNIKPGRIVYEMLGIEEGLAREALALAQSKLPFKTKIVTCESENEIY

SEQ ID NO: 58962 - protein, 234 aa, Helicobacter pylori
MGQKVNPVGLRLGINRNWTSRWFPSARTAPSNIDEDNKIRKFLKKELYYAGVSEIVIERAAKKLRVTVVAARPGLIIGKKGVDIEKVKDGLKTLIKKEVSINIKEVKHPQADAQLAAENVATQLEKRVAFRRAMKKVMQAALKSGAKGIKVCVSGRLAGAEIARTEWYMEGRVPLHTLRAKIDYGFAEAMTVYGIIGVKVWIFKGEVLQKGIQFEKKEEAKEEREPRRSRRGRQ

SEQ ID NO: 58963 - protein, 122 aa, Helicobacter pylori
MSKALLRFVRLSPTKARLIARQIQGMNAELAIASLEFTPNKAARVLSKVVASAVANGSLDAKSALIVSCRVDAGPVLRRSIPRAKGRATAIRKPTSHVFVEVAEGKEMKSSKSHKKNQAEGK

SEQ ID NO: 58964 - protein, 93 aa, Helicobacter pylori
MSRSIKKGPFIDDHLMKKTLKAKEGKDNRPIKTWSRRSTILPEMIGFTYNVHNGRVFIPVYITENHVGYKLGEFAPTRTFKGHKGSVQKKIGK

SEQ ID NO: 58965 - protein, 276 aa, Helicobacter pylori
MAIKTYKPYTPSRRFMSVLDSKDITAKSSVKGLLTKLKATAGRNNNGRITSRHKERGAKKLYRIIDFKRNKYNIEGKVAAIEYDPYRNARIALVVYPDGDKRYILQPSGLKVGDSVIAAEGGLDIKVGFAMKLKNIPIGTVVHNIEMHPGAGGQLARSAGMSAQIMGRENKYTIIRMPSSEMRYILSECMASVGVVGNEDFINVSIGKAGRNRHRGIRPQTRGSAMNPVDHPHGGGEGKTGTSGHPVSPWGTPAKGYKTRKKKASDKLIISRKKHK

SEQ ID NO: 58966 - protein, 93 aa, Helicobacter pylori
MADIMDIKSILYTEKSLGLQEKGVLVVQTAQNVTKNQLKEVFKTYFGFEPLKINSLKQEGKVKRFRGKLGQRKSFKKFYVKVPEGASIAALGA

SEQ ID NO: 58967 - protein, 215 aa, Helicobacter pylori
MSKAIVLDSHLKEKGSVELPKRYESINSHNLYLYVKHYLSSARANTAKSKNRAEVSGGGRKPWAQKGGGRARAGSITSPVFVGGGVSHGATNNRNYNLKINKKQKRLALEYALEEKAQANKLFVVEKIAIKGVVEDNKRKHLTKEANQMFQALEQRDTLFVCMNMDEYTELAFSNLKKCLIVDVSELNAYLLAAFSSVVMEEAAFQHVVQDKTEE

SEQ ID NO: 58968 - protein, 191 aa, Helicobacter pylori
MEFLVQKIGMSRTIDANSTPVTLLKVLQAKVCQLENGKALVAYAMHKKHNKAIEGQQKKYQLSKEFNHFATLKASQQKELGDLDLSALETLKRVKASFKTKGRGFAGVMKRWNFQGGPAAHGSRFHRRPGSIGNREWPGRVQKGRKMAGHYGNELVTCQNEVLSFDKESMVLVLKGSVAGFSGAYGRIRAV

SEQ ID NO: 58969 - protein, 104 aa, Helicobacter pylori
MEKIRLKLKAYDHRVLDRSVVAIVEAVKRSGSEIRGPIPLPTKNKRYTVLRSPHVNKDSREQFEIRVYSRLIDIISATPETVDSLMKLDLAPEVDVEVTSMETK

SEQ ID NO: 58970 - protein, 209 aa, Helicobacter pylori
MGCVSMTLGIDEAGRGCLAGSLFVAGVACNEKTALEFLKMGLKDSKKLSLKKRFFLEYKIKTHGEVGFFVVKKSANEIDSLGLGACLKLAVQEILENGCSLVDEIKIDGNTAFGLNKRYPHIQTIIKGDETIAQIAMASVLAKAFKDREMLELHALFKEYGWDKNCGYGTKQHIEAIIKLGATPFHRHSFTLKNRILNPKLLEVEQRLI

SEQ ID NO: 58971 - protein, 360 aa, Helicobacter pylori
MNGFCARLRAITHNERLKMKIAVLLSGGVDSSYSAYSLKEQGHELVGIYLKLHASEKKHDLYIKNAQKACEFLGIPLEVLDFQKDFKSAVYDEFINAYEEGQTPNPCALCNPLMKFGLALDHALKLGCEKIATGHYARVKEIDKISYIQEALDKTKDQSYFLYALEHEVIAKLVFPLGDLLKKDIKPLALNAMPFLGTLETYKESQEICFVEKSYIDTLKKHVEVEKEGVVKNLQGEVIGTHKGYMQYTIGKRKGFSIKGALEPHFVVGIDAKKNELVVGKKEDLATHSLKAKNKSLMKDFKDGEYFIKARYRSVPAKAHVSLKDEVIEVGFKEPFYGVAKGQALVVYKDDILLGGGVIV

SEQ ID NO: 58972 - protein, 285 aa, Helicobacter pylori
MKISPSPRKLSKVSTSVSFLISFALYAIGFGYFLLREDAPEPLAQAGTTKVTMSLASINTNSNTKTNAESAKPKEEPKEKPKKEEPKKEEPKKEVTKPKPKPKPKPKPKPKPKPEPKPEPKPEPKPEPKVEEVKKEEPKEEPKKEEAKEEAKEKSAPKQVTTKDIVKEKDKQEESNKTSEGATSEAQAYNPGVSNEFLMKIQTAISSKNRYPKMAQIRGIEGEVLVSFTINADGSVTDIKVVKSNTTDILNHAALEAIKSAAHLFPKPEETVHLKIPIAYSLKED

SEQ ID NO: 58973 - protein, 402 aa, Helicobacter pylori
MLAKMSFMQNVKNIQEVEVSHKRVLIRVDFNVPLDENLNITDDTRIRESLPTIQYCIDNKAKDIILVSHLGRPKGVEEKLSLKPFLKRLERLLNHEVVFSQNIVQLKQALNENAPTRIFLLENIRFLRGEEENDENLAKDLASLCDVFVNDAFGTSHRKHASTYGTAKFAPIKVSGFLLKKEIDSFYQAFNHPLRPLLLIVGGAKVSSKLTLLKNILDLIDKLIIAGAMSNTFLKALGYDVQDSSVEDALINDALELLQSAKEKKVKVYLPIDAVTTDDILNPKHIKISPVQDIEPKHKIADIGPASLKLFSEVIESAPTILWNGPLGVHEKQEFARGTTFLAHKIADTYAFSLIGGGDTIDAINRAGEKDNMSFISTGGGASLELLEGKILPCFEVLDKRH

SEQ ID NO: 58974 - protein, 330 aa, Helicobacter pylori
MPIRIAINGTGRIGLCAIRVASQRKDIEIVAINSTAELETLLHLIRHDSVHGHFEAQLNADRTLNIGHSKNILVLSERDINKLDFSAANAEIIIECTGKFNSLEASSAHLKNSVKKVIISAPAQNTPTFVYGVNHKNYHNESVISNASCTTNASAPLLKILDEAFKVENALLTTIHSYTNDQNLLDTKHKDIRRARAAGLNLIPTSTGVSKAISLVLPHLGPKVTGLAIRVPTPNVSLVDLSLNFKKSVSKASVQHALKDACKHAFKGVVSIDEERLVSSDFISSPFSAIVIDDQIMTIGEKNAKVLAWYDNEMGYSERLIDMAQYIAQN

SEQ ID NO: 58975 - protein, 240 aa, Helicobacter pylori
MKSNKKSNRLRAIYRALVIAIGLAVIIVFNYFNRKNNNARSSRRACSCFFSLTGVNLEKIGTFDTDAKLIVLNHQSLLDIIYLEAYHPRNICWIAKKELGEIPFYGHALTDTGMILIDREDKKGIVSLLKACKEKLDQNRPLVIFPEGTRGKGGEKFLPFKQGAKIIAEKFQLKIQPMVLINSIKIFNSKPLEAYKARTRLVMLESYTPDFNSPTWYEELQERMQKEYLKHYHELNPSEQ

SEQ ID NO: 58976 - protein, 290 aa, Helicobacter pylori
MDYQTFNEIFNRFVFGTSKAKLLENIAENPERYLGIFRPTKPKTKLLQNLLTSHEIKFGDAFEYLIEQYLKEHNFSPLSKKIPYYNKNKEKRESLELDQLAKKDNTYYFIEQKMRDDHDSAKKRGQIDNFERKLEALIHRYGENIQGYFYFIDESLNKNQNYYKEELQKLSVGYGVPLRLCYGKELFENLNILQVWDEVLNHLARWREILPDLPSLNFDENPLESFREIKDLAPSVYRKLLDNDEIFNLVLILFPEQKALKMLAEHFKRQNKTIYQQLASKLEEKLLSLR

SEQ ID NO: 58977 - protein, 835 aa, Helicobacter pylori
MLKEYLESIKDLTPEKNELTHRPSLYNLLNQLKNHFNKEFKIEHEPERKQGSQPDFRVSYQGINIGYIENKRAGTNLSQLLKSEKSDQILKYLELNPNLMLTDYLNFMWVGKDENNEPLIKKEISVASLDELSKPLKPNPQTERDLIELFKSFFNHEAAPITNAKDFATHLSPRTKYLKDALIKYQEKAQVSSIFNNFKEYLYEELSFEDFSDALAQTLTYSLFLAKLNHPSEKINLDNVRSLIPKNFAVIREMADFLKKLDEIKEIQWLLNEILSSINHVDMDSILKDLNDDKDPYLHFYETFLSTYDPKLRESKGVYYTPDSVVKFIINALDSLLKTHFKDAPLGLKSALDNENIKLLDFATGTGTFLLEAFRKALETRKTSDGGTSTKEDKYQNLLKQFYGFEYLIAPYAIAHLNLSQAFKEEFKKPLKENDALQIILTNTLIQPSEIIAYRGLSPIFEKELSNAQEIKKNENILIITGNPPYSGASENKGLFEWEVKATYGIDPKFQTIEIEKNVKLADKIQTLLSSVQIQKQSGSKNDLKKLKSLHSKYKLQDEKNPKWLLDDYVKFMRFAQNKIESLGHGLFGFISNNAFLDNPTFRGLRRSLLECYDELYILNLHGNARKKEKTPQGAKDENVFNIKQGVSINLFVKNPQVVKQKIHYYDVYGQRTEKYAFLAQNDLNSIEWLEIAPRGPFYLLLPLETPLLDEYEQGFSVQEMFQIGSTGICSQRDHVVFHKDKESLLKLLKDFSTLEPSELRRIYNIKKDGRDWRLEYAIKDVKANANNLEEYIVSCQYRPFDFYYTYYTGKSKSFIAYPRGEVFKHMLPPPPNKP

SEQ ID NO: 58978 - protein, 488 aa, Helicobacter pylori
MDHLKHLQQLQNIERIVLSGIVLANHKIEEVHSVLEPSDFYYPPNGLFFEIALKLHEEDCPIDENFIRQKMPKDKQIKEEDLVAIFAASPIDNIEAYVEEIKNASIKRKLFGLANTIREQALESAQKSSDILGAVEREVYALLNGSTIEGFRNIKEVLESAMDLITENQRKGSLEVTGIPTGFVQLDNYTSGFNKGSLVIIGARPSMGKTSLMMNMVLSALNDDRGVAVFSLEMSAEQLALRALSDLTSINMHDLESGRLDDDQWENLAKCFDHLSQKKLFFYDKSYVRIEQIRLQLRKLKSQHKELGIAFIDYLQLMSGSKATKERHEQIAEISRELKTLARELEIPIIALVQLNRSLENRDDKRPILSDIKDSGGIEQDADIVLFLYRGYIYQMRAEDNKIDKLKKEGKIEEAQELYLKVNEERRIHKQNGSIEEAEIIVAKNRNGATGTVYTRFNAPFTRYEDMPIDSHLEEGQETKVDYDIVTT

SEQ ID NO: 58979 - protein, 397 aa, Helicobacter pylori
MAIALTHYEKKSLKLFLGIYLGSSFVLMLVISVLAFNYEKNEKIKMIRMDMDKMASKIASEVIALHMQTHGDYQNALNALISRYKDASIALFDSKKRVLYSNIPESANLIKNHKEAGFFSFRGEYYLLSDETFAHLGVAKMLFKNSKPLHFSSLYRNIVLVFVVAFLCVIGVSVFLGRLFLKPIRNEITRIDHFLKNTTHELNTPMSALVLSLKTLEDNQQHRRIKIAIQRMSFLYRSLSYLVMQDIERESFVLLDLKALIIKENTLFSEMIDYHKLEFKSDLVEVELKAKEQDFISLYSNLLMNAIKYSVMNGYIHIELTHAFLKVKNLGYEIPKDKITELSVRYVRFNSGVLGYGIGLGLVKKVCEKYKMRLEIHSEPSLKGSFYENSFCVQFQG

SEQ ID NO: 58980 - protein, 347 aa, Helicobacter pylori
MIFSKLIGLFSHDIAIDLGTANTIVLVKGQGIIINEPSIVAVRMGLFDSKAYDILAVGSEAKEMLGKTPNSIRAIRPMKDGVIADYDITAKMIRYFIEKVHKRKTWIRPRIMVCVPYGLTSVERNAVKESTLSAGAREVFLIEEPMAAAIGAGLPVKEPQGSLIVDIGGGTTEIGVISLGGLVISKSIRVAGDKLDQSIVEYIRKKFNLLIGERTGEEIKIEIGCAIKLDPPLTMEVSGRDQVSGLLHTIELSSDDVFEAIKDQVREISSALRSVLEEVKPDLAKDIVQNGVVLTGGGALIKGLDKYLSDMVKLPVYVGDEPLLAVAKGTGEAIQDLDLLSRVGFSE

SEQ ID NO: 58981 - protein, 446 aa, Helicobacter pylori
MNETLYCSFCKKPESRDPKKRRIIFASNLNKDVCVCEYCIDVMHGELHKYDNSLLALKRDRLRRMESSAYEEEFLLSYIPAPKELKAVLDNYVIGQEQAKKVFSVAVYNHYKRLSFKEKLKKQDNQDSNVELEHLEEVELSKSNILLIGPTGSGKTLMAQTLAKHLDIPIAISDATSLTEAGYVGEDVENILTRLLQASDWNVQKAQKGIVFIDEIDKISRLSENRSITRDVSGEGVQQALLKIVEGSLVNIPPKGGRKHPEGNFIQIDTSDILFICAGAFDGLAEIIKKRTTQNVLGFTQEKMSKKEQEAILHLVQTHDLVTYGLIPELIGRLPVLSTLDSISLEAMVDILQKPKNALIKQYQQLFKMDEVDLIFEEEAIKEIAQLALERKTGARGLRAIIEDFCLDIMFDLPKLKGSEVRITKDCVLKQAEPLIIAKTHSKILP

SEQ ID NO: 58982 - protein, 159 aa, Helicobacter pylori
MEQSHQNLQSQFFIEHILQILPHRYPMLLVDRIIELQANKKIVAYKNITFNEDVFNGHFPNKPIFPGVLIVEGMAQTGGFLAFTSLWGFDPEIAKTKIVYFMTIDKVKFRIPVTPGDRLEYHLEVLKHKGMIWQVGGTAQVDGKVVAEAELKAMIAERD

SEQ ID NO: 58983 - protein, 835 aa, Helicobacter pylori
MTEDFPKILPLLVEEDTFLYPFMIAPIFLQNNASIKAVAYAKNNKSLVFIACQKDKLNDNEAPYYDVGVIGSVMREANMPNGRVKLLFNGIAKGRILEPAKENEQGFLEAQISPIEYLEYDKENIQAIVEVLKEKVITLANVSSLFPPDLIKALEDNDDPNRIADLIAAALHLKKDQAYSLFANNNTEQRLLDLIDIVIEETKTQKLQKEIKSKVHQKMEQTNKEYFLKEQLKQIQKELGTDKQRDEDLNQYYQKLESIKPFLKEEAFKEIKKQIDRLSRTHADSSDSATLQNYIETMLDVPFGQYGKKALDIKHVREQLDKDHYSLKRPKERIVEYFATMQLLEMRRKKKPEKKDKTKGTILCFYGPPGVGKTSLANSIAKAIERPLVRIALGGLEDVNELRGHRRTYIGSMPGRIVQGLIEAKKMNPVMVLDEIDKVDRSVRGDPASALLEILDPEQNTAFRDHYANFSIDLSQVIFIATANNIDRIPAPLRDRMEFISVSSYTPNEKEEIAKNYLIPQELEKHALKPSEVEISHECLKLIIEKYTREAGVRDLRRQIATIMRKVALKYLEDNPHQKGRTKKGKNEKSEDQKSEDQKSENQKSENKDFCVSITPNNLKEYLERMVFEIDPIDEENKIGIVNGLAWTPVGGDVLKIEVLKIRGKGELKLTGSLGDVMKESAIIAFSVVKVLLDNETLKVPKIPSETDAEGKKKKKVLKVYNAYDLHLHVPEGATPKDGPSAGIAMASVMASILCDRATRSEVAMTGELTLSGEVLPIGGLKEKLIAAFKAGIKTALIPVKNYERDLDEIPAEVRENLNIVAVKNIAEVLEKTLL

SEQ ID NO: 58984 - protein, 160 aa, Helicobacter pylori
MFLASGVILVILKEIATTNQGFQSLIPLEKINNEFLYYLILTLKNKLLKLASGSTFLEVSPNKIKNLLIPLPPLNEQIAIANILSDLDRYLYNLDALILKKESVKKALSFELLSQRKRLKGFNQAWQRVRLGDIANYLMNPSKIARFLGGCKKRLNSFAR

SEQ ID NO: 58985 - protein, 435 aa, Helicobacter pylori
MKFFLLKKFSEFLNAQTHFSLKRLNASSFLLETFSKEKHAFVVDLSAPYIGLSKKPPESVLKNTLALDFCLNKFTRNAKILQANIIDNDRILEINGAKDLAYKSENFILRLEMIPKKANLMILDKEKCVIEAFRFNDRVAKNDILGALPPNIYEHQEEDLDFKGLLDILEKDFLFYQHKELEHKKNQIIKRLNAQKERLKEKLEKLEDPKNLQLEAKELQTQASLLLTYQHLIHKHESRVVLKDFEDKERAIEIDKSMPLNAFINKKFTLSKKKKQKSQFLYLEEENLKEKIAFKENQINYVKGAQEESVLEMFMPSKNSKIKRPMSGYEVLYYKDFKIGLGKNQKENIKLLQDARANDLWMHVRNIPGSHLIVFCQKNAPKDDVIMELAKMLIKMQKDAFNSYEIDYTQRKFVKIIKGANVIYSKYRTISLKDT

SEQ ID NO: 58986 - protein, 284 aa, Helicobacter pylori
MKDSLQTIGVFVRPTHYQNPLFEKLEQAKEWVLKLLEDEGFESFMIDSLDGAKDARLIEKADAFLCLGGDGTILGALRMTHSYNKPCFGVRIGNLGFLSAVELNGLKDFLQDFKQDRIKLEEHLALEGRIGKTSFYAINEIVIAKKKALGVLDIKAYAGHTPFNTYKGDGLIIATPLGSTAYNLSAHGPIVHALSQSYILTPLCDFSLTQRPLVLGAEFCLNFCAHEDALVVIDGQATYDLKANQPLYIQKSPTTTKLLQKNSRDYFKVLKEKLLWGESPSKKR

SEQ ID NO: 58987 - protein, 380 aa, Helicobacter pylori
MTIGLVKESMDLESRVALVPDDVALIVQKGVEVLVQNSAGANSGYSNEAYESVGAKIVDSKTAWGQDLVVKCKEPLEHEYPLLKEKATLFSYLDLAYQKSLCEMFIDKKITSICTETIAGPKNDYPILAPMSVVAGRLAAHLVQHYLLALEHVKGFMGKGVMLGGLSGAQRAKIVVVGGGVVGMESAKVLSQMGAKVTILELDYAKLQNHPYYHLYDLEVLSVNEANIIQALNGAVGLVGAVLVTASQTPKVILRKHLKYMQKQGVVIDVACDLGGCIETIHQTSHSNPVYVEEDLLHYGVPNMPGIVAKTSSTAYSHASVPYLLYYLEHGLKGFLTANTKIVANTLGGLSAYNGYITQEGIAKAFNLAFKSPLEILKEL

SEQ ID NO: 58988 - protein, 842 aa, Helicobacter pylori
MLHKKVLLALTASLICQESLFAKEKDYTLGKVSTAGKKDRSDYSGQVNLGYSGITAPKSWQDEEVKKYTGSRTVISNKALTQQANQSIEEALQNVPGLQIRNATGVGAMPTIQIRGFGAGGSGHSDATLMLVNGIPVYMAPYAHIELDIFPVTFQAIDRIDVIKGGGSVQYGPNTYGGIVNIITKPIPNQWENQAAERITYWAKARNAGFAAPPDKTGDPSFIKSLGNNLLYNTYVRSGGMINKHVGIQAQANWVRGQGFRDNSPSNISNYWLDGVYDINENNGIKAYYQYYDFAIAQPGSLSEQDYKINRFANLRPLNQKGGRSQRFGAVYENRFGDLDKVGGTFSFTYYGQLMTRDFQVSSSYNSANMVTCFSEAACRAAGLPAGYNLAVPYYATNYNGWAEVENPVRSINNAFEPKVNLIVNTGKVKQTFIMGLRFMTTTFLQRQYLNTNECATKTSGEGAGFLCEGANVMSGWKPHIKHGVYRNWNNWRNNYTAVYLSDRIEAWDGRFFIVPGLRYAFVQYNNENASNWMQIPEKDLRKIKHMNNWMPSTNIGFIPVQGDHNVLTYFNYQRSFVPPQLDVLSYGGAEYFTQHFDTVEAGARYTYKDKFSFNADYFRIWARDFATGQYSVYTSGPMKGNVRPINGYSQGVELELYYRPIRGLQFHAAFNYIDTRVTSHGPLTDLNGDVLKGTSYNKHFPFVSPFQFILDARYNWRKTTIGISSYFYSRAYSGISNSAAGGYYGMQYYSGGNNYESVLNSGYQCEAWCMTQHEGLLPWYWVWNIQVSQIFWENGRHRVTGSLQINNIFNMKYYFTGIGSSPAGLQPAPGRSVTAYLNYTF

SEQ ID NO: 58989 - protein, 282 aa, Helicobacter pylori
MQEIFLCSISNVRSGDCKEDCAYCTQSSHHQGAIKRYKFKDEKVVLQEARALRQLGALGFCLVTSGRELDDEKCEYIAKLAKAINQEELGLHLIACCGRADLEQLEFLRDAGIHSYNHNLETSQNFFPKICSTHTWEERFITCENALRAGLGLCSGGIFGLNESWEDRIEMLRALASLSPHTTPINFFIKNPVLPIDAETLSADEALECVLLAKEFLPNARLMVAGGREVVFKDNDKKEAKLFEYGINAVVLGDYLTTKGKAPKKDIEKLLSYGLTMATSCH

SEQ ID NO: 58990 - protein, 259 aa, Helicobacter pylori
MLETTIDFSRYSSVKIGTPLKVSVLENDDEISQEHQIIGLANNLLIAPSAKNLALLGKNYDYICDKGECVEIGGAANASKIFNYFRANDLEGLEFLGQLPGTLGALVKMNAGMKEFEIKNVLESACINNQWLEKEALGLGYRSSGFSGVVLRARFKKTHGFREGVLKACQSMRKSHPKLPNFGSCFKNPPNDHAGRLLEGVGLRGYCLKRVGFAKEHANFLVNLGGAEFEEALDLIELAKARVLQEYGIHLEEEVKILR

SEQ ID NO: 58991 - protein, 920 aa, Helicobacter pylori
MEEYKDTLNLNTTTFSMKGNLSVNEPKTYAKWQEQQAFKRMQARKDNHGDFTLHDGPPYANGHLHLGHALNKILKDIVVKREYFKGKKIYYTPGWDCHGLPIEQQILERLEKEKTSLENPTLFREKCRDHAKKFLEIQKNEFLQLGVLGDFEDPYKTMDFKFEASIYRALVEVAKKGLLKERHKPIYWSYACESALAEAEVEYKMKKSPSIFVAFGLKKESLEKLKVKKASLVIWTTTPWTLYANVAIALKKDAVYALTQKGYLVAKALHEKLAALGVVDNEITHEFNSNDLEYLVATNPLNQRDSLVALGEHVGLEDGTGAVHTAPGHGEEDYYLGLRYNLEVLMSVDEKGCYDEGIIHNQLLDESYLGEHVFKAQKRIIEQLGDSLLLEQEIEHSYPHCWRTHKPVIYRATTQWFILMDEPFIQNDGSQKTLREVALDAIEKVEFVPSSGKNRLKTMIENRPDWCLSRQRKWGVPLAFFIDKRTNKPCFESEVLEHVANLFEKKGCDVWWEYSVKDLLPPSYQEDAKHYEKIMHILDVWFDSGSTFKAVLEDYHGEKGQSPSDVILEGSDQHRGWFQSSLLIGCVLNNQAPFKKVITHGFIVDEKGEKMSKSKGNVVSLDKLLKTHGSDVVRLWVAFNDYQNDLRVSQTFFTQTEQHYKKFRNTLKFLLANFSDMDLKNLERPHNFSPLDHFMLETLETISAGVNSAFEEHDFVKGLNILMAFVTNELSGIYLDACKDSLYCDSKNNEKRQAIQMVLLATASKLCYFLAPILTHTIEEVLEHSQALRIFLQAKDVFDLKDISVSEKLHLKEFKKPENFEAVLALRSAFNEELDRLKKEGVIKNSLECAIEVKEKALDENLVEELLMVSFVGIAKEKLSETPAFTLFKAPFYKCPRCWRFKSELENTPCKRCEQVLKER

SEQ ID NO: 58992 - protein, 84 aa, Helicobacter pylori
MRIDKFLQSVGLVKRRVLATDMCNVGAVWLNGSCAKASKEVKAGDTISLHYLKGIEEYTILQIPALKNVPRKDTHLYIAPKTKE

SEQ ID NO: 58993 - protein, 60 aa, Helicobacter pylori
MAHHEEQHGGHHHHHHHTHHHHYHGGEHHHHHHSSHHEEGCCSTSDSHHQEEGCCHGHHE

SEQ ID NO: 58994 - protein, 689 aa, Helicobacter pylori
MTDNNQNNENHENSSENSKADEMRAGAFERFTNRKKRFRENAQKNAEYSNHEASSHHKKEHRPNKKPNNHHKQKHAKTRNYAQEELDSNKVEGVTEILHVNERGTLGFHKELKKGVEANNKIQVEHLNPHYKMNLNSKASVKITPLGGLGEIGGNMMVIETPKSAIVIDAGMSFPKEGLFGVDILIPDFSYLHQIKDKIAGIIITHAHEDHIGATPYLFKELQFPLYGTPLSLGLIGSKFDEHGLKKYRSYFKIVEKRCPISVGEFIIEWIHITHSIIDSSALAIQTKAGTIIHTGDFKIDHTPVDNLPTDLYRLAHYGEKGVMLLLSDSTNSHKSGTTPSESTIAPAFDTLFKEAQGRVIMSTFSSNIHRVYQAIQYGIKYNRKIAVIGRSMEKNLDIARELGYIHLPYQSFIEANEVAKYPDNEILIVTTGSQGETMSALYRMATDEHRHISIKPNDLVIISAKAIPGNEASVSAVLNFLIKKEAKVAYQEFDNIHVSGHAAQEEQKLMLRLIKPKFFLPVHGEYNHVARHKQTAISCGVPEKNIYLMEDGDQVEVGPAFIKKVGTIKSGKSYVDNQSNLSIDTSIVQQREEVASAGVFVATIFVNKNKQALLESSQFSSLGLVGFKDEKPLIKEIQGGLEVLLKSSNAEILNNPKKLEDHTRNFIRKALFKKFRKYPAIICHAHSF

SEQ ID NO: 58995 - protein, 271 aa, Helicobacter pylori
MVVAKKSLGQHFLTDESFLDRIVNALPPLNPLKLVEIGVGLGDLTLKLLDRYPLKTYEIDSHLCEKMRSKLKAQKKPFKLELVEKDALFLKEEEPYFLISNLPYYIATRLVLNAFKDPKCRGLLVMTQKEVALKFCAKDSQNALSVLAHTIGNATLLFDVPPSAFSPPPKVFSSVFEVIKEPLKEKALASLAQAPFFEEALQKGFEMLEDFLKACFSSPRKTLSNNLKKSVSYREKLDKVLDFLALENQPTSVRASEIKDYLKLLNYLLKG

SEQ ID NO: 58996 - protein, 72 aa, Helicobacter pylori
MAHHEQQQQQQANSQHHHHHHAHHHHYYGGEHHHHNAQQHAEQQAEQQAQQQQQQQAHQQQQQKAQQQNQQY

SEQ ID NO: 58997 - protein, 293 aa, Helicobacter pylori
MLEFILKIQARDSKGLVSTISTTIANKGYNIVKNDEFVDPLKQRFFMRLKIQKEIKPLNTEIKEQEEQSLKTALFKALENFNELLIEVILTHKKNIILLATKESHCLGDLLLRVYGGELNAQILGVISNHEILRPLVEKFDIPYFYAPCDNQVLHEKEVLEIIKNLELKHKVSADLLVLAKYMRILSHDFTKRYENQILNIHHSFLPAFIGANPYQQAFERGVKVIGATAHFVNESLDAGPIIIQDTLPINHNYSVEKMRLAGKDIEKLVLARALKLVLEDRVFVHENKTVVF

SEQ ID NO: 58998 - protein, 76 aa, Helicobacter pylori
MLILSRKVNEGIVIDDNIHIKVISIDRGSVRLGFEAPESTLILRAELKEAIVSENQKASVCVDESLLENIKKVIKP

SEQ ID NO: 58999 - protein, 152 aa, Helicobacter pylori
MKLIASNKKAYFDYEILETLEAGLALLGSEVKALRQTRVNLKDNFVKIIKGEAFLFGVHISYLDTIHAYYKPNERRERKLLLHKKQLLKWQIEASKERLSIVGLKLYFNQRNRAKIQIALVKGKRLHDKRQSLKEKALNKEILADLKHHFKG

SEQ ID NO: 59000 - protein, 44 aa, Helicobacter pylori
MKRTYQPHNTPRKRTHGFLVRMKTKNGRKVINARRAKGRKKLSV

SEQ ID NO: 59001 - protein, 161 aa, Helicobacter pylori
MPDELRAEKSFPSKPYDSLKNKSEFDRVYQKGFKKHNPFFSLFVLDLSQEPPKEKAGFKDPLFCRLKDKKTLYLLGLSVSKKVGNAVKRNLIKRRLRSLTLKHAALCQGLALVFVPRSDCYHLDFWALEKHFLEMLTSIKNYMNKALKDLKKGITHTYAKQ

SEQ ID NO: 59002 - protein, 547 aa, Helicobacter pylori
MDKNNNNLRLILAIALSFLFIALYSYFFQKPNKTTTQTTKQETTNNHTATSPNAPNAQHFSTTQTTPQENLLSTISFEHARIEIDSLGRIKQVYLKDKKYLTPKQKGFLEHVGHLFSSKENAQPPLKELPLLAADKLKPLEVRFLDPTLNNKAFNTPYSASKTTLGPNEQLVLTQDLGTLSIIKTLTFYDDLHYDLKIAFKSPNNLIPSYVITNGYRPVADLDSYTFSGVLLENSDKKIEKIEDKDAKEIKRFSNTLFLSSVDRYFTTLLFTKDPQGFEALIDSEIGTKNPLGFISLKNEANLHGYIGPKDYRSLKAISPMLTDVIEYGLITFFAKGVFVLLDYLYQFVGNWGWAIILLTIIVRIILYPLSYKGMVSMQKLKELAPKMKELQEKYKGEPQKLQAHMMQLYKKHGANPLGGCLPLILQIPVFFAIYRVLYNAVELKSSEWILWIHDLSIMDPYFILPLLMGASMYWHQSVTPNTMTDPMQAKIFKLLPLLFTIFLITFPAGLVLYWTTNNILSVLQQLIINKVLENKKRMHAQNKKEH

SEQ ID NO: 59003 - protein, 461 aa, Helicobacter pylori
MKNTSSSTTLTMNDTIAAIATPLGKGAISIIKISGHNALNILKQLTQKQDFTPRYAYVHDIFSNGVLLDKALVIYFKAPYSFTGEDVCEIQCHGSPLLAQNILQACLNLGARLAKAGEFSKKAFLNHKMDLSEIEASVQLILCEDESVLNALARQLKGELKIFIEEARGNLLKLLASSEVLIDYSEEDIPSDFLDGVSLNLEKQIASFKDLLDFSNAQKQRNKGHALSIVGKPNAGKSSLLNAMLLEERALVSDIKGTTRDTIEEVIELKGHKVRLIDTAGIRESADKIERLGIEKSLKSLENCDIILGVFDLSKPLEKEDFNLIDTLNRAKKPCIVVLNKNDLAPKLELEILKSYLKIPYTLLETNTLNSKACLKDLSQKISAFFPKLDTQNKLLLTSLAQKIALENAITELQNAKNHLETLELFSYHILSAIENLNLLTRPYETSQMLDSMFSEFCLGK

SEQ ID NO: 59004 - protein, 262 aa, Helicobacter pylori
MEGFSLRINQFLAHYTKHSRREAEKLVLEGRVKINHEHAKLASVVKENDRVFLDKRLIKPLKNKKFSVLVYHKPKGELVSKADPLKRRVIYESLEKKYAHFAPVGRLDFASEGVLLLSDSKAVVSALMHADLEKEYLIKIQGFVTREMENAMQEGLKLENATKGAHQKTPIKSMEFAPFIGYEIIKNHAKYSKLRVIINEGKNRELRRFFAFFNAGVLDLRRVRYGFVNLNALPVGKMRFLNRQEYNELHAFMANAANVKGD

SEQ ID NO: 59005 - protein, 1211 aa, Helicobacter pylori
MKENKAFTHLHLHTEYSLLDGANKIKILAKRVKELGMKSVSVTDHGNMFGAIDFYTSMKKEGIKPIIGMEAYIHNDDNLSSKETKQRFHLCLFAKNQEGYENLMFLSSMAYLEGFYYFPRINKKLLKEHSKGIIASSACLQGEVNYHLNTNNERNRKYGAKGYDEAKKIACEYQEIFEDDFYLEIMRHGILDQRFIDEQVIKMSLETGLKIIATNDTHYTMPNDAKAQEVAMCVAMGKTLNDKGRLKHSVHEFYIKSPEEMAKLFADIPEALENTQEIADKCVLEIDLKDDKKNPPTPPSFKFTKAYAQNEGLNFEDDASYFAYKAREGLKERLVLVPKEKHDQYKERLEKEIEVITNMKFPGYMLIVWDFIRYAKEMGIPVGPGRGSAAGSLVAFALKITDIDPLKYDLLFERFLNPERISMPDIDTDFCQRRRKEIIEYMIEKYGKYNVAQVITFNKMLAKGVIRDVARVLDMPYKEADDFAKLIPNRLGITLKGYEKNGEFIEGAWELEPKIKELVESNELAKQVWEYSLNLENLNRNAGVHAAALVVDSQKELWHKTPLFASEKTGGIVTQYSMKYLEPVDLIKFDFLGLKTLTVIDDALKIIKTQHKISVDFLSLDMDDPKVYKTIQSGDTVGIFQIESGMFQGLNKRLRPSSFEDIIAIIALGRPGPMESGMVDDFVNRKHGVEPIAYAFKELEPILKPTYGTIVYQEQVMQIVQTIGGFSLGEADLIRRAMGKKDAQIMADNKAKFVEGAKNLGHDGQKAANLWDLIVKFAGYGFNKSHSAAYAMITFQTAYLKTYYKHEFMAAMLTSESNKIESVARYIDEVRALEIEVMPPHINSSMQDFSVAEFKNQKGELEKKIVFGLGAIKGVGGEPIKNIIEERAKGDYKSLEDFISRVDFSKLTKKSLEPLVKSGSLDNLGYTRKTMLANLDLICDAGRAKDKANEMMQGGNSLFGAMEGGTKEQVVLDMIDLGEHDAKTLLECEYETLGIHVSGNPLDEFKEEIKGFKNLVKSIDIEELEIGSQAYLLGKIMEVKKKIGKRSGKPYGIADILDRYGKFELMLFEKQLNALEELDINKPLVFKCKIEEQEEVVRLRLFEILDLESAREVKIPKARYKDPEKQKEEVREIPPMEMLASSSCSLAIVLENDVKKEFLRQIKESALKHQGKRPLYLIIKDKDKQFKIQSDLMVNEKIKDDFKGLEWRDLA

SEQ ID NO: 59006 - protein, 340 aa, Helicobacter pylori
MANLENLDWKNLGFSYIKTDFRFIATYKNGSWSQGGLVSENMLQLSEGSPVLHYGQACFEGLKAYRSQKGKALLFRPLENAKRLQTSCERLLMPKVSEELFLRACAEVVKANQKWLAPYKSGASLYLRPFVIGVGDNLGVKPANEYLFIVFCAPVGAYFKGGIEKGGARFITTIFDRAAPKGTGGVKVGGNYAASLLAHKMATEQGYDDCIYLDPTTHTKIEEVGAANFFGITHDDAFITPHSPSILPSITKKSLMVLAKEYLNLKVEEREILMDELDAFKEAGACGTAAIITPIKEIVHNNKSYFFEAPGHITKRLYDLLLSIQQGEQEAPKDWIFEVG

SEQ ID NO: 59007 - protein, 892 aa, Helicobacter pylori
MMEQPVIKEGTLALIDTFAYLFRSYYMSAKNKPLTNDKGFPTGLLTGLVGMVKKFYKDRKNMPFIVFALESQTKTKRAEKLGEYKQNRKDAPKEMLLQIPIALEWLQKMGFVCVEVNGFEADDVIASLATLSPYKTRIYSKDKDFNQLLSDKIALFDGKTEFLAKDCVEKYGILPSQFTDYQGIVGDSSDNYKGVKGIGSKNAKELLQRLGSLEKIYENLDLAKNLLSPKMYRALIHDKASAFLSKELATLERGCIKEFDFLSCAFPSENPLLKIKDELKEYGFISTLRDLENSPTPLILDNAPLLDNTPALDNTPKKSCMIVLESAAPLSAFLEKLEKTNARVFARLVLDKEKKVLALAFLYEDQGYFLPLEEALFSPFSLEFLQNAFFKMLQHAQIIGHDLKPLLSFLKAKYQVPLENIRIQDTQILAFLKNPEKVGFDEVLKEYLKEELIPHEKIKDFKTKAEKLELLSVELNALKRLCEYFEKGGLEENLLSLAREIETPFMKVLMGMEFQGFKIDAPYFKRLEQEFKNELHVLERQILELIGVDFNLNSPKQLSEVLYDKLGLPKNKSHSTDEKSLLKILDKHPSIALILEYRELNKLFNTYTTPLLRLKDKDDKIHTTFIQTGTATGRLSSHSPNLQNIPVRSPKGLLIRKGFIASSKEYCLLGVDYSQIELRLLAHFSQDKDLMEAFLKGRDIHLETSKALFGEYLAKEKRSIAKSINFGLVYGMGSKKLSETLNISLNEAKSYIEAYFKRFPSIKDYLNRMKEEILKTSKAFTLLGRYRVFDFTGANDYVKGNYLREGVNAIFQGSASDLLKLGMLKVSERFKNNPSVRLLLQVHDELIFEIEEKNAPELQQEIQRILNDEVYPLRVPLETSAFIAKRWNELKG

SEQ ID NO: 59008 - protein, 191 aa, Helicobacter pylori
MYVVLEGVDGAGKSTQVELLKDRFKNALFTKEPGGTRMGESLRRIALNENISELARAFLFLSDRAEHTESVIKPALKEKKLIISDRSLISGMAYSQFSSLELNLLATQSVLPAKIILLLIDKEGLKQRLSLKSLDKIENQGIEKLLHIQQKLKTHAYALQEKFGCEVLELDAKESVKNLHEKIAAFIKCAV

SEQ ID NO: 59009 - protein, 682 aa, Helicobacter pylori
MMDFEKSILDHLNGAQKIAASHIQGPLLILAGAGSGKTKTLTSRLAYLIGVCGVPSENTLTLTFTNKASKEMQERALKLLKNQALIPPLLCTFHRFGLLFLRQHMNLLKRACDFSVLDSDEVKTLCKQLKISNFRASISQIKNGMMDLSMQDSECYKAYELYQNALKKDNLVDFDDLLFLSLKILQDNETIAKETSERYHYIMVDEYQDTNALQLEFLKKLSFTHHNLCVVGDDDQSIYGFRGADISNILNFSKHFKGAKIVKLETNYRSSAEILACANSLISHNQHRHIKTLQSFKGSHKSVVCKEYLTQKEESLDVAYQIKALLKKGENLENIAILYRLNGLSRSIEESLNALNIPYRLIGALSFYERAEIKDALAFMHLVAKKDDRFFIKRVLNKPPRGLGKITQEWIFSLLDEEGLNLEEALKLGAFKDKLNPKNEYALKQFIAMIGRLREAFEISVEEFCSRFLEETNLLKSYEKEDNYEEREGFVKELLTLVKEYFKTNPTHSLLDFLNESVLDAHNTENAQKVSCMSVHMSKGLEFKHVFVIGLEEGFFPHRGFNQESDLEEERRLAYVAITRAKEELQLSYVKERSYFGRKISCSPSVFLEEAQLLNQDNPPKQDHQKDAPIKVGDLIRHKIFGTGRVLGVEKGLSGLCLKINCGGNVYDKISEKFVEKVDNGF

SEQ ID NO: 59010 - protein, 415 aa, Helicobacter pylori
MIDRKLLLQDFDKVALSLKKRNNAMDDELERLREVITHYKKRLIELEGLQAFQNKVSKEFGIKMAQKVDTSDLKKELENNKIKLNELSKSVGELEQQIDLKLSIIPNLVDEKTPLGTNEEDNIEIKKILTPRVFTFKPKEHFELAQQNGWIDFESGVKLAKSRFSVIRGFGAKIYRALIHLMLDFNEKNGFEIIYTPALVNEKMLFGTGQLPKFKEDVFKIENENLYLIPTAEVTLTNLYNDTIISVENLPIKMTAHTPCFRSEAGSAGKDTRGMIRQHQFDKVELVAITHPKESDVMQEHMLESASEILKALELPHRFVQLCSGDLGFSASNTIDIEVWLPGQNCYREISSVSNTRDFQARRAKIRFKENQKNQLAHTLNGSSLAVGRTMVALMENHQQADGSIHIPKALEKYL

SEQ ID NO: 59011 - protein, 246 aa, Helicobacter pylori
MKKEKHLKQEKIINMFDDIASSYDQANRLMSFGLDVKWRERACEHAFLFLENKKALRLVDVACGTGDMLVAWQKSALNCGIEFKECLGIDPSNNMLELAIKKCEELENKASFIQAQAKDLKGVENNSVDILSIAYGLRNVVERQEALKEFFRVLKPRGVLVILEFLKKDNPTWLDKISGFYTNKVLPLVGGAISKNYGAYSYLPQSIEGFLSLEGLKHELRNAGFEILRTEDSIAQISTTMLVKKN

SEQ ID NO: 59012 - protein, 449 aa, Helicobacter pylori
  MISC_FEATURE (222)..(222): X=any amino acid
MGRNQGAYLDPSESILMLMVAFLLVLLNAFFVLSEFALVKVRKTRLEELVKIGNSNAKLALKMSQRLDTYLSATQLGITLSSLALGWVGEPAIAKLLAALFESMDLRENPIFIHSMSVVIAFLSITFLHVVLGEIVPKSLAIAKSEKATLFAARPLHVFWVVFYPVVRLFDVIAHFFLKKMGINPKEHDGTHSEEELKIIVGESLREGIIDSVEGEIIKNAXDFSDTSAKEIMTPRKDMVCLDEENSYEENIDIVLKGHFTRYPYCKGSKDNIIGMVHIRDLLSRSIFTPKMHDFNQIVRKMIIVPESASISQILIKMKKEQIHTALVIDEYGGTAGLLTMEDIIEEIMGEISDEYDLKQEGINKLEEGVFELEGMLDLESVEEALHIEFDKECEQVTLGGYVFSLLERMPMEGDTIVSHGYSFEVLSVDGARIKRLKAVKQDQGENEA

SEQ ID NO: 59013 - protein, 533 aa, Helicobacter pylori
MEIKNIKEFEKASKKLQKDTLKIALALLFLIGAALLALIFGQANSKGLLLIFAAVIGGYMAMNIGANDVSNNVGPAVGSKAISMGGAILIAAICEMLGAIIAGGEVVSTIKGRIVSPEFINDAHIFINVMLASLLSGALWLHVATLIGAPVSTSHSVVGGIMGAGMAAAGMVAVNWHFLSGIVASWVISPLMGALIAMFFLMLIKKTIAYKEDKKSAALKVVPYLVALMSLTFSWYLIVKVLKRLYALNFEIQLACGCILALLIFILFKRFVLKKAPQLENSHESINELFNVPLIFAAALLSFAHGANDVANAIGPLAAISQTLEDANSPIGNTLSSVPLWIMVVGAAGIALGLSLYGPKLIKTVGSEITELDKMQAFCIALSAVITVLLASQLGLPVSSTHIVVGAVFGVGFLRERLREQSRRRFARIRDNIVAAHFGEDLEEIEGFLERFDKANLKEKSLMLESLKKSKNTAIALELKKKEKKSLKKVYKEEVIKRSILKKIVTAWLVTVPVSALLGALLFVALGFIEKYF

SEQ ID NO: 59014 - protein, 447 aa, Helicobacter pylori
MKLKKTLTYQNHTYSFLSDNTHEVLENPKEILFVKTPLNEKYSHLIAEKNLAILDFNELKNYFDFKIKIVGITGTNGKTTTASLMYSLLLDLNKKTALLGTRGFFINNERIKEKGLTTPTLLELYSDLEEAVRLKCEYFIMEVSSHAIVQKRIAGLDFALKILTNITSDHLDFHQSIENYRDAKNSFFKDEGLKVINRDETNALFNPVNAHTYALDKKAHLNVQAFSLNPSISASLCYQQDLRDPNFKEIALMHSPLLGRYNLYNILAGVLGVKLLTQLPLETIVPLLENFYGVKGRLEIVHSKPLVVVDFAHTIDGMQQVFESFKNQKITALFGAGGDRDKTKRPEMGAIASYYAHKIILTSDNPRSENEEDIIKDILKGINDSSKVIVEKDRKKAILNALENLKDDEVLLILGKGDENIQIFKDKTIFFSDQEVVKSYYQHLKQG

SEQ ID NO: 59015 - protein, 316 aa, Helicobacter pylori
MQEFSLWCDFIERDFLENDFLKLINKGAICGATSNPSLFCEAITKSAFYKDEIAKLKGKKAKEIYETLALKDILQASSALMPLYEKDPNNGYISLEIDPFLEDDAAKSIDEAKRLFKTLNRPNVMIKVPASESGIEVVSALTQASIPVNVTLVFSPKIAGEIAQILAKEAQKRAVISVFVSRFDKEIDPLVPKNLQAQSGIINATECYYQINQHANKLTSTLFASTGVKSNSLAKDYYIKALCFKNSINTAPLEALNAYLLDPNTECQTPLKTTEIEAFKKELKVHNIDLENTAQKLLKEGLIAFKQSFEKLLSSF

SEQ ID NO: 59016 - protein, 178 aa, Helicobacter pylori
MLEGVIRESITKANAKALKKDGYLIANVYGKGIENVNGAFKLNPFIKYLKEKKHLIFPVKLGDKTFEVVVQEYQKNPVTNELIHVDLLAVTKGVKSKFKVPIKHQGTPVGLKNKGILMLSKKRISVECAPEHLPDHYLVDVAPLDVNESILVRDLEKHENVKILDHDSIAVIGVIKAK

SEQ ID NO: 59017 - protein, 344 aa, Helicobacter pylori
MRLYESLLEMCLNKAWEHQTLALENPSVACMVLDKNHEILSLETHKKAKTPHAEVLAAQSALKILRPSLKNDLEKLEDPKTLSDFLKTHHDNAFTDCVFLITLEPCNSYGKTPACSELLEILKPKRVVIATEENEAKKGGLARLQKARIETIICHNLENKAKDLLLPFRVMEQKGRFNLFKLALRMNGDYHHGKITGQKSVIFTHNQRAICDTLIVSGKTIRTDNPLLDARFCDSFYQNKNPNIAILSKRSIDPNSKVFSAPNRLVNTFHDPKDLPLEKGFNFIEGGWELFESLRDKIDALLLHSHASMIGEAFKALALKTPFKGRLLHAQILENEALLWIENS

SEQ ID NO: 59018 - protein, 262 aa, Helicobacter pylori
MARSFKHSQYPKIFKPLYPNNLTLSLKKQHVIMIAILFERVFMESVLNFLTNINVIFTLLGYLIGGIPFGYALMKIFYGMDITKIGSGGIGATNVLRALQSKGVSNAKQMALLVLILDLFKGMFAVFLSKLFGLDYSLQWMVAIASILGHCYSPFLNFNGGKGVSTIMGSVVLLIPIESLIGLTVWFFVGKVLKISSLASILGVGTATVLIFFVPYMHIPDSVNILKEVGTQTPMVLIFIFTLIKHAGNIFNLLAGKEKKVL

SEQ ID NO: 59019 - protein, 395 aa, Helicobacter pylori
MEKISDLIECIAYEKNLPKEMISKVIQGCLLKMAQNELDPLARYLVVEENKQLQLIQLVEVLEDGDERLVNDPSKYISLSKAKEMDPSVKIKDELSYSLSLESMKQGAINRLFKDLQYQLEKALEDSHFEAFQKRLNSVLMGQVILVDHNQNTFIEIEQQFQGVLSMRHRIKGESFKVGDSIKAVLTQVKRTKKGLLLELSRTTPKMLEALLELEVPEIKDKEIEIIHCARIPGNRAKVSFFSHNARIDPIGAAVGVKGVRINAISNELNKENIDCIEYSNVPEIYITLALAPAKILSVEIKKIPIEELNAEEKESIQERFIVNNHLQKAKVRLLDIEKSKAIGKGGVNVCLASMLTGYHIEFETIPSVKENAENESEKETPKVGVEALESLFKN

SEQ ID NO: 59020 - protein, 967 aa, Helicobacter pylori
MKIKFKRLDYQEQCRDQILGVFKGIDLKEPENDAQRISNPVFEIGAIKDLLLENIENLRSKQKITQGSVGIDKSLNCDILMETGTGKTFCFLECVYALHKNHHLSKFIVLTPSNAIKLGVLKSVEITREFFKSEYSNTHLESYEDIERFILASNHKCCVLVMTFSAFNKEKNTINKSCLENTNLFNGATSYMQALVSMRPIVIMDEPHRFLGDKTKKYLEQLNALLTLRFGATFKDDYNNLIYTLDSKKAFDCALVKSISVASVGESNECFLELKGIEKKEAAINYTDLENKTQSVKVKEHDNLGVVTQISALEDYIVEKITKTEIRFLNGFNLLLDQKEPFSHLLEGEQEVMLKEAIKSHFEREEGLFKKGIKALCMVFISGVNSYLSENEKPAKLALLFEKLYQQKLEEVLKKPLDENYRAYLECTREDIKKVHGGYFAKSKKEGDETKTIELILKEKEKLLSFDSDLRFIFSQWALQEGWDNPNVMTICKLAPSHSNITKLQQIGRGLRLAVNDKGERITKEHADFDFVNELVVIVPQVEGDFVGAIQQEISEHSLIKQEFSAEELEKSGVVKKGRYGFLLETLEGLGFGEKTGDENFKLTLNQNEFLEKEPELEKLKDEKYLDFEKLKDFLKDRLIGNSRVRDKNERKSEKIKINKENFKKFETLWESLNHQARIAYAIDSESLIDEIVKNINSSFNVSSKIVSVTTHKKVETMGNNAKTEIFERENACVWSLHEFISALSNKVKLSFKSVAKVLENIDENKFNEIKKNEQEGLRRLEELFLEIIYQNIKDKISYQMRETTIKNRKNDAFYDEKGEIREFLDGSLGADKYEIKNSSVREKCLYENFMQVDSEIEKDTIEESNDTKIIVFGKLPRVKIPIGLNQTYSPDFGYVVENNDKKVLLVVETKGVDKKSELRPEEERKISTAKKFFEALKKQGVNIEYKTKMEKDQLSALINEVLNRKD

SEQ ID NO: 59021 - protein, 457 aa, Helicobacter pylori
MDTNNNIEKEILALVKQNPKVSLIEYENYFSQLKYNPNASKSDIAFFYAPNQVLCTTITAKYGALLKEILSQNKVGMHLAHSVDVRIEVAPKIQINAQSNINYKAIKTSVKDSYTFENFVVGSCNNTVYEIAKKVAQSDTPPYNPVLFYGGTGLGKTHILNAIGNHALEKHKKVVLVTSEDFLTDFLKHLDNKTMDSFKAKYRHCDFFLLDDAQFLQGKPKLEEEFFHTFNELHANSKQIVLISDRSPKNIAGLEDRLKSRFEWGITAKVMPPDLETKLSIVKQKCQLNQITLPEEVMEYIAQHISDNIRQMEGAIIKISVNANLMNASIDLNLAKTVLEDLQKDHAEGSSLENILLAVAQSLNLKSSEIKVSSRQKNVALARKLVVYFARLYTPNPTLSLAQFLDLKDHSSISKMYSGVKKMLEEEKSPFVLSLREEIKNRLNELNDKKTAFNSSE

SEQ ID NO: 59022 - protein, 597 aa, Helicobacter pylori
MCGIVGYIGDSEKKSVLLEGLKELEYRGYDSAGLAVLSNDRLEVFKTQGKLENLKLELKNKEFLDFGVSIAHTRWATHGKPSSANAHPHFTENLALVHNGIIENYASLKKELENKGHAFLSQTDTEVIAHLLEETLKSESDLLKAFEKSISLLKGSYAILMLHKRAKESLFYAKSSSPLVVGKGKEGVFFASSLSVLAPKVDQFVILEENSVGRISLENFKDLNNIENMKDYAFEDKDYSKGNFRNYLEKEIYEQHSSLLECLEGRLEALSVYCEIDPEFLKNVSEITLCSCGSSYHASLASVYLFERLAKIRARAILASEYRYAHFKSNPNELFIAISQSGETADTLEALKLAKAQGLKTISLCNAPFSMMSRISDHTLLIRAGVERSVASTKAFSSQVMLLWLLSVYLGKQLGTISKEEERIQAKNMLNSVNAMKVEPKLHEKIKRLSKRYLHGHGFFYIGRDVFYPLALEGALKLKEISYLHAEGYASAEMKHGPIALVDSNLFTIALLSKHLLFDKTKSNIEELSARDSTICVLSSEILEIADDFIQLEESESYMEEFFRMNLAVQLLALEIAMRLNHDVDHPRNLAKSVTVE

SEQ ID NO: 59023 - protein, 427 aa, Helicobacter pylori; identical to SEQ ID NO: 58849

SEQ ID NO: 59024 - protein, 999 aa, Helicobacter pylori
MIQSSLYRALNKGFDYQILACKDFKESELAKEVISYFKPNTKAILFPEFRAKKNDDLRSFFEEFLQLLGGLREFYQALENKQETIIIAPISALLHPLPKKELLESFKITLLEKYNLKDLKDKLFYYGYEILDLVEVEGEASFRGDIVDIYAPNSKAYRLSFFDTECESIKEFDPITQMSLKEDLLEIEIPPTLFSLDESSYKDLKTKVEQSPLNSFSKDLTSFGLWFLGEKAQDLLIVYKSIISPRALEEIQELASLNELDCERFKFLKVLENAQGYEDLEIHAHALEGFIALHSNHKITLLAPNKTILDNAISALDAGNMECVIAPFVLNFKTPDGIFISLNSFERKKKRQKSKLALNELNPGEWVVHDDYGVGVFSQLVQHSVLGSKRDFLEIAYLGEDKLLLPVENLHLIARYVAQSDSVPAKDRLGKGSFLKLKAKVRTKLLEIASKIIELAAERNLILGKKMDVHLAELEVFKSHAGFEYTSDQEKAIAEISKDLSSHRVMDRLLSGDVGFGKTEVAMHAIFCAFLNGFQSALVVPTTLLAHQHFETLRARFENFGVKVARLDRYASEKNKLLKAVELGQVDALIGTHAILGAKFKNLGLVVVDEEHKFGVKQKEALKELSKSVHFLSMSATPIPRTLNMALSQIKGISSLKTPPTDRKPSRTFLKEKNDELLKEIIYRELRRNGQIFYIHNHIASILKVKTKLEDLIPKLKIAILHSQINANESEEIMLEFAKGNYQVLLCTSIVESGIHLPNANTIIIDNAQNFGLADLHQLRGRVGRGKKEGFCYFLIEDQKSLNEQALKRLLALEKNSYLGSGESVAYHDLEIRGGGNLLGQDQSGHIKNIGYALYTRMLEDAIYELSGGKKRLEKSVEIQLGVSAFLNPELIASDSLRLDLYRRLSLCENTDEVGQIHEEIEDRFGKIDDLSAQFLQIITLKILANQLGIIKLSNFNQNITITYSDEKKESLKAPSKDDNDILETLLKHLRAQISLKRR

SEQ ID NO: 59025 - protein, 312 aa, Helicobacter pylori
MFLDRRLIVMVTDSKGSRYINVHILFRQIGLYALLSVVGSLLFLGISLLVLNQEIKNIDKQHALITKEFEKKKETNEKLSLQMDEFLDDLQLSGERINDLEEVVGVNRPEEEKEEGNFSSRLDVAGITGLQKSFIMRLIPNDYPLESYRRVSAAFNKRIHPILHVLHNHTGLDLSTAINTPVYASASGVVGLASKGWNGGYGNLIKVFHPFGFKTYYAHLNKIVVKTGEFVKKGQLIGYSGNTGMSTGPHLHYEVRFLDQPINPMSFTKWNMKDFEEVFNKERSIRWQSLITIINRLMQKQDQRLSSLKAQK

SEQ ID NO: 59026 - protein, 308 aa, Helicobacter pylori
MPQNQLVITIIDESGSKQLKFSKNLKRNLIISVVIFLLIVGLGVGFLKFLIAKMDTMTAERNAVLRDFRDLYQKNYTLTKEIKNKREELFIVGQKIRTIESLIEVKRGANGGVHLYDEVDLDNLNLAQKHLALMLIPNGMPIKTYSAIKPTKERNHPIKKIKGVESGIDFIAPLNTPVYASADGIVDFVKTNSNVGYGNLVRIEHAFGFSSIYTHLDHVNVQPKSFIQKGQLIGYSGKSGNSGGEKLHYEVRFLGKILDAQKFLAWDLDHFQSALEENKFIEWKNLFWVLEDIVQLQEHVDKDALISQ

SEQ ID NO: 59027 - protein, 806 aa, Helicobacter pylori
MDFINIEKKWQEFWWKNKSFEPKDDFNLPKKYILSMLPYPSGEIHMGHVRNYTIGDALARYYRLHHYNVLHPMGFDSFGMPAENAAIKHGIHPKTWTYENIENMQKEFEALGFSFSKNREFATSDPDYTKFEQRFFIDLWEKGLIYRKKAMLNWCPNDKTVLANEQVIDGRCWRCDTEVIQKELYQYYLKITNYAEELLKDLEALEDHWPSQVLIMQKNWIGKSSGLQFGFKIADECLKACNGIQEIEVFTTRADTIYGVTYIAIAPEHPLVEHAIKQVSQEVSKMIKAILNTTQRERALEKKGAFLGIYAIHPLTKQKIPVWVANFALANYGSGALMGVPACDERDFEFANLYHIPIKVITQSPQNLPHTKEEVLKNSGEWSDLSSSVAREQIIAYFEKENLGKRVINYRLQDWGVSRQRYWGAPIPMIHCNHCGIVPETQLPVTLPEDIVIDGEGNPLEKHASWKFTQCPKCHKNALRETDTMDTFIQSSWYFLRYTTPKNQRENQAFDQNYLKYFMPVDTYIGGIEHAILHLLYARFFTKALRDLGYLHLDEPFKQLITQGMVLKNGAKMSKSKGNVVSPKEILKKYGADAARLFILFAAPPAKELEWNDSALEGAHRFIKRLYDKANAINPTTSKPEFKEVSLNEAQKLGRKKVYEALKKSHEIFNKAESAYSFNTLIASCMEALNALSAQNNERILCEGYFVLLQILEPIIPHTAWELSERLFKRENFKPIAIDEDALMEDFMTLGLTINGKRRAELKVNINASKEEIIVLAKKELEKYLENASVKKEIYVPNKLVNFVIA

SEQ ID NO: 59028 - protein, 264 aa, Helicobacter pylori
MVTMKDLLECGVHFGHQTRRWNPKTKKFIFGVRKNIHIIDLQKTLRYFRYTYNIVRDASAQGKSIMFVGTKKQANETLKEFAESIQVPYVNYRWLGGMLTNFSTIRKSVRKLEIIEEMENSGQIDLLTKKEKLMILRKKEKLDKYLGGVRHMKKIPDMIFVIDVAKEKIAVAEARKLHIPIVAPLDTNCDPDLVDYPIPGNDDAIRSIRLFCKEMSEAILEGRELMQEEIVHANENSEEIEYVSHEEKEEMLAEIQKEITQGAE

SEQ ID NO: 59029 - protein, 355 aa, Helicobacter pylori
MSGISAQLVKKLRDLTDAGMMDCKKALVEVAGDLQKAIDFLREKGLSKAAKKADRIAAEGVVALEVAPDFKSAMIVEINSETDFVAKNEGFKELVKKTLETIKAHNIHTTEELLKSPLDNKPFEEYLHSQIAVIGENILVRKIAHLKAPSSHIINGYAHSNARVGVLIGIKYDNEKNAPKVVELARNIAMHAAAMKPQVLDCKDFSLDFVKKETLALIAEIEKDNEEAKRLGKPLKNIPTFGSRIELSDEVLAHQKKAFEDELKAQGKPEKIWDKIVPGKMERFIADNTLIDQRLTLLGQFYVMDDKKTIAQVVADCSKEWNDDLKITEYVRFELGEGIEKKAENFAEEVALQMK

SEQ ID NO: 59030 - protein, 615 aa, Helicobacter pylori
MDNRNIDPYFNPEQFLETQKYKGTVTALIFLLLFFIFLMVAFKKAFFAQANMPNLVMSKQDTAARGTIYSQDNYSLATSQTLFKLGFDTRFLNPDKEDFFIDFLSIYSNIPKKSLKDAINTKGYIILAYDLTPNMAANIRDLNKKFLAFGVFQNFKDAHDKVWQKQGLNIEVSGVSRHYPYQNSLEPIIGYVQKQEEDKLTLTTGKKGVEKSQDHLLKAQQNGIRTGKRDVSFNFIQNHSYTEVERLDGYEVYLSVPLKLQREIETLLDKTKDKLKAKEILVGIINPKSGEILSLASSKRFNPNAIKTSDYESLNLSVAEKVFEPGSTIKPIVYSLLLDKNLINPKERIDLNHGYYQLGKYTIKDDFIPSKKAVVEDILIQSSNVGMIKISKNLNPKDFYNGLLGYGFSQKTGIDLSLEATGKIPPLSAFKREVLKGSVSYGYGLNATFLQLLRAYAVFSNEGKLTTPYLVQRETAPNGDIYIPSPKPTFQVISPKSARKMKETLIKVVRYGTGKNAQFEGLYIGGKTGTARVAKNGSYSAQSYNSSFFGFAEDERQVFTIGVVILGSHGKEEYYASKIAAPIFKEITEILVRYNYLSPSIAIQNALEKNRFKIK

SEQ ID NO: 59031 - protein, 388 aa, Helicobacter pylori
  MISC_FEATURE (381)..(381): X=any amino acid
MTTDRNLFFCASLLIFLGVLMSYSLSTYTTVVLYHYGEFHFFIRQLVSAIIGIVIMWGLSRVDPSKWFSRLGFFLLFVPPLLIIGMFFLPESLSSSAGGAKRWIRLGFFSLAPLEFLKIGFTFFLAWSLSRTFVAKEKANVKEELITFVPYSVVFVALAIGVGVLQNDLGQIVLLGAVLAVLLVFSGGSVHLFGLIISGAFAISVLAIVTSEHRILRLKLWWSNLQNSLFTLLPDRLANALRISDLPESYQVFHAGNAMHNGGLFGQGLGLGQIKLGFLSEVHTDMVLAGIAEEWGFLGLCVCFILFSVLIVLIFRIANRLKEPKYSLFCVGVVLLISFSLVINAFGVGGILPVKGLAVPFLSYGGSSLLANCIAIGLVLXLARYTKG

SEQ ID NO: 59032 - protein, 335 aa, Helicobacter pylori
MLVTRFKKAFISYSLGVLVASLWLNVCNASAQEVKVKDYFGEQTIKLPVSKIAYIGSYVEVPAMLNVWNRVVGVSDYAFKDDIVKATLKGEDLKRVKHMSTDHTAALNVELLKKLSPDLVVTFVGNPKAVEHAKKFGISFLSFQETTIAEAMQAMQAQATVLEIDASKKFAKMQETLDFIAERLKNVKKKKGVELFHKANKISGHQAISSDILEKGGIDNFGLKYVKFGRADISVEKIVKENPEIIFIWWISPLTPEDVLNNPKFATIKAIKNKQVYKLPTMDIGGPRAPLISLFIALKAHPEAFKGVDINAMVKDYYKVVFDLNDAEVEPFLWH

SEQ ID NO: 59033 - protein, 198 aa, Helicobacter pylori
MLVTKLAPDFKAPAVLGNNEVDEHFELSKNLGKNGAILFFWPKDFTFVCPTEIIAFDKRVKDFQEKGFNVIGVSIDSEQVHFAWKNTPVEKGGIGQVTFPMVADITKSISRDYDVLFEEAIALRGAFLIDKNMKVRHAVINDLPLGRNADEMLRMVDALLHFEEHGEVCPAGWRKGDKGMKATHQGVAEYLKENSIKL

SEQ ID NO: 59034 - protein, 271 aa, Helicobacter pylori
MNAFKRIISVGVIALGLFNLLDAKHHKEKKENHKITRELKVGANPVPHAQILQSVVDDLKEKGIKLVIVSFTDYVLPNLALNDGSLDANYFQHRPYLDRFNLDRKMHLVGLANIHVEPLRFYSQKITDIKNLKKGSVIAVPNDPANQGRALILLHKQGLIALKDPSNLYATEFDIVKNPYNIKIKPLEAALLPKVLGDVDGAIITGNYALQAKLTGALFSEDKDSPYANLIAAREDNAQDEAIKTLIEALQSEKTRKFILDTYKGAIIPAF

SEQ ID NO: 59035 - protein, 254 aa, Helicobacter pylori
MFIDTHCHLDHKDYENDLEEVLKESLEKGVTQCVIPGADMKDLNRAIEISEKFEGVFFAIGAHPYDVESFDESLFEKFVGHQKCVAIGECGLDYYRLPELNERENYKSKQKEIFTKQIEFSIQHNKPLIIHIREASFDSLNLLKNYPKAFGVLHCFNADGMLLELSDRFYYGIGGVSTFKNAKRLVEILPKIPKNRLLLETDSPYLTPHPFRGTRNSPTYIPLIAQKIAEIINIETEELASLSTHNAQMLFSFP

SEQ ID NO: 59036 - protein, 206 aa, Helicobacter pylori
MFSGLIHQIAKVKSFHNNILNIESDLNPKLGDSIAINGACLTAIESSKTHFSVELSQKTQNSVALENYKDLVHIEPALKADASLDGHFVQGHIDAIGVIEKIIHNANQVDFFISASEETLLLCVEQGSIAVDGVSLTLSKVEEKGFWLTIIPYTLENTLFKAYKLKRRVNIETDMLVRSVASILKKTKGFEKNFSWNEADALTLGY

SEQ ID NO: 59037 - protein, 215 aa, Helicobacter pylori
MISQMLIQATLETLYMVFVASFLAVVFGLPLGVLLLVSKKGHLLNKPLLHKILDTSINMTRSFPFIILIILLLPLSRFLIGTSIGSSASIIPLAISAIPFVAKLFENSLMEVEHGKIETTLSLGASHLEVIKMMLLESLPSLVNNITITLISLIGYSAMAGALGAGGLGDLAIRIGYQSYRGDVLFYAVVVIIVLVQIIQSVGDYVVKRLRKHKY

SEQ ID NO: 59038 - protein, 336 aa, Helicobacter pylori
MLWVLYFLTSLFICSLIVLWSKKSMLFVDNANKIQGFHHARTPRAGGLGIFLSFVLAYLFEPFEAPFKGFFVFLGLLLVFLSGFLEDINLSLSPKIRLILQAVGVVCIISSMPLVVSDFSPLFSLPYFIAFLFAIFMLVGISNAINIIDGFNGLASGICAITLLVIHYIEPSSLACLLAYMVLGFMVLNFPLGKIFLGDGGAYFLGLVCGISLLHLSLEQKISVFFGLNLMLYPVIEVLFSILRRKIKRQKATMPDNLHLHTLLFKYLQQRSFNYPNPLCAFILILCNLPFILISVFFRLNPYALIAISLVFIACYLMGYAYLNRQVCALEKRAFQ

SEQ ID NO: 59039 - protein, 340 aa, Helicobacter pylori
MILSIESSCDDSSLALTRIEDAQLIAHFKISQEKHHSSYGGVVPELASRLHAENLPLLLERIKISLNKDFSKIKAIAITNQPGLSVTLIEGLMMAKALSLSLNLPLILEDHLRGHVYSLFINEKQTCMPLSVLLVSGGHSLILEARDYENIKIVATSLDDSFGESFDKVSKMLDLGYPGGPIVEKLALDYRHPNEPLMFPIPLKNSPNLAFSFSGLKNAVRLEVEKNAPNLNEAIKQKIGYHFQSAAIEHLIQQTKRYFKIKRPKIFGIVGGASQNLALRKAFENLCDAFDCKLVLAPLEFCSDNAAMIGRSSLEAYQKKRFVPLEKANISPRTLLKSFE

SEQ ID NO: 59040 - protein, 668 aa, Helicobacter pylori
MKKTLLLSLSASSLLNAEDNGFFISAGYQIGEAAQMVKNTGELKKLSDTYENLSNLLTNFNNLNQAVTNASSPSEINAAIDNLKANTQGLIGEKTNSPAYQAVYLALNAAVGLWNVIAYNVQCGPGNSGQQSVTFEGQPGHNSSSINCNLTGYNNGVSGPLSIENFKKLNQAYQTIQQALKQDSGFPVLDSAGKQVTITITTQTNGANKSETTTTTTTTNDAQTLLQEASKMISVLTTNCPWVNHNQGQNGGAPWGLDTAGNVCQVFATEFSAVTSMIKNAQEIVTQAQSLNQQNNQNAPQDFNPYTSADRAFAQNMLNHAQAQAKILELADQMKKDLNTIPSQFITNYLAACHNGGGTLPDAGVTNNTWGAGCAYVEETITALNNSLAHFGTQAEQIKQSELLARTILDFRGSLSNLNNTYNSITTTASNTPNSPFLKNLISQSTNPNNPGGLQAVYQVNQSAYSQLLSATQELGHNPFRRVGLISSQTNNGAMNGIGVQVGYKQFFGEKRRWGLRYYGFFDYNHAYIKSSFFNSASDVFTYGVGTDVLYNFINDKTTKNSKISFGVFGGIALAGTSWLNSQYVNLATFNNFYSAKMNVANFQFLFNLGLRMNLAKNKKKASDHAAQHGVELGVKIPTINTNYYSLLGTQLQYRRLYSVYLNYVFAY

SEQ ID NO: 59041 - protein, 590 aa, Helicobacter pylori
MKAIKILLIMTLSLNAISVNRALFDLKDSQLKGELTPKIVDFGGYKSNTTEWGATALNYINAANGDAKKFSALVEKMRFNSGILGNFRAHAHLRQALKLQKNLKYCLKIIARDSFYSYRTGIYIPLGISLKDQKTAQKMLADLSVVGAYLKKQQENEKAQSPYYRSNNYYNSYYSPYYGMYGMYGMGMYGMYGMGMYDFYDFYDGMYGFYPNMFFMMQVQDYLMLENYMYALDQEEILDHDASINQLDTPTDDDRDDKDDKSSQPANLMSFYRDPKFSKDIQTNRLNSALVNLDNSHMLKDNSLFHTKAMPTKSVDAITSQAKELNHLVGQIKEMKQDGASPNKIDSVVNKAMEVRDKLDNNLNQLDNDLKDQKGLSSEQQAQVDKALDSVQQLSHSSDVVGNYLDGSLKIDGDDRDDLNDAINNPMQQPAQQTPINNMDNTHANDSKDQGGNALINPNNATNDDHNDDHMDTNTTDTSNANDTPTDDKDASGNNTGDMNNTDTGNTDTGNTDTGNTDDMSNMNNGNDDTGNTNDDMGNSNDMGDDMNNANDMNDDMGNSNDDMGDMGDMNDDMGGDMGDMGDMGGDMGN

SEQ ID NO: 59042 - protein, 2902 aa, Helicobacter pylori
MKQFKKKPKKIKRSHQNQKTILKRPLWLMPLLIGGFASGVYADGTDILGLSWGEKSQKVCVHRPWYAIWSCDKWEEKTQQFTGNQLITKTWAGGNAANYYHSQNNQDITANLKNDNGTYFLSGLYNYTGGEYNGGNLDIELGSNATFNLGASSGNSFTSWYPNGHTDVTFSAGTINVNNSVEVGNRVGSGAGTHTGTATLNLNANKVTINSNISAYKTSQVNVGNANSVITINSVSLNGDTCSSLARVGVGANCSTSGPSYSFKGTTNATNTTFSNSSGSFTFEENATFSGAKLNGGAFTFNKKFNATNNTAFNSGSFTFKGTSSFNGANFSNASYTFNNQATFQNSSFNGGTFTFNDQTNQSTQHPQIQNSSFSGSATTLKGFATFEQAFNNSNHQLTIQNASFNNATFNNTGKITIEKDASFNNTSFNTPVDTNNMTISGGVTLSGKNDLKNGATLDFGSSKITLTQGTTFNLTSLGSEKSVTILNSRGGITYNHLLNHAINSLTNALKTNESSSKPQSFAQGLWDMITYNGVTGQLLNENAATSKPTDSSPSKSSTNSTQVYQVGYKIGDTIYKLQETFSHNSIIIQALESGTYTPPPVINGSKFDLSASNYINADMPWYNHKYYIPKSQNFTESGTYYLPSVQIWGSYTNSFKQTFSASNSNLVIGYNATWTDHNVSSSDTVAFGDTSGSALNGHCGPWPYYQCTGTTNGTYSAYHVYITANLRSGNRIGTGGAANLIFNGVDSINIANATITQHNAGAYSSSMTFSTQNMDNSQNLNGLNSNGKLLVYGTTFTNQAKDGKFIFNAGQATFENTNFNGGSYQFSGDSLNFSNNNQFNSGSFEIGAKNTIFNNANFNNSTSFNFNNSSATTSFVGDFTNANSNLQIAGNAVFGNSTNGSQNTANFNNTGSVNIAGNATFDNVVFNSPTNTSVKGKVTLNNITLKNLNAPLSFGDGTIVFSAHSVINIGEAITNGNPITLVSSSKAIEYNDAFSKNLWQLINYQGHGASSEKLVSSAGNGVYDVVYSFNNQTYNFQEVFSPNSISIRRLGVGMVFDYVDMEKSDRLYYQNALGFMTYMPNSYNNNLGNLNNTIYYYDNSIDFYASGKTLFTKAEFSQTFTGQNSAIVFGAKNIWTSVSDAPQSNVIIRFGDNKGAGSNDASGHCWNLQCIGFITGHYEAQKIYITGSIESGNRISSGGGASLNFNGLQGILLTNATLYNRAAGTQSSSMNFVSNSANIQAQNSYFIDDTAQNKGNPNFSFNALNLDFSNSSFRGYVGQTQSVFKFNAVNAISFTNSSNLSSGLYQMQAKSVLFDNSNLSVSVGTSSIKANAINLSQNASINASNHSTLELQGDLNLNDTSSLNLNQSAINVSNNATINDYASLIASNGSHLNFNGAVNFNSANITTSLSSSSIVFKGAVSLRGQFNLSNNSSLDFQGSSAITSNTAFNFYDNAFSQSPITFHQALDIKVPLSLGGNLLNPNNSSVLNLKNSQLVFSDQGSLNIANIDLLSDLNGNKNRVYNIIQADMNGNWYERINFFGMRINDGIYDAKNQTYSFTNPLNNALKITESFKNNQLSVTLSQIPGIKNTLYNIGSEIFNYQKVYNNANGVYSYSDDAQGVFYLTSSVKGYYNPNQSYQASGSNNTTKNNNLTSESSVISQTYNAQGNPISALHVYNKGYNFSNIKALGQMALKLYPEIKKILGNDFSLSSLSNLKGDALNQLTKLITPSDWKNINELIDNANNSVVQNFNNGTLIIGATKIGQTDTNSAVVFGGLGYQKPCDYTDIVCQKFRGTYLGQLLESISADLGYIDTTFNAKEIYLTGTLGSGNAWGTGGSASVTFNSQTSLILNQANIVSSQTDGIFSMLGQEGINKVFNQAGLANILGEVAMQSINKAGGLGNLIVNTLGSDSVIGGYLTPEQKNQTLSQLLGQNNFDNLMNDSGLNTAIKDLIRQKLGFWTGLVGGLAGLGGIDLQNPEKLIGSMSINDLLSKKGLFNQITGFISANDIGQVISVMLQDIVKPSDALKNDVAALGKQMIGEFLGQDTLNSLESLLQNQQIKSVLDKVLAAKGLGSIYEQGLGDLIPNLGKKGIFAPYGLSQVWQKGDFSFNAQGNVFVQNSTFSNANGGTLSFNAGNSLIFAGNNHIAFTNHSGTLNLLSNQVSNINVTMLNASNGLKINATNNNVSVSQGNLFINASCVQQSDPTTASATNPCTTAQNNASSSNASNNAPIALNNNDESLVVTANGFNFSGNIYANGVVDFSKIKGSANVKNLYLYNNAQFQANNLTISNQAVLEKNASFVTNNLNIQGAFNNNATQKIEVLQNLVIASNASLSTGIYGLEVGGALNNLGAIHFNLENSQTPVNPLIQVGGIINLNTTQTPFMNVSVANGGTYTLLKSSRYIDYNINPNSLQSYLKLYTLININGNHIEEKNGVLTYLGQRVLLQDKGLLLSVALPNSNNASQNNILSLSVLHNQIKMSYGNKVMDFTPPTLQDYIVGIQGQSALNQIEAVGGNNAIKWLSTLMMETKENPLFAPIYLENHSLNEILGVTKDLQNTASLISNPNFRNNATSLLEMASYTQQTSRLTKLSDFRAREGESNFSERLLELKNKRFSDPNPSEVFVKYSQLSKHPNNLWIQGVGGASFISGGNGTLYGLNVGYDRLVKSVILGGYVAYGYSGFNGNIMHSLANNVDVGMYARAFLKRNEFTLSANETYGGNASHINSSNSLLSVLNQRYNYNTWTTSVNGNYGYDFMFKQKSVVLKPQVGLSYHFIGLSGMKGKMQNPAYQQFVMHSNPSNESVLTLNMGLESRKYFGKNSYYFVTARLGRDLLIKAKGDNVVRFVGENTLLYRKGEIFNTFASVITGGEMHLWRLMYVNAGVGLKMGLQYQDLNITGNVGMRVAF

SEQ ID NO: 59043 - protein, 251 aa, Helicobacter pylori
MGAILSILKLEIKSYLTNTSALFWTFIYPILMLLLLIFVFSKNTTEIFYFNNIIGLMGLLIISSAIFGLTQAITSSRSHNIFLFYMLSPATFKQITLALIASRLIVVILYAFIFIVLSFYALNIITILNFKALILGFISIFSSALFCFCLAIFVARIFQNEQSILGFCNIINLYALMSCNVFVPLEYLPNIGQLFIKTSIFYYLNQLLIKAFQGIDTILVLATSTFFIIGGIILFLLSANRMLLTPKERMR

SEQ ID NO: 59044 - protein, 112 aa, Helicobacter pylori
MKIMHQVKDFLDFCKQTIHKNSNEAFQKTKRALFKEKSQKIREQAVKIVEKRLIKENMQLSDFNEEELKIMFEAEEKRLLEQIHAKELKEKQEKTTKHFKEVWEKGDNEQEK

SEQ ID NO: 59045 - protein, 232 aa, Helicobacter pylori
MQFFDFSLESVITTLMKILALLIAIIGHEIMHGLSAFLFGDRSAKDAKRLSLNPIRHLDMMGSVLLPALLLIFQAPFLFGWAKPVPVDMRYIVSQKGSLACVVVSLAGVIYNFTLAVLLAFITHWSFQRLGINALSINELNLYQLALVTFLIQGILYNLVLGVFNSLPIPPLDGSKALGFLALHFKSAFLLEWFSKMERYGLLIVLIFLFIPPLSEFFIHAPTRFLFSLLLS

SEQ ID NO: 59046 - protein, 3194 aa, Helicobacter pylori
MTYRNGKIDLKERFSKNRSFKGIKKKIAKKYTIKNSLSIIYSLKTHSNSSLSINKKIFLGLGFVSALSAQSEDYNSSVYWLNSVNENNNNKSYYISPLRTWAGGNRSFTQNYNNSQLYIGTKNASATPNHSSVWFGEKGYIGFITGVFKARDIFITGAVGSGNELKTGGGAILVFESSNELTTNGAYFQNNRAGTQTSWINLISNNSVNLTNTDFGNQTPNGGFNVMGRKITYNGGSVNGGNFGFDNVDSNGATTISGVTFNNNGALTYKGGNGIGGSITFTNSNINHYKLNLNANSVTFNNSTLGSMPNGNANTIGNAYILNANNITFNNLTFNGGWFVFNRSDAHVNFQGTTTINNPTSPFVNMTGKVTINPNAIFNIQNYTPTIGNAYTLFSMKNGNIAYDDVNNLWNIIRLKNTQATKDNSKNATSNNNTHTYYVTYNLGGTLYHFRQIFSPDSIVLQSVYYGANNLYYTNSVNIHDNVFNLKNINDDRADTIFYLNGLNTWNYTQARFAQTYGGKNSALVFNATTPWANGAIPKSNSTVRFGGYEGVNWGKTGYITGTFTADRVYITGNMMSGNGAQTGGGATLNFVGATEINIAGATFKNLKTTSQNSYMTFMALGNGSGSGKINVSQSDFYDWTDGGYDFTGNGVFDSVNFNKAYYKFQGAENSYNFKNTNFLAGNFKFQGKTTIEKSVLNDASYAFDGVNNAFNEDKFNGGSFNFNHAEQTNAFNNNSFSGGSFSFNAKQVDFNGNSFNGGVFNFNNTPKASFTNDTFNVNNQFKINGAQTDFTFSKGVVFNMQGLLSSLSVGTTYQLLNAKSVGYKDNNNALYQMLRWTSGENPSGKLVDENKTAPNSAKIYNVQFTDNGLTYYIKENFNNGITLTRLCTLGYTHCVNIDNDAFNLKNVNNNASNTVFYLNGMTTWKTAGTGVFTQDYSGTNSVLVFNQTTPFLAGANPTSNSVVGFGKTSGAEWGLVGYIQGVFKANQIDITGTIRSGNGAKTGGGATLVFNAQERLNIANANLNNDKAGLQNSWMNFIVNNGNLNVTNANFSNQTPHGGFNLKANNITWDKGSVSGGGNFGVDNANANGNAVIKNVNFSDNGTLIYKGGENSAGNSLTLENNTFNSYNINAKAQNLIFNNNSFNSGSYSFNDTKNVTFKGTNTLINSDPFSRLKGSVSIDNNSIFNIERDLTDKTTYTLLSGDNIKYNNQALADNVFSKNLWDLIHYDGEQGTLLRTDNNTYFVQFTQSNGQKFVFEETFNPGSITYKYFTIHSSPFHTEADSKDIWNQVRKQFDFIPGKTPVCVGVCYIAPYKNQDLIGSSAFAWSLNFGATVVGTLLLGSAQEKANNNGGSIWFGKNNLLYLHGNFNATNIFLTNNFNVGNPNAGGGATINFNADETLSADGLNYTNFQTVAMGLQTSASQHSWANFNSKLSMEIKNSNFRDFTWGGFRFNSGRITFENTTFSGWTNINGATESGSSYVNMVANTDLIFTDSILGGGIRYDLKANNIIFNNTQMVVDVSKNVNQSSLNGNVTFNHSRLSVKPNAAINIGGDQTQTTLENASSLSFYNDSVANFNGTTAFNGVSYLNLNPNAQVSFNQANFNNANVTFYGIPLFGKTPNFGNSVRLINFKGDAKFNQATLNLRAKNIHLNFQGASTFENNSTMNLAESSQASFNALSVEGETNFNLNGSSLLSFNGNSVFNAPVNFYANNSQISFTHSATFNADASFDLGNNSTLNFQSVLLNSALNLLGNGGNNLAINAKGNFSFGSQGILNLSYMNLFGGDKKASVYDVLQAQNIDGLRGNNGYEKIRFYGIQIEKADYSFNNGVHSWSFTNPLNTTETITETLHNNRLKVQISQNGASNNAMFNLAPSLYDYQQNPYDESENSYNHTSDKAGTYYLSSSIKGFGKNNEIPGTYNAQNQPLQALHIYNQAISKQDLNMIASLGKEFLPKVAKLIASGALDNLNLNSPDSFETIFSILKEYGITLNQANWKSLLKIINNFSNTANYHFSQGSLVVGAIKEGQTNTNSVVWFGGDGYKNPCAVGDNTCQMFRQTNLGQLLNSSVPYLGYINANFKAKNIYITGTIGSGNAWGSGGSANVSFESATNLVLNQANIDAQGTDKIFSYLGKEGIDKLFGEKGLGNVLSNIVYEESLNDNAIPKDLANMIPKDLGSKTLSSLLSPTEVNNLLGVSAFKNAIMEILNSKTVGDVFGENGLLNALDPVKRKEIDQMLLEQIQAHSSGFEKFIVKTLGIENVENFINNWYGKQSLSSFANNFVPGGLNQALDKIGSSSDAKDLQSFLDKTTFGDILNQMINQAPLINKLISWLGPQDLSVLVNIALNSITNPSKELLGAISGMGQKVLNDLLGEGVVNKIMSNQVLGQMINKIIADKGFGGVYHQGLGSILPKSLQDELKKLGMGSLLKPKGLHNLWQKGNFNFVAKNHVFVNNSLFSNATGGELNFVAGKSIIFNGKNTINFTQYQGRLSFVSKDFSNISLDTLNATNGLTLNASKNDISVQKGQICVNVLDCMTAKGKTTQTNSSSSATAPTNETLEVSANNFAFLGTIKANGLVDFSKVLQNTTIGTLDLGPNATFKANNLIVNNAFNNNSNYRANISGNFNVAKGATFSTNENGLNVGGNFNSEGPLIFNLNNPTHQTIINVTGTSTIMSYNNQALINFNTQLKQGAYTLINANRMVYGYDNQTILGGSLSDYLKLYTLIDFNGKRMQLNGDSLSYDNQPVSIKDGGLVVSFKDNQGQMVYSSILYDKIQVTVSDKPMSIQAPSLEYYVKRIQGSAGLNAIKSAGNNSIMWLSELFAAKGGNPLFAPYYLQDNPTEHIVTLMKDITSALGMLSNSNLKNNSTDVLQLNTYTQQMSRLAKLSNFASFDSTDFSERLSSLKNQRFADAVPNAMDVILKYSQRDKLKNNLWATGVGGVSFVENGTGTLYGVNVGYDRFVRGVIVGGYAAYGYSGFYERITSSKSDNVDVGLYARAFIKKSELTFSVNETWGANKTQISSNDALLSMINQSYKYSTWTTNAKVNYGYDFMFKNKSIILKPQIGLRYYYIGMSGLEGVMNNVLYNQFKANADPSKKSVLTIDFALENRHYFNTNSYFYAIGGVGRDLLVNSMGDKLVRFIGNNTLSYRKGDLYNTFANITTGGEVRLFKSFYANAGVGARFGLDYKMIDIIGNIGMRLAF

SEQ ID NO: 59047 - protein, 285 aa, Helicobacter pylori
MKIGWIGLGAMGTPMATRLRDAGLEVSVYNRTESKAAPLKEKGVAVYTSPIDLAAKVDLVFTMLSDKAAIDAVLAPKFWEQMSKKIVVNMSTIAPLESLSLEKIAQKHQATYLEAPVSGSVGAAKAGALLILAAGDEEVISKLKPVLAHLGSQTFYLGKVGQGTGAKLSINSLLAQMGVAYSEALLLAKRLGVDAESFLQIIGQSGMNSPLFQAKKGMWLQDNYPAAFSLKLMAKDIRLAKNEAGEAMKLPFLFQAEELYSQAEKSGLGGLDMAAVYHYLEKGEH

SEQ ID NO: 59048 - protein, 207 aa, Helicobacter pylori
MQKLAVFDFDSTLVNAETIESLARAWGVFDEVREITLKAMNGETDFHKSLILRVSKLKNMPLKLAKEVCESLPLFEGAFELISALKEKNYKVVCFSGGFDLATNHYRDLLNLDAAFSNTLIVENNALNGLVTGHMMFSYSKGEMLLALQRLLNISKDRTLVVGDGANDLSMFKHAHIKIAFNAKEILKQHATHCIDKPNLALIKPLI

SEQ ID NO: 59049 - protein, 506 aa, Helicobacter pylori
MINTIFCATMQRGVAEIVAVEATFTRALPAFVISGLANNSIQEAKQRVQSALQNNDFTFPPLKITINLSPSDLPKSGSHFDLPIALLIALQKQELAFKEWFAFGELGLDGKIKPNSNIFPMLLDIAIKRPHAKIIAPKANEELFSLIPNLQCFFVEHFKEALEILQTPEIKADTHTKKLPFKTIELNDKEYYFSDTYALDFKEVKGQAVAKEAALIASAGFHNLILEGSPGCGKSMIINRMRYILPPLSLNEILEATKLRILSEQDSAYYPLRSFRNPHQSASKSSILGSSSLREPKPGEIALAHNGMLFFDELPHFKKDILEALREPLENNKLVISRVHSKIEYETSFLFVGAQNPCLCGNLLSATKACRCQDREITQYKNRLSEPFLDRIDLFVQMEEGNYKDTPSHSWTSKEMHELVLLAFKQQKLRKQSAFNGKLNEEQIERFCPLNTEAQKLLKQAVERFNLSMRSVNKAKKVARTIADLNACENIEKSHMLKALSFRKIS

SEQ ID NO: 59050 - protein, 292 aa, Helicobacter pylori
MKRRDFIKTTALGATGAVLGAQILQAEESKGSVAKKYKIEAEYSIDFDSAEHTSLFIPMPSVAASNVHLQGNHASYESMLNFGVPYLQVEFLKSTQKKRVHLSYEIASYQLNERLFDASDFVAMGRYERDDASVANIANQLKGATPKESVRNFYAFIKHDMPKRQKALEGKENLPKRDSLPWFATISQESMFVSLCHACGIKSAEVQGLKLAQNSVVENASRVEVYLKDSLLAFDFQNNHKEVFIPLNRHKDMQLDTALLATFGDAFALVDGRDLGNYESKLFEKRVSYTIV

SEQ ID NO: 59051 - protein, 460 aa, Helicobacter pylori
MANILGAGVYSDIFFVAFKLPNLFRRIFAEGSFSQSFLPSFIRSSIKGGFASLVGLIFCGVLFMWCLLVALNPLWLTKLLAYGFDEETLKLCTPIVAINFWYLLLVFITTFLGALLQYKHSFFASAYSASLLNLCMILALLISKEKTHLEALYYLSYGVLLGGVAQILLHFYPLVKLGLWDLLFKGLLGFKTKNTNKKEYRLNRAKKDLKAFFKQFFPSVLGNSSAQIASFLDTTIASFLASGSVSYLYYANRVFQLPLALFAIAISTALFPSIAIALKNNQQDLILQRLQKAWFFLVGVLLLCSIGGIMLSKEITELLFERGQFSPKDTLITSQVFSLYLLGLLPFGLTKLFSLWLYAKLEQKKAAKISLISLFLGLAASLSLMPLLGVLGLALANSLSGLFLFVLTIKAFGFQSFLGIIKNLKSWLVILFLACVEILLLLAFKSWVTHLYLFYYFQGF

SEQ ID NO: 59052 - protein, 1288 aa, Helicobacter pylori
MEIQQTHRKINRPLVSLVLAGALISAIPQESHAAFFTTVIIPAIVGGIATGTAVGTVSGLLSWGLKQAEEANKTPDKPDKVWRIQAGKGFNEFPNKEYDLYKSLLSSKIDGGWDWGNAARHYWVKGGQWNKLEVDMKDAVGTYKLSGLRNFTGGDLDVNMQKATLRLGQFNGNSFTSYKDSADRTTRVNFNAKNISIDNFVEINNRVGSGAGRKASSTVLTLQASEGITSSKNAEISLYDGATLNLASNSVKLNGNVWMGRLQYVGAYLAPSYSTINTSKVQGEVDFNHLTVGDQNAAQAGIIASNKTHIGTLDLWQSAGLNIIAPPEGGYKDKPNSTTSQSGTKNDKKEISQNNNSNTEVINPPNNTQKTETEPTQVIDGPFAGGKDTVVNIFHLNTKADGTIKVGGFKASLTTNAAHLNIGKGGVNLSNQASGRTLLVENLTGNITVDGPLRVNNQVGGYALAGSSANFEFKAGVDTKNGTATFNNDISLGRFVNLKVDAHTANFKGIDTGNGGFNTLDFSGVTDKVNINKLITASTNVAVKNFNINELIVKTNGISVGEYTHFSEDIGSQSRINTVRLETGTRSIFSGGVKFKSGEKLVINDFYYSPWNYFDARNVKNVEITRKFASSTPENPWGTSKLMFNNLTLGQNAVMDYSQFSNLTIQGDFINNQGTINYLVRGGKVATLNVGNAAAMMFNNDIDSATGFYKPLIKINSAQDLIKNTEHVLLKAKIIGYGNVSTGTNGISNVNLEEQFKERLALYNNNNRMDTCVVRNTDDIKACGMAIGNQSMVNNPDNYKYLIGKAWRNIGISKTANGSKISVYYLGNSTPTENGGNTTNLPTNTTNNAHSANYALVKNAPFAHSATPNLVAINQHDFGTIESVFELANRSKDIDTLYTHSGAQGRDLLQTLLIDSHDAGYARQMIDNTSTGEITKQLNAATDALNNVASLEHKQSGLQTLSLSNAMILNSRLVNLSRKHTNHINSFAQRLQALKGQEFASLESAAEVLYQFAPKYEKPTNVWANAIGGASLNSGSNASLYGTSAGVDAFLNGNVEAIVGGFGSYGYSSFSNQANSLNSGANNANFGVYSRFFANQHEFDFEAQGALGSDQSSLNFKSTLLQDLNQSYNYLAYSATARASYGYDFAFFRNALVLKPSVGVSYNHLGSTNFKSNSQSQVALKNGASSQHLFNANANVEARYYYGDTSYFYLHAGVLQEFAHFGSNDVASLNTFKINAARSPLSTYARAMMGGELQLAKEVFLNLGVVYLHNLISNASHFASNLGMRYSF

SEQ ID NO: 59053 - protein, 519 aa, Helicobacter pylori
MQSLWIYPEDTEVLGAACKSLLKALKPRYQKIALFSPISGGCEGFGECESLSSLEVHSAIDKQKALELVSTAQEELLFETILKRYDELQSTHDFVINLGYAPKFFLNALLDLNTILAKHLNAPVVAVAQTSLDHLKAMHSHILKKEAPFAIGLFVGETLEKPHFLSASLCKQQCELEASAIENLLQTKSEIITPLAFQRSLEKKAKKQIKKVVLPESEDERILKAAHRLNLMGAVGLILLGDKEAINSQAKNLNLNLENVEIINPNTSHYREEFAKSLYELRKSKGLSEQEAERLALDKTYFATMLVHLGYAHAMVSGVNHTTAETIRPALQIIKTKPGVSLVSSVFLMCLDTQVFVFGDCAIIPNPSPKELAEIATTSAQTAKQFNIAPKVALLSYATGNSAQGEMIDKINEALTIVQKLDPQLEIDGPLQFDASIDKGVAKKKMPNSQVAGQASVFIFPDLNAGNIAYKAVQRSAKAVAIGPILQGLNKPINDLSRGALVEDIVNTVLISAIQAQDY

SEQ ID NO: 59054 - protein, 2399 aa, Helicobacter pylori
MAFKKARLISRFISKGSFKLNKISKKFFTLNQILKREKPLKRHKKTKSIEKPFNKNKSFLKASVLLIGALGGLSHLRANECRYWSWSSWSYQDNIESGPNSPTHNSYCLFSSAQGSGTYYLNTLTTYSAGGASFTQKFNGGTLDIGGNIRFGGTGINGGDVGYITGTYNAQTMNFNSSHITTGNSYADGGGTTLNFNATNNITINQASFDNSDAGTQKSYMNFKGSNIKISGSSFTDDTNGGFNFSGNNNNSTISFNQTSFNQGTYNFSNSATLSFNNSNFNQGTYHFNSAQSTFENSNFNQGTYNFNDNTSFNNDTFNQGTYNFNSSKVSFSGANTLNSSSPFASLKGSVSFNSGAIFNLNQTLNNNQTYDILTTNGAIQYGVYQSYLWDLINYKGDKAISHVEVSNNTYDVTFDINGQDETLQETFSNQSIITQFLGDDLQQQAQQTYQEDVANSQNALNKVASDNTIANNDTSYTQSSNPTILKDAQGLENTNQQIQQDEKALEKDLAQIKQLANSTTGFNEQAFTQAQKQEQQDEQALQNDENAFNTEQEGLEQAIANAKHANPTPNPTPSPTPTPIKHTAPNTPPSQVPPTPPSQNLPKTNVWNGVYWLQNKTYSNKGIYYIDPNLSGQSGQSGNTLSTYTANLLGRSFGVNANNGTLIIGNNTESVNDNGLIWIGHGGFGYITGTFSAANIYLTNNFKTGEGVSNSDGGGANITFKASDNITMDGLNYNNAETVTKMIQTGASQHSYTTFDATNNISVTDSDFSDMTWGKFSFSAKNISFSNASFSGFTNPGGSSTISTNASNSLSFTDSRLNGGAIYNLQANSLIFNNTQAVFNVLYSRGTSNFNATTQLLGNTSFTLSSQSLLNFNGDTTLQNNANITLGNKSQAAFKNSLTLDNNSNLSLDNQSVLNANGTSAFNNQASLNIYNGSQAAFSSLFFNGGTLSLNANSKLNASSASFSNNTTINLDDSVLNANNTSSLNANINFQGASQADFGGNTTIDTASFNFDSASSLNFNNLTANGALNFNGYAPSLTKALMNVSGQFVLGNNGDINLSDINIFDNITKSVTYNILNAQKGITGISGANGYEKILFYGMKIQNATYSDNNNIQTWSFINPLNSSQIIQESIKNGDLTIEVLNNPNSASNTIFNIAPELYNYQDSKQNPTGYSYDYSDNQAGTYYLTSNIKGLFTPKGSQTPQTPGTYSPFNQPLNSLNIYNKGFSSENLKTLLGILSQNSATLKEMIESNQLDNITNINEVLQLLDKIKITQAQKQALLETINHLTDNINQTFNNGNLVIGATQDNVTNSTSSIWFGGNGYSSPCALDSATCSSFRNTYLGQLLGSTSPYLGYINADFKAKSIYITGTIGSSNAFESGGSADVTFQSANNLVLNKANIEAQATDNIFNLLGQEGIDKIFNQGNLANVLSQMAMEKIKQAGGLGNFIENALSPLSKELPASLQDETLGQLIGQNNLDDLLNNSGVMNEIQNIISQKLSIFGNFVTPSIIENYLAKQSLKSMLDDKGLLNFIGGYIDASELSSILGVILKDITNPPTSLQKDIGVVANDLLNEFLGQDVVKKLESQGLVSNIINNVISQGGLSGVYNQGLGSVLPPSLQNALKENDLGTLLSPRGLHDFWQKGYFNFLSNGYVFVNNSSFSNATGGSLNFVANKSIIFNGDNTIDFSKYQGALIFASNGVSNINITTLNATNGLSLNAGLNNVSVQKGEICINLANCPTTKNSSPANSSVTPTNESLSVHANNFTFLGTIISNGAIDLSQVTNNSVIGTLNLNENATLQANNLTITNAFNNASNSTANIDGNFTLNQQATLSTNASGLNVMGNFNSYGDLVFNLSHSVSHAIINTQGTATIMANNNPLIQFNASSKEVGTYTLIDSAKAIYYGYNNQITGGSSLDNYLKLYALIDINGKHMVMTDNGLTYNGQAVSVKDGGLVVGFKDSQNQYIYTSILYNKVKIAVSNDPINNPQAPTLKQYIAQIQGVQSVDSIDQAGGNQAINWLNKIFETKGSPLFAPYYLESHSTKDLTTIAGDIANTLEVIANPNFKNDATNILQINTYTQQMSRLAKLSDTSTFARSDFLERLEALKNKRFADAIPNAMDVILKYSQRNRVKNNVWATGVGGASFISGGTGTLYGINVGYDRFIKGVIVGGYAAYGYSGFHANITQSGSSNVNVGVYSRAFIKRSELTMSLNETWGYNKTFINSYDPLLSIINQSYRYDTWTTDAKINYGYDFMFKDKSVIFKPQVGLSYYYIGLSGLRGIMDDPIYNQFRANADPNKKSVLTINFALESRHYFNKNSYYFVIADVGRDLFINSMGDKMVRFIGNNTLSYRDGGRYNTFASIITGGEIRLFKTFYVNAGIGARFGLDYKDINITGNIGMRYAF

SEQ ID NO: 59055 - protein, 421 aa, Helicobacter pylori
MNFFDTLMGMFVEPSQKVAKSLAEHVGSFFHAQLILNTIITILFMIWAYKRVKEGDMFEFKTAMGVVVFIAFVGFINWGIKNPNDFNTYFINTIFYPSEKLAILIAQSLNDGLEIPTNTNLSPSEIFSIGNLASSAYAMIVNLWDNAFDGINMFNWLTMIPKIIMFFLVILGELLFLGLLLIIVLLVTAEIFMWSALGLIVLPLGLIPQTKGMLFSYLKKLISLTLYKPCMMLVAFFNYGIIYKVNTLIPTKHEVTQGFYGNADKMANEGKIIDVFGNVLKGDWNSYIAHSSIVGFLTIIVLGSVICFFLVKRVPDFINNIFGTSGGVGAVTEMMQKIGMTIGGAVFGGSAVMVANQVKQAYQSAGGGLAGLQAGAKAFGLGAISGGASAMANHRSVKAGVKHFVASVKSGFGFDNDKNNK

SEQ ID NO: 59056 - protein, 144 aa, Helicobacter pylori
MNISVNPYLMAVVFVVFVLLLWAMNVWVYRPLLAFMDNRQAEIKDSLAKIKTDNTQSVEIGHQIETLLKEAAEKRREMLAEAIQKATESYDAVIKQKENELNQEFEAFAKQLQNEKQILKEQLQAQMTVFEDELNKRVAMGLGS

SEQ ID NO: 59057 - protein, 803 aa, Helicobacter pylori
MWLKSKFFLLMGVGLLSHSLNALSLTLTQGKEEGEDFSVLTLRNDKAFSCSYANEKPPSGIEASLSIIHAKRPIECVIDSIPKEGFTPLENAFFNITYSMRQQQFILHIKPKVMRRLTLFSFDRDYKKAIPLFVENDAKAKMWQIIGYDQKIPFLSEKDNAQKGLNFPIIIKDAQTPIIQELDVNNKPLLTTKGYDLNAYLEAKKQMDSQAYFDALRTISRAFKNYPQTIFKKDLYLLEIIALGKLGIKKSLLIDIGTQWIKNYPTDPNIPEALYYVAKALDENNNYKQAVRYYKRILLEYKNSRYAPLAQMRLAIEAAEGSDLSNANMLFKEAFSNAKDKESASEIALNWAEAEINYQNFNNAKYLIDKVVQSNPDYLSMHSELALELLKLLKKNQMNESAIEIAHLLLNQDDDLKAKEQALYDLGALYARIKDFKNAHLYNLQYLQDHAELERASVVRARDEKALFSMEGNTQEKIAHYDKIIQNFPNSNEAQKALELKAQLLFDNKHYAEVLGMQKNLPKDSPLIQKTLNILAKTPLEDHRCKEALKYLSQITAFAFNPQEEIQAFDCLYFASLKEKAQIIALNALKAAKTPSEKLTWLYRLGRNYYRLGDFKNSTLASKDALILAQSLNKKEFYDIAFVLFSDYMQNNEKGLALNLYAFLEKHFKDDKRMALVYFKLLENEKDPKSVKIYATSLLKLQDAYKDYSYTPFGEFALIDAYRTTKDYSKALETLDKLLNRRLSLEDHQKALYLQSSLLDLTNQKAKSKASLEKCVQLKQKDQTNAWQNLCEQGLNLFKNKES

SEQ ID NO: 59058 - protein, 123 aa, Helicobacter pylori
MNTNNHNNEKKNTITRRMKIAHNSLPETDRKAHMEPKWRELADIRSKMFAESKKQLKERGIQLKEKSKAQQQESFEREKELMEEEFQVQRELLEIYYGYPTQKNKPGIKYDDTIDIEPEDEKD

SEQ ID NO: 59059 - protein, 335 aa, Helicobacter pylori
MKDILNALYHQKDLNDEEVKKLFTLIIDEKVSPAQLGAVLCALKIKGESFKEISVAATTLLEHAPKPFNSGLDLIDNCGTGGDGLKTINISTIAALIASSMGLSMAKHGSRSVSSHSGSADLLENLGVNIEMNPMQLENCFKQSHFGFLFAPLYHQSFKKSAPLRKELFTKTIFNCLGPLINPLRPKIQLLGVYDKSLCKTMALALKALGVKRAMVVNGGGTDEIVLHDITHACELKNNEILEYDLSAKDFDLPPYDLKELQIENAKESVQACLDILENKGKDSHTMVVAANVASLLYLSHRAKDLKEGVSMTLEHLKTKAPYAHLQKIIRLSHA

SEQ ID NO: 59060 - protein, 553 aa, Helicobacter pylori
MKFLKFFASSVTLDEKFLMFLLCNALSNAYKNSDLFSFSKGFLGAFLIGFVVYYGCALIPKKRLKYSLEWLFIGSGIIFSVAEIFTLFMFKMPFSKGLIDTLLATNSSETMAFIKSYKNYLLYYALILIALLIAIKIIRFRALVPGVIASVLGLSILTIGSVRNIKHLTKNDAILKRSLFSLSLARGFYSAYLSLFDRQQAIKFYSFLNNLYLPSDYLSSTGDISNVVLVIGESASRNFMQLYGYSVPNNPLSSELANERERERESNNLFVFSDTISKEAHTSDVFESLLNYSDAETTKPWYHYHNMIDIFKRSHYETFWLEKQIVDEWGITQNLVSNRSKNRYYILGNYGAYDEELVKFYSKNVQPQLKSKNFIVFHLLGSHSWYADRFPKSFAKFKPSDLSFSNLHASSDRDKQIVADYVNSLYYNDFVLNGIFNLFKDKDAIVFYLSDHAQDIFESGPTYGHSCSKAGLEIPFMIYVSDIFKEKHPEKVKLIKNALNKPFMSDDLIHSLLPLVGIHTKDEIESKNLFSPQFDAQRKRAVCYGSMNYDRTK

SEQ ID NO: 59061 - protein, 316 aa, Helicobacter pylori
MQEFSLWCDFIERDFLENDFLKLINKGAICGATSNPSLFCEAITKSAFYQDEIAKLKGKKAKEIYETLALKDILQASSALMPLYEKDPNNGYISLEIDPFLEDDAIKSIDEAKRLFKTLNRPNVMIKVPASESAFEVISALAQASIPINVTLVFSPKIAGEIAQILAKEARKRAVISVFVSRFDKEIDPLVPQNLQAQSGIMNATECYYQINQHANKLISTLFASTGVKSNSLAKDYYIKALCFKNSINTAPLDALNAYLLDPNTECQTPLKITEIEAFKKELKTHNIDLENTAQKLLKEGLIAFKQSFEKLLSSF

SEQ ID NO: 59062 - protein, 180 aa, Helicobacter pylori
MLLCAGRNETLKKAVPIGVGLIESAINLTRMCLKNPDTESLIFIGSAGSYSPETEILSVFESIEGYQIEESFSHLNSYTPLDNFIHIETKEQALFERVRVNSSNYIHTSEMFAKKMVQKGVLLENMEFFSVLSVAKIFSLKAKGIFCVSNHVGLNAHKEFKENHAKVKQILENIIDSLIV

SEQ ID NO: 59063 - protein, 69 aa, Klebsiella pneumoniae
SVLPLAPVSPFVPLFLGFLQRYRPDARLGTYYSLVLPYPLIFLAVWLLLLVGWYLVGLPIGPGIYPRLS

SEQ ID NO: 59064 - protein, 306 aa, Klebsiella pneumoniae
ILGFFQRLGRALQLPIAVLPVAALLLRFGQPDLLNVPFIAQTDGAIFDNLALIFAIGVASSWSKDNAGSAALAGAVGYFVMTKAMVTINPEINMGVLAGIITGLVAGAVYNRWAGIKLPDFLSFFGGKRFVPIATGFFCLILAAIFGYVWPPVQHAIHSGGEWIVSAGALGSGIFGFINRLLIPTGLHQVLNTIAWFQIGEFTNAAGAVFHGDINRFYAGDGTAGMFMSGFFPIMMFGLPGAALAMYLAARKARRPMVGGMLLSVAITAFLTGVTEPLEFLFMFLAPLLYLLHAVLTGISLFIATA

SEQ ID NO: 59065 - protein, 127 aa, Klebsiella pneumoniae
CYTLVTETQVDCLAAALGSTHGLYKGKARLGFTEMKAIAEQVKVPLVLHGGTGIADEDMRRAIACGTAKINVNTENMYAWCQQVKAIFAADTGHDVNDPRKVIAQGLQPVREMIARRMALFGSEQRY

SEQ ID NO: 59066 - protein, 73 aa, Klebsiella pneumoniae
VPGVRAAQCHDTFSAERARKSNNAQIITLGARVIGAELCKKIIQAWLESEYEGGGSAPKVERIDYYEHQHARD

SEQ ID NO: 59067 - protein, 352 aa, Klebsiella pneumoniae
RQTVYLREVLDNAKFRDNPSPLTVVLGKDIAGDPVVADLAKMPHLLVAGTTGSGKSVGVNAMILSMLYKAQPEDVRFIMIDPKMLELSVYEGIPHLLTEVVTDMKDAANAVRWSVNEMERRYKLMSALGVRNLAGYNEKIAEAARMGRPIPDPYWKPGDSMDAVHPVLEKLPYIVVLVDEFADLMMTVVKKVEELIARLAQKARAAGIHLVLATQRPSVDVITGLIKANIPTRIAFTVSSKIDSRTILDQGGAESLLGMGDMLYSGPNSTTPVRVHGAFVRDQEVHAVVQDWKARGRPQYVDGITSDSESEGGGGGFDGGEELDPLFDQAVNFVTEKPKASISGVQRQFRIG

SEQ ID NO: 59068 - protein, 168 aa, Klebsiella pneumoniae
SVEKGWQQAYEKLKAFNKNVTFTPGNAGTLDMLSRGEIAMGPVWVDMFYSWKDQGKLPPSIKLALLAPGMPGQPMYYVIPAKAANPQLARDFIALATSPEVQAQGIVKQFNWYPGIDAGQVKPKLDAATWQKLFAEISPEALAKYGKSFPIAPYFDDIKEGYESQVAN

SEQ ID NO: 59069 - protein, 217 aa, Klebsiella pneumoniae
  MISC_FEATURE (193)..(193): X=any amino acid
  MISC_FEATURE (215)..(215): X=any amino acid
RRKQQQLIVMEERATIARELHDSIAQSLSCMKMQVSCLQMQGDALPTESRQLLGQIRNELNTSWAQLRELLTTFRLQLTEPGLRPALEASCQEYSAHFGFTVQLDYQLPPRFVPSHQAIHLLQIAREALSNALKHASATEVTVTVSQRDNQVRLVVADNGRGVPDHAERSNHYGLIIMRDRAQSLRGDCQYRXRETGGNEVIVTFIPENTFSIQXGD

SEQ ID NO: 59070 - protein, 62 aa, Klebsiella pneumoniae
  MISC_FEATURE (51)..(51): X=any amino acid
ESLQFSAPEFGAIASVDDESAAWSQGILSFSDKPLSEVIATLSRYRNGALXCDPTVALLRLT

SEQ ID NO: 59071 - protein, 218 aa, Klebsiella pneumoniae
QAVTHTLATGPVNDLELALFPDETGGLSLEILANKARYDEAELRRHMARLTALLAQFAADPTLRCGEAEMLSADELARLAAVNDTAVPLPATTLSALVADQARKTPDAPALADARWQFSYREMRQQVVALAQLLRQRGVKPGDSVAVALPRSVFLTLALHGIVEAGAAWLPLDTGYPDDRLRMMLEDARPSLLIATEDQLARFSDIPGLESLCYQQPL

SEQ ID NO: 59072 - protein, 114 aa, Klebsiella pneumoniae
MIINGMFWVLCSGASWRDLRERYGPWKTVDHRFNRWSKTGVINNIFNRLLTLLNANSLIDWSATALYSSNIRALRCAAGAQKNIPISPEIMCWVALAAVLAPKSTCRQTEAVCR

SEQ ID NO: 59073 - protein, 276 aa, Klebsiella pneumoniae
MVSETKTTEAPTLRRELKARHLTMIAIGGSIGTGLFVASGATISQAGPGGALLSYILIGLMVYFLMTSLGELAAFMPVSGSFATYGQNYVEEGFGFALGWNYWYNWAVTIAVDLVASQLVMSYWFPDTPGWIWSALFLGIMFLLNWISVRGFGEAEYWFSLIKVATVIIFIIVGVMMIVGIFKGAQQAGWSNWGIADGRSAGGFSAMIGVAMIVGFSFQGTELIGIAAGESENPEKNIPRAVRQVFWRILLFYVFAILIISLIIPYTDPSLLRNDV

SEQ ID NO: 59074 - protein, 266 aa, Klebsiella pneumoniae
MLATTDLWFRYQDEPVLKGLTLDFSRHAVTGLVGANGCGKSTLFMNLSGLLRPQQGAVLWQGEALNYSKRGLLALRHRVATVFQDPDQQIFYTDIDSDIAFSLRNLGVAEEEIARRVDEALTLVDAQGFRQQPIQCLSHGQKKRVAIAGALVLQARYLLLDEPTAGLDPRGRAQMIAIIRRIVGQGRHVVISSHDIDLIYEVSDAVYVLRHGEVLAAGDPGEVFACAETMDRAGLTQPWLVKLHSELGLPLCKTEAEFFQRMHNNA

SEQ ID NO: 59075 - protein, 193 aa, Klebsiella pneumoniae
QAQHISLTNFLDSGLYTSLTERLVAAQRHIDNEVKVTDSLKDSFDDTNNNLFQLGADNIFLGRKAATKEEAIRFAGEQLVKGGYVEPEYVQAMLDREKLTSTYLGESIAVPHGTIEAKDRVLKTGVVFCQYPEGVRFGEEEDEVARLVIGIAARNNEHIQVITSLTNALDDETVIERLAKTTSVDEVLALLNK

SEQ ID NO: 59076 - protein, 360 aa, Klebsiella pneumoniae
MSEQQAQGADAAIDLNNELKTRREKLAALREQGVAFPNDFRRDHTSDQLHADFDGKENEELEALNVEVAVAGRMMTRRIMGKASFVTLQDVGGRIQLYVARDDLAEGVYNDQFKKWDLGDIIAARGKLFKTKTGELSIHCTELRLLTKALRPLPDKFHGLQDQEARYRQRYLDLISNDESRKTFKVRSQILAGIRQFMVGRGFMEVETPMMQVIPGGASARPFITHHNALDLDMYLRIAPELYLKRLVVGGFERVFEINRNFRNEGISVRHNPEFTMMELYMAYADYKDLIELTESLFRTLAQDILGNTEVPYGDQVFDFGKPFEKLTMREAIKKYRPETEMADLDNFDSAKAIAESIGI

SEQ ID NO: 59077 - protein, 361 aa, Klebsiella pneumoniae
TKKLLPLLLLSALSAAAHAATPPNTLVVAQGLDDIVSLDPAEANELSSIQTVPSLYQRLVQPDRNNPEKIVPILAESWQADPAAKTLTIKLKPDAKFASGNPLRPEDVIFSYTRAVTLNKSPAFILNVLGWQPDNIASQLKKVDDHTLTLHWTADVSPAVALNILSTPIASIVDEKQVAPNAKNNDFGNDWLKMHSAGSGAYKMRVYQPHQAIVLEANASSPTGAPKIKSIIIKNVPDPASRRLLIQQGDADVARDLGADQIAALQDKPGVKVLSIPSAEQNYLVFNTANSANPLLNNPAFWEAARWLVDYEGITKNLLKGQYFIHQSFLPAGLPGALETNPFTFDPQKAKAILDKAGIKD

SEQ ID NO: 59078 - protein, 326 aa, Klebsiella pneumoniae
  MISC_FEATURE (232)..(232): X=any amino acid
LAAIVLALVIAVGVSVGELAIPLQNVFYAISNRTGLTAEPLNRIYESVIWDFRLSRALVAACCGAGLAICGVVLQSLLKNALAEPYVLGVSAGASTGAVSIVVLGLGAGAISLSAGAFAGAFAAFAFVALLTNGARGGNERTILAGVAASQLFNAITAYTISTSASAQQARDVMFWLLGSFSGVRWPEFQLVIVVVLAGLAVCLWYARALDAFTFGDDAAASLGIAVPRVAXILFTTAALITATIVSMAGSIGFVGLVVPHVMRFFFGPLHRTLLIASALAGAILMVLADIASRLLIAPQSLPVGVVTALVGVPFFAVIIYRSRNK

SEQ ID NO: 59079 - protein, 418 aa, Klebsiella pneumoniae
MDKFRVQGPTRLQGEVTISGAKNAALPILFSALLAEEPVEIQNVPKLKDIDTTMKLLSQLGAKVERNGSVWIDAGPVDVFCAPYDLVKTMRASIWALGPLVARFGQGQVSLPGGCAIGARPVDLHISGLEQLGAEIKLEEGYVKASVSGRLKGAHIVMDKVSVGATVTIMSAATLAEGTTIIENAAREPEIVDTANFLNALGAKITGQGSDRITIEGVQRLGGGVYRVLPDRIETGTFLVAAAISGGKILCRNAQPDTLDAVLAKVRDAGADIETGEDWISLDMHGNRPKAVQRGTAPHPGFPTDMQAQFTLLNLVAEGTGVITETIFENRFMHIPELIRMGAHAEIESNTAICHGVKQLSGAQVMATDLRASASLVLAGCIAEGTTIVDRIYHIDRGYERIEDKLQGAGANIQRVKG

SEQ ID NO: 59080 - protein, 257 aa, Klebsiella pneumoniae
MRFTDKVVVITGAAQGIGRQTAEQAAAEGAALLLIDRSSYVHELAATLAQSGCLVLALEADLEAWESTEQAFAAGVAHFGRIDVLINNVGGTIWARPFAEYQPDQIEKEIRRSLFPTLWGCRAALPWMLKQGKGSIVNISSVATAGVNRVPYSAAKGGVNALTRSIAMEYSGSGIRINAVAPGGTEAPPRLTPRNEEQPSEQEKAWYQQVVDQTVASSLLHRYGTLAEQANAILFLASDEASYITGVTLPVAGGDLG

SEQ ID NO: 59081 - protein, 208 aa, Klebsiella pneumoniae
  MISC_FEATURE (183)..(183): X=any amino acid
MFAQQPRSAPAPFYEKVKQAISEKIHSGVWRPHDRIPSEAELVAQFGFSRMTINRALREVTDEGLLVRLQGVGTFVAEPKGQSALFEVRSIAAEIVARHHQHRCEVLLLEETRADHIQATALSVPEGTRIFHSLMVHYENEVPVQIEDRCVNAAVVPDYLHQDYTATTPHDYLSLIAPLTEVXHIVEAVQATAEECALLHIHAHDPCL

SEQ ID NO: 59082 - protein, 193 aa, Klebsiella pneumoniae
MMAEIFGKDSGLCRGKGGSMHIADLSKGMLGANAIVGGAPPLAIGAALTAKTLKTGNVGVSFTGDGGSNQGLVFEAINMAVVLQLPAVFIFENNGYGEGTGHDYAVGGRDIARRAAGFGLPAVTVDGTDFFAVYEATSEAVKRAREGGGPSVIEAKAFRWHGHFEGDPALYRAEGEVQRLREQHDPLKIFTAK

SEQ ID NO: 59083 - protein, 311 aa, Klebsiella pneumoniae
MNELVQILKNTRQHLMTGVSHMIPFVVSGGILLAVSVMLYGKGAVPDAASDPNLKKLFDIGVAGLTLMVPFLAAYIGYSISDRAALAPCAIGAWVGNSFGAGFFGALIAGMIGGLVVYYLKKIPVHKVLRSVMPIFIIPIVGTFITAGIMMWGLGEPVGALTANLTGWLQGMREGSIVVLAIIMGLMLAFDMGGPVNKVAYAFMLICVSQGVYSVVAIAAVGIAVPPLGMGLATLIGHKYFTAEERETGKAALVMGCVGVTEGAIPFAAADSLRVIPANMIGAASGCVTAALMGAQCYAGWGGLIVLPVVQ

SEQ ID NO: 59084 - protein, 201 aa, Klebsiella pneumoniae
MAQHDENVVWHAHPVTQQQREQHHGHRGVVLWFTGLSGSGKSTVAGALEEALHERGVSTYLLDGDNVRHGLCSDLGFSDEDRKENIRRVGEVARLMVDAGLVVLTAFISPHRAERQMVRERLGEGRFIEVFVDTPLAICEARDPKGLYKKARAGELRNFTGIDSVYEAPEKAEIHLDGEQLVTNLVHQLLDLLQQSDIIRS

SEQ ID NO: 59085 - protein, 423 aa, Klebsiella pneumoniae
MDKIEVRGARTHNLKNINLVIPRDKLIVVTGLSGSGKSSLAFDTLYAETQRRYVESLSAYARQFLSLMEKPDVDHIEGLSPAISIEQKSTSHNPRSTVGTITEIHDYLRLLYARVGEPRCPDHDVPLAAQTVSQMVDNVLAQPEGLRLMLLAPIIKERKGEHTKTLENLASQGYIRARIDGEVCDLSDPPKLELQKKHTIEVVIDRFKVRDDLAQRLAESFETALELSGGTAIVANMDDEKAEELLFSANFACPICGYSMRELEPRLFSFNNPAGACRTCDGLGVQQYFDPDRVVQNPELSLAGGAIRGWDRRNFYYFQMLKSAGGHYKFDVEAPWGTLSANVQKVVLYGSGKESIEFKYMNDRGDTSVRRHPFEGVLHNMERRYKETESSAVREELAKFISNRPCASCDGTRLRREARHVFV

SEQ ID NO: 59086 - protein, 338 aa, Klebsiella pneumoniae
MAVKSLKKGYLALAASMLLVAQAQATELLNSSYDVSRELFAALNPPFEQQWAKDNGGDKLTIKQSHAGSSKQALAILQGLKADVVTYNQVTDVQILHDKGNLIPADWQSRLPNNSSPFYSTMGFLVRKGNPKNIHDWNDLVRSDVKLIFPNPKTSGNARYTYLAAWGAADKADGGDKAKTEQFMTQFLKNVEVFDTGGRGATTTFAERGLGDVLISFESEVNNIRKQYEAQGFEVVIPKTNILAEFPVAWVDKNVKANGTEKAAKAYLNWLYTPQAQTIITDYYYRVNNPKVMDALKDKFPQTELFRVEDKFGSWPEVMKTHFASGGELDKLLAAGRK

SEQ ID NO: 59087 - protein, 574 aa, Klebsiella pneumoniae
MTLPTKTSTLDVAAQCFLNSLVRETKDWRLTEYQPTQLIIPLGEQQALHFRVAYFSPTQHHRFEFPARLVTASGSHPVDFATLSRLIVDKLQHQLLLPATSCETFHQRVMESHAHTQQAIDARHDWAALREKALNFGEAEQALLVGHAFHPAPKSHEPFNQQEAERYLPDFAPHFPLRWFAVNKTQIAGESLHLNLQQRLTRFAAENAPQLLNELSDNQWLFPLHPWQGEYLLQQEWCQELVAKGLIKDLGEAGAPWLPTTSSRSLYCATSRDMIKFSLSVRLTNSVRTLSVKEVKRGMRLARLAQTDDWQTLQARFPTFRVMQEDGWAGLRDLHGNIMQESLFALRENLLVDQPQSQTNVLVSLTQAAPDGGDSLLVAAVKRLSDRLGITAQQAAHAWVDAYCHQVLKPLFTAEADYGLVLLAHQQNILVQMLGDLPVGLIYRDCQGSAFMPHAAGWLDTIGEAQAENVFTREQLLRYFPYYLLVNSTFAVTAALGAAGLDSEANLMARVRTLLAEMRDQVTHKTCLNYVLENPYWNVKGNFFCYLNDHNENTIVDPSVIYFDFANPLLAQEG

SEQ ID NO: 59088 - protein, 315 aa, Klebsiella pneumoniae
MRRVTILVLFLLVSLTWGTTWLAMRIAAETIPPVFATGMRFMFAAPFLIGIAWLRKTPLLFPRGQRLFQLVICIFYFAIPFSLMIYGETYVSSGLASIIFSNMPVAVLIASVLFLNEKTNSMQIAGLTIAIVALAGILLEETKTSTETQWQGIIALVSAVIIHAIIYTQCKKRSCAVSVITFNALPCFLAGLLLSAAGWFFERPLVSAFSAHSILATLYLGAFAGVFGILCYFALQQKASAFQASLVFLIFPLIAVSLESYVYGYAISTQSMLFIIPLVAGIFLTLFSRRVSATNKHRDCSPQTNNGIHEHTETS

SEQ ID NO: 59089 - protein, 949 aa, Klebsiella pneumoniae
MLEIYAIAGGDWLRGNLNAIAAFMGTSTWSTIEKMCIAISVLIVAGNWVKKHNVMDLIGWVFSLTLVSMLVVIRTPVQIIDYSNVAQVYEVDNVPIGLAIPASLTTRAGNALIQSYEMVFALPDSVTYSKTGMLFGSNLVAKSTDFLSQNPQITTLFSDYVQNCVMGDIFLNHKYSFEELLNSPDPYTLIFANPSPLRGVFDKNNQFQTCEEASRDLKSALVLDTQTGGKTWNYYVRQLFGGKPNPDLLFSQMIGDSYNYFYSSGQSAGQIIRQNVTMNALRSGIQSYAARSGDTASLVNMANTSSLEKQRLAQATMGHQALRTLPLMQTVIMGIMIGMFPIMVMAAMFNMMTLQVLKGYVFALIWLQTWPLLFAILNSAMAYYAKQNGVPVVLSELSQVQLKNSDIATTAGYIAVMIPPLSWGIVKSMGAAFSSAYSHFSSSGLSATSQAASGVVDGNYSFANMQMENVSGYSWGTNSTTSFGQMSRQLANGGMSTQTRDGSMVWDSGGAMSKLPVDINVGRQIASAQQQMAREADVQAESALHGYNSSVTSAWNSLQQFGTNKGNSASTTTGADTTESSQDSMARSKMWNAVVANAKANNISNEESFQQLMDDSAKSTQGVDLYGSGKWSSGDQLFGKLGKWGTGLSAEAGVKGSAGWTHSSGNTDNVGTSGRESNDSRHDTSSQAAKDFKEASDYFTSRKTTTSGNITDNNASSRVDQFAASLSSAKNSYDQYTSSRTRSHEYSEMASRTESMTGQMNENLTQQFANFVQHRAPQDAEAILTNTSSPEIAAQREALAREFVKEQVEPRVDAAYQQGRESIGQNMAGVSGGGDNGSVMADYRQNSGRIDAMTQDAGIKDNVDQKVGGMITENKQQQQETRENIQRQGAEVKNENTEMEKDHKTKANEFKGDYNERKSKVKSLPGADSPTELEAKAAKIQKDYLDGKR

SEQ ID NO: 59090 - protein, 127 aa, Klebsiella pneumoniae
GNYFDRAEYIRWKAFRETDDARYIGLVMPRVLGRLPYGPDTVPVRTFNYVEQVKGPDHEKYLWTSAAFSFASNMVKSFVNNGWCVQIRGPQAGGAVKDLPIHLYDLGTGNQVKIPSEVMIPETREFE

SEQ ID NO: 59091 - protein, 129 aa, Klebsiella pneumoniae
MLDKIVIANRGEIALRILRACKELGIKTVAVHSTADRDLKHVLLADETVCIGPAPSVKSYLNIPAIISAAEITGAVAIHPGYGFLSENANFAEQVERSGFIFIGPKADTIRLMGDKVSAITAMKKTGVP

SEQ ID NO: 59092 - protein, 165 aa, Klebsiella pneumoniae
MGRKVNHHQKPMEGKTMRIGVPQERLAQETRAAATPKTVEQLLKLGFSVAVESGAGKLASFDDEAFAEAGAEIVTGDEVWQSDVILKVNAPNDDEIALLNPGTTLISFIWPAQNPQLMEKLAARNINVMAMDSVPRISRAQSLDALSSMANIAGYRAIVEAAHEF

SEQ ID NO: 59093 - protein, 133 aa, Klebsiella pneumoniae
IAPTGGQLGQISVRLGAYVSAGTHLTSLVPPQHWVIANLKETQLAEVRVGQPVTFTVDALNGETFHGKVQSISPATGVEFSAISPDNATGNFVKIAQRIPVRITVNDGQNNSERLRPGMSVQVTIDTRAEKQP

SEQ ID NO: 59094 - protein, 149 aa, Klebsiella pneumoniae
KHLPAAGEIVIFDRSWYNRAGVERVMGFCTPEEVQKFLDGAPMVERGMVESGIILLKYWLEVSPQEQERRLRDRIDDGRKIWKLSPMDIKSFNRWDEYTAARDAMFAATDTAWAPWFVARSEDKKRVRLNIITHLLSQIPYEALPVEPV

SEQ ID NO: 59095 - protein, 190 aa, Klebsiella pneumoniae
MRNFVFLLSLLGTPMTVGINTEAINHKNTPFTMYDLGWVVLCIGAAIGSGIVFFPLQVGLKGVWVFALAVILGYPAVYYMQKLFIETMARSIEQDSYLSIITSYVGSRWGVLLGALYSFTMLKSIVEYALAITNDSASYLKTFGLTNQTLSEHWWWSLLLIAGLSLVASKGEKLLCKVSGSMIVVKLVII

SEQ ID NO: 59096 - protein, 225 aa, Klebsiella pneumoniae
MNHLPHWWQNGVIYQILPKSFQDTTGSGTGDLRGVTSRLDYLQKLGVDAIWLTPFYVSPQGSNGYDVANYTAIDPSYGTMADFDALVAEAKARGIRIVLDMVLNHTSTEHEWFRQSLNKESPYRQFYIWRDGEPDALPNNWRSKFGGNPWQWHADSGQYYLHLFAIEQADLNWENPAVRAELKKVCEFWADRGVDGLRLDVVNLISKDQTFPCDLDGDGRAFYTD

SEQ ID NO: 59097 - protein, 824 aa, Klebsiella pneumoniae
EYHAELSNKLDLTEKGLNQVSNEMRMGAISAGQFKMAMRLLPAQLNDNAVGLAGGMPLFTIFMQQGSQIADSFGGWGNLFEIIKQQLLGAGDAADESSDSLSDNANSLSENAENAKKLTGFLNPMTIGIGALVAVVGTLTYAWYKGSQEQQEFNKSLVLTGNIAGVTTGQLADMARSVADNTGNTTAAAAQALNRVVSGGKIATGSMQTVTEAVVAMNDATDESIDSMVADFEKIAQNPVAAIGELNDKYHFLTLATYNQIKALQDEGNQQEAARLATEAYAATMKQRADEITESLGTLQSAWKWLGDEAKGAWDAMLNIGREKSLESQLEEAEKALENAQRSRGIGNGLWNTYGVNYQGSDNAIAQAQAQVDSLRGQITAQGVLNDAISTYNKRQQKGVDAMRRLDAQADRMASNESKRKKELAQLDRDLADARAAGRAISAEDEAARRKEINEKYKDPKTPKGKSYTEDAATRLLDQINQQTAAMQSQLDASDKLNSATQARIKFEQQIADLKSKTQLTADQKSILSRSDEILQAYKQQEALQNSVKTLDDYRKMQEQVKTKDERTNDLLKTRLELLEKAKATGQLKPGEYEKTRADIYQNTDMQLPSTVRNVVGNTTPTGGQLSGTFGGMQQQYSQLDQAQKDLDAWLARKEEAYKKAGAITVEGEARMQKTRADAANAAAVIEAQKNAIITSTTQSMMDSGLSILADGFGQQSGIYKAAFAASKAYAIAQSMVAINAGIAQAASLPFPANLMAMASVAMETASIVSNIKAVADTGFASGGYTGPGGKYQPAGIVHKGEYVFDQASTNRIGVSQLEALRNG

SEQ ID NO: 59098 - protein, 117 aa, Klebsiella pneumoniae
DPRSPQEMIDEAVAAANQSDVVVAVVGEAQGMAHEASSRTDITLPQSQRNLIAALKATGKPLVLVLMNGRPLALVKEDQQADALLETWFAGTEGGHAIARRLFGDYNPSGKAAGVFP

SEQ ID NO: 59099 - protein, 99 aa, Klebsiella pneumoniae
AQARQITALLPLLTENYDLSNDVLYTAQKRGSVLLNAMLDGVKPDSNPNVRWLLLVAHDTNIAMVRTLMNFSWQLPGYSRGNIPPGSSLVLERWRNAKS

SEQ ID NO: 59100 - protein, 292 aa, Klebsiella pneumoniae
LPDIQSTKGDGEGESLSWVGMEQIDLPIDIAGRPVSAKVNAGINLLSSPEAEKGIHMSRLYLLLDELTQGEITPALLQHVLERFLVSHQGRSDEASIEISGDLLLSRKSLNSNHSGWKAYPLTLSAELRQSFTVTLKVGIPYSSTCPASAALSRHVAGLQFSKDFGNRIDRLPAAEIADWLVEKGMPATPHSQRSWAWVDIRLNPEAKSLPVLELIDYAEVALGTAVQTVVKRRSNRAFAVANGQNLMFCEDAARRLNNVFRCASFCEAFDIRVEHQESLHPHNAVARIHWK

SEQ ID NO: 59101 - protein, 155 aa, Klebsiella pneumoniae
KVEKDKLSSKVVELTEQTSLKDEEINELKEELEKERTEKEEFVDKNNELYFKNTELEKEKEELAKEVKTLEDENIALEKENTTLTEKVSALEEKNTKLEEELETLDANTTREINNLKGQVESLNGQLEQKDITHAADKEAALAELRKELSEAFEY

SEQ ID NO: 59102 - protein, 153 aa, Klebsiella pneumoniae
MRAGWPTAQPTDWRRSPAPGLRWRQSSASRRMLRALLLQQLIELQAAAAKVGIGAVAERDNAVPQVRLIHIFDALIQRDDAVRQIALPGGGGDHQHILTRVGFPVVDLRILIHGSLVSQSAEDRFRFFRDQQRVAVHGADKNSDFRHAIISLD

SEQ ID NO: 59103 - protein, 164 aa, Klebsiella pneumoniae
MLYALMQDFQRLIALNRHVPQAKVGHAEVIAADEKDAVKVVGGSKIIPPVAHKPCQRLQRITPGGAHRAAVGIGVQGFKVGHRHIAVLPLRYRVPCRQAVTGDILQLFHYVRGTLDIALGLIGVEIKLLMDFGFPLVQRVDDIKHRDKRNKQPQQYRQRSEQIT

SEQ ID NO: 59104 - protein, 121 aa, Klebsiella pneumoniae
MRNFVLYVQKLQNHQTHQNRQTRQSHQSRQSRQSHQSHQSRQSHQSRQSHQSRQSHQSRQSRQSRQSHQSHQSHQSRQSHQSRQSHQCRQSHLIGFVLLYLLDHHVTFLVLHIVSILTHMP

SEQ ID NO: 59105 - protein, 294 aa, Klebsiella pneumoniae
MAYKRGDDVLQVHDLRLTMVQSYHVDAEGDLQLGLGIEVVKHHFPYRIALHFNHDAHPVFIRLVTQRADAFHAFFFDQLGDFLDQARFVHLIRNFVHDDGFAAGFRVHFHFRARANVHFTATGAVGLFDAATAIDNGGGREIRARNMRHQPFNADVFIVNIRQTAVNHFRQVMRRYVGGHPYGDPGGAVHQQVRNFGRHDVRNTLRTVIVVDEIDRLFFKIGHQLMSDFRQTNFGITHRRGGVAVDGTKVTLAVHQHVTQRERCAIRTMVSYTAESPCGWYLPITSPTTRADFL

SEQ ID NO: 59106 - protein, 289 aa, Klebsiella pneumoniae
MAVGLQRGQGGLDRLRQLGVAFGDVDPQRQRVDQARRAYRQAAAALVDDDLRCRGNLKLSADVLRQQRLRGFRRRRELLNGDGRFAVFQAPLIGVFFQAGHPGGARLQTDLHTAQLIFGFRLHRAALQGDDRRAGEGVRDGVGLFLALRRHVHPGDHRVIFLADAEDQAGELGVDQLRFGLQMLGDQRGKLRVETDDIVIAVIGLKRRVGDLHSHLKDALGQQFRRLGDRGKTGADGEGKRDMARDFFQGASHHGSSRVVRGFFAEPVFSNGQTYWCRARAPVAEVHRD

SEQ ID NO: 59107 - protein, 178 aa, Klebsiella pneumoniae
MHTLSFQQSTGFNAGALIKRYQPIVAEHDNIRSAVRAWAAAEGQDVVSAYIVDEWRQQGGEEIAFPDDISRARQKLFRYLDNPAESERYREYVRLLTPAIMAVLPLEYRHRLLPVDSFMSRLARLEKETSEAKVAVAMGAPRHQKLKELSEGIVEMFRIDPELTAPLMAIVTSMLGAL

SEQ ID NO: 59108 - protein, 552 aa, Klebsiella pneumoniae
MTMSTKPFVYQDPFPLAHDDTEYYLLSKEHVSVAEFDGQQVLKVEPQALTLLAQQAFHDAAFMLRVSHQQQVASILLDPEASDNDKYVALQFLRNSEIAAKGVLPTCQDTGTAIIMGKKGQRVWTGGGDEAALAQGVYNTYTEDNLRYSQNAPLDMYKEVNTGTNLPAQIDLYSVDGEEYKFLCMAKGGGSANKTYLYQETKALITPAKLKNYLVEKMRTLGTAACPPYHIAFVIGGTSAEATLKTVKLASTRYYDGLPTEGNEHGQAFRDVQLEQELLQEAQNLGLGAQFGGKYFAHDIRVIRLPRHGASCPIGMGVSCSADRNIKAKINRDGIWIEKLESNPGKYIPEHLRQAGEGEVVSINLNQPMSEILAQLSAHPVSTRLSLNGTIIVARDIAHAKLKELIDNGEALPQYVKDHPIYYAGPAKTPAGYASGSLGPTTAGRMDSYVDLLQSHGASMVMLAKGNRSQQVTDACHKHGGFYLGSIGGPAAVLAQQSIKSLECVAYPELGMEAIWKIEVEDFPAFILVDDKGNDFFQQIQNKQCAGCKQHG

SEQ ID NO: 59109 - protein, 124 aa, Klebsiella pneumoniae
MATINQLVRKPRARKVAKSNVPALEACPQKRGVCTRVYTTTPKKPNSALRKVCRVRLTNGFEVTSYIGGEGHNLQEHSVILIRGGRVKDLPGVRYHTVRGALDCSGVKDRKQARSKYGVKRPKA

SEQ ID NO: 59110 - protein, 1038 aa, Klebsiella pneumoniae
MPHFFIERPIFAWVIALFIVLTGLFSIPRLPVAQYPEVAPPGIIISVSYPGASPEVMNTSVVSLIEREISSVDNLLYFESSSDTTGMASITVTFKPGTDIKLAQMDLQNQIKIVESRLPQSVRQNGINVEAANSGFLMMVGLKSPSGAYQEADLSDYFARNVTDELRRVPGVGKVQLFGGEKALRIWLDPMKLHSYGLSVTDVLSAISQQNVIVSPGRTGDEPATSSQEVTYPITVKGQLSSVEEFRNITIKSQVSAARVTLADVARVESGLQSYAFGIRENGVPATAAAIQLSPGANAISTASGIRARLTELSGVLPEGMTFTVPFDTAPFVKLSILKVVETFVEAMVLVFFVMLLFLHKIRCTLIPAIVAPVALLGTFTVMLLSGYSINILTMFGMILAIGIIVDDAIVVVENVERLMEDKKMSPQDATREAMREITPAIIGITLVLTAVFIPMAFASGSVGIIYRQFSISMAISILLSAFLALTLTPALCATLLKPHGIHQGKSSVFSAWFNAHFHRLTSFYATGLGFVLKRTGRMMMIYAALCLALFAGLSTLPSSFLPDEDQGYFMSSIQLPSDATMQRTLKVVDTFEEEIAHRQAVESNIMILGFGFSGSGQNSAMAFTTLKDWKQRKGTTAQEEADHIQSQMANVPDAVTMSLLPPAISDMGTSSGFTYYLQDRGGKGYQALKKAADELIVQANHNPHLADVYIDGLGEGTSLSLHVDREKAEAMGVSFDEINQTISVAAGSNYVNDYTNNGRVQQVIVQADAPYRMQPEQLLALSVKNRLGQMLPLSAFVTLSWNVAPQQLIRYQGYPAIRITGSSAQGKSSGTAMAAMDNLAKHLPPGFAGEWAGSSLQEKESASQLPGLIVLSVLVVFMVLAALYESWSIPFAVMLVVPLGLLGAVLAVSVTNMTNDVFFKVGLITLIGLSAKNAILIIEFARQLMKEGKSLIDATLTAAKLRLRPILMTSLAFTLGVVPLMLASGASDSTQHAIGTGVFGGMISGTLLAIFFVPVFFVTITRFTGMRKYRLGNSRNG

SEQ ID NO: 59111 - protein, 142 aa, Klebsiella pneumoniae
MQYVNTCPVLNVEESDRLSFMPYLFGTDFMLAELQVYALAKKWMPGYEGGFWHFIRLPEGGGYMMPDCGRVHLVSSENWFDRTVSADAAGIILTSLAINRRLAAHHDSSNPALTRLYMLRDAQLWNHITFHPECSAIYAALD

SEQ ID NO: 59112 - protein, 1247 aa, Klebsiella pneumoniae
MSKFLDRFRYFKQKGETFADGHGQLLNTNRDWEDGYRQRWQHDKIVRSTHGVNCTGSCSWKIYVKNGLVTWETQQTDYPRTRPDLPNHEPRGCPRGASYSWYLYSANRLKYPLMRKRLMKMWREAKVQHSDPVEAWASIIEDADKAKSFKQARGRGGFVRSSWQEVNELIAASNVYTVKTYGPDRVAGFSPIPAMSMVSYASGARYLSLIGGTCLSFYDWYCDLPPASPMTWGEQTDVPESADWYNSSYIIAWGSNVPQTRTPDAHFFTEVRYKGTKTVAITPDYAEIAKLCDLWLAPKQGTDAAMALAMGHVMLREFHLDKPSQYFTDYVRRYTDMPMLVMLEERDGYYAAGRTLRASDLVDSLGQENNPEWKTVAFDEKGDMTVPNGSLGFRWGDKGKWNLEQRDGKTGEEIELRLSLLGSHDEVANVGFPYFGGEGSEHFNKVDLENILLHKLPAKRLQLADGSTALVTTVYDLTMANYGLERGLNDDNCAAGYDEVKAYTPAWAEKITGVSRAHIIRTAREFADNADKTHGRSMIIVGAGLNHWFHLDMNYRGLINMLIFCGCVGQSGGGWAHYVGQEKLRPQTGWQPLAFALDWQRPARHMNSTSYFYNHSSQWRYETVTAQELLSPMADKSRYSGHLIDFNVRAERMGWLPSAPQLGVNPLRIADEAKKAGMTPVDYTVKSLKEGSIRFAAEQPENGKNHPRNLFIWRSNLLGSSGKGHEYMLKYLLGTENGIQGKDLGKQGGVKPEEVEWRDNGLDGKLDLVVTLDFRLSSTCLYSDIVLPTATWYEKDDMNTSDMHPFIHPLSAAVDPAWESKSDWEIYKGIAKKFSEVCVGHLGKETDVVTLPIQHDSAAEMAQPLDVKDWKKGECDLIPGKTAPHIIPVERDYPATYERFTSIGPLLETIGNGGKGIAWNTQSEMDLLRKLNYTKAEGPAKGQPKLETAIDAAEMILTLAPETNGQVAVKAWQALSEITGREHTHLALNKEDEKIRFRDIQAQPRKIISSPTWSGLEDEHVSYNAGYTNVHELIPWRTLSGRQSLYQDHQWMRDFGESLLVYRPPIDTRSVKAVMGEKSNGNPEKALNFLTPHQKWGIHSTYSDNLLMLTLSRGGPIVWMSEADAKDLGIEDNDWIEVFNANGALTARAVVSQRVPAGMTMMYHAQERIVNLPGSEITGQRGGIHNSVTRITPKPTHMIGGYGHLAYGFNYYGTVGSNRDEFVVVRKMKNINWLDGEGNDQVQESVK

SEQ ID NO: 59113 - protein, 353 aa, Klebsiella pneumoniae
MMQDLRLILIIVGAIAIIALLVHGFWTSRKERSSMFRDRPLKRMKSRDDESENDDFDDNVEGVGEVRVHPVTHAPHGAHGEHEAPRQSPQHQYQPPYERQMQQPARPEEPVRQPPQPPRQAPVPPQQQPAPHAVRSLAGNSRQPAQPPVQPQHQPQPVVQQPVAPQPVTPTVAQPQPAAPQQPAPQPVAASQPAVAEPQPVEPQQPAAPQPKERKETVIVMNVAAHHGAQLNGEVLINSIQQAGFKFGEMNIFHRHLSPDGSGPVLFSLANMVKPGTFNPDSMADMMTPGVTIFMQVPSYGDELQNFKLMLQSAQYIADEVGGVVLDDQRRMMTPQKLREYQDRIREVKDANA

SEQ ID NO: 59114 - protein, 731 aa, Klebsiella pneumoniae
MSSAYDSLDPRVRKWVYKQGWSTLRPLQESSIPAILARDRDVLISAGTAAGKTEAFFLPACSAVADLTNGFGIVYISPLKALINDQYRRLGSLGDALEMPVTPWHGDVPQSKKKKARTNPAGILLITPESLESLLINSMGWLKQAFSSVAYIVIDEFHAFIGSERGVQLLSLLNRIDHVLGCQVNPIPRVALSATLGELEKVPEMLRPDKRLPCVTVTDSNSMATLQVQVKGYLERVIQNEEELQSSAEHDVCADIFRLCRGDSHLVFANSRKRTESIAATLSDMCEEQIVPNEFFPHHGSLAKELREVLESRLQKGNLPTTAVCTMTLELGIDIGKVKSVIQVTPPHSVSSLRQRMGRSGRRDSPSVLRMLITENELTVSSSIVDHLRLQLVQSMAMIRLMISKQWFEPADSRQMHYSTLLHQILAITAQWGGVRADQLWSQLCQTGPFRNVDLNDFKSLLKHMGACGLLTQLASGEMVVGAEGEKLTNHYTFYAVFNTPEEFRIITGNRTLGTVPVDSPLLPDQHIIFGGRRWKVTEIETEKKVIYVEATKGGQPPQFSGGGMSVHDAVRQEMLAIYREGDYRIAIGSKKVDYADTAARNLFAEGCSNFQRFKLQNECFITSGQHCYVIPWMGDKVVNTITALLIRCGFKANSFAGVIEIDNSSVASVQHALKEMLLSGLPSAFDLATDVPEKYLDKYDEYLPESLLAKGYGAKAYETEGTRIWLQKHL

SEQ ID NO: 59115 - protein, 827 aa, Klebsiella pneumoniae
MMSALFNAPAISFADEFFNPALLEVREGEGAPTTDLSVFEVVNGQPAGNYRVDIYVNNEMVTADARDVMFSKNQDGKLEPCVTLAELSQWGVDTASFPELAVSDSECANLAGIPDAFADFQFNRQKLNLSIPHAAMNTRSLDEVPIERWDEGIPALLLNYNMNSYQSRYKGAETYESTYLNLRPGLNIGPWRLRNYTTFEHSNQSGSKWDNVYSYLQRNIVSLRSQLTLGDSSAPADVFDSVPFRGFQMASDDDMLPSSVRNYAPVIRGVARSNALVTIRQNGYVVYETKVAPGAFEISDLASTGGAGDLDVTIKEADGSEQHLRIPYASLPVLQREGKFRYSVTGGQFRAYDSHTEKNLFVQGTGIYGLPWGFTLYGGVQNAGNKYQSYALGVGKNIGSWGAFSADAIHSRSMSTDAGRQQGQSLRVRYSKNFLQTGTNFTIAGYRYSTSGFRSLEETLGTYRSDNNIPSYITDRRRNRAELSLNQDLGDNFGALNASLISEDYWQNERNSLSANLGYYKNFNAIGISLNYSWNRNTGLYGHAEQDNVVSFEINVPLDKFLNRTYASYGTTHASGNGTSHNLRLNGSAFDDASLDWGINATLAGRSEQQVVGGNVSWKASHGTLNGSYSRSRDSQQLGYGIAGGVVIHENGITLSQSLGETIGLVKAPGAEGIGVNNYAGISTDSRGYAVVPYLTPYRRNDISLNSKTLRDDTDITYMTNKVVPTRGAIVRAEYKTAIGHRVLMTLTRPGGKPVPFGAMASLLKSEENASIVGDGGEVLLSGLPQKGTLQVKWGNGQGQETTCRADYIAHKSAGASGLWNATSVCQ

SEQ ID NO: 59116 - protein, 326 aa, Klebsiella pneumoniae
MSHQLTFADSEFSTKRRQTRKEIFLSRMEQILPWQNMVEVIEPFYPKAGNGRRPYPLETMLRIHCMQHWYNLSDGAMEDALYEIASMRLFARLSLDSALPDRTTIMNFRHLLEQHQLARQLFKTINRWLAEAGVMMTQGTLVDAPIIEAPSSTKNKEQQRDPEMHQTKKGNQWHFGMKAHIGVDAKSGLTTSLVTPRATSMDLNQLGNLLHGEEQFVSADAGYQGAPQREELAEVDVDWLIAERPGKVKTLKQHPRKNKTAINIEYMKASIRARVEHPFRIIKRQFGFVKARYKGLLKNDNQLAMLFTLANLFRVDQMIRQWERSQ

SEQ ID NO: 59117 - protein, 145 aa, Klebsiella pneumoniae
MIRDWLTPDKIKVINSIDSWENAVRLAAEPLLMQGYIAGSYIEAILQSHKELGPYYVLAPGLAMPHARPEQGVLRNGLSLLHIKEGVSFGSTENDPVNVVIILCARSGNEHITMIGELAEIFSDQQKLHRLLNADDSKAIQAVID

SEQ ID NO: 59118 - protein, 453 aa, Klebsiella pneumoniae
RSNKTMTFFVCFLAALAGLLFGLDIGVIAGALPFIANEFQISAHTQEWVVSSMMFGAAVGAVGSGWLSFKLGRKKSLMIGAILFVAGSLFSAAAPNVEILLVSRVLLGLAVGVASYTAPLYLSEIAPEKIRGSMISMYQLMITIGILGAYLSDTAFSYSGAWRWMLGVIIIPAVLLLIGVIFLPDSPRWFAAKRRFVDAEPVLLRLPSTSAEAKRELDEIRESLKVKQSGWSLFKDNSNFRRAVFLGILLQVMQQFTGMNVIMYYAPKIFELAGYANTTEQMWGTVIVGLTNVLATFIAIGLVDRWGRKPTLILGFIVMAAGMGVLGTMMHIGIHSSTAQYIAVLMLLMFIVGFAMSAGPLIWVLCSEIQPLKGRDFGITCSTATNWIANMIVGATFLTMLNSLGSANTFWVYGGLNVLFILLTLWLIPETKNVSLEHIERNLMQGRPLREIG

SEQ ID NO: 59119 - protein, 458 aa, Klebsiella pneumoniae
MSMSNSAMSVVILAAGKGTRMYSDLPKVLHTLAGKPMVQHVIDAANDLGACAVHLVYGHGGDLLRQTLHEDNLNWVLQAEQLGTGHAMQQAAPFFNDDEDILMLYGDVPLISVETLQRLRAAKPQGGIGLLTVKLDDPTGYGRITRENGQVTGIVEHKDASEAQRQIQEINTGILIAGGADLKRWLAKLTNNNAQGEYYITDIIAMAHQEGHQIVAVHPQRLSEVEGVNNRLQLARLERVYQAEQAEKLLLAGVMLRDPARFDLRGTLQHGRDVEIDTNVILEGNVVLGDRVKIGAGCVIKNSTIGDDCEISPYSVVEDAQLQAACTIGPFARLRPGAELLEGAHVGNFVEMKKARLGKGSKAGHLTYLGDAEIGDNVNIGAGTITCNYDGANKHKTIIGDDVFVGSDTQLVAPVTVGNGVTIAAGTTVTRNIADNELVLSRVPQVHKQGWQRPVKKK

SEQ ID NO: 59120 - protein, 85 aa, Klebsiella pneumoniae
AKYTKGLADAKIQPEDLQRCISSGKRGLRVKAKCPANGATGSSGLGDASGHRLVDSAERDYFTLRERIVKVTKQVGYLRSTSKSC

SEQ ID NO: 59121 - protein, 289 aa, Klebsiella pneumoniae
MKPRRSMLFIPGANAAMLSTSFVYGADAVMFDLEDAVSLREKDTARLLVYQALQHPLYQDIETVVRINPLNTPFGLADLEAVVRAGVDMVRLPKTDSKEDIHELEAHVERIERECGREVGSTKLMAAIESALGVVNAVEIARASPRLAAIALAAFDYVMDMGTSRGDGTELFYARCAVLHAARVAGIAAYDVVWSDINNEEGFLAEANLAKNLGFNGKSLVNPRQIELLHQVYAPTRKEVDHALEVIAAAEEAETRGLGVVSLNGKMIDGPIIDHARKVVALSASGIRD

SEQ ID NO: 59122 - protein, 533 aa, Klebsiella pneumoniae
MDRLSTMLAKWWRSRLPVFVIKGNKMKETVAMLNQQYVMPNGLTPYAGVTAKSPWLASESEKRQRKICDSLETAIRRSGLQNGMTISFHHAFRGGDKVVNMVVAKLAEMGFRDLTLASSSLIDAHWPLIEHIKNGVIRQIYTSGLRGKLGEEISAGLMENPVQIHSHGGRVQLIQSGELSIDVAFLGVPCCDEFGNANGFSGKSRCGSLGYARVDAEHAKCVVLLTEEWVDYPNYPASIAQDQVDLIVQVDEVGNPQKITAGAIRLTSNPRELLIARQAAKVVEHSGYFKEGFSLQTGTGGASLAVTRFLEDKMRRNGITASFGLGGITGTMVDLHEKGLIKTLLDTQSFDGDAARSLAQNPNHVEISTNQYASPGSKGASCERLNVVMLSALEIDIDFNVNVMTGSNGVLRGASGGHSDTAAGADLTIITAPLVRGRIPCVVEKVLTRVTPGASVDVLVTDHGIAVNPARQDLIDNLRSAGIPLMTIEELQQRAELLTGKPQPIEFTDRVVAVVRYRDGSVIDVIRQVKNSD

SEQ ID NO: 59123 - protein, 231 aa, Klebsiella pneumoniae
MLEPPKSYNEMLPMLHKATFITTFIFYLSLVIYGYIPLVGINAKYIPPIKDYEEFIKWILTFGILPIAFSIFWTVISGALDLHNNVAKIIGIRKVWDNYLIIKPLAKIAGVTRKLSGDESYKVMSKLYYPEVKELKDKHYVELFWNKVYYFWVFFEHTVIAFITVLIISFAKLTNLFSVTGSLNNLWSWFIFLVAFNFLIFIASVKPRTESQVRQIPDDKIKEFFNSNNII

SEQ ID NO: 59124 - protein, 823 aa, Klebsiella pneumoniae
FGEPAAAGSGAPRRRGSGLASRISEQSEALLQEAAKHAAEFGRSEVDTEHLLLALADSDVVKTILGQFKIKVDDLKRQIESEAKRGDKPFEGEIGVSPRVKDALSRAFVASNELGHSYVGPEHFLIGLAEEGEGLAANLLRRYGLTPQALRQQVSKVVGKGAEDGRAETPTNTPELDKYSRDLTKMARDGKLDPVIGRAQEIETTIEVLARRKKNNPVLIGEPGVGKTAIVEGLAQRMVAGEVPETLRDKRLVELNINAMVAGAKYRGEFEERVQKVLKEVTEHQGELILFIDEVHTIVGAGQGGGEGGLDVANVFKPMMARGELNLIGATTLNEYQKYIEKDAALERRFQPVTVPEPTVAQAIMILRGLRDTFEAHHKVSISEDAIIAAAELSDRYITARFLPDKAIDLLDQAAARVKLSATARPVAVQELESELHQLRREQDYVAARKQYDQAAELGKRIEAKEAELKKLVEDGSGSGLRSAEVKAEHVAQIVSRLTGIPVNELTVEEREKLLHLEQRLHERLVGQDEAVRAVADAVRLSRAGLREGSKPVATFLFLGPTGVGKTELAKALAESIYGDEHALLRIDMSEYGERHTVARLVGAPPGYVGYDEGGQLTEKVRRKPYSVLLLDEIEKAHPDVYNILLQVFDDGRLTDGKGRVVDFTNTIIIATSNLGSDIIQRRLKARGAAGEEYEKTKAGVMDVLRGHFRPEFLNRIDEIIVFHALGKEEIRHIVGLQLDRVARSAASQGVTLTFDQTLIDHFAEEGYKPEFGARELKRLIRSELETALAREMLGGGIGKGDHASARWDDKAERVVFERKEPP

SEQ ID NO: 59125 - protein, 473 aa, Klebsiella pneumoniae
MARLMLFACIPQCGQERMPYGHNRSPVCGRNLPLSVRHPGWMRFTEACLLKTENNMTTLSEPLVTPKYGKWRQLVLGLICMAAISSPQYVWTLLTKPLAAKLGVGLPELQVTFSLLIILQTFFSPFQGRLVEKFGPRRLIAIGTVMAGMSWVLSAQVNGLATLWLVYGCMGGLGTGIVYIGVVGLMVKWFPQQRGFAAGAVAAGYGMGAIITTFPISLSLTTNGLEHTMTTFGILFALVGFLASQGLNLPPPAVSQPVSQTVAQSSRSFTSREMLRQPLFWLMFVMMAMMSTSGLMVTSQMAVFAEDFGISQAVVFGMAALPLALTIDRFTNGLTRPLFGFISDRFGREQTMFIAFALEGVAMMLWLACREDPLLFVLLSGVVFFGWGEIFSLFPSTLTDTFGSEHAASNYGWLYISQGIGSIFGGPLAALLYQYTHGWHVVFSCAIGLDFVTAALALWVLKPWRARFIRQHS

SEQ ID NO: 59126 - protein, 410 aa, Klebsiella pneumoniae
MHGWTSRQRNAAIASFLSWTLDAFDFFLLVFLLSDIAHSFHVDLEEVTLAILLTLAVRPVGALIFGRAAEKFGRKPILMLNIVFFSAFELLSAAAPSLMLFFLLRVLYGVAMGGIWGVASSLAMETIPDRSRGLMSGLFQAGYPFGYLLAAVAYGLLFEQLGWRGMFVIGAAPVLLLPFIYFCVEESPVWQAARQNKESTALLPVLRSHWKLCLYLVVLMAAFNFFSHGTQDLYPVFLKVQHGFEPKTVSIIAVCYNIASIIGGVFFGSLSEKIGRRKAIMIAAMLALPVIPLWAFASGSLALGAGAFLMQFMVQGAWGVIPTWLNELVPANTRAVLPGFVYQLGNLLASVNATLQASIAQHHGHNYGLAMALVAGTVAIVITVLTFFGREGRVIQSAGAGHHQPLSTSR

SEQ ID NO: 59127 - protein, 46 aa, Klebsiella pneumoniae
MQVVNSLRSAKQRHPDCQLVKRKGRLYVICKSNPRFKAVQGRKKRR

SEQ ID NO: 59128 - protein, 120 aa, Klebsiella pneumoniae
MYDGGYLPPARARQLVSPKSLRIMAKEQTDRTTLDLFANERRPGRPKTNPLSRDEQLRINKRNQLKRDKVRGLKRVELKLNADAVDALNELAEARNMSRSDLIEEMLMTQLTALRSQGKV

SEQ ID NO: 59129 - protein, 142 aa, Klebsiella pneumoniae
MQYVNTCPVLNVEECDRLSFMPYLFGTDFMLAELQVYALAKKWMPGYEGGFWHFIRLPEGGGYMMPDCGRVHLVSSENWFDRTVSADAAGIILTSLAINRRLAAHHDSSNPALTRLYMLRDAQLWNHITFHPECSAIYAALD

SEQ ID NO: 59130 - protein, 260 aa, Klebsiella pneumoniae
MKVLLIYAHPEPRSLNGALKNFAIRHLQQAGHEVQVSDLYAMRWKAGYDADDSGAPPVGEFWRPTLDSKQAFAQGTQSADIVAEQEKLLWADTVIFQFPLWWFSMPAIMKGWIDRVYAWGFAYGVGEHSDRHWGDRYGEGTFVGKRAMLIVTAGGWAEHYSPRGINGPIDDILFPIQHGMLFYPGFEVLPPLVFYRTDKTDAGQFADQCAALAERLDTLWQTEPIPFRRQNHGDYLIPSLTLRPELAPGQSGLAVHLRSE

SEQ ID NO: 59131 - protein, 1107 aa, Klebsiella pneumoniae
DVTIAVTGSTLLSLQSVLALVGQLVGGASSITADLSIVNTDTGEVVQIIPDAVSLTPSLALLNLVYSGSATFSDLPAGNYAVVVSSPQASGGLAAVVDELASANLLSVALATITDSTQYTSTAIAGNVLVADAGGDVADTGDGITVSKIASSVQTTPLDVTAAGVVINGLYGQLTIHADGSYTYKATGDADAVGQADIFTYTIVDADGDTATATLTINIVAGSDIGESDADADSDSDSDSTAIRIPTATPILTAIRIPIATLTPTATRILTATRTPTATRIRTATRTPTATRTPTATRTPIATRIPTAIRTPTATRILTAIRTPTATRILTATRIPTAIRTRTATPTRTSDSDSDSDSDSDSDSDSDSDSDSVEAIPDTNSSEVVQQYGNLNGTEGNLSQLVGVSLLSTINVSLLSGSSFRFNVDNNTTEDMTVDVSGVSLLSTAGLLTSIVNLLGAGNTLTADLSVIDIATGRVVAIDAGSVSISATLLGGLVYSGTASFENLPAGSYALAISSPNSDGVLVSLINTLAGAGVATFVEATVTDSLGYSGSTVTGNVLEGSDNGDMADSGTDLTVTSVTATTAAGETFSVNGGTISVTGAYGVLTINADGSYSYQASGKAGSAGNADVFTYTITDGNGLQSTTTLTINIGQEVETAQANPDTQAYYVGNVEDNLDIQGGNVVQVAGLSLLNTVNVALPTNGFKFVVAEGTEQDVTLGVSGSTALSIALGAVTLDLILINTDTNQIVGVIKDGITATPTGFLGLSLEYAGGGEFERIGAGNYMVVISSPTTEGLIGSILNLNLGTSISMEVTDSTKYVTGNVLHTDSDGDVGDTGNEITVSSIQFGSQIETVTAGGVTINGTYGTLIIKSDGSYSYHANGTTGVGQSDVFTYTITDGLGHTSSTTLTMNIESTPPVAVDDIASLSAATAMQSVTWTQSVSNLAVPNTAVAANATSAAKVTSQNFTIAEGREVDGASITLNLSGNRTSGLSLLNGDLSGTVSLIHHVTVDGVTTDVTVWTSSLTMALDGSLLSPSSDTDTVTLNMVNGGIPLQLAAGDYTLSISHTMHAGTALSYNLSASVAGTEILTDAHLTVGQSVVGNILDGSDAN

SEQ ID NO: 59132 - protein, 73 aa, Klebsiella pneumoniae
MVTIRLARHGAKKRPFYQVVVTDSRNARNGRFIERVGFFNPIANGAEEETRLDLDRIAHWVGQGATVSDALPR

SEQ ID NO: 59133 - protein, 715 aa, Klebsiella pneumoniae
MSEQPQRSDIPHLQDWANAMAFVASHYRQSYSPGTLHAAAEWATQKTLPDALKHLCRHAGLHCQFLNGNDRKMSAWRLPLVVQLKDGQIGIIESFDLHNSVGIRFVKELTLLSHCPLDSLLDEIEFTVAFRPASPEKDIRTVSYLTRFQPDWLRKIVLKDWRPYTHVMLASLAINILALAGILFSMQVYDRVIPAQSYPTLYVLFSGVLIAAVFNFVLKITRGHVTDLLGKRGDIRISDRVFGHALRLKNTAVPRSTGSFISQIRELEQVREMMTSTMMTVIADLPFFLLFQLVLFIVSPWLSWIAPVATILMLLPGLLLQKKLAELANKNQHESTLRNAILVESIQGLPDIKMMQAESRFLQQWNSYVAITAESGVQTRKVTHGLVSWGMSIQNLLYATVVAVGAPLVINGDITTGAMVAASMLSSRMVAPMTALCGVLARWQQVKVAKASLDNLMALPVEGGLDEPRINRAVLHGNYEFRNAEFRYGKDNGPAPLRIKQLSIKAGEKIAVLGRIGAGKSTLLQAMMGNVELTSGELRLDDLSLPQIDLADIRRNATLLTQEARLFHGTLRENVTLGRPMASDDELVKVLELCGALEFVNKLPMGLEHLVMEGGLGLSGGQRQSLLLARALIRDPNIILLDEPTSFFDERTEKAFVEQLARWAGERTLIIATHKAAVLNIVDRILVIQDGQLALDKPKATVFEQEKARAQVVNI

SEQ ID NO: 59134 - protein, 847 aa, Klebsiella pneumoniae
MPNKNNGLFKLSTIFFAMLPALLSGLNNKAQARDFFDPSFISSLNGSDPSTTPDLSVFQTQNAQAPGDYRVDIMFNGRYLDTRTIKFVANNRASSDNREPALVPCLSLKALAEYGVRIKSFPELAEDQNGCANFSVIPDTKADFDFTAQRLNISIPQAALSTTAQGYIPPDQFDDGINALLVNYQFSGSNDMQANDEYYSLNLQSGLNVGPWRIRNLSTWNKNNSDAGDWDSAYLYMQRSIRSINSNLVMGESSSLSTIFDSVPFTGIQLATDTTMLPESMRGYAPIIRGIAKTNARVVIKQNGYQVYQTYVAPGAFEITDMYPSGGSGDLYVSVEESDGSKQEFVVPFATLPVMVRENQLEYEITSGKYRPYDGGVDETPFTQATATYGVSSSLTLYGGMQAASRYQALSTGLGYNLGELGAASADVTQAWSKKKDDEKTSGQSWRVRYGKNIVETGTNVTIAGYRYSTRGFNTLSEVLDSYSNDGNYTSRSLRNRTNLTVNQSLGKGLGSLSISGLIEDYWDDKRTNKSISVGYNGGFRNVNYYLGYSYNRYTWSGNNSGKDAQDDRRITLTVTLPLSNWLPGTYTSYQLTNSNPGSTDQSVSIGGVGLDNDSLEWSLQQGYSNREYYRGDMRGTYNGARGSLNAGYSYDNNSQRIDYGANGSIVAHADGITLGQDITDAAVLVKAPGLDNVKLTNDNTISTDYRGYAIVPYVTPYRRTDITLDSTSLGEDMELPETTQSVVPTRGAIVRANYDGNIGQRAFVHLKTASGQDVPYGAMVLLAGDSKSQPSIVSDAGMVYMSGLQQTGILNVQWGKSAAQQCNASFTLPAREGKASGISQIETVCR

SEQ ID NO: 59135 - protein, 141 aa, Klebsiella pneumoniae
MYHARQTMLNVEESDRLSFLPDLFGNDFLAGEMQVYALAEKHITDYCGGFWHFIRIPEGGGYMMPDGDRFHLTNPDNWFDRSVSADAAGVIITALAINRRIWLHHERGDAALTRHLMLRESQLWNFIDSHDECAAIYAALD

SEQ ID NO: 59136 - protein, 397 aa, Klebsiella pneumoniae
MKRLQAFKFQLRPNGQQERDMRRFAGACRFVFNRALALQNENHEAGNKYVSYTKMASWLIEWKSHPDTQWLKDTPSLPLQQSLKDLERGYKNFFQKRAAFPRFKKRGQNDAPQGVKLDQTNNRISLPKLGWIRYRNSREVIGEVKNVTVIQSCGKWYVSIQTEYEVPEQVHKAASMVGLDAGVTKLATLSDGTVYQPVNSFKASQRKLAMLQRQLSRKVKFSASWQKQKKKIQRLHSHIANIRRDYLHKVTSEISKNHAMIVIEDLKVSNMSKSAKGTAERPGRNIRAKSGLNRSILDQGWYEMRRQLEYKQLWRGGQVLAIPPAYTSQRCACCGHTAKENRQTQSKFVCQVCGYTENADINGARNILAAGHAVLACGGMIQSGRPLKQEPTEASQA

SEQ ID NO: 59137 - protein, 433 aa, Klebsiella pneumoniae
  MISC_FEATURE (304)..(304): X=any amino acid
  MISC_FEATURE (314)..(314): X=any amino acid
YKAYTSYKDSGVEWIGQVPEHWEVKRLRHVGRYSNSGVDKKSYEDQQTVELCNYTDVYYNEFISDDMPFMQATASAHEIEQFTLKKGDVIITKDSEDPSDIGIPAFVPHDMPGVVCGYHLTMIRALNDNYGSYIHRSIQSDHTRAHFFVESPGITRYGLNQNTIGNAPVALPPPEEQATIAATLDRETARIDALVEKKIRFIELLKEKRQALITHAVTKGLDPNVKMKDSGVEWIGQVPEHWEVKPFFALVSELNRKNVGLAETNILSLSYGNIIQKPETRNMGLTPESYENLSNCRVWRSCIXVHRSAKRQTXLAFSPGYQRGIITSAYMAVKPHSIGSTYFAWLMRSYDLCKVFYAMGGGLRQSLKFEDVRRLPVLIPPVGEQSEITNTINAGTARIDALVEKTEQSITLLKERRAAFITAAVTGQIDLRG

SEQ ID NO: 59138 - protein, 665 aa, Klebsiella pneumoniae
  MISC_FEATURE (514)..(514): X=any amino acid
  MISC_FEATURE (548)..(548): X=any amino acid
  MISC_FEATURE (552)..(552): X=any amino acid
SQADFIWKNAEDLWGDFKHTDFGKIILPFTLLRRLECALEPTREAVREAHDAFKDADVELDTILRSTAEYPFYNTSEYSLGTLGSTKTRRNLEDYIALFSDNARAIFEEFEFGNTVIRLEKAGLLYKICQNFAKIDLHPDVVPDRVMSNIYEHLIRRFGAEVNEGAEDFMTPRDIVHLATALLLDPDDALFEASPGLIRTLYDPTCGTGGFLTDAMNHVGDYGNRDKIPPVLVPHGQELEPETHAVCVAGMLIRRLESDPGRDLSKNIRQGSTLSNDQFAGERFHYCLSNPPFGKKWEKDKTAVEAEHKKGELGRFGPGLPKISDGSMLFLMHLASKLELPINGGGRAAIVLSGSPLFNGGAASGESEIRRWLLEDDLIEAIVALPTDLFFRTNIATYLWILSNKKPQERKGKVQLINATDLWTSIRNEGNKRRIVSDEQRRQILDIYAAGETGALSRMLDYRTFGYRRIRVLRPLRMTLELDKVGMERLEAEAAGKSSLTRIRHSGAKPSSRXSGKRSPIAGQKPLLATRSSPMKPSSSRSNPTRHXSPRXSTPLVTKTRKPSQSRDSNGELVPDTDLTDYENVPYLEDIDDYFAREVLPHVPDAWLDESFTDARDGQLGRVGYEINFNRFFYQYQPPRKLHDIDEDLKQVEAEIAALLAEVAS

SEQ ID NO: 59139 - protein, 544 aa, Klebsiella pneumoniae
  MISC_FEATURE (2)..(2): X=any amino acid
  MISC_FEATURE (22)..(22): X=any amino acid
QXQLRLRKNIRICSKALKASLXIITANTVPKNGRLSVRIKSMTTGDTGSIHLGSQKLRLMQRRMDAVNKRNAATSLASQATAAEQASLQASAAYNAAETRRQAAQAALASAEQAAAAERKRQEAEAAAAAAAEKKRQADAAAKAAEEARAIAEKAKALQARCTAADKLKSSEIQAVRGIPATAAPFAIPLTWSTASRGGFTLSADAAASLGAFISEALATLSVAVVANPVALTIAGLVLSKSVGVGSDMVPGRDISSMMPGDAFGLPDTAALNKAADQKTSVSMPVRGRLVMNDSGILDVQLVKTNTAGAVKVARAVLDKETGYWGYTLPAVADVPAQTIFVSPADALGANGPLTLSGPVPLPERILHTGDQISAPQATDKTVTPVADDLDFDDIILVFPPESGLKPLYVMYRSPRNMPGTVSGKGQNVGNNWMGGASTGDGAPVPSQIADKLRGKTFGSFDSSRRAFWKAVADDSALSKQFSEADINQMKAGRAPTADFLESVGKRVKIELHHEKEISQGGAVMDVDNIKALTPKNHIETHKG

SEQ ID NO: 59140 - protein, 46 aa, Klebsiella pneumoniae [sequence omitted]

SEQ ID NO: 59141 - protein, 71 aa, Klebsiella pneumoniae; identical to SEQ ID NO: 43063

SEQ ID NO: 59142 - protein, 490 aa, Klebsiella pneumoniae
MKKLLPILIGLSLTGFSAMSQAENLLQVYQQARISNPDLRKSAADRDAAFEKINEARSPLLPQLGLGADYTYNNGYRDSNGINSNVTSGSLQLTQVLFDMSKWRALTLQEKTAGIQDVTYQTDQQTLILNTATAYFKVLAAIDTLSYTEAQKQAIYRQLDQTTQRFNVGLVAITDVQNARSQYDAVLANEVTARNDLDNAVEELRQVTGNYYPELASLNVNGFKTNKPQAVNALLKEAENRNLSLLQARLNQDLAREQIRQAQDGHLPTLSLSASSGISNTSYSGSKTHNNPQQYQDNDAGQNQIGLNFSLPLYQGGAVTSQVKQAQYNFVGASEQLESAHRSVVQTVRSSFNNVNASISSINAYKQAVVSAQSSLDAMEAGYSVGTRTIVDVLDATTTLYNAKQQLSNARYNYLINELNIKSALGTLNEQDLVALNNTLGKPISTSADSVAPENPQQDATADGYGNTTAAVKPASARTTQSSGSNPFRQ

SEQ ID NO: 59143 - protein, 213 aa, Klebsiella pneumoniae
MKPYQRQFIEFALSKQVLKFGEFTLKSGRKSPYFFNAGLFNTGRDLALLGRFYAEALVDSGIEFDLLFGPAYKGIPIATTTAVALAEHHDRDLPYCFNRKEAKNHGEGGNLVGSPLQGRVMLVDDVITAGTAIRESMEIIQAQGALLAGVLISLDRQERGRGEISAIQEVERDYGCQVISIITLKELIAYLEEKPEMAEHLASVRAYREAYGV

SEQ ID NO: 59144 - protein, 152 aa, Klebsiella pneumoniae
MKTIAIGADDAAYAFRDSIVAYLNGLGINVADYSSDKRQGSTVYPDVAHAVAMSIKQGEHERGILICGTGIGMSIVANKVPGVRAAQCHDTFSAERARKSNNAQIITLGARVIGAELGKKIIQAWLESEYEGGGSAPKVERIDYYEHQHARD

SEQ ID NO: 59145 - protein, 84 aa, Klebsiella pneumoniae
MTDKIRTLQGRVVSDKMEKSIVVAIERMVKHPVYGKFIKRTTKLHVHDENNECGIGDKVEIRECRPLSKTKSWTLVRVVEKAVL

SEQ ID NO: 59146 - protein, 57 aa, Klebsiella pneumoniae
MLLKPPFFDKPHQQYETDKWLSCPVLVKFHPLPPHLARGFIFTDLGVRNTDSQNAFL

SEQ ID NO: 59147 - protein, 720 aa, Klebsiella pneumoniae
MSSVTNKATSKDADEIDLGRLIGEFIDHRKLIISVTSLFTLVALIYAIFATPIYQADALIQVEQKQANAILSNLSQMLPDSQPQSAPEIALIRSRMILGKTVDDLNLQARVKQKYFPLLGRGFARLSGDKPGSLSISRLYIPENDNDTPEIILTVKERNSFSISVGDFIINGKVGELLDERGISLKVDEISAKPGTEFSIVYVSRLKAITDLQDDIAVADQGKDTGMLTLSLTGDNPVLIERILNSISENYLAQNIARQAAQDAKSLEFLSKQLPQVRSDLDQAEDKLNQYRRKSDSVDLSLEAKAVLDQIVNVDNQLNELTFRESEISQLYTKEHPTYKALMEKRKTLQDEKAKLNKRVSAMPETQQEILRLSRDVESGRAVYMQLLNRQQELNIAKSSAIGNVRIIDNAVTQPKPVKPKKVFIVLSGIIFGIVFSAGIVLLRVFLRRGIETPEQLEELGINVYASIPVAEKFTKSVVQRKGWNKKSVDEIQGFLAVDNPADLAIEAIRSLRTSLHFAMMEARNNVLMISGASPNAGKTFVSSNLAAVISQTGKKVLFIDTDMRKGYTHKLFNESNTNGLSDILSGKIEINKAIKTITSAGFDYISRGMAPPNPAELLMHRRFGELLNWASENYDIVVLDTPPILAVTDAAVIGNYAGTTLMVARFELNTAKEIEVGIKRFEQTGVVVKGCILNGVVKKASSYYGYGYNHYGYSYKDNK

SEQ ID NO: 59148 - protein, 168 aa, Klebsiella pneumoniae
MKDTNQLIGIFNTLMVANNYPVANPVASDVMADLMREAAPAEWDAQKRWVYEDIQRLMINRLDYSDMFKIMDGLEYNGLMLYSMVQAENGEPVWSNIYIRNFETRDNEIYVDPNLSDKVLIGEDGMSVFAYSFTDNCFEIRDKASTGYVIESHTNFSALLSALIDMVS

SEQ ID NO: 59149 - protein, 160 aa, Klebsiella pneumoniae
SLLTLSLGVALLPLAQAATTPAQEHLLEQVRLGEASNREDLVRQSLYRLELIDPNNPELIAARMRYLLRQGDAAGAQKELERLTKLAPDSPELKASRNEMKSNTGEGRQALQQARLLGVAGKVDEAIAAYENCTAGCRMTLTSPLNTGRWWRACRPAIAK

SEQ ID NO: 59150 - protein, 121 aa, Klebsiella pneumoniae
MSITKDQIIEAVSAMSVMDVVELISAMEEKFGVSAAAAVAVAAGPVEAAEEKTEFDVILKAAGANKVAVIKAVRGATGLGLKEAKDLVESAPAALKEGISKDDAEALKKSLEEAGAEVEVK

SEQ ID NO: 59151 - protein, 87 aa, Klebsiella pneumoniae
MANIKSAKKRAVQSEKARKHNASRRSMMRTFIKKVYAAIEAGDKAAAQKAFNEMQPIVDRQAAKGLIHKNKAARHKANLTAQINKLA

SEQ ID NO: 59152 - protein, 63 aa, Klebsiella pneumoniae
MKAKELREKSVEELNAELLNLLREQFNLRMQAASGQLQQTHLLKQVRRDVARVKTLLTQKAGA

SEQ ID NO: 59153 - protein, 45 aa, Klebsiella pneumoniae
MAAISTSRCEFTQFVTDHFVGNKYWNVLTTIMDSDGQTDHVRKDR

SEQ ID NO: 59154 - protein, 513 aa, Klebsiella pneumoniae
SDSDSDSDSDSDSDSDSDSDSDSDSDSDSDSDSDSDSDSDSDSDSDSDSDSDSDSDSDSDSDSDSDSDSDSDSDSDSDSDSDSDSDSDSDSDSDTDSDSDSDSDSDSDSDSDSDSDSDSDSDSDSDSDSDSDSDSDSDSDSDSDSDSDSDSDSDSDSDSDSDSDSDSDSDSDSDSDSDSDSDSDSDSDSDSDSDSDSDSDSDSDSDSDSDSDSDSDSDSDSDSDSDSDSDSDSDSDSDSDSDSDSDSNSDSDSDSDSDSDSDSDSDSDSDSDSDSDSDSDSDSDSDSDSDSDSDSDSDSDSDSDSDSDSDSDSDSDSDSDSDSDSDSDSDSDSDSDSDSDADSDSDSDSDSDSDSDSDSDSDSDSDSDSDSDSDSDSDSDSDSDSDSDSDSDSDSDSDSDSDSDSDSDSDSDSDSDSDSDSDSDSDSDSDSDSDSDSDSDSDADSDSDSDSDSDSDSDSDSDSDSDSDSDSDSDSDSDSDSDSDSDSDSDADSDSDSDSDSDSEFHHMELSSE

SEQ ID NO: 59155 - protein, 475 aa, Klebsiella pneumoniae
MTLLVRNFIVSIALAISDFFSFVISLYLAIGVLSITISDYETVISVNQLEGWKALHWLLGLCCIAWYSMRLRHYFYRKTFWFELKEILRTLVIFAIIEIAVMAFASWSFSRYLWVLTWFFVLLLVPLARMVTKRVLDVFGLWHRDTWIIGSGANAQEAYKAINSERNLGLVIVGFIAVTGERSENKDINGVPVLAHDPDWLSSMDKKTQFIVAVESHQSEVRNAWLRNFMIKGYRYISVIPTLRGMPLDSTDMSFIFSHEVMIFRVQQNLAKWSSRILKRAFDIVGSLAIIIILSPALIYISRKVKRDGGPSIYGHERIGKGGKSFKCLKFRSMVINSKEVLEKLLDSDSEAKKEWDATFKLKNDPRITKIGAFLRRTSLDELPQLFNVLKGEMSLVGPRPIITAELIRYNDEVDYYLLSKPGMTGLWQVSGRSDVDYETRVYLDAWYVKNWSMWNDIAILFKTISVVLKKDGAY

SEQ ID NO: 59156 - protein, 291 aa, Klebsiella pneumoniae
MNKKPLVSVYIPTHNRAELLSNAVKSVINQTYKNIEIIICNDGSGDNTDDVVNKLQKEYKDIPFVYLKNDSPMGACFSRNRCIAAASGYYLTGLDDDDYFLPNRIESLIKVCNERKIDLVCSNLIFKDGNKLKRGKNNSGVITSIDMGYENLVGNQLLTRLSYFEDVGGFDTNFPAWQDYDLWYRIIMKFGPCIKTNEATYVMDVENDRKRISTSSKAHIGYRSFIEKHSETLSEEMKSSLFIRDLINRNKKIPLKTLLSSGRKVASFKHNMRLCFPVVNSIAAFVREIKK

SEQ ID NO: 59157 - protein, 373 aa, Klebsiella pneumoniae
MIIKYISNKLGIELINSGRFTAIDGLRAYLSLFVFFHHFFIFYKWKESGKWEKPEILFIDDLGQVSVAIFFIITGFLFIGKITSGRHFDFFSVYISRFFRIMPLYLLVVMITLFYSFLLTGLSIQIPHSELLKDIVRWLLFVGDSVNGYTDAKRITAGVTWTLKYEWLFYFSLPLLFLILKNKVATTLIIIVCMLLLINNFKFHSIIDSRYFIFFMIGGISNYICKLLENNIKLIEILRNRLISIILMVLLIYVFFSGVGIFNIFSIISLLLFFIAIVCGNNLFGALTLKGARLLGEISYSIYLIHGCVIFSIFILMNKFSGLSLSEYLILMPFVTIAVVFISSLTYRFIEAPCINIGKKIQNIYRFNGKKAL

SEQ ID NO: 59158 - protein, 147 aa, Klebsiella pneumoniae
MIEMFDSILVVCTGNICRSPIGERYLRNLLPDKKIDSAGTGALIEHAADNSAIKVAQLHGLSLEGHLSRQFTSSLGRQYDLILAMEKSHIEQIGHIAPEARGKTMLFGHWLEQRDIPDPYRKSDEAFLSVYKLIEQAGRLWAQKLGA

SEQ ID NO: 59159 - protein, 92 aa, Klebsiella pneumoniae
MDVKLLIAERPGKVKTLKQHPRKNKTAINIEYMKASIRARVEHPFRIIKRQFGFVKARYKGLLKNDNQLAMLFTLANLFRVDQMIRQWERSQ

SEQ ID NO: 59160 - protein, 173 aa, Klebsiella pneumoniae
LSAHPVSTRLSLNGTIIVARDIAHAKLKELIDNGEALPQYVKDHPIYYAGPAKTPAGYASGSLGPTTAGRMDSYVDLLQSHGASMVMLAKGNRSQQVTDACHKHGGFYLGTIGGPAAVLAQQKNKSLECVAYPELGMETIWKIEMKKFSAFIPRKDKGNDFFPQIQKKQCAGC

SEQ ID NO: 59161 - protein, 59 aa, Klebsiella pneumoniae
MIFHHAKLPGVERDTFVKKGVVDHTLRRRAQRHIFFLAHKVGYISLLQENLCCPTHQPD

SEQ ID NO: 59162 - protein, 95 aa, Klebsiella pneumoniae
MKILSLRLKNLNSLKGEWKIDFTAEPFASNGLFAITGATGAGKTTLLDAICLALYHETPRLNKVSQSQNDLMTRDTAECLAEVEFEVKGIAYRAF

SEQ ID NO: 59163 - protein, 388 aa, Klebsiella pneumoniae
MGLMDTLNQCISAGHEMTKAIAIAQFNDDSPEARKITRRWRIGEAADLVGVSSQAIRDAEKAGRLPHPDMETRGRVEQRVGYTIEQINHMRDVFGTRLRRAEDAFPPVIGVAAHKGGVYKTSVSVHLAQDLALKGLRVLLVEGNDPQGTASMYHGWVPDLHIHAEDTLLPFYLGEKDDASYAIKPTCWPGLDIIPSCLALHRIETELMGKFDEGKLPTDPHLMLRLAIETVAHDYDVIVIDSAPNLGIGTINVVCAADVLIVPTPAELFDYTSALQFFDMLRDLLRNVDLKGFEPDVRILLTKYSNNNGSQSPWMEEQIRDAWGSMVLKNVVRETDEVGKGQIRMRTVFEQAIDQRSSTGAWRNALSIWEPVCNEIFDRLIKPRWEIR

SEQ ID NO: 59164 - protein, 60 aa, Klebsiella pneumoniae
MGAVVVAGDGVEVRQRVPVLIAGPTSSRRAGLLMLPSGWVAVQPAAASCDTLYVVLKPFS

SEQ ID NO: 59165 - protein, 93 aa, Klebsiella pneumoniae
EVALEDPRLGSLGDALEMPVTPWHGDVPQSKKKKARTNPAGILLITPESLESLLINSMGWLKQAFSSVAYIVIDEFHAFIGSERGVQLLPLLK

SEQ ID NO: 59166 - protein, 105 aa, Klebsiella pneumoniae
MDSYVDLLQSHGASKIMLAKGNRSQQVTDACHKHGGFYLGSIGGPAAVLAQQSIKSLECVAYPELGMEAIWKIEVEDFPAFILVDDKGNDFFQQIQTSQCARCVK

SEQ ID NO: 59167 - protein, 372 aa, Klebsiella pneumoniae
EASENDKYVALQFLRNSDIAAKGILPTCQDTGTAIIMGKKGQRVWTGGGDEAALAQGVYNTYIQDNLRYSQNAPLDMYKEVNTGTNLPAQIDLYATDGDEYKFLCIAKGGGSANKTYLYQETKALITPAKLKNYLVEKMRTLGTAACPPYHIAFVIGGTSAEATLKTVKLASTKYYDGLPTEGNEHGQAFRDVQMEQELLLEAQNLGLGAQFGGKYFAHDIRVIRLPRHGASCPVGMGVSCSADRNIKAKINRDGIWIEKLESNPGKYIPEHLRQAGEGEAVKVNLNQPMSEILAQLSQYPVSTRLSLSGTIIVARDIAHAKLKELIDNGRGVPQYVKDHPIYYAVSAKTPDGSPSGSLGPTTAGRMDSYVD

SEQ ID NO: 59168 - protein, 1085 aa, Klebsiella pneumoniae
MQSAAHQEKHFQQYIIDRLVEQGWKLGDSKFYDTERAVYPEDLESWIKTSGQQEKWDKLERLNGAKTLEVLMDRLDKALEKQGTMQVLRQGFSIAGCGLIEMTEAAPEDKRNAAVIERYQANILRVVPELKYHPAREFAIDLVLFINGLPVATVELKTDFTQSCEAAMDQYRNDRLPYDAKTKRREPLLTFKRGAVVHFAMSDSEIMMATKLDGENTFFLPFNKGRKDESGTVHAGNPPGEIKADGTQEYPVAYFWEAVCQPDAWLRIFHSFVYVEKKDVVDIQGNWSKKETLIFPRFHQWTAVNQMLTDARENGAGMTYLCDHSAGSGKTSTISWTAHDLVKLREDNGDSVFNSVIIVTDRNVLDGQLQDAVKQIDHQFGVIAAIDRQKSSKSKSKQLSEALLSGTPIVVVTIQTFPYAMEAIITDKALKGKNFAVIIDEAHNSQTGSTAAKLQAALGMSGQGKMSTMTVDELLEQLQKSRARPDNISYFAFTGTPKHSTLMLFGRPTDPSQPASNDNPPQAFHLYTMRQAIEEKFILDVLKGYVPYKTAFNLSKQLEDSKRVSGKAAKRALAQWMSLHPTNVTQKVQFIVEHFTKNVAHRLDGKAKAMVVTSSRAAAIRYKKAFDRYIEQHSEYGFIHSLVAFSGKMTGKQVMHQDDSEFKDDVFIVDENEEFTEQSMNPDVQGQDLRFAFDRPEYRVMLVADKFQTGFDQPKLVAMYVDKKIANHVEIVQTFSRLNRTAPGKDEVFIIDFVNDPENVRQAFTTYDKGAHIDEVQDLNVVYEIKERLDEHGLYDEKDLAAFKEARFKTIRDITHTKSPQHKALYAATAGATALYNDKMKMLRDGMATWEAAFEKARAKGDEAGMKSADHHQDEYAEQIKALIGFKSDLGRFCRTYSYIAQLIDFGDPELENFAAFAKLLQKRLQHEAPETVDLTGLVLTGFDINARSDNAEDEGETPVLQPVGAGGGGVAGDKPKFVKEIIERLNSLFGEATPIQDQVAFVNQIFSIAGESDVVMAQVESNTREQAMKGNLPGAVQQAVVRALSSHQKLATQVLKSDRQGMTALVDMVYDLLREGKDIDLGMD

SEQ ID NO: 59169 - protein, 135 aa, Klebsiella pneumoniae
MLERIISYSSLAAVLLTATLTAAGAISFPVALCLVIGANLGSGLLAMLNNSAANAAARRVALGSLLFKLVGSLIILPFVHPLAAAMHKLPLAESELVIYFHVFYNLLRCIAMVPFAGPMAKLCQRLIRDEPELDN

SEQ ID NO: 59170 - protein, 101 aa, Klebsiella pneumoniae
GYSVSERQQFVGEFTGERNGPLAAVAVKNKFSVGDSLELMTPQGNVNFTLEHMENGKGETMPVAPGDGYTVWLPVPDDLPLQYALLMRNFTGQTTRNPHGN

SEQ ID NO: 59171 - protein, 181 aa, Klebsiella pneumoniae
  MISC_FEATURE (4)..(4): X=any amino acid
NAGXPGLSKLIRLTIGRPADLISSPLCWKGFQNRQQALKVSRLGPKAFEHVRGFLRINHGDNPLDASTVHPEAYPVVERILAATQQALKDLMGHSSALRHLKAVDFTDEKFGVPTVTDIIKELEKPGRDRVREFKTAKFADGVETMNDLLPGMILEGAVTNVTNFGAFVDIGVHQDGLVHI

SEQ ID NO: 59172 - protein, 131 aa, Klebsiella pneumoniae
VLESIDLSLITKQAHWNMRGANFIAVHEMLDGFRTALTEHLDIMAERSGHLGGVVPGTTQVINSKPRCRSYPLDIHHVQDHLKALADRYAVVANDVRKAIDESKRRRTADIFTAASRDLDKFLWFIEANIE

SEQ ID NO: 59173 - protein, 158 aa, Klebsiella pneumoniae
SPSLYFDYHHHRDIQEDFRPHRFANEFARSKAASEEVINLLAQANPHTRFTILRPQSLFGPHDKVFIPRLAQMMQHYGSVLLPRGGSALVDMTYYENAVHAMWLASQPACDHLPSARAWNISNGEPRTLRSIVQKLIDELGIKCRIRSVPYPFPAQWR

SEQ ID NO: 59174 - protein, 129 aa, Klebsiella pneumoniae
MSTSNDPSNNASAGKCPFHAETPKQSAGSGTANRDWWPNQLRVDLLNQHSNRSNPLGENFNYREEFKKLDYSALKADLRALLTDSQEWWPADWGSYIGLFIRMAWHGAGPYRTVDGRGGAGRGQQRFCP

SEQ ID NO: 59175 - protein, 120 aa, Klebsiella pneumoniae
MSAIEVKSLVKKFHGQTVLHGIDLEVQKGEVVAIIGPSGSGKTTLLRSINLLEQPESGTIRVGDVTIDAGRSLGPQKGLIRQLRQHVGFVFQNFNLFPHRTVFPAHWSFSCSSSIVSPKS

SEQ ID NO: 59176 - protein, 161 aa, Klebsiella pneumoniae
PMCWKADFTEDALIVNGKPITVYAEKEAQHIPWQAAGAEVIVECTGFYTSAEKSQAHLQAGARKVLISAPAGEMKTIVYNVNDDTLTPDDTIISVASCTTNCLAPMAKVLQDAFGITVGTMTTIHAYTGTQSLVDGPRGKDLRASRAAAENVIPHTTGAAK

SEQ ID NO: 59177 - protein, 165 aa, Klebsiella pneumoniae
GAKLIRIRDNGSGIKKDELALALARHATSKIASLDDLEAIISLGFRGEALASISSVARLTLTSRTAEQQEAWQAYAEGRDQAVTVKPAAHPVGTTLEVLDLFYNTPARRKFMRTEKTEFGHIDEVVRRIALARFDVTINLSHNGKVMLGKLSSTVAMISDLPVSL

SEQ ID NO: 59178 - protein, 57 aa, Klebsiella pneumoniae
MPLQTSGGEGRRWWFINGDPLEAAGARTTLMLDKPGEWQLVVMDEAGQTAAASFTLQ

SEQ ID NO: 59179 - protein, 163 aa, Klebsiella pneumoniae
LLFSSSLGVTSLGIRAFSASSVSHVALYVGEGQVAEATGAGVQVISLQQALAHSDKLFALRVPDLTPDQATAMKSFAWQVKDSGYNYRGIIQFIPYMVTKPLCSLNPFSRDFRQQCVSGLAKAQLGDAASGDKKAWFCSELVSEAFVRAGHPLTLAQAAWISP

SEQ ID NO: 59180 - protein, 169 aa, Klebsiella pneumoniae
QPGDAVACVPLLPCFQCPQCQREYCSLCKQYQFVGSRSEGGNAEYVVVKRANLFRLPDQMPIDDGAFIEPITVGLHAFHLAQGCEGKNVIIIGAGTIGLLALQCARELGANSVTAIDINPQKLELAKTLGATHVFNSREMSGQAFQHSGDDIRSAGLPIVSRINFDKPG

SEQ ID NO: 59181 - protein, 116 aa, Klebsiella pneumoniae
MLHDGDKQKARLLQRFTPMAAQTTKQGVPPEKVNIATGKTSGQGPVGFSAAMLPFLQDDEARSVQRQRVADNYPGADAYYSAVLTLFGQGWDQHRFRFTASGELQPDWNQECASSH

SEQ ID NO: 59182 - protein, 113 aa, Klebsiella pneumoniae
EIKTDYQAVVTGINEGYKRFATGTYALWYPVVLRAQIKRMIKELEATGIRKILQIELAVRPDSDQRGMTASGMIVINPPWKLEQQMNNVLPWLHSKLVPTGTGHATVSWIVPE

SEQ ID NO: 59183 - protein, 76 aa, Klebsiella pneumoniae
MPRSQPGALIESEEQALAQTLEMVQHNRVRSLSGEWAHVKAETVCLHGDGAHALDFARRLRAAFAGRNIDVSADLE

SEQ ID NO: 59184 - protein, 139 aa, Klebsiella pneumoniae
MGNPELLRQFDIPVVHDLPGVGENLQDHLEMYLQYECKEPVSLYPALQWWNQPKIGAEWLFGGTGIGASNQFEAGGFIRSRAEFAWPNIQYHFLPVAINYNGSNAVKEHGFQCHVGSMRSPSRGHVRLKSRDPHAHPAI

SEQ ID NO: 59185 - protein, 107 aa, Klebsiella pneumoniae
QAVAIGADDAALTLHRKLCAAATELLSRALPAILAGTTDERPQDHSQATYVGRRTPEDGRLDWELPAQTLHNLVRAVSDPWPGAFGYAGANKLSSTVAMISDLPVSL

SEQ ID NO: 59186 - protein, 47 aa, Klebsiella pneumoniae
MGHGTCKNAILIVEFARELEIQGKGIMEAALEACRLRLRPIVMTSIA

SEQ ID NO: 59187 - protein, 95 aa, Klebsiella pneumoniae
VVAVWLSICASHFMFRRRHLQQGKALSDLQYRAPWYPVVPVLGFVLCLVACVGLAFDPSQRIALWCGIPFVALCYGAWYLTRSRNMTQEPQHVAD

SEQ ID NO: 59188 - protein, 237 aa, Klebsiella pneumoniae
  MISC_FEATURE (82)..(82): X=any amino acid
  MISC_FEATURE (136)..(136): X=any amino acid
  MISC_FEATURE (185)..(185): X=any amino acid
MLRDGLEAALIVSLIASYLIRTQRGNWIGVMWIGGILGGGLLCLGLGILYRTESHREVSVMREQELFEWDRRWIDCSVVASXACDRSSWIAAMSHAICPSCSWSRPWYTGACTRLCNSPPAWALVTDWSFFAGRSXGAGARVFFLLAAFHAGVSASGRRLGALLGLATAYRAGSFLIYWWRYPAXALSVFFTLDQPVYLLVGAWPGRLGRPRLPRVGPVEPVPGTAFDLSDVLSTHT

SEQ ID NO: 59189 - protein, 127 aa, Klebsiella pneumoniae
MDKIEVRGARTHNLKNINLVIPRDKLIVVTGLSGSGKSSLAFDTLYAEGQRRYVESLSAYARQFLSLMEKPDVDHIEGLSPAISIEQKSTSHHPRSTVGTITDNHDYLRLLYARVGEPRCPDHDVPL

SEQ ID NO: 59190 - protein, 147 aa, Klebsiella pneumoniae
RALRQGPQIVVGTPGRLLDHLKRGTLDLSKLSGLVLDEADEMLRMGFIEDVETIMAQIPEGHQTALFSATMPEAIRRITRRFMKEPQEVRIQSSVTTRPDISQSYWTAYGMRKNEALVRFLEAEDFDAAIIFVRTKNATLEVAEALD

SEQ ID NO: 59191 - protein, 136 aa, Klebsiella pneumoniae
VSCRFEKACSSYLPNRTLEAAMYQAVCHYGTPAWSDEERAFAAAIRATLSANDINNSLNNIAGTSGEEGKTFARRHRDTLLIDEVAPWAATGNVLAGSTDVGDVSWKAPVAQCFSPCFAVGTPLHSWQLVSQGLSS

SEQ ID NO: 59192 - protein, 161 aa, Klebsiella pneumoniae
MVAVSLGFGALIGVPLGIVLVVCRPGGIVANPVVHHALNPLINVLRSLPFIILLIVILPFTRLLVGTTIGTAGAIVPLIVFVAPYIARLVESSLLEVDEGILEAADAMGATPLQTVWHFMLPEAAASLILALTTATIGLLGATAMAGTVGGGGIGDLAITY

SEQ ID NO: 59193 - protein, 139 aa, Klebsiella pneumoniae
PAFHQISELVKSQSREGDPDFAAYYKEPSKQIDNPQLNLVYIYGESLERTYFDNDAFPNLTPELGRIKDEAIDFSNTMQLPGTDYTIAGMVASQCGIPLFAPFEGNASASVSSFFHTRIFALADILKNSGYENYFVQGA

SEQ ID NO: 59194 - protein, 164 aa, Klebsiella pneumoniae
EVNDEVHAALLEVIDMRRELLDQFNKQLGNQLMMAINLQINQQQLMSVSSSLKEILTQQIFWVNSNKPMDWEWIKAFPEALKGQFKAMKITVNWEKAWPAVFVAFLAGLPLLLIAGLIRWRLQWLKDYQAKLASQVGQLRNDTQLHTPKAILIDLIRALPVVLL

SEQ ID NO: 59195 - protein, 41 aa, Klebsiella pneumoniae
GVELGKQLANRILPELKDGSEVSSHDSSTNGLINRYKAWRA

SEQ ID NO: 59196 - protein, 108 aa, Klebsiella pneumoniae
NQTGSALEMKPIAACVLGGISLLAVPGTLLARFLGAFFLTQSTPYLVLFRLPAWWNDFIAGLVLLGVLVLDAVCVRRLARHQRALKYSRFQPGNTGGKQVARFPERKA

SEQ ID NO: 59197 - protein, 113 aa, Klebsiella pneumoniae
VLSIIRLTLLALLACVPLLAQAAPYQLTTAWPVNVGPLNPHLYTPNQMFAQSMVYEPLVKYQADGSVQPWLATRWRHSADGKTWWFTLRDDVAFSNGEPFNAQAAAANFQAVL

SEQ ID NO: 59198 - protein, 152 aa, Klebsiella pneumoniae
MCWKAVRDTAVLVERQQTIGALQERYTELQPVLRQVGDLERILARLALRTARPRDLARMRHALQQLPLLRELLADVDSQPVQKLREKMGEFNELRELLERAVIDAPPVLVRDGGVIAPGYSEELDEWRALADGATDYLDKLEIRERERLGLD

SEQ ID NO: 59199 - protein, 121 aa, Klebsiella pneumoniae
MSTSNDPSNNASAGKCPFHAETPKQSAGSGTANRDWWPNQLRVDLLNQHSNRSHPLGENFNYREEFKKLDYSALKADLRALLTDSQEWWPADWGSYIGLFIRMAWHGAGTYRTVDGRAAAG

SEQ ID NO: 59200 - protein, 141 aa, Klebsiella pneumoniae
YAATLRVSTVTAAAVNLYRTRNEIKRDNDAWFYTVFQLAGEAIIEQDDRQVTLAAGDITLIDAARPCSIVWQQTSRQPRLLLPRQRWRPQGTSLPPARLDKSLPMVQLSQRLLLESMGGTTLSASESEAALEAIACLLRPV

SEQ ID NO: 59201 - protein, 56 aa, Klebsiella pneumoniae
MIKKIGVLTSGGDAPGMNAAIRGVVRAALTEGLEVFGIYDLSSTLELQLLEFYSVT

SEQ ID NO: 59202 - protein, 173 aa, Klebsiella pneumoniae
AVAAELHDRMMESVFDALEAGEKLFAHHQPTPVTSVDLLGEGRQALIDANLRLGLALADDEIDYLQDAFTRLGRNPNDIELYMFAQANSEHCRHKIFNADWIIDGEQQPKSLFKMIKNTFEKTPDYVLSAYKDNAAVMEGSEVGRYFADHQTGRYDFHLSSTVAMISDLPVSL

SEQ ID NO: 59203 - protein, 151 aa, Klebsiella pneumoniae
MQLPYPLLHFIGTSAGRLSRRFLKRREHIARRNIELCFPDMSPAARETLIDQNFMSLGMGLIETGMAWFWSDERVKKWFDVEGFANLNHALSGGKGVMVVGVHFMSLELGGRAMGLCRPMMATYRPHNSPLMEWVQTRGRLRSNKAMIDRN

SEQ ID NO: 59204 - protein, 180 aa, Klebsiella pneumoniae
LLWVVHFLVLRGVQTAAGINLVATLAKLLPLGAFVALAALAFQLDTFRLDFSGLALGVPVWEQVKNTMLITLWVFIGVEGAVVVSARARHKRDVGRATLLAVLSALAVYLLVTLLSLGVVPRSELAEMRNPSMAGLMVRLMGSWGEIVIAAGLIAFQHSGDDIRSAGLPIVSRINFDKPG

SEQ ID NO: 59205 - protein, 102 aa, Klebsiella pneumoniae
MQTVLAKIVADKAIWVEARKQQQPLASFQNEIVPTQRNFYDALAGTRTAFILECKKASPSKGLIREDFDPAAIASIYKHYASAISVLCDEKYFQGSFDFLPI

SEQ ID NO: 59206 - protein, 137 aa, Klebsiella pneumoniae
MKRDWEIISLLASELGYPMHYENNQQIWDEMRELCPLFYGVTWEKMGDMGHVQWPCPTLDHPGTPWLYKDNRFDTPSGKGQLFATAWRAPAERPDDEWPLVLCTVREVGHYSCRSMTGNCAALQSLADEPGRVQMNP

SEQ ID NO: 59207 - protein, 54 aa, Klebsiella pneumoniae
GFGFITPDDGSKDVFVHFSAIQNDGYKSLDEGQKVSFTIESGAKGPAAGNVTSL

SEQ ID NO: 59208 - protein, 101 aa, Klebsiella pneumoniae
  MISC_FEATURE (5)..(5): X=any amino acid
LQTLXPSRPTYRKANPSDAPIMILTLTSDTYSQGELYDFASTQLAQTIAQIDGVGDVDVGGSSLPAVRVDLNPQALFNQGVSLDAVRTAISDANVRKPQGA

SEQ ID NO: 59209 - protein, 126 aa, Klebsiella pneumoniae
MLEREKIVALGVGVHTSKATTAIVREADGLRLNFADGGALRTDMVVFSAGIRPQDALARGCALQVGERGGIHIDDQCRTSDPNVLAIGECALWDNKIYGLVAPGYQMARIAAATLAGEDACFSGAD

SEQ ID NO: 59210 - protein, 107 aa, Klebsiella pneumoniae
MSNWPYPRIVAHRGGGKLAPENTLAAIDVGARYGHTMIEFDAKLSKDGQIFLLHDDNLERTSNGWGVAGELAWDDLLKVDAGSWFSREFKGELSSTVAMISDLPVSL

SEQ ID NO: 59211 - protein, 66 aa, Klebsiella pneumoniae
MFVSPATLIPRPDTECLVEQALARLPTAPCRILDLGTGTGAIALALASERPDCEVTAVDVMPDAVA

SEQ ID NO: 59212 - protein, 71 aa, Klebsiella pneumoniae
MIQYLNLFFYDIYPYLCGTVFLVGSWLLYDYGQYTWCASSSQMLDKRGMVLWSNLFHIGILGIFFGPLFGM

SEQ ID NO: 59213 - protein, 101 aa, Klebsiella pneumoniae
  MISC_FEATURE (97)..(97): X=any amino acid
MSQTSTLKGQCIAEFLGTGLLIFFGVGCVAALKVAGASFGQWEISIIWGLGVAMAIYLTAGVSGAHLNPAVTNRSMWLVQPCFEWRKVVPFPAQWRXYQIC

SEQ ID NO: 59214 - protein, 146 aa, Klebsiella pneumoniae
RLGDVQAIPGRPVPADALTDADALMVRSVTRVNEALLAGKAIKFVGTATAGTDHVDQAWLQQAGIGFSAAPGCNAIAVVEYVFSSLLMLAERDGFALRDRTVGIVGVGNVGGRLQKRLEALGIKTLLCDPPRADRGDEGDFPAQWR

SEQ ID NO: 59215 - protein, 150 aa, Klebsiella pneumoniae
VVLITQSSSEYSISFCVPQSDCARAKRAMEDEFYLELKEGLLEPLAIMERLAIISVVGDGMRTLRGISAKFFAALARANINIVAMAQGSSERSISVVVSNDDATTGVRVTHQMLFNTDQVIEVLSIGVGGVGGALLEQIKRQQGWLFPAH

SEQ ID NO: 59216 - protein, 155 aa, Klebsiella pneumoniae
MCWKEQTTQTTTTAAGSAADQGVPASGQGKLITVKTDVLELTINTNGGDIEQALLLAYPKTLKSTEPFQLLETTPQFVYQAQSGLTGRDGPDNPANGPRPLYNVDKEAFVLADGQDELVIPLTYTDKAGNVFTKTFTLKSLSSTVAMISDLPVSL

SEQ ID NO: 59217 - protein, 198 aa, Klebsiella pneumoniae
GRSDIIATVLESFRANTVEKTGENRYRVWPNEMPADLHKVRPHQPLNRNLDHNWQQALLKTSSERRIAVDVTLSGWQEQLVLTMTCEDGVSVTHTLDGEFAEANQAEKALANLRDGVTKLGQTIYYAREVQVNLPPLFVPNSLLNQLRRETAEMLDEARLNAWQRGTRKPVSVPAPVYPETHLSFFSSTLELQLLEFY

SEQ ID NO: 59218 - protein, 173 aa, Klebsiella pneumoniae
MGNNVVVLGTQWGDEGKGKIVDLLTERAKYVVRYQGGHNAGHTLVINGEKTVLHLIPSGILRENVTSIIGNGVVLSPAALMKEMKGLEDRGIPVRERLLLSEACPLILDYHVALDVAREKARGAKAIGTTGRGIGPAYEDKVARRGLPFQHSGDDIRSAGLPIVSRINFDKPG

SEQ ID NO: 59219 - protein, 106 aa, Klebsiella pneumoniae
MFILFADLTPKRIGMIAPETVALRIINPMRFCLLVFRPLVWLFNGMANMIFRIFKLPMVRKDDITSDDIYAVVEAGALAGVLRKQEHELIENVFELESRTVPSSMT

SEQ ID NO: 59220 - protein, 249 aa, Klebsiella pneumoniae
MKLNSRAQSAQNPHNHSPIVLVHGLFGSLDNLGILARDLIADHDIVQVDMRNHGLSPRSPEMTYPAMAQDLLDTLDAHQIERATFIGHSMGGKAVMALTALAPERISGLVAIDIAPVDYHVRRHDEIFAAIRAVSESAASTRQQAAQVMREHLQEEGVIQFLLKSFVDGDWRFNVPVLWDQYPHIVGWETIPAWPHPTQFIPGGNSPYVTDAYRDALLAQFPQARAHVIAGAGHWVHAEKPEAVLRAIR

SEQ ID NO: 59221 - protein, 176 aa, Klebsiella pneumoniae
MLERGACDMGVLPNLFPGYQEVTDPAVRAKFAAAWGIDPALMDDQVGTRITEVPHKALTGEIKAYYIMGEDPLQTEADLGLVRKGIEALDFVVVQDIFMTKTAEMADVLLPATSWGEHGGVFTCADRGFQRFEQAIPPAGNVKRDWEIISPFQHSGDDIRSAGLPIVSRINFDKPG

SEQ ID NO: 59222 - protein, 183 aa, Klebsiella pneumoniae
MCWKEPAQRLITDLYDAGVDALIVQDMGIMELDLPPIELHASTQCDIRSVEKAKFLSDAGFSQIVLARELNLSQIKAIYDHTDATIEFFIHGALCVAYSGQCYISHAQTGRSANRGDCSQACRLPYTLKDDQGRVVAYEKHLLSMKDNDQTANLAALIDAGVRSFKIEGRYKDMLESFPAQWR

SEQ ID NO: 59223 - protein, 78 aa, Klebsiella pneumoniae
MSVIKMTDLDLAGKRVFIRADLNVPVKDGKVTSDARIRASLPTIELALKQGAKVMVTSHLGRPTEGEYNEEFFPAQWR

SEQ ID NO: 59224 - protein, 123 aa, Klebsiella pneumoniae
MALVNAFGYVLLEEELYNKTYVERYTEGLDAYREAVKDYAPEAVEGIVGVSAREIREAMRMFAAAPSATIMWGMGVTQFGQAVDVVRGLASLALLTGNLGRPNVGVGPVRAFQHIGASAARVL

SEQ ID NO: 59225 - protein, 225 aa, Klebsiella pneumoniae
LPITHVIRAEDHINHTPRQINILKALNAPVPVYAHVSMINGDDGKKLSKRHGAVSVMQYRDDGYLPEALLNYLVRLGWSHGDQEIFTREEMIEFFSLGAVSKSASAFNTDKLLWLNHHYINTLPAEYVATHLQWHIEQENIDTRNGPQLAELVKLLGERCKTLKEMAQSCRYFYEEFAEFDADAAKKHLRPVARQPLEVVRDKLAAISDWTAENVHHAIQATADD

SEQ ID NO: 59226 - protein, 201 aa, Klebsiella pneumoniae
  MISC_FEATURE (174)..(174): X=any amino acid
  MISC_FEATURE (175)..(175): X=any amino acid
  MISC_FEATURE (185)..(185): X=any amino acid
VELAIEAGCNCVASTYGVLASVSRRYAHRIPFLVKLNHNETLSYPTEYDQTLYASVEQAFNMGAVAVGATIYFGSEQSRRQIEEISAAFERAHELGLVTVLWAYLRNSAFKKDGVDYHVSADLTGQANHLAATIGADIVKQKMAENNGGYKAVNFGYTLSSTVAMISDLPVSLXXVVLISISQGXPALLNRHAVPGNSTRL

SEQ ID NO: 59227 - protein, 226 aa, Klebsiella pneumoniae
QWGMQPSELPASILKRLPVRFNYDDNYFNHKFQGMPKCGYTQMIKSILNHENIKVDLQREFIVEERTHYDHVFYSGPLDAFFGYQYGRLGYRTLDFKKFTYQGDYQGCAVMNYCSVDVPYTRITEHKYFSPWEQHDGSVCYKEYSRSCEENDIPYYPIRQMGEMALLEKYLSLAENETNITFVGRLGTYRYLDMDVTIAEALKTAEVYLNSLTENQPMPVFTVSVR

SEQ ID NO: 59228 - protein, 167 aa, Klebsiella pneumoniae
MVVKRANLFRLPDQMPIDDGAFIEPITVGLHAFHLAQGCEGKNVIIIGAGTIGLLALQCARELGANSVTAIDINPQKLELAKTLGATHVFNSREMSGQAIQQALESIQFDQVVLETAGTPQTVALAIEAAGPRAQLALVGTLHHDLTLPAATFGPFQHIGASAARVL

SEQ ID NO: 59229 - protein, 252 aa, Klebsiella pneumoniae
MSKLGINGFGRIGRLVLRRLLEVDSSLEVVAINDLTSPKVLAYLLKHDSNYGPFPWSVDFTEDALIVNGKTITVYAEKEAQHIPWQAAGAEVIVECTGFYTSAEKSQAHLQAGARKVLISAPAGEMKTIVYNVNDDTLTPDDTIISVASCTTNCLAPMAKVLQDAFGITVGTMTTIHAYTGTQSLVDGPRGKDLRASRAAAENVIPHTTGAAKAIGLVIPALSGKLTFQHSGDDIRSAGLPIVSRINFDKPG

SEQ ID NO: 59230 - protein, 44 aa, Klebsiella pneumoniae
REYAAEQIDGQRKDFIRLGVLGDWSHPYLTMDFKTEANIIRALG

SEQ ID NO: 59231 - protein, 120 aa, Klebsiella pneumoniae
MTVRFGRGPVMLGFTAVMLCGLLLTLFSSLWLIFIGMLLFSAGFFAAHSVASSWIGPRARRARGQASSLYLFSYYLGSSLAGTLGGVFWHHYGWNGVGGFIALLLLAALLTGTCLHQRLK

SEQ ID NO: 59232 - protein, 118 aa, Klebsiella pneumoniae
MCWKDDTPDYSKDPNGEVIALDSHIRLANPRTPETQSSLMMRRGYSYSLGVTNAGQLDMGLLFVCYQHDLEKGFLTVQKRLNGEALEEYVKPIGGGYFFVLPGVVDEKHYLGESLLQA

SEQ ID NO: 59233 - protein, 142 aa, Klebsiella pneumoniae
MCQPLAMDRLVCGDVGFGKTEVAMRAAFLAVENHKQVAVLVPTTLLAQQHYDNFRDRFANWPVRIEMLSRFRSAKEQAQILEQAAEGKIDILIGTHKLLQSEVKLRDLGLLIVDEEHRFFPAHWSFSCSSSIVSPKSYVYDT

SEQ ID NO: 59234 - protein, 171 aa, Klebsiella pneumoniae
DLNADLGEGCASDSALLQLVSSANIACGFHAGDAVLMQQMQCDEALKIRPSAIGATHTSFPDQENFRSEPAMQVTARDGLQPQVLYQIGSSWQAIVHSHRGAELQAQSTQHGMLYKPGRQKSQHIWHDSYQPSAVRQMHDSQTHGAWLGWQGSELIRARQHYQLTRARKSS

SEQ ID NO: 59235 - protein, 179 aa, Klebsiella pneumoniae
MLESVETWIRLAREAGCAQLFNCPVSAIHHHADGITIDTLDGEYHGKKLLVSAGTWVTRLLPDLPIQPVRKVFAWYQADGRYSSKNHFPAFTGELPNGDQYYGFPAEDNELKIGKHNGGQPISTPQERVAFGAVASDGSESFPFLRNVLPGIGGCLHGASCTYDLSSTVAMISDLPVSL

SEQ ID NO: 59236 - protein, 170 aa, Klebsiella pneumoniae
YRETGRSDIIATVLESWKGITAKRPLTFFCYGVGVLEGGELPASHSARLLQFKAWGLPVSDRVTLCHTPEEVLTYYRKVEEERPHLGFDIDGVVIKVDSLALQEQLGFVARAPRWAVAFKFPAQEQMTFVRDVEFQVGRTGAITPVARLEPVHVAGVSFQHIGASAARVL

SEQ ID NO: 59237 - protein, 196 aa, Klebsiella pneumoniae
MLERKEMPLTGQHNYSNALAALALADAAGLPRASSLKALTTFTGLAHRFQLVLDHNGVRWINDSKATNVGSTEAALNGLQLDGTLYLLLGGDGKSADFTPLKRYLGGDRIRLYCFGRDGAELAELRPEVAVQTETMEQAMRQIAPLVKAGDMVLLSPACASLDQFKNFEQPFQHSGDDIRSAGLPIVSRINFDKPG

SEQ ID NO: 59238 - protein, 175 aa, Klebsiella pneumoniae
MLERSKLGLPGSRCGIIIANEKIITAISNMNGIISLAPGGIGPAMMCEMIKRQDLLRLSETVIKPFYYQRVQETIAIIRRYLPEERCLIHKPEGAIFLWLWFKDLPISTELLYQRLKKRGVLMVPGDYFFPGLDKPWPHTHQCMRMNYVPDPQKIEAGVKILAEEVEFAWREQEA

SEQ ID NO: 59239 - protein, 101 aa, Klebsiella pneumoniae
MKAVEYFLKEKVADVAELHAVSEFIHFACTSEDINNLSHALMLKTARDEVVLPYWRKLIDAVKDLATQYRDVPLLSRTHGQPATPSTMAFQHIGASAARVL

SEQ ID NO: 59240 - protein, 63 aa, Klebsiella pneumoniae
KLVDESAVMSLAINSILQSEGHLNNKAIILWLIQALETTDDVVTADVIRKTLEIVVGYTMDDI

SEQ ID NO: 59241 - protein, 125 aa, Klebsiella pneumoniae
MVALTLARGDEQQARQLTEEILSGRFQPATPTFLNAGKQQRGELISCFLLRIEDNMESIGRAVNSALQLSKRGGGVAFLLSNLREAGAPIKRIENQSSGVVPVMKMLEDAFSYANQLGAFPAQWR

SEQ ID NO: 59242 - protein, 172 aa, Klebsiella pneumoniae
MLESYVNDFNQFGRTWRVMAQADGPYRESVEDIANLRTRNNQGEMVPIGSMVNISTTYGPDPVIRYNGYPAADLIGDADPRVLSSSQAMTHLEELSKQILPNGMNIEWTDLSFQQATQGNTALIVFPVAVLLAFLVLAALYESWTLPFQHSGDDIRSAGLPIVSRINFDKPG

SEQ ID NO: 59243 - protein, 261 aa, Klebsiella pneumoniae
MLSDDAVAAQLQSATTAEELRALLMGEKQSEALKLDNETLSLDVAASDLLTLQALNAARLKEVGAVDAAFVSHVINDTPLNLGQGVWLNDSAEGNLRSAVAVSRAANAFTRDEQPVSLLVTVAMADEQPTAVLNRLSKLLLDKKAEHLLKADAATVLALLTSDDAIAEDVLSAEFVVRNEHGLHARPGTMLVNTIKQFSSDITVTNLDGSGKPANGRSLMKVVALGVKKGHRLRFTAQGEDAQQALDAIGEAIAAGLGEGA

SEQ ID NO: 59244 - protein, 148 aa, Klebsiella pneumoniae
MLERYLFLSRTYKNVDVVYIRHHTQAKEVDEHEFFYSQETGGTIVSSALKLMDEVVQARYDPAQWNIYAAQASDGDNWADDSPLCHELLAKKILPVVRYYSYIEITRRAHQTLWREYEHLQATFDNFAMQHIRDQEDIYPVFFPAQWR

SEQ ID NO: 59245 - protein, 149 aa, Klebsiella pneumoniae
MATAIAFALAIGALAGAFNGLLVVGLRIPAIVATLGTLGLYRGVMLLWTGGKWIEGLPDSLKSLSEPAFIGVSPLGWLVLALLLAGGWLLSRTAFGRDFYAAGDNLAAARQLGVAVNRTRMLAFTLKGMLADLFPAHLELQLLEFYSVT

SEQ ID NO: 59246 - protein, 167 aa, Klebsiella pneumoniae; identical to SEQ ID NO: 56103

SEQ ID NO: 59247 - protein, 158 aa, Klebsiella pneumoniae
MMLEDARPSLLIATEDQLARFSDIPGLESLCYQQPLAAGDEAPLALSKPDHTAYIIFTSGSTGRPKGVMVGQTAIVNRLLWMQDRYPLSADDVVAQKTPCSFDVSVWEFWWPFIAGAQLVMAEPEAHRDPQAMQQFFARYGVTTTPFQHIGASAARVL

SEQ ID NO: 59248 - protein, 111 aa, Klebsiella pneumoniae
MAENNGGYKAVNFGYTDDRVYSKLTSDNPIDLVRYQLANCYMGRAGLINSGGAAGGETDLADAVRTAVINKRAGGMGLILGRKAFKKSMADGVKLINAVQDVYLDGKVTIA

SEQ ID NO: 59249 - protein, 198 aa, Klebsiella pneumoniae
MLERGYAIEYDFFDPRDLKPTLESKFIQGLFFAGQINGTTGYEEAAAQGLLAGLNAARFSAEKEGWAPRRDQAYLGVLVDDLCTLGTKEPYRMFTSRAEYRLMLREDNADLRLTEQGRELGLVDDERWARYNEKLESIERERQRLKSTWVNPQAESANEVNAHLTAPLSREASGEDLLRRPEMTYAFQHIGASAARVL

SEQ ID NO: 59250 - protein, 82 aa, Klebsiella pneumoniae
MELTPREKDKLLLFTAALVAERRLARGLKLNYPESVALISAFIMEGARDGKSVASLMEEGRHVLTRLSSTLELQLLEFYSVT

SEQ ID NO: 59251 - protein, 174 aa, Klebsiella pneumoniae
MLERDQPGVVGPIKQIEALQQKGYPLAYVGDVVGTGSSRKSATNSVLWFMGDDIPNVPNKRGGGLCLGGKIAPIFFNTMEDAGALPIEVDVSNLNMGDVIDVYPFKGEVRNHETNELLASFELKTDVLIDEVRAGGRIPLIIGRGLTTKAREALGLPHLSSTLELQLLEFYSVT

SEQ ID NO: 59252 - protein, 146 aa, Klebsiella pneumoniae
MAREAVDLVDLVENVVAAHSLPARAKLMHTELTLQARRCLAEPALLISVMDNLYSNAVHYGAESGNIRIHSYRHGEQVRIDVANSGEPIPAAEKNMIFEPFYQGSHQRKGAVKGSGLGLSIARDCVRQMQGELSLVDAPAFPAQWR

SEQ ID NO: 59253 - protein, 126 aa, Klebsiella pneumoniae
MNMRIISAKDHGDSFRTLESGRAVAFMMDDALLAGERAKAKKPDNWEIVGTPQSKEAYGCMLRKDDPTFKALVDETVAQAQTSGEAEKWFDKWFKNPIPPKNLNLNFELSDDMKALFKSPNDKALN

SEQ ID NO: 59254 - protein, 157 aa, Klebsiella pneumoniae
MPVLHNRISNETLKAQMLAETEPRTTISFYKYFTIVDPQATRDALWVALTQLKVFGRIYLAREGINAQISVPQSNVEALREFLYGFDPALAGLRFNIAVEDDGKSFWVLRLKVRDRIVADGIDDPSFDASNVGEYLKAAEVNLSSTVAMISDLPVSL

SEQ ID NO: 59255 - protein, 185 aa, Klebsiella pneumoniae
MLESPGYWGTKPKIDRLVFSITPDASVRYAKLQKNECQVMPYPNPADIARMKEDKNITLLEQPGLNVGYLSFNTEKKPLDDVKVRQALTYAVNKEAIIKAVYQGAGQAAKNLIPPTMWGYNDDVKDYTYDPEKAKQLLKEAGLEKGFTIDLWAMPVQRPYNPFPAHWSFSCSSSIVSPKSYVYDT

SEQ ID NO: 59256 - protein, 124 aa, Klebsiella pneumoniae
  MISC_FEATURE (105)..(105): X=any amino acid
MTLNTILHDDELEPAQRLITDLYDAGVDALIVQDMGIMELDLPPIELHASTQCDIRSVEKAKFLSDAGFSQIVLARELNLSQIKAIYDHTDATIEFFIHGALCVXYSGQLSSTVAMISDLPVSL

SEQ ID NO: 59257 - protein, 105 aa, Klebsiella pneumoniae
MNSKDLRAIAHVERLTQMGVHSLKIEGRTKSFYYCARTAQVYRKAIDDAAAGKPFDTSLLETLEGLAHRGYTEGFLRRHTHDDYQNYEYGYSVSFQHMELQLSSL

SEQ ID NO: 59258 - protein, 149 aa, Klebsiella pneumoniae
MKALREPLWWLIALFIGLLAGLPYSAPLFSRLFPELPRPVYQQESFWALTLDHGWLVVASSLAATAIGLGAGVAVTRPAGSAFRPLVETIAAIGQTFPPVAVLAMAVPVLGFGWLPALIALALYGILPVLQGTPFQHIGASAVEFYSVT

SEQ ID NO: 59259 - protein, 186 aa, Klebsiella pneumoniae
  MISC_FEATURE (142)..(142): X=any amino acid
  MISC_FEATURE (161)..(161): X=any amino acid
  MISC_FEATURE (175)..(175): X=any amino acid
GKRIFRVLQNRRDALSLLFFSLFGALTVQFTFLMTIEKSNAATATVLQFLSPTIIVAWFALARKARPTPLVLGAICTSLAGTFLLVTHGNPTTLSISPAALFWGIASAFAAAFYTTYPSTLIARYGTLPIVGWSMLFVLCCXCLFACFTVLCHVHRIFVGXLACLLLCFFLPVWXSGTSLTFSLYL

SEQ ID NO: 59260 - protein, 352 aa, Klebsiella pneumoniae
  MISC_FEATURE (209)..(209): X=any amino acid
  MISC_FEATURE (225)..(225): X=any amino acid
  MISC_FEATURE (240)..(240): X=any amino acid
  MISC_FEATURE (248)..(248): X=any amino acid
  MISC_FEATURE (296)..(296): X=any amino acid
  MISC_FEATURE (321)..(321): X=any amino acid
  MISC_FEATURE (348)..(348): X=any amino acid
YYFGRPVEELSLDQQALLVGMVKGASVYNPWRNPKLALERRNLVLRLLQQQQVIDQELYDMLSARPLGVQPRGGVISPQPAFMQMVRQELQAKLGDKVKDLSGVKIFTTFDSVAQDAAEKAASEGIPVLKKQRKLADLETAMVVVDRFTGEVRAMVAAAEPQFAGYNRAMQARRSIGSLAKPADLLSRAEQPNQYLPEYLDLPDAPGDXFCLSNGQTVCPLQNDXSSFQLVSVMLCWMPXTRSMNCPXRLTRVMLLGLPGWLVDTWTKLWWLPEESAQLRCCLMLACAALNLTADXQWPRPSDHLPAVGTCAPAFRAAVSXFAEDGTVLYQSYPQGGVRWCLPRRPTXPLVD

SEQ ID NO: 59261 - protein, 168 aa, Klebsiella pneumoniae
MCWKAENLAYATLVDEGIPVRLSGEDSGRGTFFHRHAVIHNQTNGSTYTPLQHVHNGQGQFRVWDSVLSEEAVLAFEYGYATAEPRTLTIWEAQFGDFANGAQVVIDQFISSGEQKWGRMCGLVMLLPHGYEGQGPEHSSARLERYLQLCAEQNMQVCVPSTFPAQWR

SEQ ID NO: 59262 - protein, 123 aa, Klebsiella pneumoniae
MIHTLTLNTAIDMNIFCDPLQPAAVNRTRQTEYCPNGKGVNVSLVLHHYQQPTHVMGIFGGFTGRYIVEELRKQHINVTPAWVAEPTRINIFINDGSDEYKLVNPGARLSSTVAMISDLPVSL

SEQ ID NO: 59263 - protein, 170 aa, Klebsiella pneumoniae
MCWKVAGHSLGEYSALVCAGVIGFADAVRLVELRGKFMQEAVPEGTGAMSAIIGLDDAAIAKACEESAEGQVVSPVNYNSPGQVVIAGHKEAVERAGAACKAAGAKRALPLPVSVPSHCALMKPAAEKLAVELQKITFNAPTIPVVNNVDVKCETLSSTVAMISDLPVSL

SEQ ID NO: 59264 - protein, 210 aa, Klebsiella pneumoniae
MPPGLLEQFTKETGIKVIYSTYESNETMYAKLKTYKDGAYDLVVPSTYFVDKMRKEGMLQKIDKSKLTNFSNLDPQMLNKPFDPNNDYSIPYIWGATAIGVNSEAIDPKTITSWADLWKPEYKSSLLLTDDAREVFQMALRKLGYSGNTTDPKEIEAAYNELKKLMPNVAAFNSDNPANPYMEGEVNLGMVWNGSAYVARQAGGVTIFSF

SEQ ID NO: 59265 - protein, 158 aa, Klebsiella pneumoniae
MRHALVLFGGIVPRKATTHLRALLNDADAVLLAADTADEALFRTEVVGAKLALTEWLVQRGWRPFLNEAGEKKIAGSFKRFADIHLSRVAAELRSAVQHLAVEDAADQLPKLSRDIDSVQLLAGAYGDAVAPWLENWQELQRAIEHDDRSVFFPAQWR

SEQ ID NO: 59266 - protein, 175 aa, Klebsiella pneumoniae
GFTGMGLSELLKTAEVPKGSFYHYFRSKEAFGVALLEHHYTGYLQRLVDHFDHGDGNYRDRLLAYYQHTLNQFCQQGIISGCLTVKLSAEVCDLSEDMRAAMDRGASQIIALLGDALEKGRQEGSLAFDGEAMTLSQVLYSLWLGANLQANITRSATPLESALCTTPNRLLRLPA

SEQ ID NO: 59267 - protein, 138 aa, Klebsiella pneumoniae
VMNTFGISIPGLRIAGGLIVAFIGFRMLFPQQKAHDSMEAKIKSEELQDEPTANIAFVPLAMPSTAGPGTIAMIISSASTVKHGVDFPEWVVLAAPPIIFLLLGVILWACLRSSGAIMRLVGKGGIEAISRLMGFLLV

SEQ ID NO: 59268 - protein, 68 aa, Klebsiella pneumoniae
MQGLWWLGKRSVTPLPPSILNWFYEVRGKLQEAGQALAPVEGKPDYQALADTLKRAFKQLDKTFLDDL

SEQ ID NO: 59269 - protein, 177 aa, Klebsiella pneumoniae
MAEALGWHLLDSGAIYRVLALAALHHHVDVESEEALVPLAAHLDVRFISTDGNLEVVLEGEDVSSEIRTQEVANAASKVAAFPRVREALLRRQRAFRELPGLIADGRDMGTVVFPDAPVKIFLDASADERAHRRMRQLQEKGFDVNFERLLSEIKERDDRDRNRAVAPLVPAANALV

SEQ ID NO: 59270 - protein, 131 aa, Klebsiella pneumoniae
TTHYRETGRSDIIATVLESLGVSEEGRFLLYLGILLHGVCYDFFFVVGFIYTDRVAGEKVKGQAQSMIVMFTYGIGMLLGSQISGALYNHLVAGQSVPQAWVTFWWIPAVAAAVIALIFLFSFQYNEKEPH

SEQ ID NO: 59271 - protein, 171 aa, Klebsiella pneumoniae
MTPVIEGGDVKEPLRDRVLGRVTAEDVLKPGTADILVPRNTLLHEHWCDLLEANSVDSVKVRSVVSCDTDFGVCAHCYGRDLARGHLINKGEAIGVIAAQSIGEPGTQLTMRTFHIGGAASRAAAESSIQVKNKGSIKLSNAKSVVNSSGKLVITLSSTLELQLLEFYSVT

SEQ ID NO: 59272 - protein, 161 aa, Klebsiella pneumoniae
VKTAQLLQTLNDQLSELAALVAPLAEHATLSPRFDRQLFHTRSTLMQAYLAEAQHNFNQLRQAVERQQMPQVVWIAERLAAQIAALRRETATWSLRSWDHASPTLSRWQRRRLQHQEYERRLVAMARPRQRQLAQATSLDEQQRLGKEVEAYSGRLAPFQH

SEQ ID NO: 59273 - protein, 35 aa, Klebsiella pneumoniae
QVAADLRAYRRPEPYKGKGVRYADEVVRTKEAKKK

SEQ ID NO: 59274 - protein, 117 aa, Klebsiella pneumoniae [sequence omitted]

SEQ ID NO: 59275 - protein, 167 aa, Klebsiella pneumoniae
MAHIEKQAGELQEKLIAVNRVSKTVKGGRIFSFTALTVVGDGNGRVGFGYGKAREVPAAIQKAMEKARRNMINVALNHGTLQHPVKGTHTGSRVFMQPASEGTGIIAGGAMRAVLEVAGVRNVLAKAYGSTNPINVVRATIDGLENMKSPDMVAAKRGKSVEEILGK

SEQ ID NO: 59276 - protein, 57 aa, Klebsiella pneumoniae
MAKTIKITQTRSAIGRLPKHKATLLGLGLRRIGHTVEREDTPAVRGMVNAVSFMVKV

SEQ ID NO: 59277 - protein, 153 aa, Klebsiella pneumoniae
MLESDSASTEDMDDALYAESTADGKLLLTVAIADPTAWIAEGSKLDNAAKVRAFTNYLPGFNIPMLPRELSDDLCSLRANEVRPVLACRMTLGADGTIEDNIEFFAATIESKAKLAYDDVSDWLEGRGSWQPDSEAILSSTLELQLLEFYSVT

SEQ ID NO: 59278 - protein, 64 aa, Klebsiella pneumoniae
MLESGSWPGVITRQAAGHGGFGYDPIFFVPSEGKTAAELSREEKSAISHRGQALKLLLEALRNG

SEQ ID NO: 59279 - protein, 137 aa, Klebsiella pneumoniae
PWLIQKAGQWQVVELESWRHHNQDIIIKLKGVDDRDAANLLTNCEIIVDSSQLPELEEGDYYWKDLMGCQVVTTEGYSLGKVIDMMETGSNDVLVIKANLKDAFGIKERLVPFLDGQVIKKVDLTTRTIEVDWDPGF

SEQ ID NO: 59280 - protein, 113 aa, Klebsiella pneumoniae
MWIGIISLFPEMFRAITDYGVTGRAVKNGLLSIESWSPRDFTHDRHRTVDDRPYGGGPGMLMMVQPLRDAIHAAKAAAGEGAKVIYLSPQGRKLDQAGVSELATNQKLILVCG

SEQ ID NO: 59281 - protein, 93 aa, Klebsiella pneumoniae
ERDHVSMAPAAGRRLWAMAENTRGVLAVEWLAAAQGLDMREGLTTSPLLEEARHLLRERVPHYTQDRYFAPDIDNAIALLAARHLTRLLPAVL

SEQ ID NO: 59282 - protein, 93 aa, Klebsiella pneumoniae
MSKEKFERTKPHVNVGTIGHVDHGKTTLTAAITTVLAKTYGGSARAFDQIDNAPEEKARGITINTSHVEYDTPTRHYAHVDCPGHADYVKNMI

SEQ ID NO: 59283 - protein, 170 aa, Klebsiella pneumoniae
MLERQVIFASLTGDIMLDALIGAVFAIISYSSLAAVLLTATLTAAGAISFPVALCLVIGANLGSGLLAMLNNSAANAAARRVALGSLLFKLVGSLIILPFVHPLAAAMHKLPLAESELVIYFHVFYNLLRCIAMVPFAGPMAKLCQRLIRDEPELDNHLKPKHLFPAQWR

SEQ ID NO: 59284 - protein, 93 aa, Klebsiella pneumoniae
MMGFIGGTSDRPAPISDKEVDAIMNRLQQVGDKPRPKTLFEPGEMVRVNDGPFADFNGVVEEVDYEKSRLKVSVSIFGRATPVELDFSQVEKA

SEQ ID NO: 59285 - protein, 142 aa, Klebsiella pneumoniae
MAKKVQAYVKLQVAAGMANPSPPVGPALGQQGVNIMEFCKAFNAKTDSLEKGLPIPVVITVYADRSFTFVTKTPPAAVLLKKAAGIKSGSGKPNKDKVGKISRAQLQEIAQTKAADMTGADIEAMTRSIEGTARSMGLVVED

SEQ ID NO: 59286 - protein, 163 aa, Klebsiella pneumoniae
AGKLYIINMPLFIINELHLPEKLAGLMMGTAAGLEIPTMLIAGYYARRFGKRFLMRLSAVAGVAFYVGMLTVHTPALLLAMQVLNAIYIGILAGIGMLYFQDLMPGQAGAATTLYTNTTRVGWIIAGSLAGVVAEIWSYHAVFWIALAMGVVTQACLWRIRDV

SEQ ID NO: 59287 - protein, 160 aa, Klebsiella pneumoniae
MFEPMELTNDAVIKVIGVGGGGGNAVEHMVRERIEGVEFFAVNTDAQALRKTAVGQTIQIGSGITKGLGAGANPEVGRNAADEDREALRAALDGADMVFIAAGMGGGTGTGAAPVVAEVAKDLGILTVAVVTKPFNFEGKKRMAFAEQGITELSQHVDSL

SEQ ID NO: 59288 - protein, 245 aa, Klebsiella pneumoniae
ERCGLKVDQLIFAGLAASVFVLTEDERELSVCVVDIGGGTWDIAVYTGGALRHTKVIPYAGNVVTSDIAYAFGTPPSDAEAIKVRHGCALGSIVGKDENVEVPSVGGRPPRSLQRQTLAEVIEPRYTELLNLVNEEILQLQEQLRQQGVKHHLAAGIVLTGGAAQIEGLAACAQRVFHTQVRIGAPLNITGLTDYAQEPYYSTAVGLLHYGKESHLSGEAEVEKRVTASVGSWIKRLNSWLRKEF

SEQ ID NO: 59289 - protein, 142 aa, Klebsiella pneumoniae
MKSIGIFCGSSAGEHPLYLETARLVGRTLAQQGLALVYGGGKVGLMGAVADAALEAGGVVIGVMPRGLVEREIAHRGLTELHVVEDMHERKTKMAALADGFIALPGGAGTLEEIFEQWTWAQLGIHEKPCAYLNIKGYYDPL

SEQ ID NO: 59290 - protein, 176 aa, Klebsiella pneumoniae
MLESEVTAVDVMPDAVALALRNAEHLGIANVTISQSDWFSALAGQRFATIVSNPPYIDAADPHLAEGDVRFEPLTALVAGDQGLADLAHIIREGRQYLQPGGWMLLEHGWTQGEAVRALFREAGYLDVATCRDYGDNERLTLGRLPDMENAFQHSGDDIRSAGLPIVSRINFDKPG

SEQ ID NO: 59291 - protein, 73 aa, Klebsiella pneumoniae
MRLHNHRLELLSPARDAGIAREAILHGADAVYIGGPGFGARHNASNSLSDFPAHWSFSCSSSIVSPKSYVYDT

SEQ ID NO: 59292 - protein, 178 aa, Klebsiella pneumoniae
MMIMQAFLMSELELEQQLPLTASLTFEQSYSEVDGDSASMAELCALISALANVPINQSIAITGSVDQFGRVQPVGGLNEKIEGFFTICQQRGLTGKQGVIIPAANVRHLSLSHELRQAVADNQFAIWAIDDITEALPMLTQLMWDGEGQTLRQTIQERIAQATQQETRHRFPWPLRWL

SEQ ID NO: 59293 - protein, 264 aa, Klebsiella pneumoniae
MSSNFRHHLLSLSLLVGIAAPWAAFAQAPISSVGSGSVEDRVTQLERISNAHSQLLTQLQQQLSDNQTDIDSLRGQIQENQYQLNQIVERQKQILLQIDSLSSGGGAASGAQAPSSSGDQSAAATSAAPAATSGAPAMTGDANTDYNAAIALVKDASRQDDAMVAFQNFVKKYPDSTYQPNANYWLGQLNYNKGRKDDAAFYFASVVKNYPKSPKAPDAMFKVGVIMQDKGDTAKAKAVYQQVINKFPGTDGAKQAQKRLNALG

SEQ ID NO: 59294 - protein, 95 aa, Klebsiella pneumoniae
MLHTLSVSPWHADIAAMLRLMEHGDDLVLLSDGVTAAIADGRFLEILQSAPITLYVLQDDVDARGLAGQIADSVGRVSYTDFVRLTVKHAGQLAW

SEQ ID NO: 59295 - protein, 115 aa, Klebsiella pneumoniae
MSMQDPIADMLTRIRNGQAANKAAVTMPSSKLKVAIANVLKEEGFIEDFKVEGDTKPELELTLKYFQGKAVVESIQRVSRPGLRIYKKKDELPKVMAGLGIAVVSTSKGVMTESC

SEQ ID NO: 59296 - protein, 101 aa, Klebsiella pneumoniae
MAKQSMKAREVKRVALADKFFAKRAELKAIISDVNATDEDRWNAVLKLQTLPRDSSPSRQRNRCRQTGRPHGFLRKFGLSRIKVREAAMRGEIPGLKKASW

SEQ ID NO: 59297 - protein, 142 aa, Klebsiella pneumoniae
MGVGEAIADKKLLDNAAADLAAISGQKPLITKARKSVAGFKIRQGYPIGCKVTLRGERMWEFFERLITIAVPRIRDFRGLSAKSFDGRGNYSMGVREQIIFPEIDYDKVDRVRGLDITITTTAKSDEEGRALLAAFDFPFRK

SEQ ID NO: 59298 - protein, 284 aa, Klebsiella pneumoniae
MKLIRGIHNLSQAPHGCVLTMGNFDGVHRGHQALLQRLREEGRQRGLPVVVMIFEPQPLELFAADKAPARLTRLREKLGYLAESGVDYVLCVRFDRRFAALTAQDFISELLVRRLGVQFLAVGDDFRFGAGRQGDFLLLQKAGAEYGFDVTSTQTFCEGGVRISSTAVRQALADDDLLLAETLLGHPFSISGRVVHGDELGRTIGFPTANLPLRRQVSPVKGVYAVEVTGLGENPIAGVANIGTRPTVAGVRQQLEVHLWTVVMDLYGRHINVILGKKIRNEQR

SEQ ID NO: 59299 - protein, 155 aa, Klebsiella pneumoniae
MLERAAALAGYKWLGRGDKNTADGAAVNAMRIMLNLVNIDGTIVIGEGEIDEAPMLYIGEKVGTGKGDAVDIAVDPIEGTRMTAMGQANALAVMAVGDKGCFLNAPDMYMEKLIVGPGAKGAIDLNLPLEENLHNIARALNKPLGELTVFPAQWR

SEQ ID NO: 59300 - protein, 225 aa, Klebsiella pneumoniae
LFISLPGLAAVNLDRTRLVYNAAEKSTAITLTNESKTLPYLAQSWVEDDKGKKADEMLIALPPLQRIEAGDKSQVRIVKGVKAESLPTDRESLFYFNTREVPPKSEKKNVMQVAIQSRIKLFYRPQSIQRSSHVNPEQKITLQTVGNQLTITNPTPYYFTALAVKDSQGNKIKEVDGEMVAPHSDRNISVAGLRLGQRISISYINDFGGVISMLYRCENNICKFE

SEQ ID NO: 59301 - protein, 164 aa, Klebsiella pneumoniae
MDGITSPIKADPEWAKTTVNGQPALRETDTFDTFMESSWYYARYTCPQYQEGMLDSKAANYWLPVDIYIGGIEHAIMHLLYFRFFHKLMRDAGMVNSDEPAKQLLCQGMVLADAFYYVGENGERNWVSPVDAIVERDEKGRIVKAKDAAGHELVYTGIFPAQWR

SEQ ID NO: 59302 - protein, 124 aa, Klebsiella pneumoniae
MLESVIASPDHARCCQLGQVLGPRGLMPNPKVGTVTPNVAEAVKNAKAGQVRYRNDKNGIIHTTIGKVDFDADKLKENLEALLVALKKAKPTQAKGVYIKKVSISTTMGAGVAVDQAGLNASAN

SEQ ID NO: 59303 - protein, 165 aa, Klebsiella pneumoniae
GHRPHYGRWPLHDFPPFKRLSPQSVTSRIQPGSDVIVCAEMDEQWGYVGAKSRQRWLFYAYDRLRKTVVAHVFGERTMATLGRLMSLLSPFDVVIWMTDGWPLYESRLKGKLHVISKRYTQRIERHNLNLRQHLARLGRKSLSFSKSVELHDKVIGHYLNIKHYQ

SEQ ID NO: 59304 - protein, 90 aa, Klebsiella pneumoniae
VSEGQTVRLEKLDIATGEAVEFAEVLMIANGEEIKIGVPFVEGGVIKAEVVAHGRGEKVKIVKFRRRKHYRKQQGHRQWFTDVKITGISA

SEQ ID NO: 59305 - protein, 85 aa, Klebsiella pneumoniae
MAHKKAGGSTRNGRDSEAKRLGVKRFGGEAVLAGSIIVRQRGTKFHAGTNVGCGRDHTLFALTDGKVKFEVKGPKNRKFISIVAE

SEQ ID NO: 59306 - protein, 240 aa, Klebsiella pneumoniae
MRDNDFFSWRRDMLHQFQSMATGEEVYNLLQRETEALEYDYYTLCVRHPVPFTRPRVTFQSTYPRAWMSHYQAENYFAIDPVLRPENFMRGHLPWNDSLFRDAPALWDGARDHGLQKGVTQCLTLPNHATGFLSVSANNRLPGGYPEDELELRLRTLTELSLLTLLRLEDEMVMPPEMKFSRRELEILKWTAEGKTSAEVAMILSISENTVNFHQKNMQRKFNAPNKTQIACYAVATGLI

SEQ ID NO: 59307 - protein, 234 aa, Klebsiella pneumoniae
MRISTVEHLNAALAGLGIDNIIVEVDAPEIPIMDGSAAPFVYLLLDAGIDELNCAKKFVRIKETVRVEDGDKWAEFKPYNGFSLDFTIDFNHPAIDASTQRYTLNFSADAFMRQISRARTFGFMRDIEYLQSRGLCLGGSFDCAIVVDDYRVLNEDGLRFEDEFVRHKMLDAIGDLFMCGHNIIGAFTAYKSGHALNNKLLQAVLAKQEAWEYVTFEDDAKLPMAFRAPSMVLA

SEQ ID NO: 59308 - protein, 340 aa, Klebsiella pneumoniae
GDLIARFGGDPTLKRQDIRNMVATLKKAGVQRIEGNVLIDTSVFASHDKAPGWPWNDLTQCFSAPPAAAIVDRNCFSVSLYSAQKPGDVAFIRVASYYPVTMFSQVRTLARGSSEAQYCELDVVPGDLNRYTLTGCLPQRSEPLPLAFAIQDGASYAGAILKAELAQAGITYSGTLLRQTLANEPGTVLATSQSAPLHDLLRIMLKKSDNMIADTVFRTIGHARFGVPGTWRAGSDAVRQILRQQAGVDLGNTIIADGSGLSRHNLIAPATMMQVLQYIAQHDTELNFISMLPLAGHDGSLQYRAGLHQAGVDGKVSAKTGSLQGVYNLAGFITTASGQR

SEQ ID NO: 59309 - protein, 139 aa, Klebsiella pneumoniae
  MISC_FEATURE (110)..(110): X=any amino acid
LSPAEGSKKAGKRLGRGIGSGLRKTGGRGHKGQKSRSGGGVRRGFEGGQMPHVRRLPKFGFTSRKAMITAEIRLSDLAHVEGDVVDLNALKAANIIGVQIEFAKVILSGXGNRPVTVRGLRVTKGARAAIEAAGGKIEE

SEQ ID NO: 59310 - protein, 357 aa, Klebsiella pneumoniae
  MISC_FEATURE (239)..(239): X=any amino acid
MAKQPGLDFQSAKGGLGELKRRLLFVVGALIVFRIGSFIPIPGIDAAVLAKLLEQQRGTIIEMFNMFSGGALSRASIFALGIMPYISASIIVQLLTVVYQPLAELKKEGESGRRKISQYTRYGTLVLAIFQSIGIATGLPNMPGMQGLVINPGFAFYFTAVCSDLVTGTMFLMWLGVTITRTWIGNGISIIIFAGIVAGLPAAIDHTIEQARQGDLHYPPVALVAVLVLSSDLLVVFVXAWSTPIVVNYAKRQQGRRVYAAQSTHLPLKVNMAGVIPAIFASSIILFPATITSWFGGGTGWNWLTTISLYLQPGQPLYVLLYASAIIFFCFFYTALVFNPRETADNLKKSGAFVPGI

SEQ ID NO: 59311 - protein, 295 aa, Klebsiella pneumoniae
MAALNSKVRKAVIPVAGLGTRMLPATKAIPKEMLPLVDKPLIQYVVNECIAAGITEIVLVTHSSKNSIENHFDTSFELEAMLEKRVKRQLLEEVQSICPPHVTIMQVRQGLAKGLGHAVLCAHPVVGDEPVAVILPDVILDEYESDLSRDNLAEMISRFDETGASQIMVEPVEDVTAYGVVDCKGESLKPGESVPMVGVVEKPKADVAPSNLAVVGRYVLSADIWPLLAKTPPGAGDEIQLTDAIDMLIEKETVEAYHMKGKSHDCGNKLGYMQAFVEYGIRHKTLGDDFKAWLE

SEQ ID NO: 59312 - protein, 440 aa, Klebsiella pneumoniae
HKGLAYVDELSPDEIREYRGTLKAPGKNSPYRDRSVEENLALFEKMRSGGFEEGKACLRAKIDMASPFIVMRDPVLYRIKFAEHHQTGNKWCIYPMYDFTHCISDALEGITHSLCTLEFQDNRRLYDWVLDNISIPVHPRQYEFSRLNLEYTVMSKRKLNQLVTEKHVEGWDDPRMPTISGLRRRGYTAESIREFCKRIGVTKQDHTIEMASLESCIREDLNENAPRAMAVIDPVKLVIENYPQGESEMVVMPNHPNSPEMGSREVPFSAEIWIDRADFREEANKQYKRLVLGKEVRLRTPYVIKRNAVEKDAEGNITTIFCTYDADTLSKDPADGRKVKGVIHWVSAAHALPVEIRLYDRLFSVPNPGAADDFLAVINPESLVIKQGYAEPSLAQAEAGKAYQFEREGYFCLDSRYATATNLVFNRTVGLRDTWAKAGE

SEQ ID NO: 59313 - protein, 461 aa, Klebsiella pneumoniae
GVVGMAVMGRNLALNIESRGYTVSVFNRSREKTEEVIAENPGKKLVPYYTVQEFVESHLKQPRRILLMVKAGAGTDSAIDSLKPYLDKGDIIIDGGNTFFQDTIRRNRELSAEGFNFIGTGVSGGEEGALKGPSIMPGGQKEAYELVAPILKQIAAVAEDGEPCVTYIGADGAGHYVKMVHNGIEYGDMQLIAEAYALLKGGLALSNEELAKTFTEWNEGELSSYLIDITKDIFTKKDEEGKYLVDVILDEAANKGTGKWTSQSSLDLGEPLSLITESVFARYISSLKDQRVAASKVLSGPQAQPAGDKAEFIEKVRRALYLGKIVSYAQGFSQLRAASDEYNWDLNYGEIAKIFRAGCIIRAQFLQKITDAYAQNAGIANLLLAPYFKQIADDYQQALRDVVAYAVQNGIPVPTFSAAIAYYDSYRSAVLPANLIQAQRDYFGAHTYKRTDKEGVFHTEW

SEQ ID NO: 59314 - protein, 124 aa, Klebsiella pneumoniae
MLQPQRTKFRKVHKGRNRGLAQGTDVSFGTFGLKAVGRGRLTARQIEAARRAMTRAVKRQGKIWIRVFPDKPITEKPLEVRMGKGKGNVEYWVALIQPGKVLYEMDGVPEELAREAFGLQAAKL

SEQ ID NO: 59315 - protein, 232 aa, Klebsiella pneumoniae
MGQKVHPNGIRLGIVKPWNSTWFANTKEFADNLDSDFKVRQFLTKELAKASVSRIVIERPAKSIRVTIHTARPGIVIGKKGEDVEKLRKVVADIAGVPAQINIAEVRKPELDAKLVADSITSQLERRVMFRRAMKRAVQNAMRLGAKGIKVEVSGRLGGAEIARTEWYREGRVPLHTLRADIDYNTSEAHTTYGVIGVKVWIFKGEILGGMAAVEQPEPAAQPKKQQRKGRK

SEQ ID NO: 59316 - protein, 49 aa, Klebsiella pneumoniae
DGADIDDLKVAKIFVDEGPSMKRIMPRAKGRADRILKRTSHITVVVSDR

SEQ ID NO: 59317 - protein, 149 aa, Klebsiella pneumoniae
MQVILLDKVANLGSLGDQVNVKAGYARNFLVPQGKAVPATKKNVEFFEARRAELEAKLADVLAAAEARAEQINALESVTIASKAGDEGKLFGSIGTRDIADAVTAAGVKVAKSEVRLPNGVLRNVGEHEVNFQVHSEVFAKVIINVVAE

SEQ ID NO: 59318 - protein, 75 aa, Klebsiella pneumoniae; identical to SEQ ID NO: 42796

SEQ ID NO: 59319 - protein, 75 aa, Klebsiella pneumoniae
MLEHRSVQEEAGFHRQAWCQMPVIISGHENQAITHSITVGSAVTVRGFISCHKAKNGLSKMVLHAEQIELIDSGD

SEQ ID NO: 59320 - protein, 316 aa, Klebsiella pneumoniae
HVDCPGHADYVKNMITGAAQMDGAILVVAATDGPMPQTREHILLGRQVGVPYIIVFLNKCDMVDDEELLELVEMEVRELLSQYDFPGDDTPIVRGSALKALEGDAEWEAKIIELAGHLDTYIPEPERAIDKPFLLPIEDVFSISGRGTVVTGRVERGIIKVGEEVEIVGIKETAKTTCTGVEMFRKLLDEGRAGENVGVLLRGIKREEIERGQVLAKPGTINPHTKFESEVYILSKDEGGRHTPFFKGYRPQFYFRTTDVTGTIELPEGVEMVMPGDNIKMVVTLIHPIAMDDGLRFAIREGGRTVGAGVVAKVLG

SEQ ID NO: 59321 - protein, 323 aa, Klebsiella pneumoniae
EREEAKEQQNRLRSGCQGPAAAKPSGRTGKEAQEAAAKAAAEAKAKADAQAKAAEQAAAKAAADAKKQAEAAAAKAAAEAKKQAEAEAAKAAAEAQKKAEAAAAKKAQQEAEKKAQQEAAKQAAAEKAAAEKAAEKAAAQKAAAEKAAAEKAAAAEKAAAAKAAAAEKAAADKAAKAAAAKAAAAKKAAAAKEADGVDNLLGDLSSGKNAPKTGGGAKGNNASAAGSGNTKNSASGADINNYAGQIKSAIESKFYDASSYAGKHCTLRIKLAPDGLLLNIQSEGGDPALCQAALAAARQAKFPKPPSQAVYEVFKNAPLDFKP

SEQ ID NO: 59322 - protein, 314 aa, Klebsiella pneumoniae
  MISC_FEATURE (94)..(94): X=any amino acid
LNAAIDAFHENVYRVTKDKVNDKNDIIEEVAKLLFLETFRVHHDEDLTFKDDEGNTLRFRDVYDWQYVARHGDKAVAQIKAALRNLKATKTTSXSQMDGSRNPIFSKETHLRLSVAKNYQDLLEAIQNLGPVKTNDGKIAKEHGTLADVSGDLLGRVFDVFLRANFESKGGLGVYLTPNPVKQAMLEIAMHDIDDDDEMRSRLANGDFRFCDPTCGSFGFGSVALSQIDKWIDFKLVLADDKKESLKQKLRNYAFTGADAAPRMVMLARVNMALQGAPKAQIFYTDNSLTTNALKPNSFDLICTNPPFGTPKFD

SEQ ID NO: 59323 - protein, 392 aa, Klebsiella pneumoniae
MKFVDEATILVVAGDGGNGCVSFRREKYIPKGGPDGGDGGDGGDVWLEADENLNTLIDYRFEKSFRAERGQNGQSRDCTGKRGKDVTVKVPVGTRVIDQGTGETMGDMTKHGQRLMVAKGGWHGLGNTRFKSSVNRTPRQKTMGTPGDKRDLQLELMLLADVGMLGMPNAGKSTFIRAVSAAKPKVADYPFTTLVPSLGVVRMDNEKSFVVADIPGLIEGAAEGAGLGIRFLKHLERCRVLLHLIDIDPIDGSDPVENARIIIGELEKYSEKLASKPRWLVFNKIDLMDKAEAEAKAKAIAEALGWEEKFYLISAASQQGVKELCWDVMTFIIENPIVQAEEEQKPEKVEFMWDDYHRQQLEEAEAEAEDDEDWDDDWDEDDEEGVEFIYKR

SEQ ID NO: 59324 - protein, 92 aa, Klebsiella pneumoniae
FAGTVKRWNFRTQDATHGNSLSHRVPGSIGQNQTPGKVFKGKKMAGQLGNERVTVQSLDVVRVDAERNLLLVKGAVPGATGSDLIVKPAVKA

SEQ ID NO: 59325 - protein, 201 aa, Klebsiella pneumoniae
MELVLKDAQSALTVSETTFGRDFNEALVHQVVVAYAAGARQGTRAQKTRAEITGSGKKPWRQKGTGRARSGSIKSPIWRSGGVTFAARPQDHSQKVNKKMYRGALKSILSELVRQDRLIVVEKFSVEAPKTKLLAQKLKDMALEDVLIITGELDENLFLAARTLHKVDVRDANGIDPVSLIAFDKVVMTADAVKQVEEMLA

SEQ ID NO: 59326 - protein, 100 aa, Klebsiella pneumoniae
MIREERLLKVLRAPHVSEKASTAMEKTNTIVLKVAKDATKAEIKAAVQKLFEVEVEVVNTLVVKGKVKRHGQRIGRRSDWKKAYVTLKEGQNLDFVGGAE

SEQ ID NO: 59327 - protein, 273 aa, Klebsiella pneumoniae
MAVVKCKPTSPGRRHVVKVVNPELHKGKPFAPLLEKNSKSGGRNNNGRITTRHIGGGHKQAYRIVDFKRNKDGIPAVVERLEYDPNRSANIALVLYKDGERRYILAPKGLKAGDQIQSGVDAAIKAGNTLPMRNIPVGSTVHNVEMKPGKGGQLARSAGTYVQIVARDGAYVTLRLRSGEMRKVEADCRATLGEVGNAEHMLRVLGKAGAARWRGVRPTVRGTAMNPVDHPHGGGEGRNFGKHPVSPWGLQTKGKKTRSNKRTDKFIVRRRSK

SEQ ID NO: 59328 - protein, 92 aa, Klebsiella pneumoniae
MPRSLKKGPFIDLHLLKKVEKAVESGDKKPLRTWSRRSTIFPNMIGLTIAVHNGRQHVPVFVSDEMVGHKLGEFAPTRTYRGHAADKKAKKK

SEQ ID NO: 59329 - protein, 101 aa, Klebsiella pneumoniae
ALTAIFGIGKTRSKAICAETGIAESVKISELSEEQIDILREAVGKFVVEGDLRREITLSIKRLMDLGCYRGLRHRRGLPVRGQRTKTNARTRKGPRKPIKK

SEQ ID NO: 59330 - protein, 129 aa, Klebsiella pneumoniae
MAKAPIRARKRVRKQVSDGVAHIHASFNNTIVTITDRQGNALGWATAGGSGFRGSRKSTPFAAQVAAERCAEAVKEYGIKNLEVMVKGPGPGRESTIRALNAAGFRITNITDVTPIPHNGCRPPKKRRV

SEQ ID NO: 59331 - protein, 206 aa, Klebsiella pneumoniae
MARYLGPKLKLSRREGTDLFLKSGVRAIDTKCKIEQAPGQHGARKPRLSDYGVQLREKQKVRRMYGVLERQFRNYYKEAARLKGNTGENLLALLEGRLDNVVYRMGFGATRAEARQLVSHKAIMVNGRVVNIASYQVKANDVVSIREKAKKQSRVKAALELAEQREKPTWLEVDAGKMEGTFKRQPERSDLSADINEHLIVELYSK

SEQ ID NO: 59332 - protein, 253 aa, Klebsiella pneumoniae
MQGSVTEFLKPRLVDIEQVSSTHAKVTLEPLERGFGHTLGNALRRILLSSMPGCAVTEVEIDGVLHEYSTKEGVQEDILEILLNLKGLAVRVQGKDEVILTLNKSGIGPVTAADITHDGDVEIVKPQHVICHLTDENAAISMRIKVQRGRGYVPASARIHSEEDERPIGRLLVDACYSPVERIAYNVEAARVEQRTDLDKLVIEMETNGTIDPEEAIRRAATILAEQLEAFVDLRDVRQPEVKEEKPEFDPIL

SEQ ID NO: 59333 - protein, 575 aa, Klebsiella pneumoniae
MISGILASPGIAFGKALLLKEDEIVIDRKKISADKVDQEVERFLSGRAKASAQLEVIKTKAGETFGEEKEAIFEGHIMLLEDEELEQEIIALIKDKHMTADAAANEVIDGQATALEELDDEYLKERAADVRDIGKRLLRNILGLAIIDLSAIQDEVILVAADLTPSETAQLNLKKVLGFITDAGGRTSHTSIMARSLELPAIVGTGSITAQVKNGDYLILDAVNNQVLINPSNEQIEALRSLQAQVAEEKAELAKLKDLPAITLDGHQVEVCANIGTVRDVEGAERNGAEGVGLYRTEFLFMDRDALPTEEEQFAAYKAVAEACGSQAVIVRTMDIGGDKELPYMNFPKEENPFLGWRAVRIAMDRKEILRDQVRAILRASAFGKLRIMFPMIISVEEVRALKKEIEIYKQELRDEGKAFDESIEIGVMVETPAAATIARHLAKEVDFFSIGTNDLTQYTLAVDRGNDMISHLYQPMSPSVLNLIKQVIDASHAEGKWTGMCGELAGDERATLLLLGMGLDEFSMSAISIPRIKKIIRNTNFEDAKVLAEQALAQPTTDELMTLVNKFIEEKTIC

SEQ ID NO: 59334 - protein, 84 aa, Klebsiella pneumoniae
MTSSHHGPYDQGYTRATMAYTKRSDLARASGPHKVCRSPDWSLQLDSMKSESLVIVDQNATVNTFPGLVHTARHTMGVGCKRSR

SEQ ID NO: 59335 - protein, 609 aa, Klebsiella pneumoniae
MCGIVGAVAQRDIAKVLLEGLRRLEYRGYDSAGLAVVDSEGHMTRVRRLGKVQMLAQAVEEQPLHGGTGIAHTRWATHGEPSESNAHPHVSEHIVVVHNGIIENHEPLRALLQSRGYVFVTETDTEVIAHLVHWELEQGGTLREAVLRAIPQLRGAYGTVIMDTRDPGTLLAARSGSPLVIGLGMGENFIASDQLALLPVTRRFIFLEEGDIAEVTRRSVVIFDKSAAQVKRQEIESNLQYDAGDKGIYRHYMQKEIFEQPNAIKNTLTGRISHGEVDLSELGPNANEMLAQVEHIQIVACGTSYNSGMVSRYWFEALAGVPCDVEIASEFRYRKSAVRRNSLMITLSQSGETADTLAALRLSKELGYLGSLAICNVPGSSLVRESDLALMTKAGTEIGVASTKAFTTQLTVLLMLVAKLARLKGQDASIEHDIVHGLQALPNRIEQMLSQDKRIEQLAERFSDKHHALFLGRGDQYPIAMEGALKLKEISYIHAEAYAAGELKHGPLALIDAEMPVIVVAPNNELLEKLKSNIEEVRARGGELYVFADGEAGFNGSDNMHIIEMPHVEETIAPIFYTVPLQLLAYHVALIKGTDVDQPRNLAKSVTVE

SEQ ID NO: 59336 - protein, 363 aa, Klebsiella pneumoniae
  MISC_FEATURE (20)..(20): X=any amino acid
  MISC_FEATURE (61)..(61): X=any amino acid
  MISC_FEATURE (70)..(70): X=any amino acid
  MISC_FEATURE (81)..(81): X=any amino acid
  MISC_FEATURE (96)..(96): X=any amino acid
  MISC_FEATURE (111)..(111): X=any amino acid
VALVGGATGLIGDPMFKADXRKLNTEDTVQEWVDKILQTWWAPFLAFLTCGAQLWRIAAQXLMTRLWQTXHVLTFLRDHRXHLLLLTQMINQSKRXKQRLNRDDQGISFTXVLLQSLQGYDFACLNKLHGVALQIGGSDQWGNITSGIDLTRRLHQNQVFGLTVPLITKADGTKFGKTEGGAVWLDPKKTSPYKFYQFWINTADADVYRFLKFFTFMDIAEINALEEEDKNSGKAPRAQYVLAEQVTRLVHGEEGLEAAKRITESLFNGNLSDLSEADFEQLAQDGVPMIEMEKGADLLQALVDSELQPSRGQARKTVASNAVTINGEKQADPEYVFSDSDRLFGRYTLLRRGKKNYCLVCWK

SEQ ID NO: 59337 - protein, 526 aa, Klebsiella pneumoniae
SAEHYVTILDEATLLTWIDKLKQAPLFAFDTETDSLDNISANMVGLSFAVEPGVAAYVPVAHDYLDAPDQIPRERVLALLKPLLEDEKVLKVGQNLKYDRGILANYDIELRGIAFDTMLESYILDSVAGRHDMDSLSDRWLKHKTITFEEIAGKGKNQLTFNQIALEEAGRYAAEDADVTLQLHLKMWPKLQQHEGPLNIFQHIEMPLVPVLSRVERNGVKIDPAVLHAHSQEIAQRLVELEQRAHEIAGEAFNLSSTKQLQTILFEKQGIKPLKKTPGGAPSTSEEVLEELALDYPLPKVILEYRGLAKLKSTYTDKLPLMINPKTGRVHTSYHQAVTATGRLSSTDPNLQNIPVRNEEGRRIRQAFIAPEDYVIVSADYSQIELRIMAHLSRDKGLLTAFAEGKDIHRATAAEVFGLPLDSVSSEQRRSAKAINFGLIYGMSAFGLARQLNIPRKEAQKYMDLYFERYPGVLEYMERTRAQAKEQGYVETLDGRRLYSPDPSSSNGARRAGAERAAINAPMQGT

SEQ ID NO: 59338 - protein, 176 aa, Klebsiella pneumoniae
MANLKTKLSAAMLALIAAGASAPVLMDQFLNEKEGNSLTSYRDGSGIWTICRGATRVDGNPVTQGMKLTQVKCDQVNAIERNKALAWVDQNVRVHLTPPQKVGIASFCPYNIGPGKCFPSTFYRKLNAGDRKGACAEIRRWIFDGGKDCRVRSNNCYGQVSRRDQESALACWGIDE

SEQ ID NO: 59339 - protein, 342 aa, Klebsiella pneumoniae
MNHSLKPWNTFGIERFAKTIVRAETEQQLLSAWQTAAAAGEPTLILGEGSNVLFLNDYAGTVILNRIMGIEVSETPEAWRLHVGAGENWHQLVQFTLQHAMPGLENLALIPGCAGSSPIQNIGAYGVELQRVCEYVDCIELETGRKQRLSAAECRFGYRDSIFKHEYQDRYAIVAIGLSLAKTWQPVLSYGDLTRLDPQTVTPQQVFDAVCHMRMTKLPDPKINGNAGSFFKNPIVSAQVAKALLAQFPHAPHYPQANGSVKLAAGWLIDQCELKGQRIGGAAVHRQQALVLINEDRATSEDVVKLAHYVRQRVGAKFDVWLQPEVRFIGTHGEVNAEESIA

SEQ ID NO: 59340 - protein, 275 aa, Klebsiella pneumoniae
MIWDAEKRGVLKPGVELVEPTSGNTGIALAYVAAARGYKLTLTMPETMSIERRKLLKALGANLVLTEGAKGMKGAIQKAEEIVASNPEQFLLLQQFSNPANPEIHEKTTGPEIWEDTDGQVDVFISGVGTGGTLTGVSRYIKNTKGKKDLITVAVEPTDSPVIAQALAGEELKPGPHKIQGIGAGFIPGNLDLKLVDKVIGITNEEAISTARRLMEEEGILAGISSGAAVAAALKLQEDEAFTNKNIVVILPSSGERYLSTALFADLFTEKELQQ

SEQ ID NO: 59341 - protein, 289 aa, Klebsiella pneumoniae
MSVLINKDTKVICQGFTGSQGTFHSEQAIAYGTQMVGGVTPGKGGTTHLGLPVFNTVREAVEATGATATVIYVPAPFCKDSILEAIDAGIKLIITITEGIPTLDMLTVKVKLDEAGVRMIGPNCPGVITPGECKIGIMPGHIHKPGKVGIVSRSGTLTYEAVKQTTDYGFGQSTCVGIGGDPIPGSNFIDILKMFEEDPQTEAIVMIGEIGGSAEEEAAAYIKDHVTKPVVGYIAGVTAPKGKRMAHAGAIIAAGKGTADEKFAALEAAGVNNVRSLADIGEALKAIIK

SEQ ID NO: 59342 - protein, 622 aa, Klebsiella pneumoniae
MDVALDIGPGLAKATIAGRVNGELVDACDPIESDSTLSIITAKDEEGLEIIRHSCAHLLGHAIKQLWPNTKMAIGPVVDNGFYYDVDLDHTLTQEDIDALEKRMHELAEKNYDVIKKKVSWHEARETFVKRGESYKVSILDENIAHDDKPGLYHHEEYIDMCRGPHVPNMRFCHHFKLMKTAGAYWRGDSNNKMLQRIYGTAWADKKALNAYLQRLEEAAKRDHRKIGKQLDLYHMQEEAPGMVFWHNDGWTIFRELETFVRSKLKEYQYQEVKGPFMMDRVLWEKTGHWDNYKDAMFTTSSENREYCIKPMNCPGHVQIFNQGLKSYRDLPLRMAEFGSCHRNEPSGALHGLMRVRGFTQDDAHIFCTEDQVRDEVNACIRMVYDMYSTFGFEKIVVKLSTRPEKRIGSDETWDRAEADLAVALEENNIPFEYQLGEGAFYGPKIEFTLYDCLDRAWQCGTVQLDFSLPQRLSASYVGENNERQVPVMIHRAILGSLERFIGILTEEFAGFFPTWIAPVQVVVMNITDSQAEYVNELTRKLQNAGIRVKADLRNEKIGFKIREHTLRRVPYMLVCGDKEVEAGKVAVRTRRGKDLGSMDVNEVIEKLQQEIRSRSLQQLEE

SEQ ID NO: 59343 - protein, 453 aa, Klebsiella pneumoniae
MPEHVHHIVKRLILYICICLLAGIGISGMTAFFHTSFSSTSSILFPLLTSFLMVFHITIACFMGMKYWSSKRRLYLTPVSFGFACSALLMLGTLSSYPDWLTCNPAPVVNQNDAVIYYFFRNIMMAVLFMSSIILYYFRQRIMHSWKAHVLTFTACILFTLTIIVLSWLYSSHSPWLSVNFIDDLSHTFTPLWQSIIGWLLMAVWFITLILLISLSKLRNIFWFSGAFFCSAYLFTLFQLLSTAGELDQTWYQARFFETLCTLFLILVLLVDVFILYRESNHKYVHSYQNSIRDPLTRLYNRSFFYDTLNQQLAKVNAQHPLSVLISDLDHFKRINDSYGHVAGDKVIQFAASVLESHSRVDDAAARIGGEEFALLLVNTGEKEAQAIAERIRLAVSAGESHLPERMTISMGVYTTYDNSVTAEACVQRADEAMYEAKNNGRNQVIVWHQQGG

SEQ ID NO: 59344 - protein, 81 aa, Klebsiella pneumoniae
MRTLDQLEEKGLISRQTCASDRRAKRIKLTEKAEPLINEMEEVIGKTRDEILSGVSKQEVETLLHLIRKLEQNILDLQAKD

SEQ ID NO: 59345 - protein, 67 aa, Klebsiella pneumoniae
MMNCPKCGHAAHTRSSFRVTDQTKERYCQCQNINCGTTFITHETVVRYIMTPGVIDNAPPHPTAAGQ

SEQ ID NO: 59346 - protein, 141 aa, Klebsiella pneumoniae
MFTGIVQGTAKVVSIDDKPNFRTHVVELPAHMLEGLETGASVANNGCCLTVTEINGARISFDLMKETLRITNLGDIQVGDEVNVERAAKFSDEIGGHLMSGHIMTTAEIVKILTSEHNRPIWFKVQDPTLMKITSFYKGFI

SEQ ID NO: 59347 - protein, 389 aa, Klebsiella pneumoniae
MKITISGTGYVGLSNGVLIAQNHEVVALDIVQAKVDMLNQKISPIVDKEIQEYLAEKPLNFRATTDKHDAYRNADYVIIATPTDYDPKTNYFNTSTVEAVIREVTEITPNAVMIIKDSTIPVGFTRDIKERLGIDNCMCSPEFLREGRALYDNLHPSRIVIGERSARAERFADLLKEGAIKQDIPTLFTDSTEAEAINCFANTYLALRVAYFNELDSYAESQGLNSKQIIEGVCLDPRIGNHYNNPSFGYGGYCLPKDTKQLLANYESVPNNIIAAIVDANRTRKDFIADSILARKPKVVGVYRLIMKSGSDNFRASSIQGIMKRIKAKGIPVIIYEPVMQEDEFFNSRVVRDLAAFKQEADVIISNRMAEELADVADKVYTRDLFGND

SEQ ID NO: 59348 - protein, 122 aa, Klebsiella pneumoniae
MWLLDQWAERHILDAQTQGEFDNLPGSGEPLTLDDDSHVPAELRAGYRLLKNAGCLPPELEQRKEALALADLLNGVRQDDPRHAELSKRLALLELKLRQAGLNTDFLRGEYADALLQKINQE

SEQ ID NO: 59349 - protein, 128 aa, Klebsiella pneumoniae
MRHRKSGRQLNRNSSHRQAMFRNMAGSLVRHEIIKTTLPKAKELRRVVEPLITLAKTDSVANRRLAFARTRDNEIVAKLFNELGPRFASRAGGYTRILKCGFRAGDNAPMAYIELVDRAEPKAEAAAE

SEQ ID NO: 59350 - protein, 244 aa, Klebsiella pneumoniae
MSFEGKIALVTGASRGIGRAIAETLVARGAKVIGTATSESGAQAISDYLGANGKGLMLNVTDPASIESVLENVRAEFGEVDILVNNAGITRDNLLMRMKDDEWNDIIETNLSSVFRLSKAVMRAMMKKRHGRIITIGSVVGTMGNAGQANYAAAKAGLIGFSKSLAREVASRGITVNVVAPGFIETDMTRALTDEQRAGTLAAVPAGRLGTPNEIASAVAFLASDEASYITGETLHVNGGMYMV

SEQ ID NO: 59351 - protein, 308 aa, Klebsiella pneumoniae
MTQFAFVFPGQGSQAVGMLAEMAAAWPVIEETFGEASAALGYDLWALTQQGPAEELNKTWQTQPALLAASVALYRVWQQQGGKAPALLAGHSLGEYSALVCAGVIGFADAVRLVELRGKFMQEAVPEGTGAMSAIIGLDDAAIAKACEESAEGQVVSPVNYNSPGQVVIAGHKEAVERAGAACKAAGAKRALPLPVSVPSHCALMKPAAEKLAVELQKITFNAPTIPVVNNVDVKCETAPDAIRDALVRQLYSPVQWTKTVEFMAAEGVSHLYEVGPGKVLTGLTKRIVDTLTASALNEPAAMSAALE

SEQ ID NO: 59352 - protein, 205 aa, Klebsiella pneumoniae
MAQLYFYYSAMNAGKSTALLQSSYNYQERGMRTVVYTAEIDDRFGAGKVSSRIGLSSPARLYNPQTSLFDDIAAEHQLKPIHCVLVDESQFLTREQVHELSEVVDTLDIPVLCYGLRTDFRGELFTGSQYLLAWSDKLVELKTICFCGRKASMVLRLDQEGRPYNEGEQVVIGGNERYVSVCRKHYKEALSVGSLTKVQNQHRPC

SEQ ID NO: 59353 - protein, 417 aa, Klebsiella pneumoniae
NMLHFLIYDVLGTPAILVGLFSLIGLLLQKKGISDVISGTLKTIMGFVILTAGAGIIAYTLTIFSQLFEHSFHIQGVVPNTDAMAALAQKNYGTETATIMVWAMLINIALARLTPLKYIFLTGHHTLYMAAMLAVILSVGGLSGGWVVAIGAVILGAMMVISPAILQPFTRKITNTDDLALGHFGSIGYLLSALVGKIIGKGSPSIEEIKVPKSLNFLRDSSVAISLTMMILFLVLVLVAGKSFVEETLSAGQNFIIFAIIQSLTFAAGVYIILAGVRMVIAEIVPAFKGIADKLVKDAKPALDCPTVFPFAPNAVIVGFLASFVAGLVSMFLCPLFGLSVIVPGLVPHFFCGATAGVYGNITGGRRGAVVGAFAHGLLISFLPAILLPMMGDMGLGSTTFGDADFGVVGIVLGHII

SEQ ID NO: 59354 - protein, 94 aa, Klebsiella pneumoniae
VFGDALWRRLGRLMSLLSPFEVVIWMTDGWPLYESRLKGKLHVISKRYTQRIERHNLNLRQHLARLGRKSLSFSKSVELHDKVIGHYLNIKHYQ

SEQ ID NO: 59355 - protein, 96 aa, Klebsiella pneumoniae
  MISC_FEATURE (19)..(19): X=any amino acid
  MISC_FEATURE (25)..(25): X=any amino acid
MLSALISSAFSYRAVPLAXQPEHQXCVHSGPLVLGAAPLNSPAPTADRDRTVSRRSKPSSRTTLNGEQPYPWDLLQPQDVMSRHRGANTARRYELL

SEQ ID NO: 59356 - protein, 809 aa, Klebsiella pneumoniae
AALVETAENPPAGEEEFLLDLLINRVPPGVDEAAYVKAGFLAAIAKGEATSPLVTPEKAVELLGTMQGGYNIHPLIDALDDAKLAPIAAKALSHTLLMFDNFYDVEEKAKAGNEHAKQVMQSWADAEWFLNRPQLAEKITVTVFKVTGETNTDDLSPAPDAWSRPDIPLHALAMLKNPREGIEPDQPGVVGPIKQIEALQQKGYPLAYVGDVVGTGSSRKSATNSVLWFMGDDIPNVPNKRGGGLCLGGKIAPIFFNTMEDAGALPIEVDVSNLNMGDVIDVYPFKGEVRNHETNELLASFELKTDVLIDEVRAGGRIPLIIGRGLTTKAREALGLPHSDVFRQAKDVAESTRGFSLAQKMVGRACGVAGIRPGAYCEPKMTSVGSQDTTGPMTRDELKDLACLGFSADLVMQSFCHTAAYPKPVDVTTHHTLPDFIMNRGGVSLRPGDGVIHSWLNRMLLPDTVGTGGDSHTRFPIGISFPAGSGLVAFAAATGVMPLDMPESVLVRFKGKMQPGITLRDLVHAIPLYAIKQGLLTVEKKGKKNIFSGRILEIEGLPDLKVEQAFELTDASAERSAAGCTIKLNKEPIVEYLNSNIVLLKWMIAEGYGDRRTLERRIQGMEKWLADPQLLEADADAEYAAVIDIDLADIKEPILCAPNDPDDARLLSDVQGEKIDEVFIGSCMTNIGPLRAAGKLLDSHKGQLPTRLWVAPPTRMDAAQLTEEGYYSVFGKSGARIEIPGCSLCMGNQARVADGATVVSTSTRNFPNRLGTGANVYLASAELAAVASLLGKLPTPEEYQTFVAQVDKT

SEQ ID NO: 59357 - protein, 253 aa, Klebsiella pneumoniae
MNYRLSALALGATLLVGCASSSSGDRPQGRSDPLEGFNRTMFNFNFNVVDPYVLRPVAVAWRDYVPQPARNGLSNFTSNLEEPAVMVNYFLQGDPYKGMVHFTRFFLNTILGMGGLIDVAGMANPQLQRVEPHRFGSTLGHYGVGYGPYVQLPFYGSFTLRDEGGDMADGLYPVLSWLTWPMSIGKWAVEGIETRAQLLDSDGLLRQSSDPYILMREAYFQRHDFIANGGKLTPADNPNAQAIQDELKDIDSQ

SEQ ID NO: 59358 - protein, 372 aa, Klebsiella pneumoniae
TMSAGAVFVDPGVNVSGTSPTGKSLKADNIAPTAWVPNFHFVAPINDHFGWGASITSNYGLATEYNDDYAAGSMGGKTDLTTANFNLSGAYRLDSNWSFGLGFDAVYAKAKIERYAGDLGQIVAGSGALPPALAGQVAKIPADTQIAHLNGNAWGFGWNAGILYELDKNNRYGLTYRSEVKIDFDGNYRSSLPAAYNQILGNFGLPAGTSGQTTNGSLTLNLPEMWELSGYNRVAPQWAVHYSLTYTSWSQFQELKATGSNGQTLFYKEEGFKDAYRLALGTTYYYDDNWTFRTGIAFDDSPVPANNRSISIPDQDRLWLSAGTTYAFNKDASVDVGVSYMHGQHVEIKEGPYTFRSEGTAWLYGANFNYRF

SEQ ID NO: 59359 - protein, 394 aa, Klebsiella pneumoniae
MSKEKFERTKPHVNVGTIGHVDHGKTTLTAAITTVLAKTYGGSARAFDQIDNAPEEKARGITINTSHVEYDTPTRHYAHVDCPGHADYVKNMITGAAQMDGAILVVAATDGPMPQTREHILLGRQVGVPYIIVFLNKCDMVDDEELLELVEMEVRELLSQYDFPGDDTPIVRGSALKALEGDAEWEAKIIELAGHLDTYIPEPERAIDKPFLLPIEDVFSISGRGTVVTGRVERGIIKVGEEVEIVGIKETAKTTCTGVEMFRKLLDEGRAGENVGVLLRGIKREEIERGQVLAKPGTINPHTKFESEVYILSKDEGGRHTPFFKGYRPQFYFRTTDVTGTIELPEGVEMVMPGDNIKMVVTLIHPIAMDDGLRFAIREGGRTVGAGVVAKVLG

SEQ ID NO: 59360 - protein, 692 aa, Klebsiella pneumoniae
IARYRNIGISAHIDAGKTTTTERILFYTGVNHKIGEVHDGAATMDWMEQEQERGITITSAATTAFWSGMAKQYEPHRVNIIDTPGHVDFTIEVERSMRVLDGAVMVYCAVGGVQPQSETVWRQANKYKVPRIASLNKMDRMGANFLKVVGQIKTRLGANPVPLQLAIGAEEGFTGVVDLVKMKAINWNDADQGVTFEYEDIPADMQDLADEWHQNLIESAAEASEELMEKYLGGEELTEEEIKKALRQRVLNNEIILVTCGSAFKNKGVQAMLDAVIDYLPSPVDVPAINGILDDGKDTPAERHASDDEPFSALAFKIATDPFVGNLTFFRVYSGVVNSGDTVLNSVKAARERFGRIVQMHANKREEIKEVRAGDIAAAIGLKDVTTGDTLCDPDAPIILERMEFPEPVISIAVEPKTKADQEKMGLALGRLAKEDPSFRVWTDEESNQTIIAGMGELHLDIIVDRMKREFNVEANVGKPQVAYREAIRAKVTDIEGKHAKQSGGRGQYGHVVIDMYPLEPGSNPKGYEFINDIKGGVIPGEYIPAVDKGIQEQLKAGPLAGYPVVDMGIRLHFGSYHDVDSSELAFKLAASIAFKEGFKKAKPVLLEPIMKVEVETPEENTGDVIGDLSRRRGMLRGQESEVTGVKIHAEVPLSEMFGYATQLRSLTKGRASYTMEFLKYDDAPNNVAQAV

SEQ ID NO: 59361 - protein, 167 aa, Klebsiella pneumoniae
  MISC_FEATURE (146)..(146): X=any amino acid
ILPDPKFGSELLAKLVNILMVDGKKSTAETIVYSALETLAQRSGKSELEAFEVALENVRPTVEVKSRRVGGSTYQVPVEVRPVRRNALAMRWIVEAARKRGDKSMALRLANELTDAADNKGTAVKKREDVHRMAEANKAFAHYRWXSLRSHSHQAGASDESPALDNL

SEQ ID NO: 59362 - protein, 130 aa, Klebsiella pneumoniae
MSTMIMDLCSYTRLGLTGYLTSRGIKKQEIVEVNNAADLQKHCTSCCPAVVFLNEDCFVHDDESNGIIRQIITQNPATLFVIFMSLANIHFDRYLRVRKNLLISSKSITPKDLDVILVNYLKYKNTSVGQ

SEQ ID NO: 59363 - protein, 167 aa, Klebsiella pneumoniae; identical to SEQ ID NO: 56103

SEQ ID NO: 59364 - protein, 91 aa, Klebsiella pneumoniae; identical to SEQ ID NO: 43000

SEQ ID NO: 59365 - protein, 217 aa, Klebsiella pneumoniae
MATIKDVAKRANVSTTTVSHVINKTRFVAEETRNAVWAAIKELHYSPSAVARSLKVNHTKSIGLLATSSEAAYFAEIIESVEKSCFQKGYTLILGNAWNDLEKQRAYLSMMAQKRVDGLLVMCSEYPDSVLSMLEEYRHIPMVVMDWGEAKADFTDAVIDNAFQGGYIAGRYLIERGHREIGVIPGPLERNTGAGRLAGFMQAFQHSGDDIRSAGLL

SEQ ID NO: 59366 - protein, 314 aa, Klebsiella pneumoniae
MSNRKYFGTDGIRGRVGDAPITPEFVLKLGWAAGKVLARHGSRKIIIGKDTRISGYMLESALEAGLAAAGLSASFTGPMPTPAIAYLTRAFRAEAGIVISASHNPFYDNGIKFFSIEGTKLPDDVEEAIEAEMEKELTCVDSAELGKASRIVDAAGRYIEFCKGTFPNELSLGTLKVVVDCAHGATYHIAPNVFRELGAQVIAMGCEPDGLNINEEVGATDVRALQARVLAEKADLGIAYDGDGDRVIMVDHEGNKVDGDQILYIIAREGLRQGQLRGGAVGTLMSNMGLELALKQLGIPFARAKVGDRYVLEM

SEQ ID NO: 59367 - protein, 282 aa, Klebsiella pneumoniae
MKLLAQGSTLDLSHPHVMGILNVTPDSFSDGGAHNSLIEAVKHANLMINAGATIIDIGGESTRPGAAEVSVEEELARVIPVVEAIAQRFEVWISVDTSKAEVIRQSARAGAHIINDIRSLTEPGALQAAAETGLPVCLMHMQGQPKTMQEAPKYEDVFADVERFFNEHIVRCEQAGIAKEKLLLDPGFGFGKNLSHNYQLLARLGEFHHFGLPLLVGMSRKSMVGQLLNVGPSERLNGSLACAVIAAMQGAQIIRVHDVKETVEALRVVEATLAAKGKKRYE

SEQ ID NO: 59368 - protein, 367 aa, Klebsiella pneumoniae
MLVEMDGFEGNEGIIVIAATNRPDVLDPALLRPGRFDRQVVVGLPDVRGREQILKVHMRRVPLAPDIDAAIIARGTPGFSGADLANLVNEAALFAARGNKRVVSMVEFEKAKDKIMMGAERRSMVMTEAQKESTAYHEAGHAIIGRLVPEHDPVHKVTIIPRGRALGVTFFLPEGDAISASRQKLESQISTLYGGRLAEEIIYGPEHVSTGASNDIKVATNLARNMVTQWGFSDKLGPLLYAEEEGEVFLGRSVAKAKHMSDETARIIDQEVKSLIERNYGRARQLLNDNMDILHAMKDALMKYETIDAPQIDDLMARREVRPPAGWEEPGSSNNSDNNGTPRAPRPVDEPRTPNPGNTMSEQLGDK

SEQ ID NO: 59369 - protein, 188 aa, Klebsiella pneumoniae
MSAIEVKSLVKKFHGQTVLHGIDLEVQKGEVVAIIGPSGSGKTTLLRSINLLEQPESGTIRVGDVTIDAGRSLGPQKGLIRQLRQHVGFVFQNFNLFPHRTVLENIIEGPVIVKGEDKQESMARARELLAKVGLSGKENSYPRRLSGGQQQRVAIARALAMRPDVFPAHWSFSCSSSIVSPKSYVYDT

SEQ ID NO: 59370 - protein, 409 aa, Klebsiella pneumoniae
MSNSAMSVVILAAGKGTRMYSDLPKVLHTLAGKPMVQHVIDAANDLGACAVHLVYGHGGDLLRQTLHEDNLNWVLQAEQLGTGHAMQQAAPFFNDDEDILMLYGDVPLISVETLQRLRAAKPQGGIGLLTVKLDDPTGYGRITRENGQVTGIVEHKDASEAQRQIQEINTGILIAGGADLKRWLAKLTNNNAQSEYYITDIIAMAHQEGHQIVAVHPQRLSEVEGVNNRLQLARLERVYQAEQAEKLLLAGVMLRDPARFDLRGTLQHGRDVEIDTNVILEGNVVLGDRVKIGAGCVIKNSTIGDDCEISPYSVVEDAQLQAACTIGPFARLRPGAELLEGAHVGNFVEMKKARLGKGSRAGHLTYLGDAEIGDNVNIGAGTITCNYDGANKHKTIIGDDVFVGSDTQL

SEQ ID NO: 59371 - protein, 212 aa, Klebsiella pneumoniae
YVETRLRPEDLVGISSWSSTIRCVVDEMHPQNIRAAGVIQLLGGVGPNGNVQATILTQQLAAHLGCPAWLLPSQSIEHSVEERSRLVNSPDVAAVVAKFAEVDVAIVGIGELEPSQLLKNSGNYYNETMLQLLAARGAVGDICLHYYDAAGKPVLSQDEDPVIGMELEQIRRCPQVIALAGGVDKRTAIRGALQGDYIDVLITDFPTARALI

SEQ ID NO: 59372 - protein, 119 aa, Klebsiella pneumoniae
MRSRYSAFVMKDADYLIKTWHPSCQAQQFRAELEKGFSQTEWLGLTLFASDEGRAPNEGFVSFVARFNDNNRPGAIIERSRFLKENGQWYYIDGTRPLIGRNDPCPCGSGKKFKKCCGQ

SEQ ID NO: 59373 - protein, 280 aa, Klebsiella pneumoniae
MHSLQRKVLRTICPDQKGLIARITNICYKHELNIVQNNEFVDHRTGRFFMRTELEGIFNDATLLADLDSALPEGSIRELNPAGRRRVVILVTKEAHCLGDLLMKANYGGLDVDIAAVIGNHDTLRSLVERFGIPFELVSHEGLSREEHDQRMGDAIAAHEPDYVVLAKYMRVLTPEFVARFPNKIINIHHSFLPAFIGARPYHQAYERGVKIIGATAHYVNDNLDEGPIIMQDVIHVDHTYTAEDMMRAGRDVEKNVLSRALYQVLAQRVFVYGNRTIIL

SEQ ID NO: 59374 - protein, 221 aa, Klebsiella pneumoniae
MDGMENLMPREKMLQYGIETLTDVELLALFLRVGTRRQDVLSYAQALLQRFGSLYALLSADKAQLIAVDGLGLAKYAQLKGIAELARRYFSSQLVEEAALVTPSMTREFLQSQLTEEEREIFMVIFLDNQNRVLKHSRLFSGTLSHVEVHPREIVREAIKVNAAAVILAHNHPSGSPEPSQADRLITERVIKCCRFMEIRVLDHLVIGRGAYVSFAERGWI

SEQ ID NO: 59375 - protein, 317 aa, Klebsiella pneumoniae
MYTKIIGTGSYLPEQVRTNADLEKMVETSDEWIVTRTGIRERRIAAAHETVATMGFEAAKQALAMAGVSAEQIGLIIVATTSGTHAFPSSACQIQSMLGVKGCPAFDVAAACAGFTYALSVADQYVKNGAVDYALVVGADVLARTCDPADRGTIIIFGDGAGAVVLGASEEPGIISTHLHADGSYGELLTLPNADRVDPENPIYLTMAGNEVFKVAVTELAHIVDETLAANNLERSALDWLVPHQANLRIISATAKKLGMSMDNVVVTLDRHGNTSAASVPCALDEAVRDGRIQRGQLILLEALGGGFTWGSALVRF

SEQ ID NO: 59376 - protein, 175 aa, Klebsiella pneumoniae
MAVKPEVILGDITTLDVDVIVNAANPSLLGGGGVDGAIHRAAGPALLAACKQVQQQQGECPPGHAVITIAGNLPASAVIHTVGPVWYGGDRMEAQTLADAYKNSLQLASANNYRSIAFPAISTGVYGYPKEEAAAIAVRTVTAFLTRYNPLERVLFVCFDEETAAIYRRLLASYP

SEQ ID NO: 59377 - protein, 84 aa, Klebsiella pneumoniae; identical to SEQ ID NO: 59334

SEQ ID NO: 59378 - protein, 340 aa, Klebsiella pneumoniae
MGPVMLDVEGYELDAEEREILAHPLVGGLILFTRNYHDPAQLRELVRQIRDASRNHLVVAVDQEGGRVQRFREGFTRLPAAQSFAALLGMEEGGKLAAEAGWLMASEMIAMDIDISFAPVLDVGHISAAIGERSYHEDPQKALTMARHFIDGMHAAGMKTTGKHFPGHGAVTADSHKETPFDPRAASVIRDHDMAVFKSLIAEQRLDAIMPAHVIYPELDPRPASGSAYWLKTVLRGELGFDGVIFSDDLSMEGAAIMGSYAERGQASLDAGCDMILVCNNRKGAVSVLDNLSPIKAERVTKLYHKGSFSRQELRDSARWKTVSAQLEQLHARWQEAKSA

SEQ ID NO: 59379 - protein, 283 aa, Klebsiella pneumoniae
MSQTSTLKGQCIAEFLGTGLLIFFGVGCVAALKVAGASFGQWEISIIWGLGVAMAIYLTAGVSGAHLNPAVTIALWLFACFEGRKVVPFIISQFAGAFCAAALVYGLYYNLFLDYETTHHMIRGSVESLDLAGIFSTYPNPHINFVQAFAVEMVITAILMGVILALTDDGNGIPRGPLAPLLIGLLIAVIGASMGPLTGFAMNPARDIGPKAFAWLAGWGDVAFTGGKDIPYFLVPLCAPVVGAALGAFSYRKLIGRHLPCDTCVEEEQQSPSSSTAQHKASL

SEQ ID NO: 59380 - protein, 503 aa, Klebsiella pneumoniae
MTDKKYIVALDQGTTSSRAVVMDHDANIVSVSQREFEQIYPKPGWVEHDPMEIWASQSSTLVEALAKADINSDQIAAIGITNQRETVVVWERETGKPIYNAIVWQCRRTAEICEQLKRDGMEEYIRKATGLVVDPYFSGTKVKWILDHVEGSRERAKRGELLFGTVDTWLIWKMTQGRVHVTDYTNASRTMLFNIHDLDWDDKMLDALDIPRAMLPEVRKSSEVYGQTNIGGKGGTRIPIAGIAGDQQAALFGQLCVKEGMAKNTYGTGCFMLMNTGEKAVTSTHGLLTTIACGPRGEVNYALEGAVFMAGASIQWLRDEMKLISDAFDSEYFATKVKDTNGVYVVPAFTGLGAPYWDPYARGAIFGLTRGVNSNHIIRATLESIAFQTRDVLEAMQADSGIRLHALRVDGGAVANNFLMQFQSDILGTRVERPEVREVTALGAAYLAGLAVGFWQNLDELQEKAVIEREFRPGIETTERNYRYSGWKKAVKRALAWEEHDEA

SEQ ID NO: 59381 - protein, 328 aa, Klebsiella pneumoniae
MHDKAFTFQTLRPDTIIDGLFDLGMRVDSGLTPLNSYENRVYQFQDEERHRYVVKFYRPERWSAEQILEEHQFALQLVEDEVPVAAPLLFNDSTLHQHQGFYFAVFPSLGGRQFEADNLDQMEWVGRYLGRLHQTGCKQRFTARPEIGVQEYLLEPRQVFEQATLIPSGLKADFLKATDKLIAAVMEQWHGRGNTLRLHGDCHAGNILWRDGPLFVDLDDARTGPAIQDLWMLLNGDKAEQRMQLETIVEAYEEFGPFNSDEIALIEPLRAMRLVYYLAWLLRRWDDPAFPVNFPWLTGEDYWRGQTSTFLEQVKVLQEPPLQLTPMY

SEQ ID NO: 59382 - protein, 89 aa, Klebsiella pneumoniae
MKCKRLNEVIELLQPAWQKEPELNLMQFLQKLAKEAGYDGELSDLSDDILIYHLKMRDSSKDAVIPGIQKDYEEDFKTALLRARGVIKE

SEQ ID NO: 59383 - protein, 502 aa, Klebsiella pneumoniae
MMLDIVELSRLQFALTAMYHFLFVPLTLGMAFLLAIMETVYVLSGKQIYKDMTKFWGKLFGINFALGVATGLTMEFQFGTNWSYYSHYVGDIFGAPLAIEGLMAFFLESTFVGLFFFGWDRLGKVQHMAVTWLVALGSNLSALWILVANGWMQNPIASDFNFETMRMEMVSFSELVLNPVAQVKFVHTVASGYVTGAMFILAISSWYMLKGRDFAFAKRSFAIAASFGMAAILSVIVLGDESGYEMGDVQKTKLAAIEAEWETQPAPAAFTPVGIPDQNAQTNHFAIQIPYALGIIATRSVDKPVIGLKDLMVQHEERIRNGMKAYALLEQLRAGSTDQAVRDQFNNVKKDLGYGLLLKRYTPNVADATEEQIAKATKDSIPSVAPLYFAFRIMVACGILMLLIIGASFWSVIRNRIGEKKWLLRAAFYGLPLPWIAVESGWFVAEYGRQPWAIGEVLPTAVANSSLTAGDLIFSMLLICGLYTLFLVAELFLMFKFARKGP

SEQ ID NO: 59384 - protein, 495 aa, Klebsiella pneumoniae
MNKEILAVVEAVSNEKALPREKIFEALESALATATKKKYEQEIDVRVEIDRKSGDFDTFRRWLVVEEVTQPTREITLEAARFEDESMNVGDYVEDQIESVTFDRITTQTAKQVIVQKVREAERAMVVDQFREHEGEIITGVVKKVNRDNITLDLGNNAEAVILREDMLPRENFRPGDRIRGVLYAVRPEARGAQLFVTRSKPEMLIELFRIEVPEIGEEVLEIKAAARDPGSRAKIAVKTNDKRIDPVGACVGMRGARVQAVSTELGGERIDIVLWDDNPAQFVINAMAPADVASIVVDEDKHTMDIAVEAGNLAQAIGRNGQNVRLASQLSGWELNVMTVDDLQAKHQAEAHAAIDTFTKYLDIDEDFATVLVEEGFSSLEELAYVPMKELLEIDGLDEATVEALRERAKNALTTLALAQEESLGDNKPADDLLNLEGLDRALAFKLAARGVCTLEDLAEQGVDDLADIEGMTDEKAGELIMAARNICWFGDEA

SEQ ID NO: 59385 - protein, 902 aa, Klebsiella pneumoniae
MMLIKMLTKVFGSRNDRTLRRMRKVVNIINGMEPAMEKLSDDELKAKTAEFRARLEKGETLESLIPEAFAVVREASKRVFGMRHFDVQLLGGMVLNDRCIAEMRTGEGKTLTATLPAYLNALTGKGVHVVTVNDYLAQRDAENNRPLFEFLGMTVGINMSGLPAPAKREAYAADITYGTNNEYGFDYLRDNMAFSPEERVQRKLHYALVDEVDSILIDEARTPLIISGPAEDSSEMYRKVNKIIPHLIRQEKEDSDTFTGEGHFSVDEKARQVNLTERGLVLIEELLVQEGIMDEGESLYSPTNIMLMHHVTAALRAHALFTRDVDYIVKDGEVIIVDEHTGRTMQGRRWSDGLHQAVEAKEGVEIQNENQTLASITFQNYFRLYEKLAGMTGTADTEAFEFSSIYKLDTVVVPTNRPMIRKDMADLVYMTEAEKIQAIIEDIKTRTAAGQPVLVGTISIEKSEVVSRELTKAGIKHNVLNAKFHASEADIVAQAGYPSAVTIATNMAGRGTDIMLGGSWQAEVAALENPTPEQIEKIKADWQVRHDAVLAAGGLHIIGTERHESRRIDNQLRGRAGRQGDAGSSRFYLSMEDALMRIFASDRVSGMMRKLGMKPGEAIEHPWVTKAIANAQRKVESRNFDIRKQLLEYDDVANDQRRAIYTQRNELLDVSDVSETINSIREDVFKATIDAHIPPQSLEEMWDIEGLQERLKNDFDLDLPIKEWLDKEPELHEETLRERILQSAVETYQRKEEVVGAEMMRHFEKGVMLQTLDSLWKEHLAAMDYLRQGIHLRGYAQKDPKQEYKRESFSMFAAMLESLKYEVISTLSKVQVRMPEEVEAMEQQRREEAERLAQMQQLSHQSDDEAAAQDLAAQTGERKVGRNDPCPCGSGKKYKQCHGRLS

SEQ ID NO: 59386 - protein, 115 aa, Klebsiella pneumoniae; identical to SEQ ID NO: 55489

SEQ ID NO: 59387 - protein, 298 aa, Klebsiella pneumoniae
MKRLKYLSTLLVAAVALIAAWLLWNFYTQSPWTRDGKVRAEQVGITPQVSGSILQLNVTDNQRVKAGEVLFTIDDTPYRIAVLNAQAQLAKAQAEVAKAQAEQSKAASEARRRRSLSQNAISAEDLENVNTALDTATTTLAAARAGVGVTEAALKHAQWQLSQTVVKAPVDGWVTNLSTRVGDYATTGHPVFALVDSHSFYVLGYFEETKLRHIRIGDPAQIILYSNQQTLKGHVASIGRAIVDQSVEQGTGLVANIKPNIPWVRLAQRVPVRIAFDTLPADVTLVSGTTCTVSIGGQ

SEQ ID NO: 59388 - protein, 78 aa, Klebsiella pneumoniae
MKLSLNTSGLPLQDLVFGASVYFPPLFKAVLLGFFIWLFLHRQLRDWMYAGDIWHPLLMDLSLFALAVCLALVLLIAW

SEQ ID NO: 59389 - protein, 671 aa, Klebsiella pneumoniae
MEPIEQQLTELRTTLRHHEYLYHVMDAPEVPDAEYDRLMRKLRELESQHPELITPDSPTQRVGAAPLTAFSQIRHEVPMLSLDNVFDEESFLAFNKRVQDRLKSTDHLTYCCELKLDGLAVSILYENGVLVQAATRGDGTTGEDITSNVRTIRAIPLKLHGENIPARLEVRGEVFLPQAGFEKINEEARRTGGKVFANPRNAAAGSLRQLDPRITAKRPLTFFCYGVGVLEGGELPASHSARLLQFKAWGLPVSDRVTLCHTPEEVLTYYRKVEEERPHLGFDIDGVVIKVDSLALQEQLGFVARAPRWAVAFKFPAQEQMTFVRDVEFQVGRTGAITPVARLEPVHVAGVLVSNATLHNADEIERLGLKIGDKVVIRRAGDVIPQVVNVVLSERPADARDVVFPTHCPVCQSDVERVEGEAVARCTGGLICGAQRKESLKHFVSRRALDVDGMGDKIIDQLVEKEYVHTPADLFRLTAGKLTGLDRMGPKSAQNVVNALEKAKETTFARFLYALGIREVGEATAAGLAAHFGTLEALEQASIEELQKVPDVGIVVATHTFNFFAEESNRDVIAQLLAEGVRWPAPVVVKAEEIDSPFAGKTVVLTGSLSQLSRDDAKARLVALGAKVAGSVSKKTDLVIAGEAAGSKLAKAQELGVEVIDEAEMMRLLGE

SEQ ID NO: 59390 - protein, 294 aa, Klebsiella pneumoniae
VGEVRVHPVTHAPHGAHGEHEAPRQAPQHQYQPPYERQMQQPARPEEPVRQPPQPACCQAPVPPQQQPAPHAAPADVACQLACEPWGKAGPVTTAKTPRPHVLSAPQPVTPTVAQPQPAAPQQPAPQPVAASQPAVAEPQPVEPQQPAAPQPERRKETVIVMNVAAHHGAQLNGEVLINSIQQAGFKFGEMNIFHRHLSPDGSGPVLFSLANMVKPGTFNPDSMADMMTPGVTIFMQVPSYGDELQNFKLMLQSAQYIADEVGGVVLDDQRRMMTPQKLREYQDRIREVKDANA

SEQ ID NO: 59391 - protein, 159 aa, Klebsiella pneumoniae
MASRGVNKVILVGNLGQDPEVRYMPNGGAVANITLATSESWRDKQTGEMKEQTEWHRVVLFGKLAEVAGEYLRKGSQVYIEGQLRTRKWTDQAGVEKYTTEVVVNVGGTMQMLGGRPQNASQPGNQPQAGQQFSGQPQATGTAAAAGNEPPPFDDDIPF

SEQ ID NO: 59392 - protein, 581 aa, Klebsiella pneumoniae
MAGRIPRVFISDLLARTDIVDLIDARVKLKKQGKNFHACCPFHNEKTPSFTVNGEKQFYHCFGCGAHGNAIDFLMNYDKLEFVETVEELAAMHNLEVPYEAGNGPSQIERHQRQNLYQLLDGLNAFYQQSLMQPAADPARQYLAKRGLSSEVITRFAIGYAPPGWDNVLKRFGGNQENRQSLIDAGMLVTNDQGRSYDRFRERVMFPIRDKRGRVIGFGGRVLGDALPKYLNSPETDIFHKGRQLYGLYEAQQDNPEPPRLLVVEGYMDVVALAQYDINYAVASLGTSTTADHIQLLFRVTNNVICCYDGDRAGRDAAWRALETALPYMTDGRQLRFMFLPDGEDPDTLVRKEGKAAFEARMEQAQPLSTFLFNSLLPQVDLSTPDGRAQLSTLALPLITQVPGETLRIYLRQELGNKLGILDDAQLERLMPKQAENGAPRPAPQLKRTTMRILIGLLVQNPDLAPLVPPLEGLDSRKMPGLSLFSELVKSCLAQPGLTTGQLLEQYRGTKEAATLEKLSMWDDIADKDIAEQTFTDSLNHMFDSLLELRQEELIARDRTHGLSSEERRELWTISQELAKK

SEQ ID NO: 59393 - protein, 613 aa, Klebsiella pneumoniae
MEQNPQSQLKLLVQRGKEQGYLTYAEVNDHLPEDIVDSDQIEDIIQMINDMGIQVMEEAPDADDLMLAENTADEDAAEAAAQVLSSVESEIGRTTDPVRMYMREMGTVELLTREGEIDIAKRIEDGINQVQCSVAEYPEAITYLLEQYDRVEAEEARLSDLITGFVDPNAEEDMAPTATHVGSELSQEEMDDDEDEDEDEDADDNSDDDNSIDPELAREKFAELRTQYELTRDTIKAKGRSHAAAQEEILKLSEVFKQFRLVPKQFDYLVNSMRSMMDRVRTQERIIMKLCVEQCKMPKKNFITLFTGNETSETWFNAAVAMNKPWSEKLLEVKEDVQRGLQKLQQIEEETGLTIEQVKDINRRMSIGEAKARRAKKEMVEANLRLVISIAKKYTNRGLQFLDLIQEGNIGLMKAVDKFEYRRGYKFSTYATWWIRQAITRSIADQARTIRIPVHMIETINKLNRISRQMLQEMGREPTPEELAERMLMPEDKIRKVLKIAKEPISMETPIGDDEDSHLGDFIEDTTLELPLDSATTESLRAATHDVLAGLTAREAKVLRMRFGIDMNTDHTLEEVGKQFDVTRERIRQIEAKALRKLRHPSRSEVLRSFLDD

SEQ ID NO: 59394 - protein, 494 aa, Klebsiella pneumoniae
MFQDNPLLAQLKQQLHSQTPRAEGVVKGTEKGFGFLEVDAQKSYFIPPPQMKKVMHGDRIVAVIHSEKERESAEPESLVEPFLTRFVGKVQKKDDRLAIVPDHPLLKDAIPCRAARGVEHDFKQGDWAVAEMRRHPLKGDRGFYAELTQFITFSDDHFVPWWVTLARHNLEKEAPDGVATEMLDEGLTRRDLTTLDFVTIDSASTEDMDDALYAESTADGKLLLTVAIADPTAWIAEGSKLDNAAKVRAFTNYLPGFNIPMLPRELSDDLCSLRANEVRPVLACRMTLGADGTIEDNIEFFAATIESKAKLAYDDVSDWLEGRGSWQPDSEAIAQQITLLKDVCQRRSEWRQTHALVFKDRPDYRFVLGEKGEVLDIVAEPRRIANRIVEESMIAANICAARVLRDKLGFGVYNVHTGFDPANTEQLAALLKTHDVHVDPTEVLTLEGFCKLRRELDAQPTGFLDSRIRRSQSFAEISTEPGPHFGLGLEAYAT

SEQ ID NO: 59395 - protein, 384 aa, Klebsiella pneumoniae
EQGKPMEPRRVNGKNHWYHETQSTICPVDVLPLVPEAAHVEDRFLLDLTLPAAWLRAHADWLHPARQLAELLFPDQVAVSRLQTFTAYDRLSTALTVAQVYGVQRLCNHYAARLAPLPGPDSSRESNRRLAQITQYARQLAGSPSVINALSRSQLDEVGLTSRDIILFNQIIGFVGFQARAIAVLQAAQGFPVRWIPGMPQQEEAPAELFAPPPGAWQADIADPDLQYADDERQRRIAGWQSLPGLGELAPLLACDPQLFAPLETLIRQLSTDDTFGPQVALLTARTNGSPTCFDAWLPHWQGEEEFASHLREGDQALHHWLQQHPQARSLVTAVQLLTRSPDRFSAAQLTPLAEYRLSEQQAIDLLIWSGLCGWMNRLKIALG

SEQ ID NO: 59396 - protein, 262 aa, Klebsiella pneumoniae
MGFLSGKRILITGVASQLSIAYGIAQACHREGAELAFTYQNEKLKGRVEEFARRLGSDIVLPCDVAEDESITALFTELEKVWPNSMGFVHSSVLPPADQLDGDYVDVVTRDGFKIAHDISAYSFVAMAKACRGMLNPGSALLTLSYLGAERAIPNYNVMGLAKASLEANVRYMANAMGPEGVRVNAISAGPIRTLAASGIKDFRKMLAHCEAVTPIRRTVTIEDVGNSAAFLCSNLSAGISGEVVHVDGGFNIAAMNELELK

SEQ ID NO: 59397 - protein, 79 aa, Klebsiella pneumoniae
  MISC_FEATURE (19)..(19): X=any amino acid
  MISC_FEATURE (25)..(25): X=any amino acid
MLSALISSAFSYRAVPLAXQPEHQXCVHSGPLVLGAAPLNSPAPTADRDRTVSRRSKPSSRTTLNGEQPYPWDLLQPQD

SEQ ID NO: 59398 - protein, 267 aa, Klebsiella pneumoniae
MAIPAFGLGTFRLKDDVVIASVKTALELGYRAIDTAQIYDNEAAVGQAIAESGVPRDELFITTKIWIENLSKDKLIASLQESLQKLRTDYVDLTLIHWPAPNDAVAVEEFMAALMEAKKLGLTRQIGISNFTIPLMERAIAAVGAENIATNQIELSPYLQNRKVVDWAREHGIHITSYMTLAYGKALKDEVIARIAAKHNATPAQVILAWAMGEGYAVIPSSTKRDNLASNLKALDLQLDDEDRQAIAALDCNDRLVSPEGLAPQWD

SEQ ID NO: 59399 - protein, 396 aa, Klebsiella pneumoniae
MPLALFALTIGAFAIGTTEFVIVGLVPTIAQQLSISLPSAGLLVSIYALGVAIGAPVLTALTGRMPRKQLLLALMVLFTAGNVLAWQAPGYETLILARLLTGLAHGVFFSIGSTIATSLVAKEKAASAIAIMFGGLTVALVTGVPFGTFIGQHFGWRETFLAVSILGVIALISSLILVPNNIPGRASASLRDQLKVLTHPRLLMIYAITALGYGGVFTAFTFLAPMMQELAGFSPSAVSWILLGYGVSVAIGNVWGGKLADKHGAVSALKFIFAALVVLLLVFQLTASVHYAALATVLVMGVFAFGNVPGLQVYVVQKAEQYTPGAVDIASGLNIAAFNVGIALGSIVGGQTVERYGLAQTPWIGAMIVLVALLLVVLSGRLDKLPRRSAALSPEG

SEQ ID NO: 59400 - protein, 117 aa, Klebsiella pneumoniae
MQVKYLAGIVGAALLLAGCSSSNELTSAGQNVRFVQEKPGAECQLLGTATGKQSNWLSGQNGDEGGSMRGAANALRNQAAAMGGNVIYGVSSPTQNLLSSFVPTDSEMNGQVYKCPN

SEQ ID NO: 59401 - protein, 332 aa, Klebsiella pneumoniae
TGAVELESPFILLADKKISNIREMLPVLEAVAKAGKPLVIIAEDVEGEALATLVVNTMRGIVKVAAVKAPGFGDRRKAMLQDIATLTGGTVISEEIGMELEKATLEDLGQAKRVVINKDTTTIIDGVGEESAIQGRVAQIRKQIEEATSDYDREKLQERVAKLAGGVAVIKVGAATEVEMKEKKARVDDALHATRAAVEEGVVVSGGGVALVRVAAKLAGLTGQNEDQNVGIKVACRAMEAPLRQIVSNAGEEPSVVANNVKAGDGNYGYNAATEEYGNMIDFGILDPTKVTRSALQYAASVAGLMITTECMVTDLPKGDAPDLGAAGGMGG

SEQ ID NO: 59402 - protein, 305 aa, Klebsiella pneumoniae
RRFLTQLNSDVQLINQLGYYIVSGGGKRIRPMIAVLAARAVGYQGSAHVTIAALIEFIHTATLLHDDVVDESDMRRGKATANAAFGNAASVLVGDFIYTRAFQMMTQLGSLKILEVMSEAVNVIAEGEVLQLMNVNDPDITEENYMRVIYSKTARLFEAASQCAGLLADCTAEEERALQDYGRYLGTAFQLIDDLLDYSSDGERLGKNVGDDLNEGKPTLPLLHAMHHGTPDQSAMIRGAIEQGNGRHLLDTVLETMATCGSLEWTQKRAEEEADKAIAALQILPDTPWREALIGLAHIAVQRDH

SEQ ID NO: 59403 - protein, 419 aa, Klebsiella pneumoniae
MDKFRVQGPTRLQGEVTISGAKNAALPILFSALLAEEPVEIQNVPKLKDIDTTMKLLSQLGAKVERNGSVWIDAGPVDVFCAPYDLVKTMRASIWALGPLVARFGQGQVSLPGGCAIGARPVDLHISGLEQLGAEIKLEEGYVKASVSGRLKGAHIVMDKVSVGATVTIMSAATLAEGTTIIENAAREPEIVDTANFLNALGAKITGQGSDRITIEGVQRLGGGVYRVLPDRIETGTFLVAAAISGGKILCRNAQPDTLDAVLAKLRDAGADIETGEDWISLDMHGNRPKAVNVRTAPHPGFPTDMQAQFTLLNLVAEGTGVITETIFENRFMHIPELIRMGAHAEIESNTAICHGVKQLSGAQVMATDLRASASLVLAGCIAEGTTIVDRIYHIDRGYERIEDKLQALGANIQRVKGE

SEQ ID NO: 59404 - protein, 424 aa, Klebsiella pneumoniae
MTDKRKDGSGKLLYCSFCGKSQHEVRKLIAGPSVYICDECVDLCNDIIREEIKEVAPHRERSALPTPHEIRHHLDDYVIGQEQAKKVLAVAVYNHYKRLRNGDTSNGVELGKSNILLIGPTGSGKTLLAETLARLLDVPFTMADATTLTEAGYVGEDVENIIQKLLQKCDYDVQKAQRGIVYIDEIDKISRKSDNPSITRDVSGEGVQQALLKLIEGTVAAVPPQGGRKHPQQEFLQVDTSKILFICGGAFAGLDKVISHRVETGSGIGFGATVKAKSDKASEGELLAQVEPEDLIKFGLIPEFIGRLPVVATLNELSEEALIQILKEPKNALTKQYQALFSLEGAELEFRDEALDAIAKKAMARKTGARGLRSIVEAALLDTMYDLPSMEDVEKVVIDESVIAGQSKPLLIYGKPEAQQASGE

SEQ ID NO: 59405 - protein, 491 aa, Klebsiella pneumoniae
MSPMSAEATVVRGYIDWMVQVPWNARSKVKKDLRQAQEILDTDHYGLERVKDRILEYLAVQSRVNKIKGPILCLVGPPGVGKTSLGQSIAKATGRKYVRMALGGVRDEAEIRGHRRTYIGSMPGKLIQKMAKVGVKNPLFLLDEIDKMSSDMRGDPASALLEVLDPEQNVAFNDHYLEVDYDLSDVMFVATSNSMNIPAPLLDRMEVIRLSGYTEDEKLNIAKRHLLPKQIERNALKKGELTVDDSAIIGIIRYYTREAGVRSLEREISKLCRKAVKQLLLDKSLKHIEINGENLHDYLGVQRFDYGRADSENRVGQVTGLAWTEVGGDLLTIETACVPGKGKLTYTGSLGEVMQESIQAALTVVRSRADSWALTPTFYEKRDIHVHVPEGATPKDGPSAGIAMCTALVSCLTGIRVRADVAMTGEITLRGQVLPIGGLKEKLLAAHRGGIKTVLIPDENKRDLEEIPDNVIADLDIHPVKRIEEVLTLAL

SEQ ID NO: 59406 - protein, 84 aa, Klebsiella pneumoniae; identical to SEQ ID NO: 59334

SEQ ID NO: 59407 - protein, 134 aa, Klebsiella pneumoniae
  MISC_FEATURE (25)..(25): X=any amino acid
  MISC_FEATURE (107)..(107): X=any amino acid
  MISC_FEATURE (127)..(127): X=any amino acid
  MISC_FEATURE (129)..(129): X=any amino acid
GILTCFPSTTPFGLALGVDSPCPDXRWTGTLGLPASGLFTRFIVTYVSIRTSDTSSNPTGHLRRLTERSPTQQHHSVAAAASVHGLAPLHLPRRPTRPVSYYAFFKXWLLLSQHPGCLCLPTSFPTXPXLWDLS

SEQ ID NO: 59408 - protein, 151 aa, Klebsiella pneumoniae
  MISC_FEATURE (64)..(64): X=any amino acid
  MISC_FEATURE (128)..(128): X=any amino acid
PSAGTLHLHSSSISLSLGWRQPGHHYAIRAGRNLPDKEFRYLRTVIVTAAVYRGFDQRASPYGXPHQLTFRHRAGVTPYTSTFVFAQCCVFNKQLQPAGIFDWSQLHPQGLHLHTSVLLPKLRHHFAXFLHPSSLKRLGILYLTTCVGLGY

SEQ ID NO: 59409 - protein, 254 aa, Klebsiella pneumoniae
MLLIARRTALAAALLLVMPLTVWLSGWLWQPGLPVAMLKSLWWVTETVTQPWGIITHVVLCGWFLWCLRFRLRAALILFLILAAAILAGQGAKSWVKARVQEPRPFVIWLENTRQVPVTQFYALKRKERAKLVHEQLAQAQDIPSFLRKHWQKETGFAFPSGHTMFAASWALLAAGLLWPRRRWGTIAVLLVWATAVMGSRLALGMHWPLDLIVATLISWLLVTVACWLTQRLCGPLSPPGEEAQDIKKRMPEA

SEQ ID NO: 59410 - protein, 212 aa, Klebsiella pneumoniae
MKKLAAAALILGTLSTGSVWAHEAGEFFIRAGTATVRPTEGSDNVLGSLGSFNVSNNTQLGLTFTYMATDNIGVELLAATPFRHKVGTGPTGTIATVHQLPPTLMAQWYFGDAQSKVRPYVGAGINYTTFFNEDFNDTGKAAGLSDLSLKDSWGAAGQVGLDYLINRDWLLNMSVWYMDIDTDVKFKAGGVDQKVSTRLDPWVFMFSAGYRF

SEQ ID NO: 59411 - protein, 179 aa, Klebsiella pneumoniae
MKQFLDFLPLVVFFAFYKLYDIYAATTALIVATAVVLIYSWVRYRKVEKMALITFVLVAVFGGLTIFFHNDEFIKWKVTVIYALFAGALLFSQWVMKKPLIQRMLGKELSLPQQVWSRLNLAWAVFFILCGLANIYIAFWLPQNIWVNFKVFGLTALTLVFTLLSGIYIYRHMPQDDHH

SEQ ID NO: 59412 - protein, 289 aa, Klebsiella pneumoniae
YLLLTLAALFWGGNYVVGHVLVQGVDPILMTEARWALTALLLGLLYRRKSPAVATLLRANAPAVVVLTLCGQVSFPLTLYIGLQTTSALNAAIYMSATPSMVLLINRLFFRDPVSGRNWLGVAFSTLGVMILLFQGNPLHAASLHSFAVGDLWAMGSALSWALYCSLLRLKDRRIPANGFVAVSSLLGALILLPIVAFWLMRHPAQDWAAWREPFFLSGLAYLVIFPSWLAYLFWNKGIATIGATRGEIYTHIIPLSGGVLSILFLHTQPHAWHLFSALFIMVGIGICS

SEQ ID NO: 59413 - protein, 599 aa, Klebsiella pneumoniae
  MISC_FEATURE (41)..(41): X=any amino acid
GQQTLLLTHNIDTLGQMSCNPAMAGIGKGHLVKEVDALGGXWPKAIDQAGIQFRILNASKGPAVRATRAQADRVLYRQAVRTALENQPNLMIFQQAVEDLIVENDRVVGAVTQMGLKFRAKAVVLTVGTFLDGKIHIGLDNYSGGRAGDPPSIPLSRRLRELPLRVSRLKTGTPPRIDARTIDFSVLAQQHGDNPMPVFSFMGSADQHPCQVPCYITHTNEKTHDVIRNNLDRSPMYAGVIEGIGPRYCPSIEDKVMRFADRNQHQIFLEPEGLTSNEIYPNGISTSLPFDVQMQIVRSMQGMENARIVRPGYAIEYDFFDPRDLKPTLESKFIQGLFFAGQINGTTGYEEAAAQGLLAGLNAARFSAEKEGWAPRRDQAYLGVLVDDLCTLGTKEPYRMFTSRAEYRLMLREDNADLRLTEQGRELGLVDDERWARYNEKLESIERERQRLKSTWVNPQAESANEVNAHLTAPLSREASGEDLLRRPEMTYEQLVQLSPFTPGLEDRQAAEQVEIQVKYEGYIARQQDEIEKQQRNENTLLPATLDYRQVTGLSNEVIAKLNDHKPSSIGQASRISGITPAAISILLVWLKKQGMLRR

SEQ ID NO: 59414 - protein, 203 aa, Klebsiella pneumoniae
VLNKLSRLLDEAGISLTDHQKNQLVAYVGLLDKWNKAYNLTSVRDPNEMLVRHILDSIIVAPYLQGSRFIDVGTGPGLPGIPLAIVCPESHFTLLDSLGKRVRFLRQVQHELKLDNVTPVQSRVEAFPAEPPFDGVISRAFASLNDMVSWCHHLPAANGHFYALKGLAQKEEMESLPEGYDIVEVIELHVPRLEGERHLVVIK

SEQ ID NO: 59415 - protein, 271 aa, Klebsiella pneumoniae
MASENMTPQDYIGHHLNNLQLDLRTFSLVDPHNHTATFWTLNIDSMFFSVVLGLLFLAMFRSVAKKATSGVPGKFQTFIEMIIGFVHGSVKDMYHGKSKVIAPLALTVFVWVFLMNLMDLLPIDFLPWIGEHILGLPALRVVPSADVNITLSMALGVFILIIFYSIKMKGVGGFVKELTMQPFNHWAFIPVNLILEGVSLLSKPVSLGLRLFGNMYAGELIFILIAGLLPWWSQWVLNVPWAIFHILIITLQAFIFMVLTIVYLSMASEEH

SEQ ID NO: 59416 - protein, 177 aa, Klebsiella pneumoniae
MSEFVTVARPYAKAAFDFAVEHNSVERWQDMLAFAAEVTKNDQMAELLSGALAPETLSEAFIAICGEQLDENGQNLIKVMAENNRLKVLPDVLEQFIHLRAASEAIAEVEVISANQLSDEQLARIVSAMEKRLSRKVKLNCKIDKSVMAGIIIRAGDMVIDGSVRGRLERLADVLQS

SEQ ID NO: 59417 - protein, 510 aa, Klebsiella pneumoniae
MQLNSTEISELIKQRIAQFNVVSEAHNEGTIVSVSDGVIRIHGLAECMQGEMISLPGNRYAIALNLERDSVGAVVMGPYADLAEGMKVKCTGRILEVPVGRGLLGRVVNTLGAPIDGKGPLENDGFSAVEAIAPGVIERQSVDQPVQTGYKSVDAMIPIGRGQRELIIGDRQTGKTALAIDAIINQRDSGIKCVYVAIGQKASTISNVVRKLEEHGALANTIVVVATASESAALQYLAPYAGCAMGEYFRDRGEDALIVYDDLSKQAVAYRQISLLLRRPPGREAFPGDVFYLHSRLLERAARVNAEYVEAFTTGEVKGKTGSLTALPIIETQAGDVSAFVPTNVISITDGQIFLETNLFNAGIRPAVNPGISVSRVGGAAQTKIMKKLSGGIRTALAQYRELAAFSQFASDLDDATRKQLDHGQKVTELLKQKQYAPMSVAQQSLVLFAAERGYLADVELAKIGSFEAALLAYVDRDHAPLMQEINQSGGYNDEIEGKLKGILDSFKAT

SEQ ID NO: 59418 - protein, 238 aa, Klebsiella pneumoniae
MNNEHRLQAAPALQDKDESIYQALMTAIVEHQLPPGSKLPEEALAEVFAVSRTGIRKVLQRLAAVQLVTLTPKRGAHVTSPSVEESQAIFRTRALLEVANLPDVIARCQPPHLAALENIIQREQQAHAAHDGPAAIRHSADFHIQLQAISGNPVLTEMVTRLSQRSSLVIAAWGAPWRQGCRCDDHQQLVGLLRDKALQPLSEALMHHFDHIVASLCFERDGVSLPDFSRLFAGHKES

SEQ ID NO: 59419 - protein, 498 aa, Klebsiella pneumoniae
MPHSSHTQQTKTHEAAAGYSPRLCNDDLAPTRDQNWSWYNIFSFWMSDVHSMGGYVVAASFFTLGLASWQVLLCLLVGICIVQLCANLVAKPSQMAGVPYAVICRQAFGVFGANIPAVIRGLIAFAWYGIQTYLAANALMLVLLKFWPSLASLTSSSFLGLSTLGWLCFATMWLLQAMVFWHGMNAIKRFIDIAGPAVYVVMLALAGWIVYKTGLDGISFTLASKSLSAGEQTWQMITATALVVSYFSGPLLNFGDFSRYGKSMGEIRRGNRWGLPFNFLLFSVVTVVIVSGTQSLFGKMITDPIETVSRVGNDLAVAIGLLTMITATIGINIVANFVSPAFDFSNCAPQKISFRTGGMIAAVGSILLTPWNLFNSPELIHYTLDVLGAFIGPLFGILIADFYLIKRGRVSVDDLFDDTPQGKYWYRNGFNPKAIAALLPSVGLGLIISFIPALHEVANFSWFIGVFLGATTYRWLARDEREVQAKAAFRSGAVAQKE

SEQ ID NO: 59420 - protein, 436 aa, Klebsiella pneumoniae
MMDYQTAVRGAFFDIAGVAETPDEVAAQARYLDDGLLFLQEGKIIALLPWLEGEAFLHPLKGYVDLRGKLLLPGFVDTHIHYPQTEMIGAFGEQLLEWLTTYTFPVESQFADAEYAQEIAQFFVNQLISHGTTTALVFCTLHPASVEALFSEALRLNMRLIAGKVMMDRHVPDYLCETAGESYEQTRALIRRWHQRGRLGYAITPRFAPTSTPGLLEAVQRLRAEFPDTWLQTHLSENREEIAWVKQLWPEHARYLDVYHHYQLTGERSVFAHGIHLDDAEWQCLHDTGSAVAFCPTSNLFLGSGLFRLPACWQHQVRMGIGSDVGAGTTFSMLRTLGEAYKVGQLQSYRLRASEAFYHATLGGARALRLEEKIGNFQPGKEADFVVIDPAVTPLQRLRIGRCHDIYEQLFVLMTLGDERNISETWVNGERVWCQD

SEQ ID NO: 59421 - protein, 446 aa, Klebsiella pneumoniae
VSNLSLDFSDNAFQPLAARMRPENLAQYIGQQHLLAPGKPLPRAIEAGHLHSMILWGPPGTGKTTLAEVIARYASADVERISAVTSGVKEIREAIERARQNRNAGRRTILFVDEVHRFNKSQQDAFLPHIEDGTITFIGATTENPSFELNSALLSRARVYLLKSLTTDDIERVLDQAMNDKTRGYGGQDIVLPDETRRAIAELVNGDARRALNTLEMMADMAESDDSGKRVLMAELLTEIAGERSARFDNKGDRFYDLISALHKSVRGSAPDAALYWYARIITAGGDPLYVARRCLAIASEDVGNADPRAMQVAISAWDCFTRVGPAEGERAIAQAIVYLACAPKSNAVYTAFKAALADARDRPDYDVPVHLRNAPTKLMKEMGYGQEYRYAHDEPNAYAAGEQYFPQEMAQTRYYHPTNRGLEGKIGEKLAWLAEQESNSPIKRY

SEQ ID NO: 59422 - protein, 615 aa, Klebsiella pneumoniae
MLGKENAEGDRTTPSIIAYTQDGETLVGQPAKRQAVTNPQNTLFAIKRLIGRRFQDEEVQRDVSIMPYKIVAADNGDAWLDVKGTKTAPPQISAEVLKKMKKTAEDYLGEPVTEAVITVPAYFNDAQRQATKDAGRIAGLEVKRIINEPTAAALAYGLDKEVGNRTIAVYDLGGGTFDISIIEIDEVDGEKTFEVLATNGDTHLGGEDFDTRLINYLVDEFKKDQGIDLRNDPLAMQRLKEAAEKAKIELSSAQQTDVNLPYITADATGPKHMNIKVTRAKLESLVEDLVNRSIEPLKVALQDAGLSVSDINDVILVGGQTRMPMVQKKVAEFFGKEPRKDVNPDEAVAIGAAVQGGVLTGDVKDVLLLDVTPLSLGIETMGGVMTALISKNTTIPTKHSQVFSTAEDNQSAVTIHVLQGERKRASDNKSLGQFNLDGINPAPRGMPQIEVTFDIDADGILHVSAKDKNSGKEQKITIKASSGLNEEEIQKMVREAEANAESDRKFEELVQTRNQGDHLLHSTRKQVEEAGDKLPADDKTAIESALTALESSLKGEDKADIEAKMQALAQASQKLMEIAQQQHAQQQAGSADAQASNAKDDDVVDAEFEEVKDKK

SEQ ID NO: 59423 - protein, 374 aa, Klebsiella pneumoniae
MKREEQNQKRSKERLMESKVVVPAEGQKITLQNGKLNVPHNPIIPFIEGDGIGVDVTPAMLKVVDAAVEKAYKGERKISWMEVYTGEKSTHVYGQDVWLPAETLDLIRDYRVAIKGPLTTPVGGGIRSLNVALRQELDLYVCLRPVRYYQGTPSPVKHPELTDMVIFRENSEDIYAGIEWKADSAEADKVIKFLRDEMGVKKIRFPEHCGIGIKPCSEEGTKRLVRAAIEYAITNDRDSVTLVHKGNIMKFTEGAFKDWGYQLAREEFGGELIDGGPWVKIKNPNTGKEIVVKDVIADAFLQQILLRPAEYDVIACMNLNGDYISDALAAQVGGIGIAPGANIGDECALFEATHGTAPKYAGQDKVNPGSIILS

SEQ ID NO: 59424 - protein, 455 aa, Klebsiella pneumoniae
MELSSLTAVSPVDGRYGDKVSALRGIFSEFGLLKVRVQVEVRWLQKLAAHAAIKEVPAFAADANGFLDKIVADFSVEDAERIKPIERTTNHDVKAVEYFLKEKVADVAELHAVSEFIHFACTSEDINNLSHALMLKTARDEVVLPYWRKLIDAVKDLATQYRDVPLLSRTHGQPATPSTMGKEMANVAYRMERQYRQLNQVEILGKINGAVGNYNAHIAAYPEVDWHQFSEEFVTSLGIQWNPYTTQIEPHDYIAELFDCIARFNTILIDFDRDVWGYIALNHFKQKTIAGEIGSSTMPHKVNPIDFENSEGNLGLANAVMQHLASKLPVSRWQRDLTDSTVLRNLGVGIGYALIAYQSTLKGISKLELNQDRLLDELDHNWEVLAEPIQTVMRRYGIEKPYEKLKELTRGKRVDAEGMKQFIDSLALPEEEKVRLKAMTPANYIGRATTMVDEL

SEQ ID NO: 59425 - protein, 388 aa, Klebsiella pneumoniae
MNGERVLEYAASKFNVASISMSESQKKVIVGMSGGVDSSVSAYLLLQQGYKVEGLFMKNWEEDDGEEYCTAAADLADAQAVCDKLGIELHTVNFAAEYWDNVFELFLEEYKAGRTPNPDILCNKEIKFKAFLEFAAEDLGADYIATGHYVRRADVDGKSQLLRGLDGNKDQSYFLYTLSHEQIAQSLFPVGELEKPQVRKIAEELDLITAKKKDSTGICFIGERKFRDFLGRYLPAQPGKILTVDGEEIGTHQGLMYHTLGQRKGLGIGGTKEGSEDPWYVVDKDVENNILIVAQGHDHPRLMSVGLIAQQLHWVNREPLQGTLRCTVKTRYRQTDIPCTVTALDEDRIEVRFDEPVAAVTPGQSAVFYLGEVCLGGGIIEQRLPLQS

SEQ ID NO: 59426 - protein, 466 aa, Klebsiella pneumoniae
VSLSLWQQVLPRLQDELPATEFSMWIRPLQAELSDNTLALYAPNRFVLDWVRDKYLNNINGLLNDFCGADAPQLRFEVGAKPASSLQKGAVSPAAAAIPAAQVQTARAAPTIVRPGWDNVPAPAEPTYRSNVNVKHTFDNFVEGKSNQLARAAARQVADNPGGAYNPLFLYGGTGLGKTHLLHAVGNGIVARKPNAKVVYMHSERFVQDMVKALQNNAIEEFKRYYRSVDALLIDDIQFFANKERSQEEFFHTFNALLEGNQQIILTSDRYPKEINGVEDRLKSRFGWGLTVAIEPPELETRVAILMKKADENDIRLPGEVAFFIAKRLRSNVRELEGALNRVIANANFTGRAITIDFVREALRDLLALQEKLVTIDNIQKTVAEYYKIKVADLLSKRRSRSVARPRQMAMALAKELTNHSLPEIGDAFGGRDHTTVLHACRKIEQLREESHDIKEDFSNLIRTLS

SEQ ID NO: 59427 - protein, 366 aa, Klebsiella pneumoniae
MKFTVEREHLLKPLQQVSGPLGGRPTLPILGNLLLQVADGALSLTGTDLEMEMVARVALVQPHEAGATTVPARKFFDICRGLPEGAEIAVQLEGDRMLVRSGRSRFSLSTLPAADFPNLDDWQSEVEFTLPQATMKRLIEATQFSMAHQDVRYYLNGMLFETEGSELRTVATDGHRLAVCSMPLEASLPNHSVIVPRKGVIELMRMLDGGDTPLRVQIGSNNIRAHVGDFIFTSKLVDGRFPDYRRVLPKNPDKHLEAGCDILKQAFARAAILSNEKFRGVRLYVSENQLKITANNPEQEEAEEILDVTYAGTEMEIGFNVSYVLDVLNALKCENVRILLTDSVSSVQIEDAASQSAAYVVMPMRL

SEQ ID NO: 59428 - protein, 418 aa, Klebsiella pneumoniae
EVIMTVLHAGGKFDDNSYKVSGGLHGVGVSVVNALSQKLELVIQRDNKVHKQMYEHGVPQAPLAVTGETDKTGTMVRFWPSLETFTNVTEFEYDILAKRLRELSFLNSGVSIRLRDKRDGKEDHFHYEGGIKAFVEYLNKNKTPIHPNIFYFSTEKDGIGVEVALQWNDGFQENIYCFTNNIPQRDGGTHLAGFRAAMTRTLNAYMDKEGYSKKAKVSATGDDAREGLIAVVSVKVPDPKFSSQTKDKLVSSEVKSAVEQQMNELLSEYLLENPSDAKIVVGKIIDAARAREAARRAREMTRRKGALDLAGLPGKLADCQERDPALSELYLVEGDSAGGSAKQGRNRKNQAILPLKGKILNVEKARFDKMLSSQEVATLITALGCGIGRDEYNPDKLRYHSIIIMTDADVDARTFVPC

SEQ ID NO: 59429 - protein, 633 aa, Klebsiella pneumoniae
MIVFSSLQIRRGVRVLLDNATATINPGQKVGLVGKNGCGKSTLLSILKNEISADGGSMTFPGNWQLAWVNQETPALPQPAIDYVIDGDREYRQLEAALQQANERNDGHAIATVHGKLDAIDAWTIRSRAASLLHGLGFSNEQLERPVSDFSGGWRMRLNLAQALICRSDLLLLDEPTNHLDLDAVIWLEKWLKGYTGTLILISHDRDFLDPIVDKIIHIEQQTMFEYTGNYSSFEVQRATRLAQQQAMYESQQQRVAHLQSYIDRFRAKATKAKQAQSRIKMLERMELIAPAHVDNPFHFSFRQPESLPNPLLKMEKVSAGYGERIILDSIKLNLVPGSRIGLLGRNGAGKSTLIKLLAGELQPVSGEIGLAKGIKLGYFAQHQLEFLRADESPLQHLARLAPQELEQKLRDYLGGFGFQGDKVSEETRRFSGGEKARLVLALIVWQRPNLLLLDEPTNHLDLDMRQALTEALIDFEGALVVVSHDRHLIRSTTDDLYLVHDGKVEPFDGDLEDYQQWLSDSQKQESQSGEAPKESGNSAQARKDQKRREAELRSQTQPLRKEIARLEKEMDKLNAQLASAEEKLGDSELYDASRKAELTECLQQQASAKFGLEECEMAWLEAQEQLERMLQE

SEQ ID NO: 59430 - protein, 519 aa, Klebsiella pneumoniae
TLKDTLVARRLALNPWTGFYFLQSLLINLALGYEFSLLYTVAFTCVLHLLWRAFPRVQKAVVGAYSLLAALYYPFGQAYGAPNFNTLLALHATNVEESTEILTIFPWYNYLLAVFIFALGVIAVRRRIVEPSRWGKMDTLGLLFSIGIFFLQPVQNLAWGGVFKVIDTGYPAFRFVKDVVVNNNEVLDEQARMAQLAGMKDSWHVLAVKPKYHLYVVVIGESARRDALGAFGGHWDNTPFASSVNGYLFNNYIAASGSTQKSLGLTLNRVVDGKPQYQDNFVTLANRAGFQTWWFSNQGQIGEYDTAIASIAKRADEVQFLKNGDFEANKNTQDEQLLKLTEQVLSTQRTQPQLIVLHLMGSHPQACDRTKGKYTVFVQSKETSCYLYSMTQTDSLLAKLYHQLQNSGDTFSLTYFSDHGLAFKERGKRVQYLAHDDKFQQNFQVPFMVLSSDDKRIKVIKAQRSANDFLSFFSQWTGIQATEITPRYRFISEQRPVPVYITNFQLQKVDYAHLGTDEF

SEQ ID NO: 59431 - protein, 440 aa, Klebsiella pneumoniae
MQTYFDQLDRVRYEGPKSTNPLAFRHYNPDELVLGKRMEDHLRFAACYWHTFCWNGADMFGVGSFDRPWQQPGDALEMAKRKADVAFEFFHKLNVPYYCFHDVDVSPEGASLKEYSNNFARMVEVLAEKQQQSGVKLLWGTANCFTNPRYGAGAATNPDPEVFSWAATQVVTAMNATHQLGGENYVLWGGREGYETLLNTDLRQEREQIGRFMQLVVEHKHKIGFKGTLLIEPKPQEPTKHQYDYDASTVYGFLKQFGLEKEIKLNIEANHATLAGHSFHHEIATAIALGLFGSVDANRGDPQLGWDTDQFPNSVEENALVMYEILKAGGFTTGGLNFDAKVRRQSTDKYDLFYGHIGAMDTMALSLKVAARMIEDGELDKRVARRYAGWNGELGQQILNGQMTLSDIAQYAAQHQLAPQHRSGQQEQLENLVNHYLFDK

SEQ ID NO: 59432 - protein, 144 aa, Klebsiella pneumoniae
MLGRAIGTLDTDKKWLTPLCAALFIAAVWVISRGTLHELRWRGDFGDTWYLYCGPAVFVCAVTLLTLAKNWLNARPLPGIACIARHSLGIYGFHALIVHALRASHLELSRWPLLDIVWIFSAALLGSLLLSGLVQRIDSRRLVS

SEQ ID NO: 59433 - protein, 554 aa, Klebsiella pneumoniae
MCSIFGVLDIKTDAGELRKKALELSRLMRHRGPDWSGVYASDKAILAHERLSIVDVNAGAQPLYNAEKTHALAVNGEIYNHQALRAEYGDRYQFQTGSDCEVILALYQEKGPEFLDDLQGMFAFALYDSEKDAYLIGRDHIGIIPLYMGHDEHGNFYVASEMKALVPVCRTIKEFPAGSYLWSKDGEIRQYYQRDWFDYDAVKDNVTDKNELRQALEESVKSHLMSDVPYGVLLSGGLDSSVISAITKKFAARRVEDQERSEAWWPQLHSFAVGLEGSPDLKAAQEVANHLGTVHHEIHFTVQEGLDAIRDVIYHIETYDVTTIRASTPMYLMSRKIKAMGIKMVLSGEGSDEVFGGYLYFHKAPNAKELHEETVRKLQALHMFDCARANKAMSAWGVEARVPFLDKKFLDVAMRINPQDKMCGNGKMEKHILRECFESYLPASVAWRQKEQFSDGVGYSWIDTLKEVAAKQISDQQLETASFRFPYNTPTSKEGYLYREIFEELFPLPSAAECVPGGPSVACSSAKAIEWDEAFKTMNDPSGRAVGVHQSAYK

SEQ ID NO: 59434 - protein, 406 aa, Klebsiella pneumoniae
MTAGGQAQIGNVDLVKQLNSAAVYRLIDQHGPISRIQIAEQSQLAPASVTKITRQLIERGLIKEVDQQASTGGRRAISIIAETRSFNAIGVRLGRYDATLTLYDLSSKTLEEEHFPLPERTQETLEHALLNIIATFIENCQRKIRELIAISVILPGLVDPESGVIRYMPHIAVENWGLVGALEKRFNVTCFVGHDIRSLALAEHYFGASQDCEDSILVRVHRGTGAGIISNGRIFIGRNGNVGEIGHIQVDPLGERCHCGNFGCLETVAANAAIEQRVRHLLEQGYQSRLTPDDCTIKTICKAANKGDALACEVIEYVGRHLGKTIAIAINLFNPQKIVVAGEIVEAEKVLLPAIEGCINAQALKAFRKNLPVVRSTLDHRSAIGAFALVKRAMLNGTLLQRLLES

SEQ ID NO: 59435 - protein, 382 aa, Klebsiella pneumoniae
MYALTQGRVYTGHEILDDHAVVIADGFIERLCPLADLPSDIEQRSVNGAIIAPGFIDVQLNGCGGVQFNDSPEAVTVETLEIMQKANERSGCTSFLPTLITSSDDLMKQGVRVMREYLQKHPNQALGLHLEGPWLNIVKKGTHNPDYVRKPDAALVDFLCDNADVITKVTLAPERVEPEVIRKLVAAGIVVSAGHSNATLKEAKVGFRAGITFATHLYNAMPYITGREPGLAGAIFDEPDVYCGIIVDGMHVDYANVRNAKRLKGDKLCLVTDATAPAGANIDQFIFAGKTIYYRNGLCVDENGTLSGSSLTMIEGVRNLVEHCGVALDEVLRMATLYPARAIGVDKQLGSIAPGMVANLTAFTRDYKITKTIVNGNEVVTE

SEQ ID NO: 59436 - protein, 266 aa, Klebsiella pneumoniae
MRLIPLVTAEQVGKWAARHIVNRINAFKPTADRPFVLGLPTGGTPLTAYKALVEMHKAGQVSFKHVVTFNMDEYVGLPKEHPESYHSFMHRNFFDHVDIPAENINLLNGNAPDIDAECHRYEEKIRSYGKIHLFMGGVGNDGHIAFNEPASSLASRTRIKTLTHETRVANSRFFDGDVDLVPKYALTVGVGTLLDAEEVMILVLGHQKALALQAAVEGNVNHMWTITCLQLHPKAVIVCDEPSTMELKVKTLKYFNELEAENIKGL

SEQ ID NO: 59437 - protein, 651 aa, Klebsiella pneumoniae
MNILGFFQRLGRALQLPIAVLPVAALLLRFGQPDLLNVPFIAQAGGAIFDNLALIFAIGVASSWSKDNAGSAALAGAVGYFVMTKAMVTINPEINMGVLAGIITGLVAGAVYNRWAGIKLPDFLSFFGGKRFVPIATGFFCLILAAIFGYVWPPVQHAIHSGGEWIVSAGALGSGIFGFINRLLIPTGLHQVLNTIAWFQIGEFTNAAGAVFHGDINRFYAGDGTAGMFMSGFFPIMMFGLPGAALAMYLAAPKARRPMVGGMLLSVAITAFLTGVTEPLEFLFMFLAPLLYLLHAVLTGISLFIATALGIHAGFSFSAGAIDYVLMYSLPAASKNVWMLLVMGVVFFFVYFLLFSAVIRMFNLKTPGREDKAADVVTEEANSNTEEGLTQLATSYIAAVGGTDNLKAIDACITRLRLTVGDSAKVNDAACKRLGASGVVKLNKQTIQVIVGAKAESIGDEMKKVVTRGPVAAAAAAPAGNVATAAPAAKPQAVANAKTVESLVSPITGDVVALEQVPDEAFASKAVGDGIAVKPTSNIVVAPAAGTVVKIFNTNHAFCLETNNGAEIVVHMGIDTVALEGKGFKRLVEEGTDVKAGEPILEMDLDFLNANARSMISPVVCSNSDDYSALVILASGKVVAGQTPLYEIKGK

SEQ ID NO: 59438 - protein, 685 aa, Klebsiella pneumoniae
MNKFAPLHPKVSTLLHGADYNPEQWENDPDIIDKDIAMMQQAKCNVMSVGIFSWAKLEPREGVFNFAWLDIILDKLYAAGIHVFLATPSGARPAWMSQRYPQVLRVGRDRVPALHGGRHNHCMSSPVYREKTLQINTLLAERYSSHPAVLGWHISNEYGGECHCDLCQNRFRDWLKARYQTLENLNQAWWSTFWSHTYTDWSQIESPAPQGEMSIHGLNLDWHRFNTAQVTDFCRHEIAPLKAANASLPVTTNFMEYFYDYDYWQLAEALDFISWDSYPMWHRDKDETALACYTAMYHDMMRSLKGGKPFVLMESTPGATNWQPTSKLKKPGMHILSSLQAVAHGADSVQYFQWRKSRGSVEKFHGAVVDHVGHIDTRIGREVCQLGEILSKLPEVRGCRTEAKVAIIFDQQNRWALDDAQGPRNLGMEYEKTVNEHYRPFWEQGIAVDVIDADVDLTPYQLVIAPMLYMVRDGFAGRAEAFVANGGHLVTTYWTGIVNESDLCYLGGFPGPLRNLLGIWAEEIDCLNDGEFNLVQGLAGNQCGLQGPYQVRHLCELIHIESAQALATYRDDFYAGRPAVTVNAFGKGKAWHVASRNDLAFQRDFFTALSKELALPRAIATELPPGVVATARTDGDNAFIFLQNYSAQNHTLTLPQGYRDCLTDAAVSAPLTLSAWDCRILRRHA

SEQ ID NO: 59439 - protein, 269 aa, Klebsiella pneumoniae
MVETLLEVRQLSKTFRYRTGWFHRQTVEAVKPLSFTLRERQTLAIIGENGSGKSTLAKMLAGMVEPTSGELLIDDHPLTFGDYSYRSQKIRMIFQDPSTSLNPRQRISQILDFPLRLNTDLDAEARQKQIIDTLRMVGLLPDHVSYYPHMLAPGQKQRLGLARALILRPKVIVCDEALASLDMSMRSQLINLMLELQEKQGISYIYVTQHLGMMKHISDQVLVMHNGEVVERGSTADVLASPLHDLTRRLIAGHFGEALTADAWRKDGK

SEQ ID NO: 59440 - protein, 857 aa, Klebsiella pneumoniae
MRLDRLTNKFQLALADAQSLALGHDNQFIEPLHLMSALLNQEGGSVRPLLTSAGVNAGKLRTDIEQALSRLPQVEGTGGDVQPSQDLVRILNLCDKLAQKKKDNFISSELFVLAALESRGTLTDLLKSAGATTANVTQAIEQMRGGESVNDQGAEDQRQALKKFTVDLTERAEQGKLDPVIGRDEEIRRTIQVLQRRTKNNPVLIGEPGVGKTAIVEGLAQRIVNGEVPEGLKGRRVLALDMGALVAGAKYRGEFEERLKGVLTDLSKQEGNVILFIDELHTMVGAGKADGAMDAGNMLKPALARGELHCVGATTLDEYRQYIEKDAALERRFQKVFVAEPSVEDTIAILRGLKERYELHHHVQITDPAIVAAATLSHRYIADRQLPDKAIDLIDEAASSIRMQIDSKPEELDRLDRRIIQLKLEQQALKKESDEASLKRLDMLNEELADKERQYSVLEEEWKAEKASLSGTQTIKAELEQAKIAIEQARRVGDLARMSELQYGKIPELEKQLAAATQAEGKTMRLLRNKVTDAEIAEVLARWTGIPVSRMMESERDKLLRMEQELHHRVIGQDEAVEAVSNAIRRSRAGLSDPNRPIGSFLFLGPTGVGKTELCKTLANFMFDSDDAMVRIDMSEFMEKHSVSRLVGAPPGYVGYEEGGYLTEAVRRRPYSVILLDEVEKAHPDVFNILLQVLDDGRLTDGQGRTVDFRNTVVIMTSNLGSDLIQERFGELDYGHMKDLVLGVVSQNFRPEFINRIDEVVVFHPLGEKHIASIAQIQLQRLYKRLEERGYEVQMSDEALKLLSANGYDPVYGARPLKRAIQQQIENPLAQQILSGELVPGKTIELVVKDDRIVAVQ

SEQ ID NO: 59441 - protein, 431 aa, Klebsiella pneumoniae
MKKNINLRSLAAQAIEQVVEKGQSLSNVLPPLQQKVSDKDKALLQELCFGVLRTLSQLEWLISKLMARPMTGKQRTVHFLIMVGLYQLLYTRIPPHAALAETVEGAVAIKRPQLKGLINGVLRQFQRQQEALLAEFAEHENRYLHPKWLLKRLQQAWPEQWQEIVEANNQRPPMWLRVNRNHHSRDEWLALLNETGLEGFTHPDYPDAVRLATPAPVHALPGFAEGWVTVQDASAQGCMRYLQPENGERILDLCAAPGGKTTHILEVAPQAQVMAVDIDEQRLSRVYDNLKRLGMKAEVKQGDGRFPEQWCGNEQFDRILLDAPCSATGVIRRHPDIKWLRRDRDIAELAQLQAEILNAIWGHLKPGGTLVYATCSILPEENSQQIAAFLARTPDAELHATGTPAIPGQQNLPGAEEGDGFFYAKLIKRRN

SEQ ID NO: 59442 - protein, 267 aa, Klebsiella pneumoniae
MKIIILGAGQVGGTLAENLVGENNDITLVDTNGDRLRSLQDKFDLRVVQGHGSHPRVLREAGADDADMLVAVTSSDETNMVACQVAYSLFNTPNRIARIRAPDYVRDAEKLFNSEAVPIDHLIAPEQLVIDNIHRLIEYPGALQVVNFAEGKVSLAVVKAYYGGPLVGNALSTMREHMPHIDTRVAAIFRHDRPIRPQGSTIVEAGDEVFFIAASQHIRAVMSELQRLEKPYKRIMLVGGGNIGAGLAHKLEKDYSVKLIERNQQGC

SEQ ID NO: 59443 - protein, 484 aa, Klebsiella pneumoniae
MNIKAASLTPEQALAELEAHYEASVTALRKAIGDYIDHNTLPDTEARAQGLFVYPQLSVSWDGADHKALKTRAWGRFTHAGCYTTTITNPKLFRNYLLEQLTLLYQDYGAHISVELSQHEIPYPYVIDGSTLTLDRSMSAGLTRYFPTTELSQIGDETADGLFHPTEFYPLSHFDARRVDFSLARLRHYTGTPAEHFQPYVLFTNYTRYVDEFVSWGCSQILDPDSPYIALSCAGGIWITAETEAPEQAISDLAWKKHQMPAWHLITHDGKGITLINIGVGPANAKTICDHLAVLRPDVWLMIGHCGGLRESQAIGDYVLAHAYLRDDHVLDAVLPPDIPIPSIAEVQRALYDATKQVSGMPGEEVKQRLRTGTVVTTDDRNWELRYSASALRFNLSRAVAIDMESATIAAQGYRFRVPYGTLLCVSDKPLHGEIKLPGQANRFYEGAISEHLQIGIRAIDLLRAEGDHMHSRKLRTFNEPPFR

SEQ ID NO: 59444 - protein, 395 aa, Klebsiella pneumoniae
MTNSNRIKLTWISFFSYALTGALVIVTGMVMGNIADYFHLPVSSMSNTFTFLNAGILISIFLNAWLMEIVPLKTQLRFGFILMVLAVAGLMLSHSLALFSASMFVLGLVSGITMSIGTFLITHMYEGRQRGARLLFTDSFFSMAGMIFPMVAAVLLARSIEWYWVYACIGLVYVAIFVLTFGCDFPVLGKKAQSENSQPVVKEKWGIGVLFLSVAALCYILGQLGFISWVPEYAKSLGMSLGDAGKLVSDFWMSYMIGMWSFSFILRFFDLQRILTVLAGLATVLMYLFINGSPEHMPWFILTLGFFSSAIYTSIITLGSQQTRVASPKLVNFILTCGTIGTMLTFVVTGPIVAASGPLAALHTANGLYAVVFVMCFILGFVSRHRQNNAQAASH

SEQ ID NO: 59445 - protein, 80 aa, Klebsiella pneumoniae
SLLSPFDVVIWMTDGWPLYESRLKGKLHVISKRYTQRIERHNLNLRQHLARLGRKSLSFSKSVELHDKVTGHYLNIKHYQ

SEQ ID NO: 59446 - protein, 304 aa, Klebsiella pneumoniae
MDHQKVTFKNRYGITLAADVYLPKDRGNKKLAALVISGPFGAVKEQASGLYAQTLAERGFVTLAFDPSYTGESSGEPRNIASPDINTEDFMAAVDFMGLQPYVDHERIGVIGICGMGGIALNAVAVDKRVKAVVASTMYDMSRVMSKGYNDSVTPEQREQALEKMSLQRWEDAANGKPAYQPAYNKLKGGEAQFLVDYADYYMTKRGYHPRAVNSGNSWSVTTPMAFMNFPLMTYIKEISPRPILFIHGEKAHSLYFSKTAYEAANQPKELLIVKNATHVDLYDRMDKIPFDNITAFFNKNLNK

SEQ ID NO: 59447 - protein, 336 aa, Klebsiella pneumoniae
MVKVGINGFGRIGRNVLRAALNNPDIQIVAINDLTDSKTLAHLLKYDSLLGKLDAEVTAGEGGLVVDGKPITVFSERNPASIPWRQCEVDIVIEATGLFTDREKAAVHIHSGGAKRVIISAPGKNDDLTIVMGVNESLYSPDKHYVISNGSCTTNGLAPAAQVLHQHFGIKHGLMNTTHAYTNSQALHDQPEKDLRGARAAALSIVPYSSGAAKALGKVIPELDGRLTGYSLRVPVPVVSIVDLTVTLERDVTVEEVNNAFREAAAAGPLKGILGYSDEPLVSSDYQGDPRSSIIDGLSTLVIGGNMVKILAWYDNEWGFSNRLVDLALMMAKRES

SEQ ID NO: 59448 - protein, 374 aa, Klebsiella pneumoniae
RAGGGDGRREPDARPGRAAAAVVLMAGLQGAGKTTSVGKLGKFLREKHKKKVLVVSADVYRPAAIKQLETLAEQVGVDFFPSDVGQKPVIIVNAALKEAKLKFYDVLLVDTAGRLHVDEAMMDEIKHVHAAINPVETLFVVDAMTGQDAANTAKAFNEALPLTGVVLTKVDGDARGGAALSIRHITGKPIKFLGVGEKTEALEPFHPDRVASRILGMGDVLSLIEDIESKVDRAQAEKLASKLKKGDGFDLTDFLEQLRQMKNMGGMASLMGKLPGMGQIPDNVKAQMDDKVLVRMEAIINSMTLKERAKPEIIKGSRKRRIAAGCGMQVQDVNRLLKQFDDMQRMMKKMKSKGGMMKMMRGMKGMMPPGFPGR

SEQ ID NO: 59449 - protein, 287 aa, Klebsiella pneumoniae
  MISC_FEATURE (19)..(19): X=any amino acid
LQRLEQRPANVILLLFLIXPTADTMPVFALLALVAYSVSLALIIPGLLQKNSSWRRMAILSATIALICHAFALEARIFPGGESGQNLSLLNVGSLVSLMICTVMTIVASRNRGWLLLPIVYAFALINLAFATFVPNEYITHLETTPGMLVHIGLSLFSYATLIIAALYALQLAWIDYQLKNKKLAFSSEMPPLMSIERKMFHITQVGVVLLTLTLCSGLFYMHNLFSSENIDKAVLSIIAWFVYIVLLWGHYHEGWRGRRVVWFSVAGAGLLTLAYFGSRVLQQFVS

SEQ ID NO: 59450 - protein, 160 aa, Klebsiella pneumoniae
MTKKKAHKPGSATIALNKRARHEYFIEDEYEAGLALQGWEVKSLRAGKANIGDSYVILKDGEAFLFGANFTPMAVASTHYVCDPTRTRKLLLNQRELDTLYGRINREGYTVVALSLYWKNAWCKVKIGVAKGKKQHDKRTDLKDREWALDKARIMKHAGR

SEQ ID NO: 59451 - protein, 292 aa, Klebsiella pneumoniae
MKNHFKCIGIVGHPRHPTALTTHEMLWRWLCSKGYEVLVEQQIAHELQLSNVKTGTLAEIGQQADLAVVVGGDGNMLGAARTLARYDINVIGINRGNLGFLTDLDPDNALQQLADVLEGHYIAEKRFLLEAQVCQQDCQKRISTAINEVVLHPGKVAHMIEFEVYIDEVFAFSQRSDGLIISTPTGSTAYSLSAGGPILTPSLDAITLVPMFPHTLSARPLVINGDSTIRLRFSHRCSDLEISCDSQIALPIQDGEDVLIRRCDYHLNLIHPKDYSYFNTLSTKLGWSKKLF

SEQ ID NO: 59452 - protein, 592 aa, Klebsiella pneumoniae
MGCVMKLPVREFDAVVIGAGGAGMRAALQISQSGQTCALLSKVFPTRSHTVSAQGGITVALGNSHEDNWEWHMYDTVKGSDYIGDQDAIEYMCKTGPEAILELEHMGLPFSRLDDGRIYQRPFGGQSKNFGGEQAARTAAAADRTGHALLHTLYQQNLKNHTTIFSEWYALDLVKNQDGAVVGCTALCIETGEVVYFKARATVLATGGAGRIYQSTTNAHINTGDGVGMAIRAGVPVQDMEMWQFHPTGIAGAGVLVTEGCRGEGGYLLNKHGERFMERYAPNAKDLAGRDVVARSIMIEIREGRGCDGPWGPHAKLKLDHLGKEVLESRLPGILELSRTFAHVDPVKEPIPVIPTCHYMMGGIPTKVTGQALTVNEKGEDVVIPGLFAVGEIACVSVHGANRLGGNSLLDLVVFGRAAGLHLQESIAEQGTLRDASESDIEGSLDRLNRWNNTRSGEDPVAIRKALQECMQHNFSVFREGDAMHKGLEQLKVIRERLKNARLDDTSSEFNTQRVECLELDNLMETAYATAVSANFRTESRGAHSRFDFPDRDDENWLCHSLYLPESESMTRRSVNMEPKLRPAFPPKIRTY

SEQ ID NO: 59453 - protein, 935 aa, Klebsiella pneumoniae
MQNGAMKAWLDSSYLSGSNQSWIEQLYEDFLTDPDSVDANWRSMFQQLPGTGVKPDQFHSKTRDYFRRLAKDASRYTSSISDPDTNVKQVKVLQLINAYRFRGHQHANLDPLGLWKQERVADLDPAYHDLTEADFQESYNVGSFAIGKDTMKLGELIAALKQTYCGSIGAEYMHITSTEEKRWIQQRIESVAGKASFTAEEKKRFLSELTAAEGLERYLGAKFPGAKRFSLEGGDALIPMLKEMIRHAGKSGTREVVLGMAHRGRLNVLVNVLGKKPQDLFDEFAGKHKEHLGTGDVKYHMGFSSDMETEGGLVHLALAFNPSHLEIVSPVVIGSVRARLDRLDEPSSNKVLPITIHGDAAVTGQGVVQETLNMSKARGYEVGGTVRIVINNQVGFTTSNPLDARSTPYCTDIGKMVQAPIFHVNADDPEAVAFVTRLALDFRNTFKRDVFIDLVCYRRHGHNEADEPSATQPLMYQKIKKHPTPRKIYADKLEQEKVATLEDATEQVNLYRDALDAGECVVQEWRPMNMHSFTWSPYLNHEWDESYPDKVEPKRLQELAKRISTVPEGIEMQSRVAKIYADRQAMAAGEKLFDWGGAENLAYATLVDEGIPVRLSGEDSGRGTFFHRHAVIHNQTNGSTYTPLQHVHNGQGQFRVWDSVLSEEAVLAFEYGYATAEPRTLTIWEAQFGDFANGAQVVIDQFISSGEQKWGRMCGLVMLLPHGYEGQGPEHSSARLERYLQLCAEQNMQVCVPSTPAQVYHMLRRQALRGMRRPLVVMSPKSLLRHPLAVSSMDELANGTFLPAIGEIDQLDPQAVKRVVLCSGKVYYDLLEQRRKNEQKDVAIVRIEQLYPFPHQAVQEALKAYAHVHDFVWCQEEPLNQGAWYCSQHHFREVIPFGASLRYAGRPASASPAVGYMSVHQKQQQDLVNDALNVD

SEQ ID NO: 59454 - protein, 393 aa, Klebsiella pneumoniae
MENRSAALPRRGFDVTSSAFLIVAFLTGMAGALQTPTLSLFLTNEVHVRPAMVGFFFTGSAVIGILVSQFLAGRSDRQGDRKQLIVVCCLLGVLACVLFAWNRNYFILLFIGVFLSSFGSTANPQMFALAREHADRTGREAVMFSSILRAQVSLAWVIGPPLAYALAMGFGFTAMYLSAAAAFIVCGIMVWLFLPSMRKAKPVAAGRLEAPRTHRRDALLLFSICTLMWGTNSLYIINMPLFIINELHLPEKLAGLMMGTAAGLEIPTMLIAGYYARRFGKRFLMRLSAVAGVLFYVGMLTVHTPALLLAMQVLNAIYIGILAGIGMLYFQDLMPGQAGAATTLYTNTTRVGWIIAGSLAGVVAEIWSYHAVFWIALAMGVVTQACLWRIRDV

SEQ ID NO: 59455 - protein, 209 aa, Klebsiella pneumoniae
MMFKWPWKADDESGNAEMPWEQALAIPVLAHLSSTEQHKLTQMAARFLQQKRLVALQGLELTPLHQARIAMLFCLPVLELGIEWLDGFHEVLIYPAPFIVDDEWEDDIGLVHNQRVVQSGQSWQQGPVVLNWLDIQDSFDASGFNLVVHEVAHKLDTRNGDRASGVPLIPLREVAGWEHDLHAAMNNIQDEIDLVGESAASIDAYAATD

SEQ ID NO: 59456 - protein, 78 aa, Klebsiella pneumoniae
MSTIEERVKKIIGEQLGVKQEEVTNNASFVEDLGADSLDTVELVMALEEELDTEIPDEEAEKITTVQAAIDYINGHQA

SEQ ID NO: 59457 - protein, 262 aa, Klebsiella pneumoniae
MFLVDSHCHLDGLDYQTLHKNVDDVLAKAAARDVKFCLAVATTLPGYRSMRELVGTRDNVVFSCGVHPLNQDEPWEVETLRALAAEEGVVAMGETGLDYFYTPETKAHQQASFRDHIRIAVSLNKPVIVHTRDARADTLAILREEKVTDCVAYLHCFTEDRETAGKLLDMGFYISFSGIVTFRNAEQLRDAARYVPLDRLLVETDSPYLAPVPHRGKENQPALVRDVAEYMAVLKGVSLEQLAQQTTDNFATLFHIDPARLQ

SEQ ID NO: 59458 - protein, 213 aa, Klebsiella pneumoniae
MRSNYIVIEGLEGAGKTTARQLVVETLQSAGIHDMVFTREPGGTILAEKLRSLVLDIQSTGDEVINDKAEVLMFYAARVQLVEAVIKPALARGQWVIGDRHDLSTQAYQGGGRGIDRTMLATLRDAVLGDFRPNLTLYLDVTPEVGLQRARARGELDRIEQESMNFFNRTRARYLELAAADPSIRTVDATQPLDAVARDIRATIAQWMAEQAA

SEQ ID NO: 59459 - protein, 269 aa, Klebsiella pneumoniae
MFLINGVVQDTLAANDRATQFGDGCFTTARIQQGQVALLDAHLQRLQTTCEKIHIPFNDWLTLSEEMQRLAQPHAQGVLKVTLTRGVGGRGYSTAGCVSPTRILSFSPFPAHYARWREEGITLTQSPVPLGRNSWLAGLKHLNRLEQVLIRSHLEQTDADEALVLDSDGWLTECCAANLFWRQGRDVFTPRLDYAGVNGIMRQRCIAQLAPSTFRVVEVTARPETLREADEVLICNALMPLVPVRRWEETTWSSRELYHFLAPLCELSG

SEQ ID NO: 59460 - protein, 413 aa, Klebsiella pneumoniae
MSKRRVVVTGLGMLSPVGNTVESTWKALLAGQSGISLIDHFDTSAYATKFAGLVKDFNCDDIISRKEQRKMDAFIQYGIVAGVQAMQDSGLEVTEENATRIGAAIGSGIGGLGLIEENHSSLVNGGPRKISPFFVPSTIVNMVAGHLTIMFGLRGPSISIATACTSGVHNIGQAARIIAYGDADAMVAGGAEKASTPLGVGGFGAARALSTRNDNPQAASRPWDKDRDGFVLGDGAGMVVLEEYEHAKKRGAKIYAEIVGFGMSSDAYHMTSPPEDGAGAALAMVNAIRDAGIEPGQIGYVNAHGTSTPAGDKAEAQAVKSVFGDAASRVLVSSTKSMTGHLLGAAGAVESIYSILALRDQAVPPTINLDNPDEGCDLDFVPHEARQVSGMEYTLCNSFGFGGTNGSLIFKKV

SEQ ID NO: 59461 - protein, 577 aa, Klebsiella pneumoniae
MNIQALLSEKVSQALIAAGAPADCEPQVRQSAKVQFGDYQANGVMAVAKKLGMAPRQLAEQVLSHLDLNGIANKVEIAGPGFINIFLDPAFLADNVNRALQSERLGVTKPQAQTIVVDYSAPNVAKEMHVGHLRSTIIGDASVRTLEFLGHKVIRANHVGDWGTQFGMLIAYLEKQQQENAGEMALADLEGFYREAKKHYDEDEAFAERARSYVVKLQGGDEYFLQMWRKLVDITMSQNQITYDRLNVTLTRDDVMGESLYNPMLPGIVADLKAKGLAVESEGATVVFLDEYKNKEGEPMGVIIQKKDGGYLYTTTDIACAKYRYETLHADRVLYYIDSRQHQHLMQAWTIVRKAGYVPDSVPLEHHMFGMMLGKDGKPFKTRAGGTVKLADLLDEALERARRLVAEKNPDMSADELENLAKVVGIGAVKYADLSKNRTTDYVFDWDNMLAFEGNTAPYMQYAYTRVLSVFRKAGIDENAMIDAPVVIAEDREAQLAARLLQFEETLSVVAREGTPHVMCAYLYDLAGLFSGFYEHCPILSAESEETRNSRLKLALLTAKTLKLGLDTLGIETVERM

SEQ ID NO: 59462 - protein, 313 aa, Klebsiella pneumoniae
  MISC_FEATURE (308)..(308): X=any amino acid
MRTEYCGQLRQSHVGQQVTLCGWVNRRRDLGSLIFIDMRDREGIVQVFFDPDRADALKLASELRNEFCIQVTGTVRAREEKNINADMATGAIEVLASDLTIINRSESLPLDSNHVNTEEARLKYRYLDLRRPEMAQRLKTRAKITSFVRRFMDDHGFLDIETPMLTKATPEGARDYLVPSRVHKGKFYALPQSPQLFKQLLMMSGFDRYYQIVKCFRDEDLRADRQPEFTQIDVETSFMTAPQVREIMEAMVRQLWLEVKGVDLGEFPIMTFAEAERRYGSDKPDLRNPMELVDVATVKSVDFQHIGXQLSSL

SEQ ID NO: 59463 - protein, 188 aa, Klebsiella pneumoniae
MLELNAKNTALVVIDLQEGILPFAGGPHRADEVVARAARLADKCRQQGSPVIMVRVGWSADFAEALKQPVDAQAGAHTLPENWWTYPATLGKQESDIEVTKRQWGAFYGTDLELQLRRRGIDTIILCGISTNIGVESTARNAWELGFNLVIAEDACSAASAEQHQGSMTHIFPRIGRVRSTEEILTAL

SEQ ID NO: 59464 - protein, 334 aa, Klebsiella pneumoniae
MTKPIVFSGAQPSGELTIGNYMGALRQWVNMQDDYHCIYCIVDQHAITVRQDPQQLRKATLDTLALYLACGIDPQKSTIFVQSHVPEHAQLGWALNCYTYFGELSRMTQFKDKSARYAENINAGLFDYPVLMAADILLYQTNQVPVGEDQKQHLELSRDIAQRFNAIYGDIFKVPEPFIPKSGARVMSLLEPTKKMSKSDDNRNNVIGLLEDPKSVVKKIKRAVTDSDEPPVVRYDLKEKAGVSNLLDILSAVTGKTIPELEQHFEGKMYGHLKGEVAEAVSGMLIDLQERYHRFRNDEAFLNQVMKDGAEKASARASQTLKAVYEAIGFVAKP

SEQ ID NO: 59465 - protein, 692 aa, Klebsiella pneumoniae
MWRRLIYHPEVNYALRQTLVLCLPVAIGLLLGHLQQGLLFSLVPACCNIAGLDTPHKRFFKRLIIGGCLFAGCSLVVQLLLAQAIPLPFILSGLALLLGVTAEISSLHARLLPASLIAAIFTLSLAGNMPIWEPLLIYAFGTLWYGVFNWFWFWLWREQPLRESLSLLYRELADYCEAKYSLLTQHTDPSTALPPLLTRQQKVVDLITQCYQQMHMLAANQRNDHKRLLRAFQMGLDLQEHISVSLHQPEEVQKLVERSHAEAVIRWNAQTVAARLRVLADDMLYHRFPKRFQMDKQIEALEKIARQHPDNPVGHFCAWHFSRIARVLHTQRPLYARDLMADKERRLPLLPALKNYLSLKSPALRNAARISVMLSVASLMGNALHLPKPYWILMTVLFVTQNGYGATRVRIVHRAAGTLAGLTIAGLTLHFHVPESYTLSGMLLITLLSYLIIRKHYGWAMVGFTVTAVYTLQLLTLNGEQFIIARLIDTLIGCLIAFGGMVWLWPQWQSGLLKKNAHDALEADQQAIRLILSADPKAPALAYQRMRVNQAHNALYNSLNQAMQEPGFNTHYLEDMKLWVTHSQFIVEHINAMTTLAREHTMLTPDLAQRYLESCEIALQRCQQRLDSDGPGSAGDANIMESPESEAPIGPLSTLEQHLQRILGHLNTMHTISSVAWRQRPHHGIWLRKINR

SEQ ID NO: 59466 - protein, 406 aa, Klebsiella pneumoniae
MATEQPAITRATFDEVILPIYAPAEFIPVKGKGSRVWDQQGKEYIDFAGGIAVTALGHCHPALVAALHQQGETLWHTSNVFTNEPALRLGRKLVEATFAERVVFMNSGTEANETAFKLARHYAVTRHSPYKTKIIAFHNAFHGRSLFTVSVGGQPKYSDGFGPKPADIVHVPFNDLQAVKAVMDDHTCAVVVEPIQGEGGVTAATPAFLQGLRELCEQHQALLVFDEVQCGMGRTGSLFAYMHYGVTPDILTSAKALGGGFPVSAMLTTHEIASAFHAGSHGSTYGGNPLACAVANAAFDLINTPAVLDGVSAKRELFVKHLQRLDAEFDLFSDIRGMGLLIGAELKPQHKGRARDFLYAAADAGVMVLNAGPDVMRFVPSLIIDEQDITEGMARFAQAVAKVING

SEQ ID NO: 59467 - protein, 200 aa, Klebsiella pneumoniae
MSDKFGDERDPYLYPALNVLRNRLGIRQAKNLQQAAFEMTALRAATLPLGPRVRGLPYLCAIHHQLYQDLFDWAGRLREVNLYLGDTPFCHFARIEEEGNALMQALEQEDYLSGLPRDTFIERLSWFYGEINVLHPFRLGNGLTQRIFFEQLAIHAGYLLNWRDVDPAGWSAACQQSAMGDLAPLVAIFRKVVSEARESE

SEQ ID NO: 59468 - protein, 619 aa, Klebsiella pneumoniae
MPIQVLPPQLANQIAAGEVVERPASVVKELVENSLDAGATRIDIDIERGGAKLIRIRDNGSGIKKDELALALARHATSKIASLDDLEAIISLGFRGEALASISSVARLTLTSRTAEQQEAWQAYAEGRDQAVTVKPAAHPVGTTLEVLDLFYNTPARRKFMRTEKTEFGHIDEVVRRIALARFDVTINLSHNGKVMRQYRGVAQDGQRERRLGTICGAAFLEHALAIEWQHGDLTLRGWVADPLHTTPALAEIQYCYVNGRMMRDRLINHAIRQACEDKLGADQQPAFVLYLEIDPHQVDVNVHPAKHEVRFHQSRLVHDFIYQGVLSVLQQQLDAPLAEKDDPPAPRQMPENRIAAGGNQFARPAEAREPATRFSITPSREPAASSGKPGGASWPHAQPGYQKQQGALYRQLLDTPTAPKPALQPPAAAELAGHSQSFGRVLTIVGGDCALLEREGGLALLSLTVAERWLRQAQLTPGAEAVCAQPLLIPLRLKVTEGEKQALAAAQPALAQLGIDVHTDALHVTVRAVPLPLRQQNLQILIPELIGYLAQQNAFDVGNIAQWMARNLTSEQTSWNMAQAIALLADVERLCPQLVRTPPGGLLQPVDLHSAMNALKDE

SEQ ID NO: 59469 - protein, 118 aa, Klebsiella pneumoniae
MAYIPKNYARLEVGYREKALKLFPWVCGRCSREFVYSNLRELTVHHIDHDHSNNPEDGSNWEMLCLYCHDHEHSKYTEADQYGSTVVAGEDAQKSVGEATYNPFADLKAMMNKSKRSG

SEQ ID NO: 59470 - protein, 183 aa, Klebsiella pneumoniae
MDALDLLLNRRSASRLAEPAPAGEQLENILRAGLRAPDHGTLQPWRFFIIADDGRERFSQLLEKGAREAGQDEKGIEKARNAPFRAPLIITVVARCEDHPKVPRWEQEMSAGCAVMAMQMAALAQGFNGIWRSGALTESPVVRAGFECREQDKIVGFLYLGTPQLKASTTIALPDTAPFVTRF

SEQ ID NO: 59471 - protein, 173 aa, Klebsiella pneumoniae
MAKPKYSPETKLAVVNHYLSGKDGEQSTADLFGIERTSVRRWVRAWQFHGAEGLTAKNNHYSDEFKLVVVRAVISDRLTMREAAARFNLSAEILVRRWLDVYNDAGAEGLLNMQCGRPGQMTKPKNIPPLTDKELEKLSPEELRAELRYLRAENAYLKQLKALVQSEQNGQKP

SEQ ID NO: 59472 - protein, 349 aa, Klebsiella pneumoniae
MATGTLPDAGQILNSLINSILLVDDDLAVHFANPAAQQLLAQSSRKLFGTPLPELLSYFSLNIGLMQESLQAGQGFTDNEVTLVIDGRSHILSLTAQRLPEGFILLEMAPMDNQRRLSQEQLQHAQQVAARDLVRGLAHEIKNPLGGLRGAAQLLSKALPDPALTEYTKVIIEQADRLRNLVDRLLGPQHPGMHVTESIHKVAERVVKLVSMELPDNVKLIRDYDPSLPELPHDPDQIEQVLLNIVRNALQALGPEGGEIILRTRTAFQLTLHGVRYRLAARIDVEDNGPGIPPHLQDTLFYPMVSGREGGTGLGLSIARSLIDQHSGKIEFTSWPGHTEFSVYLPIRK

SEQ ID NO: 59473 - protein, 469 aa, Klebsiella pneumoniae
MSAEHVLTMLNEHEVKFVDLRFTDTKGKEQHVTIPSHQVNAEFFEEGKMFDGSSIGGWKGINESDMVLMPDASTAVIDPFYEEPTLIIRCDILEPGTLQGYDRDPRSIAKRAEEYLRATGIADTVLFGPEPEFFLFDDIRFGASISGSHVAIDDIEGAWNSSTKYEGGNKGHRPGVKGGYFPVPPVDSSQDIRSTMCMIMEEMGLVVEAHHHEVATAGQNEVATRFNTMTKKADEIQIYKYVVHNVAHRFGKTATFMPKPMFGDNGSGMHCHMSLAKNGTNLFSGDKYAGLSEQALFYIGGVIKHAKAINALANPTTNSYKRLVPGYEAPVMLAYSARNRSASIRIPVVTSPKARRIEVRFPDPAANPYLCFAALLMAGLDGIKNKIHPGEAMDKNLYDLPPEEAKEIPQVAGSLEEALQALDADREFLTAGGVFTNDAIDAYIALRMEENDRVRMTPHPVEFELYYSV

SEQ ID NO: 59474 - protein, 607 aa, Klebsiella pneumoniae
MIENLRNIAIIAHVDHGKTTLVDKLLQQSGTFDARTEAQERVMDSNDLEKERGITILAKNTAIKWNDYRINIVDTPGHADFGGEVERVMSMVDSVLLVVDAFDGPMPQTRFVTKKAFAHGLKPIVVINKVDRPGARPDWVVDQVFDLFVNLDATDEQLDFPIVYASALNGIAGLDHEDMADDMTPLYQAIVDRVPAPDVDLDGPLQMQISQLDYNNYVGVIGIGRIKRGKVKPNQQVTIIDSEGKTRNGKVGKVLTHLGLERIESDVAEAGDIIAITGLGELNISDTICDPQNVEALPALSVDEPTVSMFFNVNTSPFCGKEGKFVTSRQILDRLNKELVHNVALRVEETEDADAFRVSGRGELHLSVLIENMRREGFEMAVSRPKVIFREIDGRKQEPFENVTLDVEEQHQGSVMQALGERKGDLKNMNPDGKGRVRLDYVIPSRGLIGFRSEFMTMTSGTGLLYSTFSHYDDVRPGEVGQRNNGVLISNGQGKAVAFALFGLQDRGKLFLGHGAEVYEGQIIGIHSRSNDLTVNCLTGKKLTNMRASGTDEATVLVPPVKMTLEQALEFIDDDELVEVTPTSIRIRKRHLTENDRKRAMRGAKEE

SEQ ID NO: 59475 - protein, 64 aa, Klebsiella pneumoniae
MQGTVLETLPNTMFRVELENGHVVTAHISGKMRKNYIRILTGDKVTVELTPYDLSKGRIVFRSR

SEQ ID NO: 59476 - protein, 400 aa, Klebsiella pneumoniae
MTDSLFPRLVLAKGREKSLLRRHPWIFSGGVARMEGKARSGETIDIVDHQGKWLARGAYSPSSQIRARVWTFDRNEAIDSAFFERRLQQAQTWRAWLAERDGLDSYRLIAGESDGLPGVTIDRFGNFFVLQLLSAGAEYQRAAIISALQNLFPDCAIYDRSDVAVRKKEGLELAQGPVVGELPPALLPITEHGMKLLVDIQGGHKTGYYLDQRDSRLATRRYVADKRVLNCFSYTGGFAVSALMGGCRQVTSVDTSQEALDVARQNVEINGLDLSKAEFVRDDVFKLLRKYRDQGEKFDVIVMDPPKFVENKSQLMGACRGYKDINMLAIQLLNPGGVLLTFSCSGLMTTDLFQKIIADAAIDAGRDVQFIEQFRQAADHPVIATYPEGLYLKGFACRVM

SEQ ID NO: 59477 - protein, 287 aa, Klebsiella pneumoniae
MSDSQYAVIYDLHSHTTASDGRLTPQELVHRAHEMRVGTLAITDHDSVAAIPAAREEIARAGLPLTLVNGVEISTLWENHEIHIVGLNIDIAHPTMTALLEEQKARRQQRGQMIAERLEKARIPGAWEGALRLADGGAVTRGHFARFLVEAGHAKNMAEVFKKYLARGKTGYVPPQWCTIKQAIDVIHHSGGKAVIAHPGRYDLSAKWLKRLLAHFSEQGGDAMEVAQCQQAPHERAQLATLAVQFGLLASQGSDFHQPCAWIELGRKLWLPAGVEGVWHSWEAAAE

SEQ ID NO: 59478 - protein, 865 aa, Klebsiella pneumoniae
MGKALVIVESPAKAKTINKYLGNDYVVKSSVGHIRDLPTSGSASKKSADSTATKGAKKPKKDERSALVNRMGVDPWHDWNAHYEVLPGKEKVVSELKQLAEKADHIYLATDLDREGEAIAWHLREVIGGDEHRYSRVVFNEITKNAIRQAFEKPGELNIDRVNAQQARRFMDRVVGYMVSPLLWKKIARGLSAGRVQSVAVRLVVEREREIKAFVPEEYWEVDASTTTPGGDALPLQVTHKDDKPFRPVSRDETMAAVSLLEKASYSVLEREDKPTSSKPGAPFITSTLQQAASTRLGFGVKKTMMMAQRLYEAGHITYMRTDSTNLSQDALNMVRGYISDKFGKKYLPDSANQYASKENSQEAHEAIRPSDVNVLAETLKDMEADAQKLYQLIWRQFVACQMTPAQYDSTTLTVAAGDFKLKARGRTLRFDGWTKVMPALRKGDEDRTLPLVKQGDRLSLVELTPAQHFTKPPARFSEASLVKELEKRGIGRPSTYASIISTIQDRGYVRVENRRFYAEKMGEIVTDRLEENFRDLMNYDFTAQMEDRLDQVANHQAEWKEVLNHFFGDFTTQLATAEKDPEEGGMQPNPMVLTSIECPTCGRKMGIRTASTGVFLGCSGYALPPKERCKTTINLVPENEVLNVLEGDDAETNALRAKRRCQKCGTAMDSYLIDPKRKLHVCGNNPTCDGYEIEEGEFRIKGYDGPVVECEKCGSEMHLKMGRFGKYMACTNDECKNTRKILRNGEVAPPKEDPVPLPELPCEKSDAYFVLRDGAAGVFLAANTFPKSRETRAPLVEELYRFRDRLPEKLRYLADAPQQDPEGNKTLVRFSRKTKQQYVASEKEGKATGWSAFFIDGKWTEAKK

SEQ ID NO: 59479 - protein, 253 aa, Klebsiella pneumoniae
MHYQPQRHLLKDRIILVTGASDGIGREAALTYARYSASVILLGRNDDKLRTVAQEIEREGGIPPRWFTLDLLTCTPQACQQLAQQISMHYPRLDGVLHNAGLLGDICPMEEQKPEVWQQVMQVNVNGTFMLTQALLPLLLRSESGSLVFTSSSVGRQGRANWGAYAVSKFATEGMMQVLADEYQSRHLRVNCINPGGTRTGMRASAFPTEDPLKLKTPADIMPVYLWLMGDDSRRKTGMTFDAQPGRKPGIAQ

SEQ ID NO: 59480 - protein, 151 aa, Klebsiella pneumoniae
MSTPEKRPVSFFSLFNRGQHYAKTWPLDKRLAPVFIENRIIRATRYAIRIMPPIAIFTLCWQIALGGQLGPAVATALFALSLPMQGLWWLGKRSVTPLPPSILNWFYEVRGKLQEAGQALAPVEGKPDYQALADTLKRAFKQLDKTFLDDL

SEQ ID NO: 59481 - protein, 229 aa, Klebsiella pneumoniae
GVHFGHQTRYWNPKMKPFIFGARKKVHIINLEKTVPMFNEALAELNKIAARKGKILFVGTKRAASEAVKDAALSCDQFFVNHRWLGGMLTNWKTVRQSIKRLKDLETQSQDGTFDKLTKKEALMRTRELDKLENSLGGIKDMGGLPDALFVIDADHEHIAIKEANNLGIPVFAIVDTNSDPDGVDFVIPGNDDAIRAVSLYLGAVAATVREGRSQDLASQAEESFVEAE

SEQ ID NO: 59482 - protein, 283 aa, Klebsiella pneumoniae
MAEITASLVKELRERTGAGMMDCKKALTEANGDIELAIENMRKSGAIKAAKKAGNVAADGVIKTKIEGNYGYILEVNCQTDFVAKDGGFQAFADKVLDAAVAGKISDVEVLKAQFEEERVALVAKIGENINIRRIAVLEGDVLGSYQHGARIGVLVAAKGADEELVKQLAMHVAASKPEFVKPEDVSAEVVEKEYQVQLDIAMQSGKPKEIAEKMVEGRMKKFTGEVSLTGQPFVMEPSKSVGQLLKEHNADVTGFIRFEVGEGIEKVETDFAAEVAAMSKQS

SEQ ID NO: 59483 - protein, 241 aa, Klebsiella pneumoniae
MATNAKPVYKRILLKLSGEALQGSEGFGIDASILDRMAQEIKELVELGIQVGVVIGGGNLFRGAGLAKAGMNRVVGDHMGMLATVMNGLAMRDALHRAYVNARLMSAIPLNGVCDNYSWAEAISLLRNNRVVILSAGTGNPFFTTDSAACLRGIEIEADVVLKATKVDGVFTADPAKDPSATMYDQLTYSEVLEKELKVMDLAAFTLARDHKLPIRVFNMNKPGALRRVVMGEKEGTLITE

SEQ ID NO: 59484 - protein, 185 aa, Klebsiella pneumoniae
MISDIRKDAEIRMEKCVEAFKNQISKIRTGRASPSLLDGIVVEYYGTPTPLRQLASVTVEDSRTLKINVFDRSMSAAVEKAIMASDLGLNPSSAGSDIRVPLPPLTEERRKDLTKIVRGEAEQARVAVRNVRRDANDKVKALLKEKEISEDDDRRSQDDVQKMTDAAIKKVDAALADKEAELMQF

SEQ ID NO: 59485 - protein, 309 aa, Klebsiella pneumoniae
MPSIRLADLAQQLDAELHGDGDIVITGVASMQSAKTGQITFMVNPKYREHLAACQASAVVMTQDDLPFAHSAALVVRNPYLTYARMAQILDTTPQPAQDIAPSAVIDPSAKLGSNVAIGANAVIESGVVLGNNVVIGAGCFVGKNTKIGAGSRLWANVTVYHEIEIGENCLIQSSTVIGADGFGYANDRGNWVKIPQLGRVIIGDRVEIGACTTIDRGALDDTVIGNGVIIDNQCQIAHNVVIGDNTAVAGGVIMAGSLKIGRYCMIGGASVINGHMEICDKVTVTGMGMVMRPISEPGVYSSGIPLQP

SEQ ID NO: 59486 - protein, 258 aa, Klebsiella pneumoniae
MDLKRVMLSANQTVSEISPTHGCRHVAIIMDGNGRWAKRQGKIRAFGHKAGAKSVRRAVSFAANNGIEALTLYAFSSENWNRPAQEVSALMELFVWALDSEVKSLHRHNVRLRIIGDTTRFNARLQERIRKAEALTANNTGLTLNIAANYGGRWDITQGVRLLAKQVQDGTLLPEQITEDMLSQQVCMHELAPVDLVIRTGGEHRISNFLIWQIAYAELYFTDVLWPDFAEQDFEGALHAFVNRERRFGGTEPGGSHA

SEQ ID NO: 59487 - protein, 263 aa, Klebsiella pneumoniae
MPPMGFAIVTLVVCMLAAWEWGQLSGFTSTSQRVWLAVLCGLLLAAMLFLLPEYHYDVHQPMVEGSLWASFAWWIVALLLVLSYPASAAFWRHSKVLRLIFGILTIVPFFWGMLALRAWHYADNHYSGALWLLYVMILVWGADSGAYMFGKMFGKHKLAPKVSPGKTWQGFFGGLLTAAVISWAYGVWAHLDVTPTVLLVCSVVAALASVLGDLTESMFKREAGIKDSGHLIPGHGGILDRIDSLTAAVPVFACLLLLVFRTI

SEQ ID NO: 59488 - protein, 178 aa, Klebsiella pneumoniae
MRVNNLIEVVMFRKLAAECFGTFWLVFGGCGSAVLAAAFPELGIGFAGVALAFGLTVLTMAFAVGHISGGHFNPAVTLGLWAGGRFPAKEVIGYIIAQVVGGIIAAAVLYVVASGKAGFDAAASGFASNGYGEHSPGGFSMLSAIVIEIVLTCGFLLVIHGATDKHAPAGFAPIAIGL

SEQ ID NO: 59489 - protein, 552 aa, Klebsiella pneumoniae
MLLERVEIVGFRGINRLSLMLEQNNVLIGENAWGKSSLLDALTLLLSPEFDLYHFVRDDFWFPPGDIQGREHHLHIILTFRETEPGRHRVRRFRPLQRCWVPCDDGYHRVFYRLEGELAEDDSVMTLRSFIDGEGEALVLEEIDELARHLVRLMPVLRLRDARFMRRIHNGTVPHSPQIEITARQLDFLSRELVSHPQNLSDGQIRQGLSAMVQLLEHYFAEQSSAQTRHRLMRRRSHDEQRSWRYLDIINRMIDKPGGRSHRVILLGLFATLLQAKGTVRLDRDARPLLLIEDPETRLHPIMLSVAWHLLNLLPLQRVTTTNSGELLSLTPVEQVCRLVRESTRVSAWRLGPGGMNAEESRRIAFHIRFNRASSLFARCWLLVEGETETWVINELARQCGHHFDAEGVKVIEFAQSGLKPLIKFARRMGIQWHVLVDGDEAGKKYAATVRGLLNNDRELERDHLTSLPALDMEHFMYRQGFDDVYHRVAQIPDNVPMNMRRVITKAIHRSSKPDLAIEVAMEAGRRGVDAVPTLLKKMFSRVLWLARGRAD

SEQ ID NO: 59490 - protein, 840 aa, Klebsiella pneumoniae
APDKLTLQRKTRSTLNIPGTGGKSKSVQIEVRKKRTFVKRDPQEAERLAAEEQAQREAEEQARREAEEAAKREAQLKAEREAAEQAKREVADKAKREAAEKDKVSNQHTDEMTKTAQAEKIRRENEAAELKRKSEEEARRKLEEEARRVAEEARRMAEENEKNWSETSDSPEDSSDYHVTTSQHARQAEDDNDREVEGGRGRSRSSKAARPAKKGNKHAESKADREEARAAVRGGKGGKHRKGSALQQGFQKPAQAVNRDVVIGETITVGELANKMAVKGSQVIKAMMKLGAMATINQVIDQETAQLVAEEMGHKVILRRENELEEAVMSDRDTGAAAEPRAPVVTIMGHVDHGKTSLLDYIRSTKVASGEAGGITQHIGAYHVETDNGMITFLDTPGHAAFTSMRARGAQATDIVVLVVAADDGVMPQTIEAIQHAKAAQVPVVVAVNKIDKPEADPDRVKNELSQYGILPEEWGGESQFVHVSAKAGTGIDDLLDAILLQAEVLELKAVRNGMASGAVIESFLDKGRGPVATVLVREGTLHKGDIVLCGFEYGRVRAMRDELGREVLEAGPSIPVEILGLSGVPAAGDEVTVVRDEKKAREVALYRQGKFREVKLARQQKSKLENMFANMTEGEVHEVNIVLKADVQGSVEAISDSLLKLSTDEVKVKIIGSGVGGITETDATLAAASNAILVGFNVRADASARKVIEAESLDLRYYSVIYNLIDEVKAAMSGMLSPELKQQIIGLAEVRDVFKSPKFGAIAGCMVTEGTIKRHNPIRVLRDNVVIYEGELESLRRFKDDVNEVRNGMECGIGVKNYNDVRVGDMIEVFEIIEIQRSI

SEQ ID NO: 59491 - protein, 643 aa, Klebsiella pneumoniae
MAEFETTFADLGLKAPILEALTDLGYEKPSPIQAECIPHLLDGRDVLGMAQTGSGKTAAFSLPLLNNIDPELRAPQILVLAPTRELAVQVAEAMTEFSKHMRGVNVVALYGGQRYDVQLRALRQGPQIVVGTPGRLLDHLKRGTLDLSKLSGLVLDEADEMLRMGFIEDVETIMAQIPEGHQTALFSATMPEAIRRITRRFMKEPQEVRIQSSVTTRPDISQSYWTAYGMRKNEALVRFLEAEDFDAAIIFVRTKNATLEVAEALERNGYNSAALNGDMNQALREQTLERLKDGRLDILIATDVAARGLDVERISLVVNYDIPMDSESYVHRIGRTGRAGRAGRALLFVENRERRLLRNIERTMKLTIPEVELPNAELLSKRRLEKFAAKVQQQLESSDLDQYRALLAKIQPTAEGEELDVETLAAALLKMAQGERSLIVPPDAPMRPRREFRDRDDRFDRRGDRNDRGPRGDREDRPKRERRDVGDMELYRIEVGRDDGVEVRHIVGAIANEGDISSRYIGNIKLFASHSTIELPKGMPGEVLQHFTRTRILNKPMNMQLLGDAQPRTERRGGGERREGGRGFGGERREGGRGFGGERREGGRGEGRRFSGERREGRAPRRDDASAPRRDDSAGRRRFGGDA

SEQ ID NO: 59492 - protein, 711 aa, Klebsiella pneumoniae
MLNPIVRKFQYGQHTVTLETGMMARQATAAVMVSMDDTAVFVTVVGQKKAKPGQDFFPLTVNYQERTYAAGKIPGGFFRREGRPSEGETLIARLIDRPVRPLFPEGFVNEVQVIATVVSVNPQVNPDIVAMIGASAALSLSGIPFNGPIGAARVGYINDQYVLNPTQEELKSSKLDLVVAGTEAAVLMVESEAELLSEDQMLGAVVFGHEQQQIVIQNINDLVKEAGKPRWDWQPEAVNEALNARVAALAESRLSDAYRITDKQERYAQVDVIKSETIATLVAEDETLDANELGEILHAIEKNVVRSRVLAGEPRIDGREKDMIRGLDVRTGVLPRTHGSALFTRGETQALVTATLGTARDAQNIDELMGERTDSFLFHYNFPPYSVGETGMVGSPKRREIGHGRLAKRGVLAVMPTIEEFPYTVRVVSEITESNGSSSMASVCGASLALMDAGVPVKAAVAGIAMGLVKEGDNFVVLSDILGDEDHLGDMDFKVAGSRDGISALQMDIKIEGITKEIMQVALNQAKGARLHILGVMEQAINAPRGDISEFAPRIHTIKINPDKIKDVIGKGGSVIRALTEETGTTIEIEDDGTVKIAATDGDKAQHAIRRIEEITAEIEVGRIYNGKVTRIVDFGAFVAIGGGKEGLVHISQIADKRVEKVTDYLQMGQEVPVKVLEVDRQGRVRLSIKEATEQTPSAAAPEAPAAEQGE

SEQ ID NO: 59493 - protein, 89 aa, Klebsiella pneumoniae
MSLSVEAKAKIVSEFGRGENDSGSTEVQVALLTAQINHLQGHFAEHKKDHHSRRGLLRMVSQRRKLLDYLKRKDVARYSALIERLGLRR

SEQ ID NO: 59494 - protein, 314 aa, Klebsiella pneumoniae
MSRPRRRGRDVHGVLLLDKPQGASSNDVLQKVKRIYNANRAGHTGALDPLATGMLPICLGEATKFSQYLLDSDKRYRVIAKLGQRTDTSDADGQVVEERPLTFSDEQLAAALDSFRGETQQVPSMYSALKYQGKKLYEYARQGIEVPREARPITVYELLFIRREGDELELEIHCSKGTYIRTIIDDLGEKLGCGAHVIFLRRLAVSKYPVERMVTLEQLQALVDEAAAQDIPAAQLLDPLLMPMDSPASDYPLVNIPETSAVYFKNGNPVRQSGAPLNGLVRVMESESGKFLGMGEIDDEGRVAPRRLVVEYPA

SEQ ID NO: 59495 - protein, 296 aa, Klebsiella pneumoniae
MNMKKLATLVSAVALSATVSANAMAKDTIALVISTLNNPFFVSLKDGAQKEADKLGYNLVVLDSQNNPAKELANVQDLTVRGTKLLLINPTDSDAVGNAVKMANQAKIPVITLDRQATKGDVVSHIASDNVQGGKMAGDYIAKKVGESAKVIELQGIAGTSAARERGEGFKQAVAAHKFNVLASQPADFDRTKGLNVMQNLLTAHPDVQAVFAQNDEMALGALRALQTAGKSDVMVVGFDGTPDGEKAVNSGKLAATVAQLPEQIGAKGVETADKVLKGEKVEANYPVELKLVVKQ

SEQ ID NO: 59496 - protein, 321 aa, Klebsiella pneumoniae
MTTQAVSGRRYFTKAWLMEQKSLIALLVLIAVVSTMSPNFFTVNNLFNILQQTSVNAIMAVGMTLVILTSGIDLSVGSLLALTGAVAASIVGIEVNALVAVAAALALGAAIGAVTGVIVARGRVQAFIATLVMMLLLRGVTMVYTNGSPINTGFSDNADLFGWFGIGRPLGIPTPVWIMAIVFLAAWYMLHHTRLGRYIYALGGNEAATRLSGISVNKVKIIVYALCGMLASLAGIIEVARLSSAQPTAGTGYELDAIAAVVLGGTSLAGGKGRIVGTLIGALILGFLNNGLNLLGVSSYYQMIVKAVVILLAVLVDNKKQ

SEQ ID NO: 59497 - protein, 139 aa, Klebsiella pneumoniae
MKKGTVLNADISAVISRLGHTDTLVVCDAGLPVPRSSTRIDMALTQGVPSFMQVLEVVTTEMQVEAAVIAEEIKTHNPQLHATLLTHLEQLQQHQGNTIEIRYTSHEQFKKQTADSQAVIRSGECSPFANIILCAGVTF

SEQ ID NO: 59498 - protein, 621 aa, Klebsiella pneumoniae
STDNKQSLPALTLAAIGVVYGDIGTSPLYTLRECLSGQFGFGVERDAVFGFLSLIFWLLIFTVSIKYITFVMRADNAGEGGILTLMSLAGRNTSARMTSVLVILGLIGGSFFYGEVVITPAISVMSAIEGLEIIAPQLDTWIVPISIIVLTLLFVIQKHGTGMVGKLFAPIMLIWFLLLAVLGARSIYANPEVLQALNPYWAVHFFLQYKTVSFIALGAVVLSITGVEALYADMGHFGQLPIRVAWFSVVLPSLVLNYFGQGALLLKHPEAIKNPFFLLAPEWALIPMLIIATLATVIASQAVISGVFSLTRQAVRLGYLSPMRIIHTSEMESGQIYIPFINWLLYVSVVIVIVSFEHSSNLAAAYGIAVTGTMVLTSILSATVARKNWHWNKLFVGLMLVAFLCIDIPLFSANLDKIVSGGWLPLSLGMVMFTVMTTWKSERFRLLRRMHEHGNSLEAMISSLEKSPPVRVPGTAVYMSRALNVIPFALLHNLKHNKVLHERVILLTLRTEDAPYVHNVRRVQIEQLSPSFWRVVASYGWRETPNVEEVFHRCGLEGLSCRMMETSFFMSHESLIIGKRPWYLRLRGKLYLLLQRNALRAPDQFEIPPNRVIELGTQVEI

SEQ ID NO: 59499 - protein, 632 aa, Klebsiella pneumoniae
MAIEIKVPDIGADEVEITEILVKVGDKVEAEQSLITVEGDKASMEVPSPQAGVVKEIKVSVGDKTETGKLIMIFDSAEGAAAAAPAQEEKKEAAPAAAAPAAAAAAKEVHVPDIGGDEVEVTEIMVKVGDTIAAEQSLITVEGDKASMEVPAPFAGTVKEIKINTGDKVSTGSLIMIFEVAGAAPAAAPAQAAAPAAAAPAAAAGVKDVNVPDIGGDEVEVTEVMVKVGDKVAAEQSLITVEGDKASMEVPAPFAGTVKEIKISTGDKVKTGSLIMVFEVEGAAPAAAPAQAAAPAPAAAPAQAAKPAAAPAAKAEGKSEFAENDAYVHATPLIRRLAREFGVNLAKVKGTGRKGRILREDVQAYVKDAVKRAESAPAAAAGGGIPGMLPWPKVDFSKFGEVEEVELGRIQKISGANLSRNWVMIPHVTHFDKTDITDLEAFRKQQNAEAEKRKLDVKFTPVVFIMKAVAAALEQMPRFNSSLSEDGQRLTLKKYINIGVAVDTPNGLVVPVFKDVNKKSITELSRELTTISKKARDGKLTAGEMQGGCFTISSIGGLGTTHFAPIVNAPEVAILGVSKSAMEPVWNGKEFVPRLMLPISLSFDHRVIDGADGARFITIINNTLSDIRRLVM

SEQ ID NO: 59500 - protein, 475 aa, Klebsiella pneumoniae
MMSTEIKTQVVVLGAGPAGYSAAFRCADLGLETVIVERYSTLGGVCLNVGCIPSKALLHVAKVIEEAKALAEHGIVFGEPKTDIDKIRTWKEKVITQLTGGLAGMAKGRKVKVVNGLGKFTGANTLEVEGENGKTVINFDNAIIAAGSRPIQLPFIPHEDPRVWDSTDALELKSVPKRMLVMGGGIIGLEMGTVYHALGSEIDVVEMFDQVIPAADKDVVKVFTKRISKKFNLMLETKVTAVEAKEDGIYVSMEGKKAPAEAQRYDAVLVAIGRVPNGKNLDAGKAGVEVDDRGFIRVDKQMRTNVPHIFAIGDIVGQPMLAHKGVHEGHVAAEVISGLKHYFDPKVIPSIAYTEPEVAWVGLTEKEAKEKGISYETATFPWAASGRAIASDCADGMTKLIFDKETHRVIGGAIVGTNGGELLGEIGLAIEMGCDAEDIALTIHAHPTLHESVGLAAEVFEGSITDLPNAKAKKK

SEQ ID NO: 59501 - protein, 196 aa, Klebsiella pneumoniae
MEENTVLREDVLAEAIKILEIEGIANTSLEMVAERVSCPTSDLKRFWPDREALLYDALRYLSQQVDAWRRQLLLDETLSAEQKLLARYAALTTCVSNQRYPGCLFIAACTFYPDPQHPIHQLAEQQKQASLAYTHELLTQLEVDDPEMVAKQMELIVEGCLSRLLVKRSQTDVDTARRLAEDILRFAQCRMGGALT

SEQ ID NO: 59502 - protein, 397 aa, Klebsiella pneumoniae
MSTLLNPYFGEFGGMYVPQILMPALRQLEEAFVSAQKDPAFQAEFTDLLKNYAGRPTALTKCRNLTEGTRTTLYLKREDLLHGGAHKTNQVLGQALLAKRMGKTEIIAETGAGQHGVASALASALLGLKCRIYMGAKDVERQSPNVFRMRLMGAEVIPVHSGSATLKDACNEALRDWSGSYEKAHYMLGTAAGPHPFPTIVREFQRMIGEETKAQILEKEGRLPDAVIACVGGGSNAIGMFADFIEETNVGLIGVEPAGHGIESGEHGAPLKHGRVGIYFGMKSPMMQTADGQIEESYSISAGLDFPSVGPQHAFLNSTGRADYVSITDDEALDAFKALSRHEGIIPALESSHALAHALKMMRENPEKEQLLVVNLSGRGDKDIFTVHDILKARGEI

SEQ ID NO: 59503 - protein, 452 aa, Klebsiella pneumoniae
MQTVLAKIVADKAIWVEARKQQQPLASFQNEIVPTQRNFYDALAGTRTAFILECKKASPSKGLIREDFDPAAIASIYKHYASAISVLCDEKYFQGSFDFLPIVSQVAPQPILCKDFTIDPYQIYLARYYQADACLLMLSVLDDEQYRQLSAVAHSLNMGVLTEVSNEEELERAIVLKAKVVGINNRDLRDMSIDLNRTRQLAARLGPDVTVISESGIHTYAEVRELSHFANGFLIGSALMEQADLEAAVKRVLLGENKVCGLTRPQDARVAWESGAIYGGLIFVPTSPRAVNDAQAKAVIAAAPLQYVGVFRNAPLEEVAARAQALGLAAVQLHGDEDQAYIDALRDALADNVRIWKALSVGETFPARTLRHVDKYLLDNGQGGSGQRFDWSLLQDQDLRNVMLAGGLGADNCVEAAKSGCAGLDFNSGVESQPGIKDASKLASVFQTLRAY

SEQ ID NO: 59504 - protein, 531 aa, Klebsiella pneumoniae
MADILLLDNIDSFTYNLADQLRANGHNVVIYRNSVPAQALIERLGTMDNPVLMLSPGPGTPSEAGCMPELLTRMRGKLPIIGICLGHQAIVEAYGGYVGQAGEILHGKASSIEHDGQAMFAGLANPLPVARYHSLVGSNIPAGLTINANFNGMVMAVRHDADRMCGFQFHPESILTTQGARLLEQTLAWALQKLEHTNTLQPILEKLYQAETLSQQESHQLFSAVVRGEVKPEQLAAALVSMKVRGEQPQEIAGAATALLENAAPFPRPDYLFADIVGTGGDGSNSINISTASAFVAAACGLKVAKHGNRSVSSKSGSSDLLAAFGINLDMNADKSRAALDELGVCFLFAPKYHTGFRHAMPVRQQLKTRTLFNVLGPLINPAHPPLALIGVYSPELVLPIAETLRVLGYQRAAVVHSGGMDEVSLHAPTVVAELHNGEIKSYQLTADDFGLTPYHQAQLAGGTPEENRDILTRLLQGKGEAAHEAAVAANVAMLMRLHGHEDLKANAQQVLDVLHSGAAYDRVTALAARG

SEQ ID NO: 59505 - protein, 170 aa, Klebsiella pneumoniae
MCWKDVPPDMLLEKGGIIALLNLLIEHGLPAVDALRFATLNAAIRLQRHDLGLIAAGRRADLVVFDSLEKLVAREVYVGGKLLARAGNLLTPIAPAAGVTPPRDTLQIAPLRADDFILRVQGIRHGIARLRHIRGARFTQWGEVAFQHSGDDIRSAGLPIVSRINFDKPG

SEQ ID NO: 59506 - protein, 400 aa, Klebsiella pneumoniae
MTQFTSPVLHSLLDTDAYKLHMQQAVFHRYGDVHVAAEFRCRGDDLLGIYADAIREQVESMRDLRLRDDEYRWLSTLPFFRQDYLNWLRDFRYDPSQVTVSNDNGKLNIRLTGPWREAIMWEVPLLAVISELVHRYRSPEMGVDQALNTLEHKLGDFATMTADLDMSAFRLMDFGTRRRFSREVQEGIVRRLQQEPWFVGTSNYDLARRLNLTPMGTQAHEWFQAHQQISPSLASSQRAALAAWLEEYPDQLGIALTDCITMDAFLRDFGPEFATRYQGLRHDSGDPVEWGEKAIAHYQKLGIDPLSKVLVFSDNLDLAKAVDLYRHFASRVKLSFGIGTRLTCDLPQVKPLNIVIKLVECNGKPVAKLSDSPGKTICHDKAFVRALREAFDLPPIKKAS

SEQ ID NO: 59507 - protein, 871 aa, Klebsiella pneumoniae
MTQQPQAKYRHDYRAPEYLISDIDLTFDLDAAKTVVTAESKVSRHAAASDVPLRLDGEDLTLIALQVNGQPWSDYKEENNQLVIGGLPEHFTLTIVNEISPAANTALEGLYQSGEALCTQCEAEGFRHITWYLDRPDVLARFTTKIIADKAKYPFLLSNGNRMAEGELENGRHWVQWQDPFPKPCYLFALVAGDFDVLRDSFRTRSGREVALELYVDRGNLDRAPWAMTSLKNSMKWDEERFGLEYDLDIYMIVAVDFFNMGAMENKGLNVFNSKYVLARTDTATDKDYLDIERVIGHEYFHNWTGNRVTCRDWFQLSLKEGLTVFRDQEFSSDLGSRAVNRINNVRTMRGLQFAEDASPMAHPIRPDMVIEMNNFYTLTVYEKGAEVIRMLHTLLGEENFQKGMQLYFERHDGSAATCDDFVQAMEDASNVDLSHFRLWYSQSGTPIVTVHDDYNPETEQYTLTISQRTPPTAEQAEKQPLHIPFAIELYDNEGKVIPLQKGGHPVHPVLNVTQAEQTFVFDNVYFQPVPALLCEFSAPVKLEYKWSDQQLTFLMRHARNDFSRWDAAQSLLATYIKLNVNRHQQGQPLSLPVHVADAFRAILLDEKIDPALAAEILTLPSANEIAEMFAIIDPIAIAAVREALTRTLANELADEFLAVYNANKLDSYRVEHADIGKRALRNTCLRYLAFAEPTLGDKLVATQYHQADNMTDALAALSAAVAAELPCRDALMQEYDDKWHQDGLVMDKWFILQSTSPAANVVETVRGLLNHRSFSMSNPNRVRSLIGAFASSNPAAFHAEDGSGYQFLVEMLTELNQRNPQVASRLIEPLIRLKRYDEKRQALMRAALEQLKGLENLSGDLFEKISKALA

SEQ ID NO: 59508 - protein, 108 aa, Klebsiella pneumoniae
MKRDYIPDAGDIVWMDFNPQAGHEQAGHRPALVLSPAVYNGRIGLLLCCPMTTKIKGYPFEVRNGEGSAVLADQVKSLDWRERGAVKKGKVSAAVLAEVRSKLKVLIG

SEQ ID NO: 59509 - protein, 511 aa, Klebsiella pneumoniae
MQKSGVVMQQSTPYLSFRGITMTFPGVKALSDISFDCYPGQIHALMGENGAGKSTLLKILSGNYIPTAGHLQIGGQQMAFANTMEALNAGVAIIYQELHLIPEMTVAENIYLGQLPHRGGIVNRSLLNYEARLQLEHLGLDIDPETPLKYLSIGQWQMVEIAKALARNAKIIAFDEPTSSLSAREIDNLFRVIRELREEGRVIIYVSHRMEEIFALSDAITVFKDGRYVCTFDDMPSVSHDALVQAMVGRNLGDIYGWKPRPYGEERLRLEAVKAPGVRTPVSLSVRSGEIVGLFGLVGAGRSELMKGLFGGTQITGGQVYIDGQPVSIRKPAQAIQAGMMLCPEDRKAEGIIPVHSVRDNINISARRKHIHAGCLINNAWEADNADQHIQSLNIKTPGPEQLIMNLSGGNQQKAILGRWLSEEMKVILLDEPTRGIDVGAKHEIYNVIYGLAASGVAVVFASSDLPEVLGVADRIVVMREGQIAGELLHEEANEQQALSLAMPTVSQAVA

SEQ ID NO: 59510 - protein, 169 aa, Klebsiella pneumoniae
MAVPGMAQKLNTQMNLEFHASNVYLNLSEWCARHRFDGAATFLRTRAQSSITLTMRVFDYLKKAGSWPIVNPDHACNPECTSLEDLFTQTLSDYQQRSRLLSGLAQEAKAQSDDSTWRFLTLLAEEQQQDGLLLQSVLEEIRNADKAGLGMEQTDRRLMAIVGEAQKAH

SEQ ID NO: 59511 - protein, 456 aa, Klebsiella pneumoniae
MDKNSSDGVPLPQRYGAILTIVLGLTMAVLDGAIANVALPTIASDLNASPAASIWIVNAYQIAIVIALLPLSFLGDMVGYRRIYKIGLVVFIFTSLACALSRSLEMLTFARVAQGLGGAALMSVNTALIRLIYPQRFLGRGMGINSFVVAVSSAAGPTIAAAILSLASWQWLFLINVPLGIVAFVLAMRFLPPNSARSKIIRFDLPSAIMNALTFGLLITALSGFAQGQSTQLVLAEVAAMLVVGFFFVRRQLTMPVPLLPVDLLRIPLFSLSICTSICSFCAQMLAMVSLPFFLQSMMGRSEVETGLLLTPWPLATMVMAPLAGYLIEKCHAGLLGAIGLLIMACGLFGLALLPSSPSDLDIIWRMALCGAGFGLFQSPNNHTIVASAPSHRSGGASGMLGTARLLGQSTGAALVALLFNLLGNNGTHTALLLAGTLAIVAALISGLRVTQPRAA

SEQ ID NO: 59512 - protein, 282 aa, Klebsiella pneumoniae
ITGHTELIGLIATPIRHSMSPTMHNEAFAHLGLDYVYLAFEVGNQELKDVVQGFRAMKLRGFNVSMPNKTEICQYLDKLSPAAQLVGAVNTVVNDDGVLTGHITDGTGYMRALSEAGIDIIGKKMTVLGAGGAATALCVQAALDGVKAISIFNRRDKFFANAEETVAKIRHNTDCEIHLFDLDDHDKLRAEIDSSVILTNATGVGMKPFEGQMLLPDDSFLRPDLIVSDVVYNPRKTHLLEVAEKKGCRTLNGLGMMLWQGARAFEIWTGKQMPVDYIKSIL

SEQ ID NO: 59513 - protein, 466 aa, Klebsiella pneumoniae
MAKTLYEKLFDAHVVYEAQNETPLLYIDRHLVHEVTSPQAFDGLRAHGRQVRQPGKTFATMDHNVSTQTKDINASGEMARIQMQELIKNCKEFGVELYDLNHPYQGIVHVMGPEQGVTLPGMTIVCGDSHTATHGAFGALAFGIGTSEVEHVLATQTLKQGRAKTMKIEVQGKAAPGITAKDIVLAIIGKTGSAGGTGHVVEFCGEAIRDLSMEGRMTLCNMAIEMGAKAGLVAPDETTFNYVRGRLHAPKGKDFDDAVAYWKTLKTDDGATFDTVVTLQAAEIAPQVTWGTNPGQVISVTDNIPDPASFSDPVERASAEKALAYMGLKSGIPLTEVAIDKVFIGSCTNSRIEDLRAAAEIAKGRKVAPGVQALVVPGSGPVKAQAEAEGLDKIFIEAGFEWRLPGCSMCLAMNNDRLNPGERCASTSNRNFEGRQGRGGRTHLVSPAMAAAAAVTGHFADIRNLK

SEQ ID NO: 59514 - protein, 173 aa, Klebsiella pneumoniae; identical to SEQ ID NO: 43417

SEQ ID NO: 59515 - protein, 163 aa, Klebsiella pneumoniae
MKKITTLAVSLLTAACMSAGALAADQPLEKVAPFPKAEKGMKRQVIQLPQQQDESALKVELMIGQTLEVDCNHHRLGGELESKTLEGWGYDYYVFEKLSGPVSTMMACPDGKKEKKFVTAGLGDDAMLRYNSKLPIVVYTPSNVDVKYRIWRADETIGNAVVR

SEQ ID NO: 59516 - protein, 544 aa, Klebsiella pneumoniae
MNKKMAVPRSQAVGPNSTRTNTRHEQETDVLLIGGGIMSATLGTWLQELEPDWSITMVEQMSSVAEESSNGWNNAGTGHAALMELNYTPQTANGINIDKAVDINEAFHISRQFWAHQVTRGVLNKPKSFINSVPHMSFVWGEDNVNFLRARYAALQQSELFRGIRYSEDHQQIKAWAPLVMEGRDLLQKVAATRSEVGTDVNYGEITRQLIAGLQKHDNFSLQLGTVVRRFKRNADKSWTVTLADADNRRQKRVIKAKFIFIGAGGAALTLLQETGIPQAKEYAGFPVGGQFLVCENPEVVNHHLAKVYGQAEVGAPPMSVPHIDTRIIDGKRVVLFGPFATFSTRFLKNGSLWDLLASTNTSNILPMLNVGLDNFDLVKYLISQVMQKDKDRLAALCEYYPEARKEDWRLWQAGQRVQIIKRDAKKGGVLRLGTEVVSDDEGTVAALLGASPGASTAAPIMLQLMEKVFKDKVNSPEWQAKLKAIIPTYGIRLDGNPAEIEKALAWTSEVLELKYEPAGAVDEVPQAELKPLSGGKPMADIAL

SEQ ID NO: 59517 - protein, 478 aa, Klebsiella pneumoniae
MSVLHKKSARLRDEERARLIWLLSTDKAVTSALLGKLTLAERYDEGTLADDLAEVEMLVSHLPPPDLADALEALPYDARTALWCLVPDDKRGEVLLEASENVWGDLIDKMSDPELLQAMQPLDIDEQVYLLQHLPRNLTGRLLATLPAEKRARIRQIMRYADNSVGSIMEFEVITVRPEATLAAVQRYLRRLGKMPENTDKLFVTTRNKLLLGELELQTILLNDAQKRVGEVMEGDPVTFQPHEEAEKVARTFERDDLLSAAVIDADGKLIGRLTIDEIVDVVYEETDNDLRRMGGLSDEEDVFAPVSKAVKTRWAWLAVNLCTAFIASRVIDGFEHTISQLVALASLMPIVAGIGGNTGNQTITMIVRAMALQQIQPGSFTFLILREMGVALINGLVWGGIMGAITWWLYDDPQLGGVMTLAMMLNLLMAAMMGVIIPMVMVKLGRDPAVGSSVMITAITDTGGFFIFLGLATLFLM

SEQ ID NO: 59518 - protein, 269 aa, Klebsiella pneumoniae
MPELPEVETSRRGIEPHLVGATILHAVVRNGRLRWPVSEEIYRLSDVPVLSVRRRAKYLLLELPDGWIIVHLGMSGSLRILSEELPAEKHDHVDLVMSNGKVLRYTDPRRFGAWLWTRTLEGHPVLAHLGPEPLSDAFNADYLQQKCAKKKTAIKPWLMDNKLVVGVGNIYASESLFSAGIHPDRLASSLSREECEQLVKVIKLVLLRSIEQGGTTLKDFLQSDGKPGYFAQELQVYGRKGEPCRICGTPVVGTKHAQRATFYCRQCQK

SEQ ID NO: 59519 - protein, 375 aa, Klebsiella pneumoniae
MSKFRLALVRQKYRPDGGAERFVSRALEALDSSHLQLNVITREWQGPVKPDWQIHICNPRKWGRISRERGFANAARALWQRESFDLVQSHERIPGCDLYRAGDGVHRRWLQQRSRILPAWKSRLLFADRYHRYVMQAEREMYEDSHLRGVICNAEMIKREIIEDFGLPAEKIHVIYNAIDNQRFLPPDEETFAALRAKWQLPLQATCLIYVGSGFERKGLAAAIRAIAPTDRYLLVVGKDKDQPRYQALAKSLNCEARVRFFGMQSETLPFYQMADGLLLPTLYDPFPNVILEAMACGLPVITTTGCGGAEFIVDGHNGYVCDALDIPALQQAVMALPARALGSAEGGHARERIMACTSERLSTQLLSLYQDLVK

SEQ ID NO: 59520 - protein, 55 aa, Klebsiella pneumoniae
MAKGIREKIKLVSSAGTGHFYTTTKNKRTKPEKMELKKYDPVVRQHVIYKEAKIK

SEQ ID NO: 59521 - protein, 78 aa, Klebsiella pneumoniae [sequence omitted]

SEQ ID NO: 59522 - protein, 875 aa, Klebsiella pneumoniae
MSKSTAEIRQAFLDFFHSKGHQVVASSSLVPHNDPTLLFTNAGMNQFKDVFLGLDKRNYSRATTAQRCVRAGGKHNDLENVGYTARHHTFFEMLGNFSFGDYFKQDAIKYAWELLTGENWFALPKEKLWVTVYETDDEAFDIWANEVGVPRERIIRIGDNKGAPFASDNFWQMGDTGPCGPCTEIFFDHGDHIWGGPPGSPEEDGDRYIEIWNIVFMQFNRQADGTMEPLPKPSVDTGMGLERIAAVLQHVNSNYDIDLFRDLIASVAKVTGATDLTNKSLRVIADHIRSCAFLVADGVIPSNENRGYVLRRIIRRAIRHGNMLGAKDTFFWKLVAPLIDVMGSAGDELKQQQAQVEQVLKTEEEQFARTLERGLALLDEELSKLKGDTLDGETAFRLYDTYGFPVDLTADVCRERNIKVDEAGFEAAMEEQRRRARESSGFGADYNAMIRVDGASEFKGYDHLELNGKVTALFIDGKAVDSVSAGQEAVVILDQTPFYAESGGQVGDKGELKGAGFSFAVSDTQKYGQAIGHIGKVASGSLKVGDAVQADVDEARRQRIRLNHSATHLMHAALRQVLGTHVAQKGSLVNDKALRFDFSHFEAMKPEEIRAVEDLVNTQIRRNLAIETNIMDIDAARASGAMALFGEKYDDRVRVLRMGDFSTELCGGTHAARTGDIGLFRITSESGTAAGVRRIEAVTGEGAMAILHAQSDQLNDIAQLLKGDSHNLGEKVRAALERTRQLEKELQQLKEQAAAQESANLSSKAEEINGVKLLVSELTGVEPKMLRTMVDDLKNQLGSTIVVLATVADGKVSLIAGVSKDVTDRVKAGELVGMVAQQVGGKGGGRPDMAQAGGTDASALPAALASVKGWVSAKL

SEQ ID NO: 59523 - protein, 356 aa, Klebsiella pneumoniae
MLKRRYLALLPLCVLLAACSSKPKTPAETEMASGTGGFLLEPQHNVMQMGGDFANNPAAAQFIDKMVAKHGFDRQQLQEILSQAKRLDYVLRLMDRQAPTGLPPTGPTGAWLRYKKQFITPDNVQNGVVFWNQYQDALNRAYQVYGVPPEIIVGIIGVETRWGRVMGKTRILDALATLSFSYPRRAEYFSSELETFLLMARSESDDPLDLKGSFAGAMGYGQFMPSSYKQYAVDFNGDGHINLWDPVDAIGSVANYFKQHGWVSGDLVAVQALGQAPGLENGFKTKYSVSQLAAAGLTPTQPLGNHQQASLLRLDVGTGYEYWYGLPNFYTITRYNHSTHYAMAVWQLGLAVAQAR

SEQ ID NO: 59524 - protein, 166 aa, Klebsiella pneumoniae
MTEPSSRRSGYARLLDRAIRILAMRDHSEQELRRKLVAPVMSKNGPEALDATPDELEQVVAWCIENRYLDDNRFVGQFIASRSRKGYGPARIRQELSQKGIARQVVDQAMRKCDIDWVSLAREQAQRKYGEPLPSAFTEKVKVQRFLLYRGYLMEDIQEIWRNFAD

SEQ ID NO: 59525 - protein, 352 aa, Klebsiella pneumoniae
MAIDENKQKALAAALGQIEKQFGKGSIMRLGEDRTMDVETISTGSLSLDIALGAGGLPMGRIVEIYGPESSGKTTLTLQVIAAAQREGKTCAFIDAEHALDPVYARKLGVDIDNLLCSQPDTGEQALEICDALARSGAVDVIVVDSVAALTPKAEIEGEIGDSHMGLAARMMSQAMRKLAGNLKQSNTLLIFINQIRMKIGVMFGNPETTTGGNALKFYASVRLDIRRIGAVKEGDNVVGSETRVKVVKNKIAAPFKQAEFQILYGEGINFYGELVDLGVKEKLIEKAGAWYSYNGDKIGQGKANAITWLKENPAAAKEIEKKVRELLLNNQDAKPDFVVDGNDAEETEQDF

SEQ ID NO: 59526 - protein, 292 aa, Klebsiella pneumoniae
SRADVADLIYFMAIARHRSFSRAAIELGVSASALSHALKGLETRLGVRLLNRTTKSVTPTAAGEELVQSVLQPFDTIEGALESLNRYRNTPTGRIRINAAVEAANLLLAPVMPAFMDRYPDIEIDIVASNRMVDVTDAGFDAGIRYGGTVPEDMVARRLSADIRWVIAASPDYLERYGTPEHPDDLLHHRCISNRLGDDRVYRWELARDGETYQMTVPGSVTVNHAETGLVAVLGGAGLMYFPEPLVAPYVKDGRLRLVLTEWSPLEEGFHIYYSSRRQCRPGLRLLIEFIQ

SEQ ID NO: 59527 - protein, 91 aa, Klebsiella pneumoniae; identical to SEQ ID NO: 43000

SEQ ID NO: 59528 - protein, 167 aa, Klebsiella pneumoniae; identical to SEQ ID NO: 56103

SEQ ID NO: 59529 - protein, 231 aa, Klebsiella pneumoniae
MPAIAPLASPPQSQEQLLAQARQLAGYSLGELAALAGIPIPRDLKRDKGWTGILLELWLGASAGSKPEQDFAALGVELKTIPIDSRGRPLETTFVCVAPLTGNSGVTWESSHVRHKLQRVLWIPVEGERTIPLAARRVGAPLLWSPDEDEERQLRMDWEELMDLIVLGEVERITARHGEVLQLRPKAANSKALTEAIGARGETILTLPRGFYLKKNFTAALLARHFLLQHD

SEQ ID NO: 59530 - protein, 257 aa, Klebsiella pneumoniae
MEKAIVPPEKKPYQEIGDDLRAQIAQGRYPVGSRLPPERHIAETYGVSRTIVREALLMLELQGTVDIRQGSGVYVMRIPHENDSEEEQLLSSDVGPFEILQARQLLESNIAAFAAKMATRADIDNLKRIIEQEQRAIALNDTAQDNARLFHLVLAGATQNQMLLATVERIWLQMDSSPLWQQFNVHIASRAWRLKWLGDRQTLLAALRRRDVMGAWQAMWQHLENVKNSLLELSDEDAPDFDGYLFDSVPIFQGKLV

SEQ ID NO: 59531 - protein, 1046 aa, Klebsiella pneumoniae
  MISC_FEATURE (637)..(637): X=any amino acid
LKSHSHIAAIDIPLSGKEKAWLAAQPTLTVGTWLPERTPIVYDGDEKSYQGINADYLALMAHSLGLKVIIRQYDTEQQALTALADRQVDTLLTQVAHRDALAPGLDQSAPLLKTWPTLVTSLKSPLPPLTTDRRVTLACTRDCAFFDIIQQAFPNAKITLYDSDYQALASVVSGENQYFIGNNITTGHCISKYFSQSLVIAHYFRQQEQHNRFVTRDDRPELHQLLDRFIHAVDSDTAMRIMQNWLNRGDLSFLNTPLTFSPEELRWLQKHRRVRLLVNPYFPPFTLVDNEDELRGIMADMLNIVSLQTGLQFDPILVRNRQALAKRMEKEDWAIMPAATLIPQPQAYVTLSDPLINVAFVLVARGSAPDQHLLTRSARIALPVGPIAAHDLKARFPLINWVETDNVGVAMKMVEEGEVDAAVASELSARYMIDHYYPQGLHYTRIDGLPVAAIRLAIPRDEPVLAAILNKALQVIPPRDILQMTEKWSKISSQQIENWSQYSRQFYQLIAFALVLIAISLGWGLSLCREVRKRKDSQQRLEEELAQKEALSCALEREKDKAIQATKAKSRFLASMSHELRTPVSAIVGFLELLAKPELNVSQRKEAIELAGSTAQTLLGLIGNILDIDKIESGKYXVTPQWSDVAQLVSQQCHTFDALAQQKGIDLHYHNALQEGTMLWVDPQALRQILNNLIGNALKFTVEGAIQVSCRLTPANETQGELALMVSDSGCGISEAEQATLFHRYAQARQGRQQTGSGLGLVICKELVALMQGRLEMVSRPGVGTTFTITLPVKASRCAIHAPQASPARPQALPGLAILIADDHPTNRLLLKRQLSTIGYSVDEACDGEEAENKLASKHYDLLITDLNMPKKDGLALAASLRRRYPGLVIWGVTASALPQSREACLASGMNMCLFKPVSVQTLSHELSRLAVGRASPHATRHLKLSVLSENTGGDQALMNEMLETFRDASAADLQAAGQAIARHEPQIFLRALHRLHGSAQILGITALQQLCAPFEAKRPDSLTPASCLEVVQRITGVMREIDGEI

SEQ ID NO: 59532 - protein, 337 aa, Klebsiella pneumoniae
MTMIETAKAPQAQSHSGLLLDVKDLRVTFKTPDGDVTAVNDLNFTLQAGETLGIVGESGSGKSQTAFALMGLLAANGRIGGSATFNGRQILNLPERELNKLRAEQISMIFQDPMTSLNPYMRVGEQLMEVLMLHKGLSKAEAFEESVKMLDAVKMPEARKRMKMFPHEFSGGMRQRVMIAMALLCRPRLLIADEPTTALDVTVQAQIMTLLNELKREFNTAIIMITHDLGVVAGICDKVLVMYAGRTMEYGQARDVFYQPSHPYSIGLLNAVPRLDAEGDALLTIPGNPPNLLRLPKGCPFQPRCPHAMEQCSSAPPLESFAPGRLRACFKPVGDLL

SEQ ID NO: 59533 - protein, 277 aa, Klebsiella pneumoniae
MGMLSAARLRLYHLLFDQNRRSGRRFEGLCGLFALLSVLVIFIESGLGTQYHLTLDEWHIFVWLELLVTAVFTLEYLLRIATWPNPLHYIFSFWGLIDLATILPLYVMWLWPEISLNYVFAWRAMRAIRALRILKLLRFMPSLNVFWRAIVSARHQLILFYSFIAIVMVIFGSLMYLIEGPEYGFTTLNASVYWAIVTITTVGYGDITPHTPLGRILASILILIGYSIIAIPTGLITTHMTSALNRRRQQRLCPQCQQGDHDDNARFCHACGHALPK

SEQ ID NO: 59534 - protein, 215 aa, Klebsiella pneumoniae
MFSISPVFFWANIYVPADFEDYCVNTLKKTALLSVLALYIPVSQAAAKEYSLDPQHTSVVISWNHFGFSNPTAYVSDVSGKLAFDKENPEKSSVNVTLPVKTIDAHVKALTDEFLGKEYFDVKTFPDATFQSTKVESKGDNKYDVEGNLTIKGITKPVVLHAVLNKQDMHPMVKKEAIGFDATGVIKRSDFKLDKYVPAVSDNVTITLSTEAYAK

SEQ ID NO: 59535 - protein, 220 aa, Klebsiella pneumoniae
MAFRDQPLGELALTIPRASALFRQYDMDYCCGGKQTLARAASRKALDVAVIEAELAKLAEQPLSRDWRAAPLAEIIDHIIVRYHDRHREQLPELILQATKVERVHADKPNVPKGLTKYLTMLHQELSSHMMKEEQILFPMIKQGMGAQAGRPISVMESEHDEAGELLEVIKHITHNVTPPPEACTTWKAMYNGINEMIDDLMEHISLENNVLFPRALGGK

SEQ ID NO: 59536 - protein, 149 aa, Klebsiella pneumoniae
MGSLNFVKEAGEKIWDAVSGDSKEDRAEKLKKHIDGLNLPGAEKVNIDVAEDGTATVTGDVASQEDKEKILVAVGNVTGVGQVSDGVKVTQSGAESRFYTVKSGDTLSAISKAIYGSANEYQRIFEANKPMLTHPDKIYPGQVLIIPAK

SEQ ID NO: 59537 - protein, 346 aa, Klebsiella pneumoniae
LPVGVSSGYVMTVLGPLPINEMGVTLMHEHILLDASGKWVPPCCCSDRHLAEMPVKMENLGELSLNPLMSRDNCQLFDVDVAIDELTKYRALGGETVVDPTNIGIGRDPKALARIARVTGLNIIMGTGLYLEPSHPEWVKISSVEQLTERLIYDLGGAEEKPEVLAGLIGEIGISSRFTPDEEKSLRAAGRASAATGVPIEVHLPGWERLGHRVLDILEQEGADLRHTVLCHMNPSFADKRYQRELAQRGAFLEYDMIGMSYYYADESAQSPSDEENARAIRELIDDGYIQQILLSQDVFLKTMLTRYGGHGYGYILKHFVPRLRRHGVSGEQLETLMIGNPQRVF

SEQ ID NO: 59538 - protein, 144 aa, Klebsiella pneumoniae
MSLREAIEKAEEAGVDLVEISPNAEPPVCRIMDYGKFLYEKSKSSKEQKKKQKVIQVKEIKFRPGTDEGDYQVKLRSLIRFLEDGDKAKITLRFRGREMAHQQIGMEVLNRVKDDLVELAVVESFPTKIEGRQMIMVLAPKKKQ

SEQ ID NO: 59539 - protein, 65 aa, Klebsiella pneumoniae [sequence omitted]

SEQ ID NO: 59540 - protein, 118 aa, Klebsiella pneumoniae
MARVKRGVIARARHKKILKQAKGYYGARSRVYRVAFQAVIKAGQYAYRDRRQRKRQFRQLWIARITAAARQNGISYSKFINGLKKASVEIDRKILADIAVFDKVAFTALVEKAKAALA

SEQ ID NO: 59541 - protein, 327 aa, Klebsiella pneumoniae
MSHLAELVASAKAAINEASDVAALDNVRVEYLGKKGHLTLQMTTLRELPPEERPAAGAVINEAKEQVQQALNARKAELEGAALNARLAAETIDVSLPGRRIENGGLHPVTRTIDRIESFFGELGFTVATGPEIEDDYHNFDALNIPGHHPARADHDTFWFDATRLLRTQTSGVQIRTMENQQPPIRIIAPGRVYRNDYDQTHTPMFHQMEGLIVDKNISFTNLKGTLHDFLNNFFEEDLQVRFRPSYFPFTEPSAEVDVMGKNGKWLEVLGCGMVHPNVLRNVGIDPEVYSGFAFGMGMERLTMLRYGVTDLRAFFENDLRFLKQFK

SEQ ID NO: 59542 - protein, 328 aa, Klebsiella pneumoniae
MLTLAHLQQRRSRRWLFGLTLLLLVTLLISLCAGEQWIPPGEWLSAKGQLFIWQIRLPRTLAVLLVGAALALSGAIMQALFENPLAEPGLLGVSNGAGVGLIAAVLLGKGVLPGWALGLCAIFGALLITFILLRFARRHLSTSRLLLAGVALGIICSALMTWAVYFSTSFDLRQLMYWMMGGFGGVDWQQLWLMIALLPVLCWVCLQSQPLNLLALGEVSARQLGLPLWLWRKLLVVATGWMVGVSVALAGAIGFIGLVIPHILRLCGLSDHRVLLPACMLAGASALLGADIIARLALSAAELPIGVVTATLGAPVFIWLLLRSRGRG

SEQ ID NO: 59543 - protein, 795 aa, Klebsiella pneumoniae
MKFSELWLREWVNPAIDSEALSDQITMAGLEVDGVEPVAGSFNGVVVGEVVECGQHPNADKLRVTKVNVGGERLLDIVCGAPNCRQGLKVAVATIGAVLPGDFKIKAAKLRGEPSEGMLCSFSELGISDDHSGIVELPADAPIGTDIREYLKLDDNTIEISVTPNRADCLGIIGVARDVAVLNKAPLNAPEITPVAATIDDVLPIQVDAPQACPRYLGRVVKGINVKAPTPLWMKEKLRRCGIRSIDAVVDVTNYVLLELGQPMHAFDRDRIEGGIVVRMAKEGETLVLLDGSEAKLDSDTLVIADHNKALAMGGIFGGEHSGVNDETQNVLLECAFFSPLSITGRARRHGLHTDASHRYERGVDPALQYKALERATRLLIDLCGGEAGPVIDVTSKENLPTRATITLRRSKLDRLIGHHIADAQVTDILQRLGCEVTVGEGEWQAVAPSWRFDMEIEEDLVEEVARVYGYNNIPDEPVQAGLIMGTHREADLSLKRVKTLLNDKGYQEVITYSFVDPKVQQLIHAGEEALILPSPISSEMSAMRLSLWTGLLGTVVYNQNRQQSRVRIFESGLRFVPDTNAPLGIRQDVMLAGAICGNRYEEHWTLAKETVDFYDLKGDLEAVLDLTGKLADIEFRAEATTALHPGQSAAIYLKGERIGFIGVVHPELERKLDLNGRTLVFELEWNKLADRVVPQARDISRFPANRRDIAVLVAENVAAADVLAECKKVGVNQVVGVNLFDVYRGKGVAEGYKSLAISLILQDTSRTLEEEEIAATVARCVEALKERFQASLRD

SEQ ID NO: 59544 - protein, 482 aa, Klebsiella pneumoniae
MQLNDMTLFRQQALIDGQWRDAPNGDVIAVTNPANGEQLGSVPKMGADETREAIEAANRALPAWRALTAKERANILRRWFDLMMENQDDLARLMTLEQGKPLAEAKGEISYAASFIEWFAEEGKRIYGDTIPGHQADKRLLVIKQPIGVTAAITPWNFPAAMITRKAGPALAAGCTMVLKPASQTPFSALALAELANRAGIPAGVFNVVTGSAGAVGGELTSNPLVRKLSFTGSTEIGRQLMEQCAKDIKKVSLELGGNAPFIVFDDADLDKAVEGALASKFRNAGQTCVCANRLYVQDGVYDRFAEKLQQAVEKLRIGDGLQDGVTTGPLIDEKAVAKVEEHIADAIAKGAKVVTGGKPHALGGNFFQPTILVNVPDSAKVAKEETFGPLAPLFRFKDEADVIAQANDTEFGLAAYFYARDLSRVFRVGEALEYGIIGINTGIISTEVAPFGGVKASGLGREGSKYGIEDYLEIKYMCIGL

SEQ ID NO: 59545 - protein, 59 aa, Klebsiella pneumoniae
MVRNGKSTAGHQRYLCSHCRKTWQLQFTYTASQPGTHQKIIDMAMNGVGCRATDPHYGR

SEQ ID NO: 59546 - protein, 466 aa, Klebsiella pneumoniae
MGQLSQSQDLGAGLKSRHVTMLSIAGVIGASLFVGSSVAIAEAGPAVLLAYLFAGLLVVMIMRMLAEMAVATPDTGSFSTYADKAIGRWAGYTIGWLYWWFWVLVIPLEANIAAIILHSWVPGVPVWLFSLVITLALTGSNLLSVKNYGEFEFWLALCKVIAILAFIVLGAVAITGFYPYAEVSGISRLWDHGGFMPNGFGAVLSAMLITMFSFMGAEIVTIAAAESDTPDKHIVRATNSVIWRISIFYLCSIFIVVALIPWNMPGLKSIGSYRSVLELLHIPYAKLIMDGVILLSVTSCLNSALYTASRMLYSLSRRGDAPAIMGRTNSSKTPYVAVLLSTGAAFLTVVVNYYAPAKVFKFLIDSSGAIALLVYLVIAVSQLRMRKILQAQGGEIRLRMWLYPYLTWLVIAFITFVLVVMLFRPAQQLEVISTGLLALGIICTVPIMSRWKKLVLWQKLPLQNTR

SEQ ID NO: 59547 - protein, 209 aa, Klebsiella pneumoniae
MNWQLISFFGDSTVLLPSAAALFIVLMLRKTSRLLAWQWSLLFGITGAIVCASKLAFMGWGLGIRELDYTGFSGHSALSAAFWPIFLWLLSARFSAGWQKAAVATGYILAAVVGYSRLVIHAHSVSEVIAGLLLGAAGSALFLVLQKRTSDPESVNISWGGVACLVMVPLILLHSGSKAPTQSLLGQIATAVGPLDKPFTRTDLHKQAW

SEQ ID NO: 59548 - protein, 472 aa, Klebsiella pneumoniae
LSAWRRSAKVAPLLHRHGDFATMFIGFDYGTANCSVAVMRENTPQLLTLENGSALLPSMLCAPTREAVSEWLYRHHDVPTHSDENQALLRRAIAANRDEDIEVLRNSVQFGLASLQQYVEDPQEVYFVKSPKSFLGASGLKPQQVALFEDLVCAMMLHIKLQAESQLPEQIDQAVIGRPINFQGLGGDEANAQAQGILERAAHRAGFRDVVFQFEPVAAGLDFEATLSEEKRVLVVDIGGGTTDCSLLLMGPQWRERADRQQSLLGHSGCRIGGNDLDIALAFKCLMPLLGMGGETEKGTALPILPWWNAVAINDVPAQSDFYSTANGRLLNDLLRSARDADKVALLLKVWRQRLSYRLVRSAEESKIALSSAASVETALPFIQDDLATAIAQQGLEAALDQPLTRIMEQVRLALDSSQTTPDVIYLTGGSARSPLIKKALAAQLPGIPLAGGDDFGSVTAGLARWAQVVFR

SEQ ID NO: 59549 - protein, 241 aa, Klebsiella pneumoniae
MHTPVLFEHPLNEKMRTWLRIEFLIQQMAFRPQIASHADALHFFRNAGDLLDVLERGEVRTDLVKELERQQRKLQSWAEVPGVDQERINELRHQLKQSSSTLMAAPRIGQFLREDRLIALVRQRLSIPGGCCSFDLPTLHIWLHMPQAHRDEQVASWLASLDPLVQSLSLILDLIRNSALFRKQTSLNGFYQDNGEDADLLRLRLDLAHQLYPQISGHKSRFAIRFLALDSEYGIVPERFD

SEQ ID NO: 59550 - protein, 259 aa, Klebsiella pneumoniae
MAYSKIRQPKLSDVIEQQLEFLILEGTLRPGEKLPPERELAKQFDVSRPSLREAIQRLEAKGLLLRRQGGGTFVQSRLWQSFSDPLVELLSDHPESQFDLLETRHALEGIAAYYAALRSNDEDRDRIRELHQAIERAQQSGDLDAESGAVVQYQIAVTEAAHNVVLLHLLRCMEPMLAQNVRQNFELLYARREMLPLVSNHRTRIFEAIMAGEPEQAREASHRHLAFIEEILLDRSREQSRRERSLRRLQQRKDENSGS

SEQ ID NO: 59551 - protein, 402 aa, Klebsiella pneumoniae
MCELDILHDSLYQFCPELHLKRLNSLTLACHALLDCKTLTLTELGRNLPTKARTKHNIKRIDRLLGNRHLHKERLAVYRWHASFICSGNTMPIVLVDWSDIREQKRLMVLRASVALHGRSVTLYEKAFPLSEQCSKKAHDQFLADLASILPSNTTPLIVSDAGFKVPWYKSVEKLGWYWLSRVRGKVQYADLGAENWKPISNLHDMSSSHSKTLGYKRLTKSNPISCQILLYKSRSKGRKNQRSTRTHCHHPSPKIYSASAKEPWILATNLPVEIRTPKQLVNIYSKRMQIEETFRDLKSPAYGLGLRHSRTSSSERFDIMLLIALMLQLTCWLAGVHAQKQGWDKHFQANTVRNRNVLSTVRLGMEVLRHSGYTITREDSLVAATLLTQNLFTHGYVLGKL

SEQ ID NO: 59552 - protein, 240 aa, Klebsiella pneumoniae
VLSIQDLHVAVEDKAILRGLNLEVRPGEVHAIMGPNGSGKSTLSATLAGREDYEVTGGRVEFKGKNLLELAAEDRAGEGIFMAFQYPVEIPGVSNQFFLQTALNAVRNYRGQEALDRFDFQDLMEEKIKLLQMPEDLLTRSVNVGFSGGEKKRNDILQMAVLEPELCILDESDSGLDIDALKIVSQGVNALRDGKRAFIIVTHYQRILDYIKPDYVHVLYQGRIVKSGDFSLVKQLEEQG

SEQ ID NO: 59553 - protein, 413 aa, Klebsiella pneumoniae
MTSSRVENSSSRAARKVKLALMGPAFVAAIGYIDPGNFATNIQAGASFGYQLLWVVVWANLMAMLIQVLSAKLGIATGKNLAEQIRDHYPRPVVWFYWVQAEIIAMATDLAEFIGAAIGFKLVLGVSLLQGAVLTGVATFLILMLQRRGQKPLEKVIGGLLLFVAVAYVVELIFSQPALAPLTKGLVIPTLPNGEAVFLAAGVLGATIMPHVIYLHSSLTQHLHGGTRKERYNATRWDVAIAMTIAGFVNLAMMATAAAAFHFNGHTGVADLDQAYMTLEPLLSHAAATIFGLSLIAAGLSSTVVGTLAGQVVMQGFIRFHIPLWFRRAITMLPSFVVILLGLDPTRILVMSQVLLSFGIALALVPLLIFTSNAKLMGDLVNTRWVRGIGWAIVAIVVSLNGWLIVGSLLGVD

SEQ ID NO: 59554 - protein, 330 aa, Klebsiella pneumoniae
MVYQASTTRYQTMEYRRCGRSGLQLPAISLGLWHNFGDETRVETSRQMLLHAFDLGITHFDLANNYGPPPGSAESNFGRILKESLLPYRDELIISTKAGYTMWDGPYGDWGSRKYLVASLNQSLKRMGLEYVDIFYHHRPDPQTPLMETMRALDHLVRQGKALYVGISNYPLAQAREAVKILNDLGTPCIIHQPRYSMFERGVEEGLLDFLQTEGIGSIAFSPLAGGQLTDRYLNGIPADSRAASSSRFLQPEQLTPARLEKIRQLNRQAEARGQKLSQMALAWVLREEKVTSVLIGASKTAQLDDAVGMLQNRHFTTEECTAIDAILAL

SEQ ID NO: 59555 - protein, 411 aa, Klebsiella pneumoniae
MLHPRARTMLILSVPAILIGIACSLILIVAMKVAALLQRVLWSNLPAQLGVSADSPLWIIAMLTATGIAVGLVIRYSPGHAGPDPATESLIGAPIATGALPGLLAALILGLAGGVSLGPEHPIMVVNIALAVAVGSRLFPRVSSLDWTILAASGTIGALFGTPVAAALIFSQTLNSSNDTPLWDRLFAPLLAAAAGALTTDLFFHPHFSLPIPHYGQMRFVDILSGIIVALIAIAVGMVAVWCLPRLHALMHRLKNPILTLGIGGLLLGIVGTIGGPLTLFKGLDEMQQLAFSQTLTAADFLLIALVKLAALVLASASGFRGGRIFPAVFVGVALGLMLHAHVDAVPAAITVSCAILGMVLVVTRDGWLSLFMAAVVVPDTTLLPLLCMVMLPAWLLLAGRPLMIAKRHTD

SEQ ID NO: 59556 - protein, 404 aa, Klebsiella pneumoniae
MAESSPERRFTRIDRLPPYVFNITAELKMAARRRGEDIIDFSMGNPDGATPPHIVEKLCTVAQRPDTHGYSTSRGIPRLRRAISRWYEERYNVDIDPESEAIVTIGSKEGLAHLMLATLDHGDTVLVPNPSYPIHIYGAVIAGAQVRSVPLVEGVDFFNELERAIRESYPKPKMMILGFPSNPTAQCVELDFFEKVVALAKQYDILVVHDLAYADIVYDGWKAPSIMQVPGARDVAVEFFTLSKSYNMAGWRIGFMVGNKTLVNALARIKSYHDYGTFTPLQVAAIAALEGDQQCVRDIAEQYKRRRDVLVKGLHEAGWMVECPKASMYVWAKIPEPYAAMGSLEFAKKLLNEAKVCVSPGIGFGDYGDTHVRFALIENRDRTRQAIRGIKAMFRADGLLASAS

SEQ ID NO: 59557 - protein, 83 aa, Klebsiella pneumoniae
MASVSISCPSCSATDGVVRNGKSTAGHQRYLCSHCRKTWQLQFTYTASQPGTHQKIIDMAMNGVGCRATARIMGVASTRFSAI

SEQ ID NO: 59558 - protein, 167 aa, Klebsiella pneumoniae; identical to SEQ ID NO: 56103

SEQ ID NO: 59559 - protein, 239 aa, Klebsiella pneumoniae
MRLDKFIAQQLGVSRAIAGREIRGSRVTVDGDIVKDASFKLQPEHEVEYDGNTLTQQNGPRYFMLNKPQGYVCSTDDPDHPTILYFLDEPVAHKLHAAGRLDIDTTGLVLMTDDGQWSHRITSPRHHCEKTYLVALESPLAEGTAELFAKGVQLHNEKDLTKPALLEVITPTEVRLTISEGRYHQVKRMFAAVGNHVVGLHRERIGDILLDESLAPGEYRPLTEAEIASVGAPQPRSKT

SEQ ID NO: 59560 - protein, 395 aa, Klebsiella pneumoniae
VTLKQNSSLGIVFILGLLAMLMPLSIDMYLPALPVIAAQYNVPDGSAQMTLSTYILGFALGQLLYGPMADSLGRKPVILGGTLVFAAAAGACALSQTVDMLIVMRFFHGLAAAAASVVINALMRDIYPKDEFSRMMSFVMLVTTIAPLVAPMVGGAVLVWFSWHAIFWILALVALLASLMIGLFVRETLPAERRQPFHLRTTLGNFATLFRHKRVLSYMLASGFSFAGMFSFLSAGPFVYININHVAPQHFGYYFALNIVFLFLMTMFNSRFVRRVGALRMFRAGLWIQFAMAVWMVVCALLDVGFWSLVIGVAAFVGCVSMVSSNAMAVILDEFPHMAGTASSLAGTFRFGIGAIIGALLSMATFTTAWPMLISIAFCATCSIFFSLYASRRRK

SEQ ID NO: 59561 - protein, 94 aa, Klebsiella pneumoniae
MFTINAEVRKEQGKGASRRLRAANKFPAIIYGGEAAPVAIELDHDKVWNMQDKAEFYSEVLTVVVDGKEEKVKVQAVQRHAFKPKLTHIDFVRA

SEQ ID NO: 59562 - protein, 584 aa, Klebsiella pneumoniae
  MISC_FEATURE (8)..(8): X=any amino acid
AYYSPVNXPREFMTFTLRPYQQEAVDATLAWFRRHTEPAAIVLPTGAGKSLVIAELARLARGRVLVLAHVKELVAQNHAKYCALGLEADIFAAGLQRKESHGKVVFGSVQSVARNLDQFRSEFSLLIVDECHRISDDDDSQYQQIIGHLRQVNPQIRLLGLTATPFRLGKGWIYQFHYHGMVRGDEKALFRDCIYELPLRYMIKHGYLTPPERLDMPVVQYDFSRLQAQSNGLFSEADLNHELKKQQRITPHIVSQIVEFAENRKGVMIFAATVEHAREVTGLLPVGQAVLITGETPGPERDRIIEAFKAQAYRYLVNVAVLTTGFDAPHVDLIAILRPTESVSLYQQIVGRGLRLAPGKTDCLILDYAGNPHDLYAPEVGTPKGKSDNVPVQVFCPACGFANTFWGKTTADGTLIEHFGRRCQGWFEDDDGHREQCDFRFRFKNCPQCNAENDIAARRCRECDTILVDPDDMLKAALKLKDALVLRCSGMALQHGGDEKGPWLKITYYDEDGADVSERFRLQTPAQRTAFEQLFIRPHTRTPGVPLRWITPADIVTQQALLRHPDFVVARMKGQYWQVREKVF

SEQ ID NO: 59563 - protein, 562 aa, Klebsiella pneumoniae
MSQSKYRQLDVRAPRGTTLTAKSWLTEAPLRMLMNNLDPDVAENPHELVVYGGIGRAARNWECYDAIVKALKNLESDETLLVQSGKPVGVFKTHENSPRVLIANSNLVPHWATWEHFNELDAKGLAMYGQMTAGSWIYIGSQGIVQGTYETFVEAGRQHYQGSLKGRWVLTAGLGGMGGAQPLAATLAGACSLNIECQQSRIDFRLRTRYVDEQATSLDDALARIKKYTAEGRAISIALCGNAAEIVPELVKRGVRPDMVTDQTSAHDPLHGYLPKGWSWEEYQQKAESDPQGTILAAKRSMADHVQAMLAFHEMGVPTFDYGNNIRQMAQEVGVSNAFDFPGFVPAYIRPLFCRGIGPFRWVALSGDPQDIYKTDAKVKEIIKDDQHLHHWLDMARERISFQGLPARICWVGLEWRQKLGLAFNEMVRSGEVSAPIVIGRDHLDSGSVASPNRETEAMRDGSDAVSDWPLLNALLNTASGATWVSLHHGGGVGMGFSQHSGMVIVCDGTDEAAARIARVLHNDPATGVMRHADAGYEIAIECAAEQGLNLPMVAATQGNAK

SEQ ID NO: 59564 - protein, 346 aa, Klebsiella pneumoniae
MAHQPRWTMSQVTELFNKPLIDLLFEAQQIHRQHFDPRQVQVSTLLSIKTGACPEDCKYCPQSARYKTGLEAERLMEVEQVLESARQAKNAGSTRFCMGAAWKNPNDRDMPYLEQMVKGVKALGLESCMTLGTLTDSQAQRLAEAGLDYYNHNLDTSPEFYGNIITTRTYQERLDTLDKVRDAGIKVCSGGIVGLGESVKDRAGLLLQLANLPTPPESVPINMLVKVKGTPLADNDDVDAFDFIRTIAIARIMMPTSYVRLSAGREQMNEQTQAMCFMAGANSIFYGCKLLTTPNPEEDKDLQLFRKLGINPQQTAVLEGDNEQQQRLEQALLTPDTEEYYNAAAL

SEQ ID NO: 59565 - protein, 435 aa, Klebsiella pneumoniae
MVYKSLMTLDDLAFDRRHIWHPYTSMTSPLPVYPVVSAHGCELSLAGGEQLVDGMSSWWAAIHGYNHPRLNAALKGQIDQMSHVMFGGITHPPAVALCRQLVAMTPASLECVFLADSGSVAVEVAMKMALQYWQAKGEPRRRFLTFRNGYHGDTFGAMSVCDPQNSMHSLWQGYLPDNLFAPAPQSRFDGEWDEMDMVPFARLMAAHRHEIAAVILEPIVQGAGGMRMYHPEWLKRVRKMCDREGILLIADEIATGFGRTGKLFACEHAGITADILCLGKALTGGTMTLSAAITTRTVAETISNGEAGCFMHGPTFMGNPLACAVAGESLRLLESGEWQPQVTAIEAQLQAELAPARGSALVADVRVLGAIGVVETRRPVNMAALQRFFVEQGVWIRPFGRLIYLMPPYIITPEQLTRLTRAVNQAVQDETFFSE

SEQ ID NO: 59566 - protein, 507 aa, Klebsiella pneumoniae
MKSLTLIPGQLSLSQLRDVYSHPVNITLDSGAFAAIDESVACVNAILAEGRTAYGINTGFGLLAQTRISTEDLENLQRSLVLSHAAGVGEPLDDDLTRLIMVLKINSLSRGFSGIRLSVIQALIGLVNAGVTPWIPAKGSVGASGDLAPLAHMSLTLLGEGKARVRGGDWLPATEALRQVGLEPITLAAKEGLALLNGTQASTAFALRGLFEAEDLFASAVVCGALTTEAALGSRRPFDARIHEVRGQRGQIDAAALYRHLLTDDSAISQSHHNCSKVQDPYSLRCQPQVMGACLTQIRQAAEVLLAEANAVSDNPLVFAAENDVISGGNFHAEPVAMAADNIALAIAEIGSLSERRIALMMDSHMSQLPPFLVKNGGVNSGFMIAQVTAAALASENKALSHPHSVDSLPTSANQEDHVSMAPAAGRRLWAMAENTRGVLAVEWLAAAQGLDMREGLTTSPLLEEARHLLRERVPHYTQDRYFAPDIDNAIALLAARHLTRLLPAVL

SEQ ID NO: 59567 - protein, 238 aa, Klebsiella pneumoniae
MNEIFPLASAAGMTVGLAVCALVIGLVLAMLFAVLESVKWRPVAWLATGIVTILRGLPEILVVLFIYFGSSQLLLTLSDGFTIPLGFTQIPVQMQIENFDVSPFLCGAIALSLLYAAYASQTLRGALKAVPQGQWESGQALGLSKAAIFFRLVMPQMWRHALPGLGNQWLVLLKDTALVSLISVNDLMLQTKSIATRTQEPFNWYIIAAAIYLVITLLSQYILKRIDQRATRFERRPG

SEQ ID NO: 59568 - protein, 572 aa, Klebsiella pneumoniae
MKQTVAAYIAKTLEQAGVKRIWGVTGDSLNGLSDSLNRMGTIDWMPTRHEEVAAFAAGAEAQLTGELAVCAGSCGPGNLHLINGLFDCHRNHVPVLAIAAHIPSSEIGSGYFQETHPQELFRECSHYCELVSTPEQIPQVLAVAMRKAVINRGVSVVVLPGDVALKAAPESASSHWYHAPLPTVTPAEEELRKLAQLIRYSSNIALMCGSGCAGAHQELVEFAAKIKAPIVHALRGKEHVEYDNPYDVGMTGLIGFSSGFHTMMNADTLILLGTQFPYRAFYPTDAKIIQIDINPGSIGAHSKVDMALVGDIKSTLKALVPLLEEKTDRHFLDKALEHYRDARKGLDDLAKPSDKAIHPQYLAQQISHFADEDAIFTCDVGTPTVWAARYLKMNGKRRLLGSFNHGSMANAMPQAIGAKATAPERQVVAMCGDGGFSMLMGDFLSLAQMKLPVKIVIFNNSVLGFVAMEMKAGGYLTDGTELHDTNFARIAEACGIKGIRVEKASEVDEALQTAFRTDGPVLVDVVVAKEELAIPPQIKLEQAKGFSLYMLRAIISGRGDEVIELAKTNWLR

SEQ ID NO: 59569 - protein, 322 aa, Klebsiella pneumoniae
MTMPTSQCPWRMQVHHIHQETPDVWTLSLLCHDYYPYRAGQYALVSVRNSAETLRAYTLSSTPGVSEYITLTVRRIDEGTGSQWLTREVKRGDYLWLSDAMGEFTCDDKAEDKFLLLAAGCGVTPIMAMRRWLAKHRPQADVQVIYNVRSPEDVIFAEEWRNFPVTLVAEHNATHGFVAGRLTRELLQSVPDLASRTVMTCGPAPYMEKVEQDVAALGVTRFFKEKFFTPVAEAATSGLKFTKLQPAREFYAPVGTTLLDALESNKVPVTVACRAGVCGCCKTKVVSGKYSVTSTMTLTDAEIADGYVLACSCHPQSDLVLA

SEQ ID NO: 59570 - protein, 299 aa, Klebsiella pneumoniae
MFSGLFIILLPLVVGYLLPLRHSSALKLINRMLSWIVYVILFFMGISLAFLDNLASNLLAILHYAAVSVVIILLCNIAALLWLESKMPWRSQHRQEKLPSRLAMALESLQLCGVVVLGFLLGLTRLPFLQHATEASEYTLIFLLFLVGIQLRNNGMSLRQIVLNRRGMIVAVVVTASSLLGGILNAFILGLPLKTGLAMASGFGWYSLSGILLTESFGPVIGSAAFFNDLCRELLAIMLIPGLIRRSRSTALGLCGATSMDFTLPVLQRSGGVEIVPAAIVHGFLLSLLVPILIAFFTA

SEQ ID NO: 59571 - protein, 337 aa, Klebsiella pneumoniae
MKVLVTGATSGLGRNAVEYLRNKGISVRATGRNEAMGKLLSKMGAEFIPADLTELVSSQAKVMLAGIDTLWHCSSFTSPWGTQQAFDLANVRATRRLGEWSVAWGVRNFVHISSPSLYFDYHHHRDIQEDFRPHRFANEFARSKAASEEVINLLAQANPHTRFTILRPQSLFGPHDKVFIPRLAQMMQHYGSVLLPRGGSALVDMTYYENAVHAMWLASQPACDHLPSARAWNISNGEPRTLRSIVQKLIDELGIKCRIRSVPYPMLDIIARSMERFGDKTAKEPAFTHYGVSKLNFDFTLDITRAQDELGYQPVVTLDDGIVRTAAWLRDHGKLHR

SEQ ID NO: 59572 - protein, 403 aa, Klebsiella pneumoniae
MLTTIIYRSHICDNVSFKSIEAMVARANERNGQADVTGILLFNGTHFFQLIEGPEEKVQDIYQHICRDPRHYNLVELLCDYAPSRRFGKVGMELFDLREHDREEVLQAVMDRGTSKYQLTYDDRALQFFRTFVEATEKANYFEIPSADSWVFIPDKETFYPDTPIIDNTEGCSFAFQPIVDPFACEIISWEALLRTPDGQSPGAYFAGLTGDDIYLADLHSKRVALSLAGKLGLRNKALSINLLPMTMVKAPNAVAFLLDEISRNDLIPEQIIVEFTEREVISRMDDFTDAVRKLKGAGINLAIDHFGAGFAGLSLLAQYQPDRIKIDHELIRNIHQDGPRQSIVQAIIKCCTSLEIAVSAVGVERAEEWMWLESAGISQFQGNLFASARLGGLPAVAWPEKK

SEQ ID NO: 59573 - protein, 812 aa, Klebsiella pneumoniae
MKIKAPDALLAAEVSRRGLMKTTAIGGLALASNALTLPFTRLSHAADTPAPASEKVVWSACTVNCGSRCPLRMHVVDGAIKYVETDNTGDDNYDGLHQVRACLRGRSMRRRIYNPDRLKYPMKRVGKRGEGKFEQISWEEALDTIASNMQRLIKEYGNESIYLNYGTGTLGGTLTRSWPPGKTLIARLMNCCGGYLNHYGDYSSAQIAAGLNYTYGGWADGNSPSDIENSQLVVLFGNNPGETRMSGGGVTYYLEQARQKSNARMIIIDPRYTDTGTGREDEWIPIRPGTDAALVSGLAWVMITENLVDQPFLDKYCVGYDEKTLPAGAPANGHYKAYILGQGTDGIAKTPEWASTITGIPRERIVKLAREIATAKPAYISQGWGPQRHANGEIATRAISMLAILTGNVGINGGNSGAREGSYSLPFERMPTLENPVETSISMFMWTDAIERGPEMTALRDGVRGKDKLDVPIKMIWNYAGNCLINQHSEINRTHEILQDDKKCEMIVVIDCHMTSSAKYADILLPDCTASEQMDFALDASCGNMSYVIFADQAIKPRFECKTIYEMTSELAKRLGVEEQFTEGRTQEGWMRYLYEQSRKAIPDLPDFDTFRQQGIYKQRDPQGHHVAYKAFREDPQANPLTTPSGKIEIYSQDLAKIAATWELPEGDVIDPLPIYTPGFENYNDPLTAKYPLQLTGFHYKSRVHSTYGNVDVLKAACRQEMWINPIDARKRGIANGDRIRIFNDRGEVHIEAKVTPRMMPGVVALGEGAWYNPDASRVDQAGSINVLTTQRPSPLAKGNPSHTNLVQVEKL

SEQ ID NO: 59574 - protein, 285 aa, Klebsiella pneumoniae
MKADNPFDLLLPAAMAKVAEEAGVYKATKHPMKTFYLAITAGVFISIAFVFYITATTGTAAMPYGIAKLIGGICFSLGLILCVICGADLFTSTVLIVVAKASGRITWGQLAKNWLNVYFGNLVGALLFVLLMWLSGEYMTANGGWGLNVLQTADHKMHHTFVEAVSLGILANLMVCLAVWMSYSGRSLMDKAMIMVLPVAMFVASGFEHSIANMFMIPMGIVIRNFASPEFWTAIGSTPESFSHLTVMNFITDNLIPVTIGNIIGGGLLVGLTYWVIYLRGNDHH
